United States Patent Application Publication US 2013/0332133 A1 - sequence listing, part 42

SEQ ID NO: 278963 - DNA, 1189 bp, Unknown
  Bacterial polypeptide expressing nucleotide sequence isolated from the Sargasso Sea
gcgcgctacaaggtgccgaccatcgccgggctgccgcgtttcaatggcggcctggtcggttacttcgcctatgacagcgtgcgttacgtcgagtccaggctggctgccggggtgaaccccgatgcgctgggcacgccggacatcctgctcaacgtctccgatgccgtggtggtgttcgacaacctggcgggcaagatgcacgccatcgtgctggttgacccggccgaggcggacgccttcgagcgtggccaggcgcaactgcaggaaatcctgcacaagcttcgtcagccgttcaccccgcgtctgggtgtggatctgaacaagccggcaggcgaggagcctgtgtttcgctccagcttcagccgcgaggattacgaacgctcggtcagcgccatcaaggactacatcctggctggcgactgcatgcaggtggtgatttcccagcgcatgtcgatcccgttcaaggctgcaccgattgacctttatcgcgcgctgcgctgcatcaacccgacgccttacatgtacttcttcaacttcggcgacttccacgtggtgggttcgtcgcccgaggtgctggtgcgcgtcgaggacaacctggtcaccgtgcggcccatcgccggcacccgcccgcgcggtgcgaccgaagaggccgacctggcgctggaagaagacctgctggccgatgccaaggaagtcgccgaacacctgatgctgatcgacctgggccgtaacgacaccggccgtgtctcggaaatcggctcggtgaagctgaccgagaagatggtcattgagcgctattccaacgtcatgcacatcgtttccaacgtcaccggcgagctgaaaaagggcctgacctcgatggacgccctgcgcgcgatcctgccggccggcaccctgtccggtgcgccgaagatccgcgccatggaaatcatcgacgagttggagccggtcaagcgtggcgtctacggcggcgcggtcggctactacgcctggaacggcaacatggacaccgcgattgcgattcgcacggcggtgatcaaggacggcgagctgcacgtgcaggccggcgccggcatcgtcgccgactcggtgcccgcgctggagtgggaagaaaccctgaacaagcgtcgcgccatgttccgcgccgtcgcgctcgccgaacagactgccgtccaggcccaggaataag

SEQ ID NO: 278964 - DNA, 469 bp, Unknown
  Bacterial polypeptide expressing nucleotide sequence isolated from the Sargasso Sea
gttgaccttgcgcgtaacgacctggcgcgcatctgtacgcctggcagccgctatgttgctgacctcaccaaagtcgatcgttactccttcgttatgcacctggtttcacgcgtggtcggcgagctgcgtaacgatctggatgtgctgcacgcttaccgcgcctgtatgaatatgggcacgttaagcggagcgccaaaagttcgcgctatgcagcttatcgccgaggcagaaggtcgtcgccgtggtagctacggcggcgcagtaggttacttcacggctcatggcgatctggatacctgtattgtcattcgctccgccctcgtggaagacggtattgccaccgtacaagccggtgccggaattgttctggattctgtaccgcagtctgaagccgatgaaacccgtaataaagcgcgcgcggttctgcgtgctatcgccaccgcgcaccacgcacaggagaccttctaat

SEQ ID NO: 278965 - DNA, 654 bp, Unknown
  Bacterial polypeptide expressing nucleotide sequence isolated from the Sargasso Sea
ggtacttaataggttctagtcctgaagtaatggtcaaagcagagaagaataaaactaatcaaattgttgcaagcttaagaccgatagctggcacaaggccaagaggtcaagatgctgaacaagatttaaaatttgagaaagatttattaaaagatcctaaagagatatcagaacatgtaatgcttattgatctgggaagaaatgatttaggaagagtatgtgaaacaggcacagtagaggttaaagatttgatgataattgaaaaatattcacatgtaatgcacatagttagtgaagttgaaggtatcttaaaaagtaatactggggtatgggatttacttaaagcatgttttcctgctggtacagtaactggggctccaaaaattagagctatgcaattaattaaggactttgagaaagatgctagaggtccgtatgctggagtttatgggtctatagatataaatggtgcactaaatactgcgataacaatacgaacaatgatagttcagccttcaaatgatggagaatatatagtttctgttcaggctggtgctgggatagttgcagattcctctcctgcgaatgaatatcaagagactattaataaagccaaaggtatattaatggcattggcttgtttggatagataaa

SEQ ID NO: 278966 - DNA, 1205 bp, Unknown
  Bacterial polypeptide expressing nucleotide sequence isolated from the Sargasso Sea
acaagtcaagcatgacttgaagaattaccatcaattcggacagttatatggctcttggggttatgaattaataaatcgaatagagccaagcgttccaataaatgaaataccagaaaacaatatcccacatggttcctggatgttttttgatcaattagttgtttttgatcaaataaaaagatgtattactgcagtggtttatgcagatacaacttcttctaaagagtcttcgattgaagagttgtatctaaactcaatttctaaaattcaggaaactagaaatttaatgagaattcctctaaaagaaaatgagtttttagattggaatgaaaatgagaatttgaatttagatctagaaagtaattggaagaaaaaagattttgaggatgcagttatctctgcaaaagaatacataagaaagggagatatcttccaaatagttataagtcagagatttcaaactcaagtcaataatgatccctttagtttatatagaagtttgaggatggttaatccatctccatatatgtcattttttgatttcggctcatggtatctgataggttcaagtcctgaagtaatggttaaagcagaaaaaaataaaaatagtcagattgttgcaagcttaagaccaatagctggtacaagacctagaggaattgataatcaacaagacttggaattagaaaaggaattattaaaagatccaaaagagatagctgagcatgtaatgctaattgatcttgggagaaatgatcttggaagagtttgtgaaattggtactgtcaaggttaaggatttaatggttattgagaaatattcacatgttatgcatatagtcagtcaagttgagggaatcttaaaaaacaatgctgatgtatgggatttgctcaaagcatcctttcccgctgggacagtaactggcgccccaaaaataagagctatgcaattgattaagcactttgaaaaagatgctagaggaccttatgctggtgtttacggatctgttgatattaatggtgcattaaatacagcaattacgataagaaccatgatagttaaaccctcaagagatggaaaatatgatgtatcagtgcaagcaggagctggaatagttgctgattctttccctgaaaatgaatatcaagagacgataaataaagcaaagggaatacttaaagcattagcctgtttggataaataaa

SEQ ID NO: 278967 - DNA, 1171 bp, Unknown
  Bacterial polypeptide expressing nucleotide sequence isolated from the Sargasso Sea
ataataattgaaaaaattattgaagattttaaatttaaaattccaagttatttaccaccaataagttccataatatcaggatatttttcatatgatattattaggtatattgaaaaaatacctgacagatgtttagacgatctaaaaatgccagatgcgagaattattagaccgaaaactttgattatacatgataatttgaagaaaaagatttattttattgaaaattgtttttctgatgaaaaaataaaaaattatgaaaataaatttaaagatattaaacaagaaattgagaaactaatttttttagcaaattataaaaataatttcattactaaagagaataaaaaaaaaataatagtaaaatcgaatatttcaaaaaataaatttattaataatgttataaaagcaaaaaaatatattaaaattggtgatatttttcaggttgttttgagccaaagatttgaagccaaactaactaaaaaacctcttgatatttataaaaaacttagaattaaaaatccatcaccatttatgtatttttttaattttgaagattttcaaattataggggcgagccctgaaatacttgtaagattaagaaataataagataacaataagacctattgcaggaacacggcctagaggtagcaattcaagagaagataaattttatgaaaaagatttattaaaagataaaaaagaactttctgagcatttaatgcttttagacttaggaagaaatgatgcaggaaaagtttcaaaaattaactcagtaaaagttacagaaaaatttgtaattgaaaagtattctcatgttatgcatatagtttctaatgtaattggtgattttaataaaaaattttctaaatttgatacactgctttcaggattccctgcaggtactgtttcgggtgcacctaaaataagagcaatggaaattattgatgaattagaaaactcaaaaagaaaagtatatgctggtggaattggatatttttcagcaaatggtgattttgatacatgtattgctttaagaacagcagtttcaaaaaataataaattttatgttcaagctggtgctggcatagtagctgatagcaaacctattaatgaatataaagaaactatcaacaaagcaaaagctttattaaaatcattagaataaa

SEQ ID NO: 278968 - DNA, 580 bp, Unknown
  Bacterial polypeptide expressing nucleotide sequence isolated from the Sargasso Sea
agtcagactaagagataacaaaattacagttagacctattgcaggaacacgacctagaggcaaaactgttaaagaagataccttttttgaaaaagatttacttaaagataaaaaagaattgtctgaacatttaatgcttttagatttaggaagaaatgatgctggaaaagtatcaaagattaattcagttaaagttacagaaagcttcattattgagagatattcacatgtaatgcacatagtttctaacgtaataggcgaatacaataaaaaattttcaaaattcaaatcattattagctggttttccagcaggaacggtgtcaggagcacccaaaattagagctatggagattatagatgaactagaaaaaactaaaagaaaagtttatgctggaggtattgggtatttttcagcaaatggagagtttgatacttgtatagctctaagaacagctgttgctaaaaataataaattttatgttcaagcaggtgcaggaattgttgcagatagtaaaccaattaatgaatatgaggaaactgttaataaagctaaagctttaatcaacgctttaagataa

SEQ ID NO: 278969 - DNA, 1396 bp, Unknown
  Bacterial polypeptide expressing nucleotide sequence isolated from the Sargasso Sea
atgaataaatattttgacattgaattgaatgatgaaacacccgcatcggtgtttatgaagctgcgtgatatttcaccaacttttttgttggaaagtattgaaagaggagttgatcaatctaggcattcatttttaggaataggggcgtctcaatcccttcaagtcagagacggaacttacattttaaatggggaagaaataagtaagccaagttcccataatgaaatgatgaatttgttcagaaagacactaaaagagattcctgatttaaaaccatcaatcgatgacatcccattttcaggaggaatggttggtttcagttcatttgatatgattcgccattttgaaaaattaccagtacccgaagggaaagacggtattttaagtccctcagattgctcatatattgcaccgacatcattgctaatctttgatcatttggaaaataagatggcactgcttcattgcggcaatgaggaggaaagaataaatttaagggacgaaatcctgtccctcctcagcaaggagatcactcaaagtcaaaaaaagaaaacatactcagaaccaatagcaaacatcaaaaaagaaaccttttatgatgctgttgaaaaagcaaaacaccatatctttgagggagacatttttcaaatcgttttatccattgcattttctggtagttatgatcttgatccatttgatgtttatcgagcaatgcgtttaattaatccatcaccttatatgttctattgtgagtcagatggactgaagattgcaggctcctctcctgaggctctggttaaactgggtggcaataaagcatctcttagaccgattgcaggaactaggccaagaggaaaggattcagaagaagaccagtcatatagagaatcactgctcgcggatgaaaaagagatcgcagagcatattatgttggttgatcttgcacgcaatgatcttggacgggttgctaagcatggatcaattgaagtgaaaccataccaatcgatcgaatactatagccatgtgatgcatatagtcagtggtgttcaaggccatttagaagaagaaaaagatgcctttgatttatttgccgccgcttttcctgcgggaacattggttggcgctccaaaggtcagagcaatggaattgatcgatgaaattgaacctcagctgagaggcatttacggaggcacggtgggttatttttctaagaatggaggcatggatcaggcaatcgcaattcgaacaattgttttttctgatcaaacatattgctttcaagccggagccggaatcgtggctgacagtttgcctgagaatgaatacaaagaagtcttagcaaaaagtcagattcttcgaacagcactaaaaatggtgaaagagggagagttatgag

SEQ ID NO: 278970 - DNA, 1453 bp, Unknown
  Bacterial polypeptide expressing nucleotide sequence isolated from the Sargasso Sea
atgctaaataaaacaatttctgaatttaaaagaagccatataaataaaaaaaatcaaattttatttcatacaattaaatcaaatgggattcgagagactgaaaatttaattaataattttttaattgaaaaaaatagttttatatttgaatcagttgaaaaaggtaaaattaaaggcagatatacaatattaggcagaaatccagattatatttgggaatttcaaggaaataaatgtaaaaaaataattaataataaaattaaaatattaaaaaattctccaaaaaatgtaattgataaaattattgaaaattttaaattcgacacacctaaagaattacctaacatatgttctataatttcaggatatttttcttacgatataattcgttatattgagaaaattcctaacaaatgtaaggacgacctaaacattccagatgttagaataatcagaccaaaatcactgattattctagataattttaaaaaaaaaatacactttattagaaatttttttaaggaagaaaaagttaaaaattattttcaagcatatgagagtgctaaatctgatattgaaaatttaatacttcttgcaaataataaaaattattttgagaatgaaaaaaaattgaaagtaaaaattaaatcaaatattagcaaacaaaaatttttgaataatgtaattaaagctaaaaaatacatcaaaaaaggtgatatatttcaagttgttctaagtcaaagatttgaggcaaaattacaaaaggatcctcttgaagtttataaaaaacttagagttacaaacccttctcctttcatgtacttttttaactttaaagattttcaaattataggagcaagtccagaaatacttgtaagattaagagatgatcaaataactataagacctattgcgggaacaagacctaggggtaaaaataaaaaacaagatattttttatgcaaaagatctattgagagataaaaaagaactagctgaacatttaatgcttttagatttgggcaggaatgatactggaagagtttcccaaattaatactgttaaagttactgaaaaatttaaaatagaaagatattctcacgtgatgcacatagtttcgaatgtagttggaaaatttaataatggatatagtaaatttgatactttgttgtctggttttccagcaggaactgtatctggagcgccaaaaatacgtgcgatggaaattatcgatgagttagaaacaaccaaaagaaaggtttatgctggtggaataggatattttactgcagcaggtgaatttgacacctgtatagctctaagaacagctgttgttaaagatggttttttatatgcgcaagctggtgctggaatagttgcagatagtaagcccataaaagaatacattgaaactgaaaacaaagctaaagctttaattaaagcgatggagtaaa

SEQ ID NO: 278971 - DNA, 625 bp, Unknown
  Bacterial polypeptide expressing nucleotide sequence isolated from the Sargasso Sea
gatgagtgtgagtggttggatcctcacccgaaatattgttagattagaagatagcaatattactctcagaccaattgcaggtacaagaaaaagaggtgcaaacgaagaagaggataaaaataatgagaaagatttattaaatgatccgaaagaattagctgagcatcttatgcttatagatcttggaagaaatgatgttggaagagtttctgaaattggtagtgtgaaactaactgaaaaaatggtgatcgaaagatactcccatgtcatgcatatagtatcaaacgtagtaggcaaattatctaggggattaaattttactgatgctcttaaagctactttgccagctgggactctttcaggtgcaccaaaaataagagccatggaaataattaatgagcttgagccaagttcaagaggtatttatggaggtgcaataggttatatatcttggaatggtaatattgatactgcgattgcgataagaacagctgtaataaggaataacaaaattcatgttggagccggagcaggcatagttgctgattcagatccagaaaaggaatgggaggaatgtgtccaaaaatcaaaagtatttttagacgcgatggagatgatttcatga

SEQ ID NO: 278972 - DNA, 1462 bp, Unknown
  Bacterial polypeptide expressing nucleotide sequence isolated from the Sargasso Sea
aatgaacataaatcgaagcttcaaagattttaagtttcgacatagaagcaataaaaatcaaattatatatacttcaaaaaaaattcaagaagatgaggagattttaaatttaatagataattttttaagtgaaaaaaatagctttatatttgagtcggttgagaaaggaaaaatcaaaggaagatacactatatttggcaaaaatcctgacaagatatgggaattcaaaaataaaatttcttatttaattcaaaatgaaaagaaaattaaactgaaagataaacctgaaaacttgattgagaaaattattgaagaatttaaatttgaaactcccaaaaatttaccaaaactgtgttctttaatttcaggatatttctcatatgactctataagatatatagagaaaatccctaataattgtaaggatgatctaaatatacctgatgtaagacttctgagaccaagaacactaattattcacgataatttaaaaaaagagattttttatattagaaatatctataaagacgaaaagattagagattatcaaaaaaaatttgatgaggtaaaatcagatctttttagattacttattcaatcatcaattaagaatatagataataggactccattaaaatcaaaaaatattaaagttaagtctaatacttctaaaaatagattcttgcaaatgatcaatacagccaaaaaatatataaaattaggagatatatttcaggtagttttaagtcaaagatttgaagctaagttaacaaaaaaaccgattgatatttataaaaaacttagagtgactaacccatcaccttttatgtttttttttaatttcaatgacttccaaattattggtgcgagtcccgaaatattggtgagactaagagataataaaattactgtaagaccaattgctggaacgagaccaagaggaaaaactttaaaagaggatcgtttttatgaaaaagatcttcttaatgacaaaaaggagctttcagaacacttaatgctattagatttaggaagaaatgatgccggtaaagtttcaaaaattaatacggtaaaagtaactgagagttttattattgagagatattcccatgtaatgcacatagtatcaaatgtcatcggtgagtataataagaaattttctaagtttaaatcacttctagctggtttccctgcgggaacagtttctggagcaccaaaaattagagctatggaaataattgatgaattagaaacaactaagagaaaagtttatgctggtggtattggctatttttcagcaaacggagaatttgatacatgtatagctttaagaactgctgttgctaaaaataataaattttatgttcaagctggcgctggaattgttgctgatagcaaacctttaagagagtacgaggaaactgttaataaagcaaaagctttaattaatgctttaaaatga

SEQ ID NO: 278973 - DNA, 862 bp, Unknown
  Bacterial polypeptide expressing nucleotide sequence isolated from the Sargasso Sea
ttgaatttagaaattaaaagtaattggaagaaaaaagattttgaggatgctgttctctccgcaaaagaatacataagaaaaggagatatcttccagattgttataagtcagagatttaatactcatgtcaataatgatccctttaatttatacagaagtttaaggatggttaatccttctccatatatgtcgttttttgattttggctcatggtatctcataggttccagtcctgaagtcatggttaaagctgaaaaaaacaaaaatagtcagattgttgcaagcttaagaccaatagctggtacaaggcccagaggtaatgatcctcaagaagatctggaattagaaaaggatttgttaaaagatccaaaagagatagctgagcatgtaatgctgattgatctaggaagaaatgatcttggaagggtttgcgaaattggaactgtgggtgtaaaagatctaatggttatagagaaatattcacatgtcatgcatattgtgagtgaagttgaaggaatcttaaaaaacaacacagatgtatgggatttgctaaaagcatgttttcccgccggaacagtaactggtgcaccaaaaattagagctatgcagttgattaaacactttgaaaaagatgctagaggtccttatgctggtgtttatggatctattgatataaatggggcattgaatacggcaattacaataagaactatgatagttaaacctttaaaagatggaaaatataatgtatcagtgcaggcaggggcaggaatagttgctgattcttctcctgagaatgaatatcaagagactatgaataaagctaaggggatactaaaagcaatagcctgtttggattaat

SEQ ID NO: 278974 - DNA, 1486 bp, Unknown
  Bacterial polypeptide expressing nucleotide sequence isolated from the Sargasso Sea
ttgatttttagtcatataacaactacgccgggtgaagtaacgagtattacgcaaacacgcgactacatcagtagtccacttgcgctctacgcggcacttgataaacctaactcactgctacttgaatcggctgaaattgattctaaagacagtgtaaaaagtttaattttagtcgattgcgcattgcgcattgtttgccaaggcaaaacagtcacgattacagctcagtcaaacaatggccaccagctgttaagttacttacaagctcatgttaaaaactgcaatgcagaattaaacgatacaaccctaaccctaaattacttgagtacaagtaacgacattgatgaagccagtaaactagtggccgataatgcatttagtgccctacgaacttgtattaactcaatcaaaagcaccaccgacaatccattttctctatttttaggtggtgtatttgcctacgacatggttgcaaactttgaacagttaagtgacgttcccgatggcgagaacagctgtcctgattatgtattttatttagctgaaacattagttgtaatagaccaccaaaaacagaccaccgaacttatcggtaacgtgtttaacggcccagacgtacacgcaaactgctttgaagtaggcaaacagctagagcagttaaatagcctttgcgataacgcagcccaatacagcgccccattaaacaaaggcgaatgtgaggtaaatgtagacataagcgacagcacctactgtcagcaggttgtaaaacttaaaaagaacattgtagacggtgatatttttcaggttgttccttctcgtactttctcgctgccttgccctaacgctttacatgcgtacagccaattaaaacaacaaaacccaagcccttatatgttttatatgcgcgatgaagactttgctttatttggcgcatcacccgaatcggcccttaaatacgatattaataatcaacaggtagaagtatacccaattgcaggaacgcgccctcgtggtaagtttgctaatgggcaaataaaccccgatttagatagccgtattgagcttgaacttagaaacgatcaaaaagaacgtgcagaacacttaatgcttgttgacttagcccgtaacgatgtagcacgaattagtgttgcaggtacacgtcatgccaaagagctattaaaagtagaccgttattcgcaagttatgcatttagtttcacgtgttgttggtacattaaaacccgaacttgatgcacttcacgcttaccaagcatgcatgaacatgggtaccttagtaggcgcgcctaaagttcgcgctgcagaattagttcgccaaacagaaggaaaacgacgtggcagttacggtggcgcagtaggttatttaaccggtgacggcgcaatggacagttgtattgttattcgctctgcctttgttaaaaacaacatggcttatgtgcaagccggtgccggggttgtatttgactcag

SEQ ID NO: 278975 - DNA, 1111 bp, Unknown
  Bacterial polypeptide expressing nucleotide sequence isolated from the Sargasso Sea
tatgggttcaatgttagttggttatttttcttatgacattattcgttacatagagaagataccaaataaatgcaaagatgatttaaagattcccgatgtgagactttgccggccaaaaaatttaataatttatgataatttaaaaaaaaaaatacattatatcgaaaatgtatatgcagatgttaaaattaaaaattataaagaaacttatgattctattctaaaaaggtttgagctatataaaagttttgaaaatattaaacttccagatcaatttactttcaagcctaataaaaatttagtaaaatcaaatactacaaaaaataaatttaaattattagttaaaaaagcaaaaaattacataaaaaaaggtgatatttttcaagttgtactaagtcaaagatttgagagaaaaataaataaaagacctattgaaatttataaccatttaagaaagtcaaacccgtccccttttatgttttattttaattatgaagactttaatgttttaggaagtagtccagaaatattagttagacttagaaagggcgaagttactatcaggcccatagctggcacaagaccaagaggaaaaaatattaaagaagataaaaaatacatgattgatttacttagagatgggaaagaattagctgaacatcttatgttattagatcttggcagaaacgatgttggtaaggtttcagaggtaaatactgtaaaagtcaccgaaaaatttaaggtggaaaagtattcccatgttatgcacattgtttcatatgtagttgggaaatttaataataaactttcaatttttgaaacacttttatcaggttttccagcaggcacagtaagtggtgctcccaaaatacgtgcaatggaaatcattgatgagcttgaaaaaaatagaagaaaattatatgcaggtggtatcggttacttcactccgaataatgaatttgatacatgtatcgctttaagaacagctctaatcaaaaacgacaagttttacgttcaagctggtgctggaattgttgctgatagcaaaccagagaaagaatatactgaaacagttaataaagccaaagctttgatgaaagcagttgattaa

SEQ ID NO: 278976 - DNA, 1102 bp, Unknown
  Bacterial polypeptide expressing nucleotide sequence isolated from the Sargasso Sea
gatgcttgttggttatttttcgtatgacataatacgcttgattgaaaaaattccaaataaatgcaaaaacgatataaatattcctgatataagattaatgcgacctagaaatttggttatttatgacaatgtaaaaaaaaaaattttctttattcaaaatatttttaaagaagaaagtattgttaactatgaacttaaataccaatcgattaaaaatacatttgcggaattacaacattttggaaaaataagacttcctgaaaattttcacaaaagtaataaaaaaatcaaatttaaatcaaacatatcaagatcaaaatttaaaaaaaatgtacttaaagcaaaagattacattaaaaagggagatgtttttcaggtagttttgagtcaaagatttgaggcgccgattgataaacctcctcttgaaatttacaatactttaagaattttgaacccttccccatttatgttttattttaactatgatgattttcaaattttaggtagtagccctgaaattttagttaggctgttaaataatgaagtcactatcaggcctatagcgggtacaagaccaagaggtaaaaataaaaaacaagacaaaaaattaactgttgagctattaaaagatccaaaagaacttgccgaacatttaatgcttttagatcttggaagaaatgatgttggtaaagtgtcaaaaactaatagcgttaaagttacagaaagatttaaagtggaaaaatattctcatgtaatgcatattgtttcaaacgttacaggaaaactaaggaaaaatttttctctttttgaaacgtttttatcagggtttccagcaggaacggttagtggtgctcccaaaataagagctatggaaattattgatgaattagaagactcaaaaagaaaactttacgcaggaggaataggttatttcacagcaaatcaagattttgatacctgtatagctttaagaacagctttgattaaaaacaaaaaaatttatgttcaagctggtgctggaatagtagctgatagcaatcctaaaaatgaatacaaagaaacagtaaataaagcaaaggcactacttaaagcgataaattaa

SEQ ID NO: 278977 - DNA, 1377 bp, Unknown
  Bacterial polypeptide expressing nucleotide sequence isolated from the Sargasso Sea
aatgattacaaaggaagaattcaatactctgcaagatagaggttttaacgtaataccaattgtgaaagaaatatctctcacaaatgcttcaccattatctgtttttaatacttttctaagaacaaagaactcttttctcttagagtcagttgaaggaggaaataagtgggctcaatactcaattattggtctcgactgtcatgattatttcaagatttctggaaatgaagttattagctttgaaaataatcaacaaacttcttttcattctgaaagtccattagatcttataaaagagaagatagaaaaatataactgtgcaaaatttgatgatttgcctagattttttggtggttatgtaggcttctttgcatatgaaagctcaaaatatgcagagaaaaggattgaaagcttgaaagaaaagccatcgaaatttgatgagaatatgccagatattttccttgtgaaggcaaaaaaactagttgttttcgataactttagcaacaaaataaaaataataattaatacttttttagatactggatcatatgatcaatcaattgaagaaattgtccacattgaagatgaacttaaaaaagaaaacaactttgaacctaaagatttctcattaaaggcatcagaggaagcttttgattcaaatttttctaaagaagatttcttaaaagctgtatctgtggctaaagactacattgttgatggtgatgtaatgcaagttgttctagctcaagacttttcaaaggagttcactcatgagccttttgatttatatcaggcgcttagatttttaaatccatcaccttacatgtattttctaaactttggaatttgtcaggtagtaggagcatctccagagatcttagtaagacttcaaggggatcaaataaccttaagaccaatagcaggaacaagaagaagaggctcaaacgagattgaagatgaagaaaatgccaaagaccttctttcagatcccaaggaattagctgagcatttgatgttaattgacttaggaagaaatgatgttggaaagatttctaaaacgggaacagtgaaagtttctgaaaaaatggtaatagaaaaatattctcatgttatgcacattgtttctaacgtagaaggcagtaaaaaagaaaatttaagctttattgatgttttaaaatctgctcttcctgcaggaaccttatctggagcaccaaagataagagctatggaaattattaatgaattagagccaagctcaagaggcatatatggaggagcaattggtcacatatcttgggatggagacattgatacagcaatagctatcagaactgcagtaattaaaaataataaaattcatgtggagctggggcaggg

SEQ ID NO: 278978 - DNA, 1354 bp, Unknown
  Bacterial polypeptide expressing nucleotide sequence isolated from the Sargasso Sea
aaataaatatagcttcctttatgaatcagttgaaaaaggtagtgaaaaaggaagatactccatatgtggatatgactcactaagaactattcaattaacgaatgacacacttactttagaaaataataaagttataaaaaaaattaaatatagaggcagtccacttaaaaaaattgacgctatcataaaaaacttaaagtttattaaaagtaaaggattaccgccaatgtcaggtgcctttttcgggtatttagcttatgagaatataaataaagttgaaaaaatatcatctaaaagaaaaaaagacgaccttaaaactcctgacattattatgtttatacctaacaatttacttatatatgataatttttctgcttctctttttataattaaacattatctatcaagtgcaaaagcgagatattttcataaacaaattatagatataaatgaaattgaaaattacataaaaaaggtcaaaggctatagagatataaatttcaataaaaagaaaaaaattagtattaagtcaaatatgacaaaaacaacctttaaaacaaatattaaaaaagcaaaacaatatataaaaaatggcgatgtattccaagtagttccaagtcagcgatttgaaactaactttaatcagaaaagtagctttctgtacgaagtattaagaaaaactaatccttcgccttttatgtactattttaatcttcccaaatttgaaattgtaggatcgagccctgaaatactagtaagacttagatcaaatgaaataactatcaggccaattgctggaaccagacctagaggaaagaataagatcgaagacaagaagtttgagtctgaattaatgaacgacaagaaagaaattgccgaacatttaatgcttttagacctaggaagaaatgatgttggaaaagtatcaaaaaaatcaaccgtcaaggttacatcgaaatttaagatagaacgctattcacatgttatgcatatagtttcaaatgtcactggcaaattaaaacctgatacatcatcaatttctgcacttatggcgggttttcccgcaggaactgtctctggtgctccaaaaataagggccatgcaaatcatagatgaattagaaactactaagcgaggtatatattcaggagggatcggatatatatcatctaatggagatatggatacatgcattgtcttgagaacaggaataataataaaaaataaactatatgttcaagctggtggcggtgtagtattcgacagtgactcagaaaaagagtttaacgaaacaattaataaggctaaagctgtgcttaatgcagctgaaatagtaatgggtaatgttcaatga

SEQ ID NO: 278979 - DNA, 1444 bp, Unknown
  Bacterial polypeptide expressing nucleotide sequence isolated from the Sargasso Sea
attggaacccattcgatataaaggtaccgtactttactgtaatatctatttagagtttaaataccgtatttcattagcgtgcatatgggtgaacacctttggaaaacacagcatttctaagattcctctagtgtatactgaaacccaaccctttgacgtttacaataaaatttccagaaactatacgcattcatttttgtttgaatcactagaaggacccgatgagcttgcagagacatcaatcatgggatttgacccagaaataattgtgaaaggctattttgataaaataacaattcaaagcagagatggcaaaacagagacaattcaaacggatacacctctagaagaaatcaaaaaattgattaaaaaaacagatgatatgtcttaccgatatttgggaggcgcagtaggaaatattgattatgatgcaattaggttatttgaaaatattccaggtaagaaagatttagaaaaaccaataatggaatttggaatttacaacgacggcatactttacgataataaaaagaaacagtttttctatttttattatgatgaagatagaaaagacaaaattaaaaaaacagatgaagacgtaggaacatttgaaatgtcagatattgatataaatctgaacaaagaacaatttgaacaaattgtcaataaagcaaaggaatatgttcacagtggagatgtatttcaagttgttttatctagaagattttcatttgaggcaaaaggagattatttgcgagtgtatgaaaaacttcgagaattaaatccgtcaccatatatgtttcacttaaaaatggatgaaaatgtaatcattggatcaagcccagaaatgttattgagagttactggaagagatgtagaaacttttccaatagcaggtacaagaaaaattactgaagatgaagagaaaaatgaaaaattaaaaaatgaattgttaaatgacgaaaaagaacttgcagaacatacgatgttggtagatttaggtagaaatgatattggaagggtatgcgattatggaactgttaaagtaaaagaactaatggagataaagagattcagccacgttcaacacatagtaacacacgttgtaggtaaattgaatgagaaaaatgacatgtatgacgcatttgaagcagtttttcctgcaggaacagtctcaggagcaccaaaagtaagagcaatggaaataattcaagaactagaaccaattcaaagagaaacatatgcaggagccgtaggttatttttcatttaacggatgctgtgattttgcaattgcaattaggagtatttttgccaataaagaaagagggtttgtacaggcaggtgcaggcattgtatttgattcaattgcagaaaatgaacttaaagaaacagaacataaagcaaacgcaatgattacagccttaaaggaggcatcaaaatga

SEQ ID NO: 278980 - DNA, 1468 bp, Unknown
  Bacterial polypeptide expressing nucleotide sequence isolated from the Sargasso Sea
atgataagtaaagaagaatatatagaatttgcagaaaatggatttaatattgttccattgattaaatctattgaaaaaaacttggattcacccataaaagttttttcaagaattaagaataaaaaaaatactttcttgcttgaatccattgaaggtggagaaaaatgggctcagtactcaattattggattggattgcaaagactctattaaggtatcagataataaaattgaaattaaaacagctctgggaactaatctaattgaatgtaaagagcccctaaatgaactaaataaattaattggcgaatacaagaccccaattttagatgatatgccacgattttatggaggatatgtcggtttttttgcgtatgaaagtgctaagtatgctgaaaataaaattaatgcccttcaaagaaaagactcaaaatttgatgtagatatgcctgatatttatttggtaaagtctgaaaaaataattgtttacgacaactttaataacagtattcaagcaatttataatgcaaaccctcaaaagacatcatatgaagatgctttggtaatcattgatgagattcaaaacagcattgatcattctggagaatttaaagaaacttcatattcaaatactactgggcaattagaatttaaatcaaattttacaaaaaatgagtacatttcgtctgtgaataaaattaaagaatatataaaagaaggtgatgtaatgcaggttgtactagcacaagatttttataaatccttcaatggcgattcatttgaattatatgccgctctaagacagataaacccatcaccatatatgtattatctcaaccttgatgagtgtgaggtggttggatcctcacccgaaatattggttagattagaagatagcaatattactctcagaccaattgcaggcacgagaaaaagaggtgcaaacaaagaagaggataaaaataatgaaaaagatttattaaatgatccaaaagagttagctgagcatcttatgcttatagatcttggaagaaatgatgttggaagagtttctgaaattggtagcgtgaaactgactgaaaaaatggtgatcgaaagatattcccatgtcatgcatatagtatcaaacgtagtaggcaaattatccaagggattaaattttactgatgctcttaaagctactttgccagctggaactctttcaggcgctccaaaaataagagctatggaaataattaatgagcttgagccaagttcaagaggtatatatggcggtgcaataggttatatatcttggaatggtaatattgatactgcgattgccataagaactgccgtaataagggataataaaattcatgttggagccggagcaggaatagttgccgattcagatccagaaaaggaatgggaggagtgtgtccaaaaatctaaagtatttttagacgcaatggagatgatttcatgat

SEQ ID NO: 278981 - DNA, 1366 bp, Unknown
  Bacterial polypeptide expressing nucleotide sequence isolated from the Sargasso Sea
aatatctgaagatcatgaaaacagttttctttttgaatcattaaaagatggtgatctcagcggaaggtattcggttataggcataaaacctgataaaatattaaaaataagaaaaaaagtatctaagatatacaatggaaaaaaaattgcagaaactgttaataaagaaccaatagaggcaataagatactttgttaataatagcttaattaaaatttctgaagatattccttcaatagcatcaggtatatttggttacattggttatgattttgttgcaaacattgaagagcttcctgaagaaaagatcgatgaatttaacataccagattgtattttattaaggccttccattacagtggtttttgacaaaaaacttgatgagattcttatctgtaaagcagtttggtacgatgataatactaatgcggatactgcatttaatttggctgagtctgaattaagtcaaattaaagaaaaaattaaatccgatcaaattattaaattaaaaagcaatcaaaaagaattaggaagcattcaatctaacttcacaaaagaacaatattttgaaaatgtaagaaaagcgagagaattcattaaagcaggagatatatttcaggttgttcctagtcaaagactatcaatcgaatttaatgctcatccatttttgctatatgaaacattacgaagaattaatccatcgccttatatgtattacataaaattcggtgatttctttatcgtaggctctagtcctgagacattagttaaagttgaaaaaaataaagtaacaattaaaccaattgcaggaactaggcttaaagaaaaaggaaaagaagaagaaataaaagaagatttattatctgacccaaaagaattagcagagcatctaatgcttcttgaccttggaagaaatgatgttgggagggtttcaaaagttggctcaataaatgttaaagagtcatttcaaattcaagaaacttctcacttatatcatatttactctactgttgaaggagatctaaatcctgaagaagatagagtatctgcattatgcgcgggttttccggcagggacagttacaggagcacctaagattagagcaatggaaataattaatgaaatcgaagacaggaaaagaagtatttattcaggggcaattggttatttttcatcctctggggacatggatactgctatcgccttaagaacagctgttataaaagataataaaatgtatgttcaagcaggtggaggagttgtatatgattctgatgaagaatatgaattcaatgaaacactaaataaagcccaagctttgttttcagctgctaaagaagtcttcacgaaacaggaaatgaaatga

SEQ ID NO: 278982 - DNA, 628 bp, Unknown
  Bacterial polypeptide expressing nucleotide sequence isolated from the Sargasso Sea
tgatgagtgtcaggtggtcggatcttcacctgaaatattggttagattagaagatagcaatattactctcagaccaattgcaggcacgaggaaaagaggtgcaaacgaagaagaggataaaaataatgagaaagatttattaaatgatccaaaagagttagcagagcatcttatgcttatagatcttggaagaaatgatgttggaagagtttctgaaattggtagcgtgaaactgactgaaaaaatggtgatcgaaagatattcccatgtcatgcatatagtatcaaatgtagttggcaaattatctaagggattaaattttactgatgctcttaaggctactttgccagctgggactctttcaggcgctccaaaaataagagctatggaaataattaatgagcttgagccaagttcaagaggtatatatggcggtgcaataggttacatatcttggaatggtaatattgatactgcgattgccataagaactgcggtaataagggataataaaattcatgttggagctggagcaggaatagttgccgattcagatccagaaaaggaatgggatgagtgtgtccaaaaatctaaggtatttttagacgcaatggagatgatttcatga

SEQ ID NO: 278983 - DNA, 1468 bp, Unknown
  Bacterial polypeptide expressing nucleotide sequence isolated from the Sargasso Sea
atgattagtaaagaggaatatatagattacgcaggaaaaggttttaatcttgttccaattataaaagagcttgaaatagattctgattctccaatcaccctgtactcaaaaattaaaaataaaagtaacacatttttacttgaatcaattgagggcggaataaaatgggcacagtattcaataattggattagattgcactgacagcattaaaatttctgataactttattgagatttcagaaaacggagaaattaattcctatgaatgtgcagatccattgaccgaaatcaatagaattatttctaactacaaaactccagaaattgaagacttgcctaggttttacggtgggtatgtaggattttttgcatatgaaagttcaaaatatgctgaaaaaaaaattgagaatcttgaaaagaaagaatcaaaatttaaagaacatatgccagacatatatctagtcaaagcagaaaaattaattgtttttgataattttaatcaaaagaaatttgcaatttacaatgcgaatccttctagctcatcttatgaggaagcaattaattccgtttcagagataagtgatagcatagatcaggcttttgaaaaagttggacaagattttaaaaaggtaaaaggtgagcttgaatttcaatcaaatttttcaaagaaagagttcatcaccgcagttaattcagtaaaaaattatattgctgagggtgatgttatgcaggttgttttagcacaagactttaaaatgccttttcatggcgactcttttcatctttatgccgcattaagagagcttaatccttcaccatatatgtattatctcaaccttaatgaatgtaaagttgttggcgcatctcctgaaatattgattaggcttgaaggaagccaagtcacattaagaccaattgctggtactcgaaaaaggggtgctaatgaagaagaagataagataaatgaaaaagatcttttaagtgatccaaaagaattagcggaacatttaatgttaattgatttaggaagaaacgatgttggtaaagtttcaaaaataggcagtgttaaagtaactgaaaaaatgatagttgagaaatattctcatgtgatgcacatcgtttctaacgtggtaggacaaatatcagaaggtctgcaggccatggatgtattaaaagcaacacttcctgctggtactctttccggtgccccaaaaataagagcgatggaaattattaatgaaatcgagcctagctctagagggatttatggaggagcaattggatatatctcatggaatggcgatattgatacagcaattgctatcagaactgcagttataaaagatcaattaatgcatgttggtgcgggtgcaggaatcgtagcagattcagatcctgaaaaagaatggcttgagtgcatacaaaaatcacaagtatttattgacgctatggagatgatctcatgat

SEQ ID NO: 278984 - DNA, 892 bp, Unknown
  Bacterial polypeptide expressing nucleotide sequence isolated from the Sargasso Sea
tttgaaaaaatttgaattatacaaaaattttgaaaatattaaacttccagatcaatttaccttcaaaccaaataaaaatttaataaaatcaaatacctcaaaaaataaatttaagtctttaattaaaaaagcaaaatcttacataaaaagaggtgatatttttcaagtagtgttaagtcaaagatttgaaagaaaaattaataaaacccctattgaaatttataatcatctgagaaaatctaacccttcaccttttatgttttattttaattatgaagattttaaagttctaggaagtagtccggaaatacttgttcgtctcagaaaaggcgaagttacaataagacctattgcaggaacaagacctagggggagaacaaaaaaagaagataaaagatttgagactgatcttcttaaagaccaaaaggagttagctgaacatcttatgctccttgatctaggaagaaatgatattggtaaagttgcaaaaattaatactgttaaagttactgaaaaatttaaagtagaaaaatactcacatgtgatgcatattgtttcaaatgttattggaaaatttaataatcaaacctcaatttttgaaacgcttttatcaggttttcccgcaggaactgtgagtggtgctccaaaaatcagagcaatggaaataattgatgaacttgaaaaaaataaaagaaagttgtacgcaggtgggattgggtactttacgcctaataatgaatttgatacttgcattgcattgaggacagccctaataaaaaatggaaaattttatgttcaagcaggagcaggaatagttgcggatagtaaaccggaaaaagaatatttagaaactataaataaagcaaaagctttaatgaaagcagtagattaa

SEQ ID NO: 278985 - DNA, 681 bp, Unknown
  Bacterial polypeptide expressing nucleotide sequence isolated from the Sargasso Sea
tagatatttataaaaaacttagggtaacaaatccctcaccttttatgtttttctttaactttaaagactttcaaattattggtgctagcccagaaatattagttagactgagaaataataatattactgtaagaccaatagcaggaacaagaccaagaggaaaaacgcttaaagaagatcgctattatgaaaaagatctcctaaaagacaagaaggaactatcagaacatttaatgttacttgatttaggaagaaatgatgctggaaaagtttcaaaaattaattctgttaaagtcacagaaagttttataattgaaagatattctcatgtaatgcacattgtttcaaatgtagttggtaaatataataagaaattttctaaatttaaatcacttttagctggatttccagcagggactgtgtcaggtgcacctaaaattagagcaatggaaataatagatgaactagaaacatccaaaagaaaagtctatgcaggtggaattggatatttttcggcaaatggtgaatttgatacttgtatagctttaagaactgcagttgcaaagaacaaaaaattttatgttcaagcgggtgcaggaatagttgctgatagtaaacctaaaaatgaatacgaggagacagttaataaagctaaagctttaattaatgctttacaataat

SEQ ID NO: 278986 - DNA, 1459 bp, Unknown
  Bacterial polypeptide expressing nucleotide sequence isolated from the Sargasso Sea
atgttgaatattggtctaaaattattcaagaaaaaccacttaaagagtaaaaaccaggttctttactattcatttaaatctaatggattaaaagaaatagataatttaataaataactttttaaatgtaagaaatagttttatttttgagtccgttgaaaagggttttataaaaggcagatatactatttttggcaaaaatcctgataaaatatgggaatttaataataataactgtgttttaaattatgaaaacaaaaaaaagaaactaaaaggaaaaccaaagaataatattgaaaaaataattgaaaattttaagtttgaaatacctaaagaattaccgcctattagttcaattatctcaggatacttttcctatgatataataagatatattgaaagaattccgaatagtacaaaaaatgatcttcaaattcctgatgcaagaatattaaggcctaggaaccttatagtttttgataatgctgaaaaaaaaatattttttatagttaactgtttttctgatgaaaaaatcaagaattatgaggcaaaatattatcaaattcaaaaagaaattgaggagatgatttttttatcaaactataatttgaagattaaatcatcaaacgcaaatatctctaaacctaaaattaaatcaaacatctcaaagaaaaaatttttaggcaatgtaattaaagctaaaaattacattaaaattggagatatttttcaagttgttctaagtcaaagattcgaaactgatcttaataaagaaccaatagatatttataaaaaattaagaattactaacccctctccttttatgtatttttttaactttgaagattttcaaattataggcgcaagccctgagatacttgtgaggcttagagataataaaataactataagacctattgctggtacaagacctagaggtaaaaataaaaaagaagataaattctatgaaaatgatcttttaaaagataagaaagagctttctgaacacttaatgcttcttgaccttggaagaaatgatactggaaaagtttctaaaataaactctgttaaagtaactgaaagctttaaaatagagagatattctcatgtgatgcatatagtttccaatgttgagggtatattcaataaaaaatttggcaaatttgataccttgctggctggttttcctgctggaactgtttcaggtgcgccaaaaataagagcaatggaaattattgatgagttagaaacaacaagaagaaaggtgtacgctggtgggattggttacttttcagcgaatggcgattttgacacttgtatagcgcttagaacagcaatttctaaaaataagaaattttacgtgcaatcaggtgcgggaattgtagcagatagcaaaccaattaatgagtttaatgaaactgtaaataaagcaaaagctttaattaaggctttggaataag

SEQ ID NO: 278987 - DNA, 490 bp, Unknown
  Bacterial polypeptide expressing nucleotide sequence isolated from the Sargasso Sea
aaagatcttttaaaagataaaaaagaaatcgcagagcatttgatgctcttagatttgggcaggaatgatgctggaaaggtttcaaagataaattctattaaagttactgaaaattttaaaatcgagaaatattcccatgtcatgcacatagtatcaaatgtacaaggtgattttaataataaatatagtaaatttgatactttattatcgggtttccctgcggggacagtgtctggagcaccaaaaattagagcaatggaaattatagatgagttagaaacaacaaaaagaaaagtatatgctggaggtataggatatttttccgctaatggggactttgatacatgtatagctttaagaactgccattacaaaaaaaaataaattttatgttcaagctggcgcaggaatagttgcagatagtaaacctattaacgagtataatgaaactataaacaaagcaaaagctttgttaaaatctttagaataaa

SEQ ID NO: 278988 - DNA, 526 bp, Unknown
  Bacterial polypeptide expressing nucleotide sequence isolated from the Sargasso Sea
taaacgaagaagaggaataaataacgaagaagatttattacatgatccaaaagaattagccgaacatcttatgcttatagatcttgggagaaatgatgttggaagggtttctgaaatagggagtgtgaaactaactgaaaaaatggtgatcgaaagatactctcatgtgatgcatatagtatcaaacgtagtaggcaaattatccaaaggattaagttttacagatgctcttaaagctaccctgccagctgggactctttcaggcgcaccaaaaataagagctatggaaataattaatgagcttgagccaagttcaagaggtatatatggaggtgcaataggttatatatcttggaatggtaatattgatacagccattgctataagaactgctgtaattagggataacaaaattcatgttggagctggggcaggcatagttgctgattcagatccagaaaaggaatgggaggaatgtgtccaaaaatcaaaagtatttttagatgcgatggagatgatttcatga

SEQ ID NO: 278989 - DNA, 458 bp, Unknown
  Bacterial polypeptide expressing nucleotide sequence isolated from the Sargasso Sea
agaacatttgatgcttcttgatttgggtagaaatgatgctggtaaagtctcaaagataaattcagtaaaggttacagaaagcttcattattgaaagatattctcatgttatgcatatagtttcaaatgtaattggagaatataataaaaaattttcaaaatttaaatcgctcttggctggtttcccagcaggtactgtatctggagctccaaaaattagagctatggaaattatagatgaattagaaacaacaaaaagaaaagtatatgctggtggaatcggatatttctctgcaaatggcgaatttgatacatgcatagccttaagaactgctgttgttaaaaataaaaaattttatgtgcaagcaggtgcaggtatagttgcagatagtagacctaaaaatgaatatgaggaaacagttaataaagcgaaagctttaataaacgctttaagataat

SEQ ID NO: 278990 - DNA, 1231 bp, Unknown
  Bacterial polypeptide expressing nucleotide sequence isolated from the Sargasso Sea
taacaataaaattattattgatgattttaaaaagaaaaaaataatcaaaaaaaatgtactttcttttttaaataatttattaaatgattttaaagttaaatcatctgtgaatttacctagaatgtcatcaatgcttgttggctacttttcatacgatattattcgtttgattgagaaaatcccaaacaaatgtaaaaatgacataaatattcctgacattagattaatgcgtcctagaaatctaatcatctatgataatttaaaaaaaaaaatattttttattcaaaacatttttactgaagaaataataaaagattacaaatttgaatacgaaagaatcaaaaatacttttaaggaatttcagcactatggaagtattattcttccttcattatttcacaaaaataaaaaaaaaataaatgttaaatcaaatatatcaaagtctaaatttaagagtattgtattaaaggcgaaaaattatattaaaaagggtgatatttttcaggttgttctaagtcaaagattcgaagctactattgataaacccccactagaaatctacaacacactaagaattcttaatccatcccctttcatgttttattttaattataaagattttcaagttttaggtagtagtcctgaaattcttgttagattacatgatggggaggttactattaggccgattgctggaacaagaccaagaggaagaaataataagcaagataaaaaattaacttctgacttacttaaagatccgaaggaattagctgaacatttaatgttattggatcttggaagaaatgatgtagggaaagtatcaaaaatcaatagtgttagagtaacagaaaaatttaaagtagaaaaatattctcatgttatgcatattgtatctaatgttactggaaaattaagaaaaaatttttctatttttgaaacttttttatcaggttttcctgctggaactgttagtggtgccccaaaaattagagcaatggaaattattgatgaattagaaaaatcaaaaagaaaactttatgctggaggaataggatattttacagcaaatcaagaatttgatacatgtattgcattaagaactgctcttataaaagataagaaaatttatgttcaggctggcgcaggaattgtagctgatagcaatcctaaaaaagaatataatgaaactttaaataaggcaaaagctttgcttaaagcaattaattaa

SEQ ID NO: 278991 - DNA, 902 bp, Unknown
  Bacterial polypeptide expressing nucleotide sequence isolated from the Sargasso Sea
tgaaaaattattaaaattttcaaataataatttatacaaaaaagataataaatttaagaaaacgacgagcccgattaaatcaaactttacaaaatcgaattttatgagtgcggtaaaaaaaattaagagctatgttaagaaaggagatgtaattcaaactgtggtttctcagagatgggaaactaaatatgaagatgatccaataaacttatatagatccttgagaaaacttaatccttctccttatatgttttatcttaaaatggaaaaatctttaattgttggagcatcaccggaagtgctagttaggcttgaaaataacaaagtagaatctcgcccaatagctggaacaaggcccagaggtatagatactgaagaggatttaaaaatggagaaagacttattgtcagaccctaaagaattagcagaacatgtaatgctggtagatcttgctagaaacgatataagcagagtgtgcaaaaatagcactgtaaatgttacagaaatgatgagtattgagagatactcgcatgtaatgcacattgtttcacatgtagaggggctcatagataaaaagaaagatgcttttgacttgcttaaatctacttttccagcaggaacattatctggggcaccaaaaataagagcgatgcaaattataaacgagctcgagccaaatcaaagaggtccttatgggggttccgtaggatattttggtttttccggtaatatggatatgagtatagttataagatcattttatattaaaaataaaacattatattttcaagcaggtgccggaattgttgcagattcaataccaaaaaatgaatatgacgagacaaaaaataaatctaaagctatgttaaatgctataagaaagagcctgaacaatgagtagc

SEQ ID NO: 278992 - DNA, 1693 bp, Unknown
  Bacterial polypeptide expressing nucleotide sequence isolated from the Sargasso Sea
atgaccctaaagacatttaatcaggttacccaagccgacggagggaatttcccctcacctccgcagacatttgcacgttcacatacgatcaaggccaccttggcataccatagcgatccgctgcgtttgtaccaacacatcactcaagatgcgccccataccatgttgttggaatcagcagaaataaacagcaaggaaaatcttaagagcatggtgatgacccatgcggcgctgatgatccgctgcgacgggtattgtttacgctttagcgcactgagcgacaatggtgccagtttacttgcccccatcgagcaattttttagtgctcgctcaagccaaactcaatgccaacgcgatggccacaacttagtggtcacgctacaaaaagacactgagcttaaggacgaagatgcccgcttaaagtccacctcgccacttgatggtttacgcttgtttgttaaacatatcgactgtggtcagacgccagcattcgaagacttatttttaggtggcgtactttcctacgatttgattgatacagtggagccactgcctaaagcaccaaatggtgcaaatgattgccctgattatttattttatcttgccgaaaccttaattcttattgatcacaagcagaaacaagccgaaatcatcacccacaattttagtgaaggttctgcaaaactggttgaagtgacccaagccttagccaaacgagctagccacattagcgctgactgccaaaccttagccaatgatatagaacctgcgcccgcgctggttgggataacagcgactgagcaagtcaatatcagtgatgaggcctttaaacaaaccgttatcgatttaaaagaacacattattgcgggcgatatcttccaagtggtgccctcacgcagttttagcctgccctgcccaaataccttaggggcttaccgcgcactacgtctaaccaatcccagcccttatatgttttatttcaggggtcatgacttcaccctgtttggcgcctcacccgagagcgcactgaaatatgaagccagcaacaatcaggtcgaagtctacccgattgcaggcacccgtaagcgcggcaaaaccgccagcggcgagattgatttcgacctcgatagccgtatcgaactcgaattgcgcttagataaaaaagagctctccgagcacttaatgctggttgatttagcccgtaatgatatcgctcgaatcagccaaagtggcagtcgcaaagtggccgagttacttaaagtcgaccgttattcccacgtgatgcacttagtcagccgcgtcacaggtcaactacgccaagacttggatgcgctccacgcctatcaggcctgcatgaatatgggcacgctagttggcgccccgaaagtgcgcgcctcgcaactcgtacgtcaggcggaaaagacccgccgaggcagctacggcggcgccgtgggttacctcaacgcccttggggatatggacacttgcattgtgatccgctccgcctttgtgaaaaacggcgtggcccatatccaagcgggtgctggcgtggtatttgattccgatccccagagtgaagccgatgaaacccgccaaaaggcacaggcagtgatttcagccatcaaaatgggcgcaggcttgggtgaaagccatcaagcaactgcgaccactacgactgaacaaccaagataag

SEQ ID NO: 278993 - DNA, 1468 bp, Unknown
  Bacterial polypeptide expressing nucleotide sequence isolated from the Sargasso Sea
aatgataactaaagaagaatacgatcagtatgctatagatggattcaatataattccattaataaaaaagatagatgttgttttagactctccaataaaaatttattcaaaaattaagaataaagagaataccttcttattagaatcaattgaaggtggagaaaaatgggctcaatactcaataataggattagattgtaaagatacgataaaggtatctgaaaataaaattgaaatcaaaacagatacaaatattaatttaattgaatcagacgaccctttaaaagaactaaataaattaataagtaaccataaatctccagatttacgagatatgccaagattttatggaggttatgtgggcttttttgcatatgagagtgctcaatacgctgaagaaaaaattaaatctcttccaaaaaaagatcctaagtttaatgagcatatgccagacatatatttagttaaatctgaaaagttaattgtttatgataattttaataaaactatacaggccatctataatgcaaatccatcaaagacctcatataaagaagcagtaaagattcttaataaaattgaagatagtattgatcaatcagaagagtatgccgatttatcatttgcaaaagtttcaggagaattaaaatttgaatcaaatttcactaaaagtcaatttataagctccgttaatagaattaaagattacattgaagagggggatgtaatgcaagttgtattagctcaggatttttatagacgctttgatggcgattcttttaaattatattcagccttaagagagcttaacccatcaccatatatgtattatttaaatcttgatgggtgtgaagtggtgggatcatctcctgaaatattagtaagggttgaagatgatgatattactcttagaccaattgctgggaccaggaaaagaggtgaaaacgaagaagaagataaacataatgagcaaaacttattaaatgatcctaaagaattggcagagcaccttatgcttatagatttaggcagaaatgatgttggtagaattgctaatattggtagcgtaaaactaactgaaaaaatggtaatagaaaggtattctcatgtaatgcacattgtttcaaatgtggttggaaaattatcaaaagaatataactttattgatgcgcttaaggctactcttcctgcaggaacattatctggggcgccaaaaattcgtgctatggaaataattaatgagcttgagcctagttctagaggtatttacggaggcgctattggttacatatcttggaatggcaatattgatactgctatagcaattagaaccgctgttataaaagataatttaattcatgttggggctggtgctggaatagttgcagactctgacccagagagtgaatggaaagaatgcattcaaaaatcaaaagtttttttagatgcggtggagatgatttcatga

SEQ ID NO: 278994 - DNA, 1600 bp, Unknown
  Bacterial polypeptide expressing nucleotide sequence isolated from the Sargasso Sea
cgataccctcaccctcaacgccccctatgtggccgatccgctggcactctacagcgagctttgccagggtcgccccaacaacctgctgctggaatcggtcgagatcgactccaaggccggcaaacagagcctgctgctggtggacgcctgcctgcgcatcgagtgccgtggccgcaccgtgcgggtgcgcagcctcaacgacaacggcgcccagctgcagagcctgctggccgagcgcctgcctgtggtggtggctcgctcgctggtagacggcgagctgcagctcgacttcccggcctccgatcgggagcaggacgaagacagccgcctcaaggggatcagcgtgctggacgtgctgcgcaccctgcagcgggagctcgattgtcagcttggcaaagaggccctgtttatagccggcagcttcgcctacgacctcatcgcctcctttgaagatctgcccgacgtgccacaggggagcaacgactgccccgactactgcttctacgtggccgagaccctgatcaccatcgaccacatcgcgcgctccactgcgctgctcgcctgcatcttcggcggtgacagcgacgaaagccgggtggaagacagatacaaccgcctgagcgagcgcctcgcccagttcaagcacgcctgccagcaagcccccgcgcaggctccggccaccccgaccctcgccggcggcatgagcgtggacaagagcgacaagcagttctgcgccgaggtggagaagctcaagggctttatccgccgcggcgacatcttccaggtggtgccgtcccgctgcttctccctgccctgccccagccccgtcgccgcctatcgccgcctcaaacagaccaaccccagcccctacatgttctatgtgcaggatgagggcttcaccctgtttggagcctcgccggagagcgcggtgaaattctgcgccaccagccgcgacgtggagatgtaccccatcgccggcacccgccgccgcggcttcaaccccgatggcagcatcaaccgggatctcgacggccgcatcgagctggaactgcgtcaagacgaaaaagaggtggccgaacacctgatgctggtggatctgggccgcaacgatatcgcccgcatctcggagcccggtacccgctacgtcaaggagctgctgaaagtggatcgctacagccacgtgatgcacttggtctccaaggtggtcggcaccttgcgcgccgaccttgacgccctgcacgcctatcaggcctgcatgaacatgggcaccctcaccggcgcccccaagatccgcgccagcgagctgattcgcatggtggaaggcaagcgccgcggcagctacggcggcgcggtcggctacatcaacggcgccggcgagatggatacctgcatcgtgatccgctccgcttttgtcaaagagggcgtggcccacgtgcaggccggcgccggggtggtctatgactccaaaccccaggccgaggcggacgaaacccgcgccaaggcggccgccgtgctggccgccattgcagccagccatggcacctccctgcaagccctgagcgcccagcaggagcaacataaggacgtgagccatgactaa

SEQ ID NO: 278995 - DNA, 1522 bp, Unknown
  Bacterial polypeptide expressing nucleotide sequence isolated from the Sargasso Sea
tatgatcagctcacagaaagatagttttttaaaggctcacaaagaaggtaaaaattttatacctattactcaaacttggccagcagatttagagacaccattatctacttggttaaaattatcctcacaaaattcgcatggcgtatttcttgaatctgttgagggtggtgaaagtttgggtagatggagtatcgttgctacaaaacctctttgggaagcagtttgttatggagatgaaatagttaaaacttggaataatggaaaaactgaaatacataaaggggatccttttaatattttaagaacttggacaaaggaatataagtcaaactcgcttgatgacttaccatcagttggacagttatatggttcttggggttatgaattgattaatcaaatagaatcaagcgttcctataaatgagatagaagaaaacaacatacctaatggttcttggatgttttttgatcagttagttgtttttgatcaaataaaaagatgtataacagcagtggtttatgcagatataacttctttacaagggtcttctattgaagagatatacctaaactcaatttctaaaattcagaaaactagagaattaatgaaagttcctcttaaagaaaacgagtttttaaagtggaatgaaaatgagaacttgaatttagatattaaaagtaattggaagaaaaaagactttgaggatgcagttctctccgcaaaagaatatataagaaaaggagatatattccaaatagttataagtcagagatttcatactgaagtcaataatgatccttttaatttatatagaagtttaaggatggttaatccatctccatacatgtcattttttgattttggctcctggtatctgataggttccagtcctgaagttatggttaaagctgaaaaaaattgcaatagtcagattgttgcaagcttaagaccaatagctggtacaagaccgagaggtaatgatcttcaacaagatctggaattagaaaaggatttattaaaagatccaaaagagatagccgagcatgtaatgctaatagatcttggaaggaatgatctgggaagagtttgtgaaattggtactgtagaggttaaagatttaatggttattgagaaatattcacatgttatgcatatagtgagtgaagttgagggaatcttaaaaaagaatactgacgtatgggatttgctaaaggcatgttttcccgctggaacagtaactggtgcaccaaaaataagagctatgcaattgattaaagactttgaaacagatcctagaggaccttatgctggagtgtacggatctattgatataaatggtgcattaaatacggcaattacaataagaactatgatagttaaaccctcaaaagatggaaaatatgatgtttacgtacaagcaggcgcgggaatagttgctgattcttctcctgaaaatgaatatcaagagacaattaataaagcaaaggggatactaaaagcattagcctgtttagataaataa

SEQ ID NO: 278996 - DNA, 508 bp, Unknown
  Bacterial polypeptide expressing nucleotide sequence isolated from the Sargasso Sea
acaagacgatcttttaaagaaagagttattaaatgataaaaaagaattatcagaacatttaatgcttttagatttgggaagaaacgacgctggaaaagtttcaaaaattaactcagtaaaagtcactgaacaattcaaaatagaaaaatactctcatgtgatgcatattgtctcaaatgtaactggaaaatttaataataaatttacgagttatgaaacattgatgtctggttttccagctggtaccgtttctggtgcaccaaaaataagagcaatggaaataattgatgaattggaaaactccaaaagaaaaatttatgctggtgggattggatacttttcctcgaatggagattttgatacttgtattgcacttagaacagcgattacaaaaaaaaataaattttttatacaagctggagctggaattgtggctgacagtattcctgaaagagaatttaatgaaaccctaaataaagcaaaagctttactaaaatcggtagagtaa

SEQ ID NO: 278997 - DNA, 718 bp, Unknown
  Bacterial polypeptide expressing nucleotide sequence isolated from the Sargasso Sea
atataatttaaaggcagtcaatctttatagatcgttaagacgactaaatccatctccttatcttgtaaatcttaacttcgataaaattggccttgttgcatctagtccagaattaatggttcaattaagaaacaaaaaagttacgataagaccaattgctggaacaagaaaaagaggaaagaatgcctctgaagacctttatttatctaatgacttactgaatgataagaaagaactcgcagaacacttaatgcttttagatttaggaaggaacgatgttggtcgcgttgcaaaaaaaggaacagtgaatgttactgaaaagatgattatagaatactactctcatgtaatgcatattgtttcaaacgttgagggaaaaatagataataatttagatgctctagatgctttaatggctggatttccagcaggtacagtttctggtgcaccaaaaataagagcgatggaaatcatagaggaacttgaaaatttaaatagaagtttttatgctggttgtatgggttattttgattctaatggagacatggatacttgtattagtttgaggactgggcttgtaaaagatagtaaattatacattcaggctggtgctggaatagtttatgactcagtcccaaaaaatgaacatcaagaaattttgaataaagctggtgctttaatggcagctgcagaggattcatacaaattcgatatatga

SEQ ID NO: 278998 - DNA, 334 bp, Unknown
  Bacterial polypeptide expressing nucleotide sequence isolated from the Sargasso Sea
aatgtccatcggtgtatataataaaaaattttctaagtttaaatcacttctagctggtttccctgcaggaactgtctctggagcaccaaaaattagggctatggaaataattgatgaattagaaacaactaagagaaaagtttatgctggtggtattggttatttttcagctaacggagaatttgatacatgtatagctttaagaacagctgtcgctaaaaataataaattttatgttcaagctggtgctggaattgttgctgatagtaaacctttaagagagtacgaggaaactattaataaagcaaaagctttaattaatgctttaaaatga

SEQ ID NO: 278999 - DNA, 1263 bp, Unknown
  Bacterial polypeptide expressing nucleotide sequence isolated from the Sargasso Sea
aaacccagataaaattttgggaatttaacaataacgattcttatacggttgataaatacaacaaacgaaaaaaaattaacggtaaaccaaaaaaaataatagaaaaaattattgaaaattttaagtttaaaactccaaaaagtttacctccgatatgttcattaatatcaggttatttttcatatgacacaattagatatttagaaaatattccaaataaatgtaaaaatgatcttagtttaccagatgtaagaatcttaagacctaaaactttaataatacacgataactataaaaataaaattttctttataatcaatgtttttaaagatgaaaaaattaacgattataaaattaagtataatcaaattaaaaatgaattagctatgttaaatttattatctttaaatagaacgaataattcaaaaaaaataaaaacaaataaattgacagttaaatctaatacatcaaaaaaaagatttttaactatagtaaatagagcaaaaaaatacattaaagttggcgatatttttcaagtagttttaagtcaaagatttgaaacaaaattatcaaagcgaccaatagatatttataaaaagttaagaataaccaacccttcaccttttatgtatttttttaattttcctgatttccaaattattggggcaagtcctgaaatattggtaagactaagaaacaacaaaattactattaggccaattgccgggactagacctcgtgggacaaataaaaaacaagataacttttattcaaaagacttacttaaagataaaaaagagatatctgagcacttaatgttattagacttgggtagaaatgatgttggaaaagtttcaaaaattaacacagttaaagtaactgagaagtttaaaattgaaaaatactctcacgtgatgcatatagtttctaatgtcgaaggaatttttaataataaatactcgaaatttaaatcattattatcaggttttcctgcaggaaccgtttcaggtgctccaaaaataagagctatggaaattatagatgaactagaaaaatctaaaagaaaggtttacgctggtggaattggatatttttctgctaacggtgaatttgatacttgtatagcattaagaacagcaatagcaaaaaataataagttttatgttcaggctggtgctggaatagtagctgatagtattcctgctaaagagtatgaggagacagttaacaaagctaaggctttgattaatgcattaagataat

SEQ ID NO: 279000 - DNA, 1261 bp, Unknown
  Bacterial polypeptide expressing nucleotide sequence isolated from the Sargasso Sea
aatcctgataagatatgggaattcaacaatcaaaagtcatatttaatcactgaaaataaaaaaatcattcttaaggacaaaccagaagaactaatagaaaagattattgaaaattttaaatttgatacacctaaaaatttacctaaaatttgttcactaatttctggttatttttcatacgactctattaggtacatagaaaaaattcctaactcatgtaaaaatgatcttaatttacctgatgtaagattaatgagaccaagaaccttggttattcatgataatttaaagaaagaaatatattatataagaaatgtttttaatgatgaaaaaatcaaagattatcaaaaaaaatatgactccataaaaactgatctatttaaattattaattcaatcatccatcaaaaatattaataaaaacagagtattaaaagaaaaaaaaattaaagtaaaatcaaacacacctaaaaataaatttcttgctatggttaataaagccaaaaaatacattaaacttggtgatatttttcaagttgttttaagtcaaaggtttgaggcaaaattaacaaaaaaacctttagaaatttataaaaaacttagagtaacaaacccttctccttttatgttttacttcaactttaatgacttccaaattattggggcaagtccagaaattttagtaagactaagagataaaaaaattactgttaggccaatagcaggtactagaccaagaggaaaaaataaaaaagaagatgttttttatgaaaaagaccttcttaaagataaaaaagaactttctgaacatttaatgcttttagatctaggaagaaatgatgcgggtaaagtatcaaaaataaatactgtaaaggtaactgagagtttcataattgagaggtactcccatgtaatgcatatagtttccaatgtagttggagagtataataaaaagttttcaaaatttaaatcacttttggcgggatttcctgctggtactgtatctggtgctcctaaaataagagcaatggaaattattgatgaattagaaacatctaaaagaaaagtttacgctggtggaattggatatttttctgctaatggtgaatttgatacttgtattgcattaagaacagctgtagcaaaaaataaaaaattctatgtacaagctggagcaggtatcgtggctgatagtaagcctataaacgaatatgatgaaacagtgaacaaggcgaaagctttgataaatgctttaagataat

SEQ ID NO: 279001 - DNA, 1459 bp, Unknown
  Bacterial polypeptide expressing nucleotide sequence isolated from the Sargasso Sea
atgcttaatataagccttaaacaatttaagattaatcataaaaaaaaaataaaccaaatactctatttatctttggatagtgatggttctaaagaaataataaatttaataaataatttttttaccgaaaaaaatgcttttgtatttgagtcagtagaaaaaggatttattaaaggtagatatacaatttttggaaaaaatcctgataaaatttgggaatttaataataatgtaagtaaaatatacttcgataacaaagttaaaattttgaaaggtactgcaaagaaaaatatagaaaatgttattgaaagttttaaatttaaaattcctagagaattaccctcaattagctccataatatcaggatacttttcatatgacattattagatatctagaaaatattcctaataaaaatagagacgatttaaaattacctgatgctagaattatcagaccaagagaactaataatacatgataatataaaaaagaaattatattttataattaatgttttttgtgatgaaaaaataaataattataaaataagatatgaaaaaataattaatcaaattgagaatttaatttttttatctaattataataattcgtatcttgataaaattaataaaaaaattaaaacaaaggtaaaatcaaatatatctaaacaaaagtttttatcaaatgtaaaaaaggctaaaaaatatattaaaattggagacatatttcaggtagttctaagtcaaagatttgaaactaagctaagtaaaaacccaatagaaatttataaaaaattaagaaaaacaaacccttctccttttatgtatttttttaattttaaagattttcagattattggtgcaagtccagaaatacttgttaggttaagaaataataaagtcacgattagaccgattgctggaacaagaccaaggggaaaaaataaaaaacaagatttattttttgaaaaagatttactgaatgacaaaaaagagctgtccgaacatttaatgcttcttgatttaggaagaaacgacactggaaaagtatcaaagattaatactgtaaaagtgactgaaagtttttcaatagaaagatactctcatgtcatgcatattgtatcaaatgttgaaggagtatttaataataaatactcaaaatttcaaactatgttgtctggatttccagcaggaacagtatctggggctccaaaaattagagcaatggaaataatagatgagctagagacaactaaaagaaaagtttatgcaggtggaattggatatttttcagcaaatggtgaatttgatacatgtattgcacttagaactgcagtagctaaaaataagaaattttatgtgcaatctggtgctggaatagttgcagatagcaaaccacaaaacgaatatcttgaaacagttaataaagcaaaggctctattaaaagcaattgagtaat

SEQ ID NO: 279002 - DNA, 1432 bp, Unknown
  Bacterial polypeptide expressing nucleotide sequence isolated from the Sargasso Sea
atgaaaattaatcgaagcttcaaagaattcaagtttcgacacagaaacaacgaaaatcaaataatctatacatcaaaaaaagtaaaaactgatgaagaaataattaatttaattgataactttttaattgaaaaaaatagctttatttttgagtcagtagaaaaaggtaagattagaggcagatacactatatttggtaaaaatcctgataaaatttgggaatttaataataataattcttatttaataaaaaaaaataaaaaaattaagttaagggataaacctaaatatttgattgaaaaaataattgaagattttaaatttaaaactcctaataaattaccgaaaatttgttctttgatttcaggatatttttcgtacgatgcaattaggtatatcgaaaaaatcccaaacaattgtaaagatgacttaaaattacctgatgttagattattacgtccaagaacactcattattcacgacaatttgaaaaaggaaatattctttatcaataatatttttaaagatgaaaaaattacgaattacaaaagtaaatataaagatatccaatctgaacttttcacgctctctttacaatcatcagttaaaaaaatagataatgtaataaatagaaagtcacaaaaaattataattaattcaaatacttctaaaaataaatttttatctatagttaataaggcaaaaaaatacattaaattaggagatatatttcaagtcgttttaagtcagcgttttgagactaagttgacaaaaaaacccatcgatatttataaaaaattgagaataactaatccatcgccatttatgtttttttttaattttactgattttcaaataataggtgccagtcccgaaatattagtaaggttaagagagggtgaaataactgttagacccattgctggaacaagacctcgaggaaaaacaactaaagaggatcgtttttatgagaaagatttaattagagataaaaaagagctttctgaacatcttatgttattagaccttggaagaaatgatgccggaaaggtatctaaaactaattctatcaaagtaactgaaagttttataattgaaaggtattcacacgtaatgcatatagtttcgaacgtaataggtaaacatgataaaagattttctaaatttaagtctcttttagcaggttttccagctggaactgtgtctggagctcccaaaataagagctatggaaattattgatgaactagagtccacaaaaaggaaagtttatgccggtggcattgggtatttcgcagctaatggagaatttgatacatgtattgcgttaagaacagctgttgccaaaaataatagattttatgtccaagctggagccgggattgttgcggatagcaaacctctaaaagaatatgaagaaactgtaaataaag

SEQ ID NO: 279003 - DNA, 409 bp, Unknown
  Bacterial polypeptide expressing nucleotide sequence isolated from the Sargasso Sea
tttgactgaaaagatgatagttgaacgatattcccatgttatgcatattgtttcaaatgtcacaggcaagcttaaaaaagggatgaatgctatagatgtcctaaggtcaacttttcctgctggtacggtatctggtgcaccaaaaattagagcaatggaaatcattgatgagctagaaccagtcaaacgcggggtttattctggtgccgttggttatatatcttggaatggaaatatggatactgctattgcaataagaacggctgttattaaagataaaatactgcatatacaagctggggcaggtattgttgctgattcagtacctaaaaatgaatgggacgaaacgatgaacaaaggacgtgctatatttaaggctgtatctctagctgaaaaaggtctggaataa

SEQ ID NO: 279004 - DNA, 1444 bp, Unknown
  Bacterial polypeptide expressing nucleotide sequence isolated from the Sargasso Sea
atggatcttattcgatataaaggtaccgtactttactgtaatatctatttagagtttaaataccgtatttcattagcgtgcatatgggtgaacacctttggaaaacacagcatttctaagattcctctagtgtacactgaaacccaaccatttgacgtttacaataaaatttctagaaactatactcattcatttttgtttgaatcattagaagggccagatgaacttgcagagacttcaatcatgggatttgatccagagttaattgtgaaagggtattttgataaaataacaattcaaaatagagatggcaatattgaaaccattcaaacagattcacctttagaagaaatcaaaaaattgatcaaaaaaaccgatgacatgtcttaccgatatttgggaggtgcagtcgggaatattgattatgatgcaataagactatttgagaaaattccaggaaaaagagatttagaaaaaccaataatggaatttggaatttacaatgacggaatattgtatgacaataaaaagagacagtttttctatttttattatgacgaagatagaaaagacaaaataaaaaaaaccgatgaagatgtagggatgtttgaaatgtcagacataaatccaaatctgaataaagaggaatttgagaaaattgtaagtaaagcaaaagagtacgttcacagtggagatgtatttcaggttgttctatctagaagattttcatttgaagggaaaggagattatttacgagtatatgaaaagcttcgagaactaaatccttctccatacatgtttcatctaaaaatgaatgaaaatgtaattatcggatcaagtccagaaatgttgctaagagttactggtagagacgttgaaacttttccaatagcagggacaagaaaaattaccaatgatgaagaaaaaaatgaaaaattaaaagaagaattactaaatgatgaaaaagaacttgcagaacatacgatgcttgtagatttaggtcgaaatgatattggaagagtctgcgattatggaacagtcagagtaaaagaactaatggagattaaaagattcagtcatgttcagcatatagtaacacacgtagtgggtaaattgaatgagaaacatgacatgtatgatgcatttgaagctgtttttcctgcaggaactgtatcaggggcaccaaaagttagggcaatggagataattcaagaactagaacctactcaaagagaaacatatgcaggtgccgtaggttatttttcatttaatggatgctgtgattttgcaatagctatccgaagtatttttgctaagaaagacaagggatttgtccaagcaggtgcaggaattgtatttgattcaattgcagaaaatgaacttaaagaaacagaacacaaagcaaatgcaatgattactgccttaaaggaggcttcaaaatgaa

SEQ ID NO: 279005 - DNA, 1255 bp, Unknown
  Bacterial polypeptide expressing nucleotide sequence isolated from the Sargasso Sea
aaccctgataaattgtgggagtttaatgataataaatgtaaactaatatataaaaatagatcaataaatttaaaaggaagtccaaaacaaaatatagaaaaaattattgaaaattttaattttgatatacccaaagagttaccgccaattagttcaattttatcgggttatttttcttatgatataattagatatattgaaaaaattccaaacagtacaaaaaatgatctaaaaattcctgattcaagaattataaggccaaagaatataattatacacgataatgttgataaaaaattatattttatagttaatgtgtttaaagatgaaaaaataaataattttaaaaaaagattttccgaaataaataatcaaattgaagaaatggtatttttggcaaactataattcaataaaaattactcaaactaataaattaactaaaattaaatctaatatttctaaaaaaagatttatagataatgttaaaaaagcaaaaaaatatattaaaattggtgatatttttcaggtagttttaagtcaaagatttgaatgtaaattgacaaaaaaacctattgagatttacaaaaaactaagaaaaaccaatccatctccatttatgtatttttttaatttcaaagactttcaaattattggagctagtccagaaattttagttagactaagaaataataaaatcacaataagaccaatagcagggacaagaccgagaggtaaaaataaaaaacaagatcaattttttgaaaaagatttattgaaagataagaaagaattatctgaacatttaatgcttttagacttaggaagaaatgatactggtaaagtatcgaatgtaaattcagttaaagtaactgagagttttaaaattgaaagatattcgcatgttatgcatatagtttctaatgtggagggtacttttaataataaatatagtaaatttgatacacttttgtcaggttttcctgctggtacagtttctggtgcaccgaaaattagagctatggaaataattgatgaactagaaaacacaagaagaaaagtttatgcaggtggaataggttatttttctgcaaatggcgattttgatacatgtatagctttgagaaccgctatatcaaaaaataataagttctatatccaatctggagctgggatcgtagcagatagtaaacctttaaatgaatttaatgaaacggtaaataaagccaaagctttaataaaagcattagagtaat

SEQ ID NO: 279006 - DNA, 460 bp, Unknown
  Bacterial polypeptide expressing nucleotide sequence isolated from the Sargasso Sea
aatgcttgtagatttaggtagaaatgatatcggtagagtttgtgattatggaactgtaaaagtgaaagaactgatggaaattaaacgatttagtcatgttcaacatatcgtaacacatgtagttggaaaattaaatgataaacacgacatgtatgatgcatttcaagcagtatttcctgcaggaactgtttcaggagcaccgaaagtcagagcaatggagataattgaagaattagaaccaatacaaagagaaacttatgcaggtgcagtcggatatttttcattcaacggatgttgtgattttgcaatagcaattagaagtatttttgcagatgcggaaagaggatttgtacaagctggagcaggaatagtatttgattcaatagcagaaaacgaactaaaagaaacagaacataaagcaaatgcaatgattactgcgttaaaggaggcatcaaaatga

SEQ ID NO: 279007 - DNA, 1462 bp, Unknown
  Bacterial polypeptide expressing nucleotide sequence isolated from the Sargasso Sea
aatgttaaattacaatttaaagcaatttaaatctcttcacaaaaaaaagaaaaatattgttttattttattctgaaaaatcaaaaggagttgatgaagtcaataatttaattaataatttattaaatcaaaaaaattcgtttattttcgaatctgttgaaaaaggaattataaaaggtagatatacaatatttgggtctgatccagataaaatttgggaatttaacaaaaataattcatttataattaagaaaaatgtaaaaagaaaaattaagaatggtaatccaaaaaaaattattgaaagtataataaataattttaagttcaaaattcctaaaacactaccgccaattagctcacttttatcaggatatttttcatatgatataattagatatatagaaaatatcccagataattgcaaagatgatttaaaaataccagacgcaagaatattaagaccaaaaactttaattattcatgataattttaaaaaaaaaatattttacattataaattgttttgctgatgaaaaaattattaattataaatctgaatatcataatatagaaaataaaattaataatttaatacttaaatcaaaatataattttaatttttctaatgaaaattattttaaaaaaaaaattaatgtaaagtctaatatttctaaaaaacaatttataaatattgttaaaaaagctaaaaaatatattaaaaaaggtgatatttttcaggtcgtattatcacaaaggtttgtaactaacttaaataaaaaccctctggaaatttacaaaaaactccgcattacaaacccatcgccatttatgtatttctttaattttgatgacttccaaataataggtgcgagtcctgaaattttagtaagattgagaaataatgaaataactattagaccgatagctggtacaagacctaggggtaaaaataaaaaactagataatcgctataaaaaagaactcttaaatgataagaaagagttatctgaacatttgatgcttcttgatttgggcagaaatgatactggaaaagtttctaaaattaattctgttaaagtgactgacaaatttaaaatagaaaaatattcgcatgtaatgcatatagtttctaatgttactggaaaatttaacaataaattcactaaatttgaaacattgttatcaggtttccctgctggaactgtttctggagcaccaaaaattcgtgctatggaaattattgatgaattagagaaatctaaaagaaaagtttatgctgggggaattggttatttttctgcaaatggtgattttgacacttgtatagctttaaggactgctatttctaaaaataataaattttacgttcaagcaggagcaggaatagttgctgacagcaaacctttaaatgagtttaatgaaactgttaataaagcaaaagcacttattaaagcaatagagtag

SEQ ID NO: 279008 - DNA, 1693 bp, Unknown
  Bacterial polypeptide expressing nucleotide sequence isolated from the Sargasso Sea
atgaccctaaagacatttaatcaggttacccaagttgatggcgcgcattttgccccgtctcaacagacattcgcacgttcgcatacgctcaaggcgacgctggcatatcatagcgacccactgcgcctgtaccagcacatcacccaagatgtaccccataccatgttgttagaatcggcagaaatcgacagcaaggaaaatcttaagagcatggtgatgacccatgcggcgctgatgatccgctgcgatggctatcgtttacgctttagcgcactgagtgacaatggcgtcagtttactcgcccccatcgagcaattttttattgctcgttcaagccaaactcaatgccaacgcgatggccacaacttagtggtcacgctgcaaaaggacactgagcttaaggatgaagatgcccgcttaaaatccacctcgcccctcgatggtttgcgcttgtttgtaaagcatatcgactgcggccagacgccagcattcgaagacttatttttaggtggcgtgctctcctacgatttgattgataccgtcgagccactgcctgaagcaccaaatggtgcaaatgattgtcctgattatttattttatctcgccgaaaccttaattcttatcgatcacaagcaaaagcaagccgagatcatcacccacaacttcagtgaaggttcagcaaaacaggttgaagtgacccaagccttagccgagcgagcagagaatatccgcgcccaatgtgaagccttagttaagagtgcaatgcctgcgcccgccctcattggcataacggccaaagagcaagtgaatgtcagtgatgaggacttcaagcaaaccgttatcgatttaaaagaacacattattgctggcgacatcttccaagtcgtgccttcacgtaactttagcctgccctgccccaataccttgggagcttaccgcgcactgcgtttaaccaaccccagcccctatatgttttatttcaggggccatgacttcaccctgtttggcgcctcgcccgagagcgcgctgaaatatgaagccagcaataatcaggtcgaagtctacccgattgcaggcacccgtaagcgcggcaaaaccgccagtggcgagatcgatttcgacctcgatagccgtatcgaactcgaattgcgtttggataaaaaagagctctccgaacatttaatgttggtcgatttagcccgtaacgatatcgcccgtatcagccaaagtggcagccgcaaagtggccgagttacttaaagtcgaccgttattcccacgtgatgcacttagtcagccgcgtcacaggtcaactacgccaagacttagatgcgctccacgcctaccaagcctgtatgaatatgggcacgctagttggcgccccgaaagtgcgcgcctcgcaattggtgcgtcaagcagaaaagacccgccgcggcagctacggcggcgccgtgggttacctcaacgcccttggggatatggacacctgtatcgttatccgctccgcctttgtgaaaaacggcgtggcccatatccaagcgggtgctggcgtggtgtttgactccgatccccagagtgaagccgatgaaacccgccaaaaggcgcaggcagtgatttcggccatcaagatgggcgctggcttggatgacagccatcaagcgacaacgaccactacgactgaacaacaaagataag

SEQ ID NO: 279009 - DNA, 1459 bp, Unknown
  Bacterial polypeptide expressing nucleotide sequence isolated from the Sargasso Sea
atgaaactaaatgttggtctatacgaatttaaaaaagcatatcaccaaaaaaaaaatcaagttttatactgtaagataaaatccaaaagttcttttgaagttgaaaatttgattaacaactttttagaagacagaaatagttttatttttgagtctgtagaaaaaggtaaaataaaaggaagatacacaatttttggtaagggaccagataaaatatgggagttcaatcaaaaaaaaatttcttcaattatattaggaaagaaaaaaattataaaaggcgatccaaaaattatattaagtaaaataatagataattttaggtttaaaatcccatcttcattgccgcctatgtgtagtatgatagctggatacttttcttatgatacaattaggtatatagaaaaaattaaaaattcttgtaagaacgacctaaagctacctgatattagattgataagacctactactctaataatacatgataatgttaaaaaagaaattttttttgtcaaaaattttttttcagacattaaaattaataatctagaaaaaaagtattttgaagtacaagatgaaatcaatagtttattgataagttcaagagtttctaaatttcaaaaggataacacaaaaaaaaaatttagcgttaaatcaaatatttctaaaaaaagattttttcaaattgtaaacaaagctaaacaatatataaagaaaggtgacatattccaggttgtcttaagccaaagatttgagacaaaacttacaaaaaaaccaattgagatttacaagaaattaagagtaactaacccttcaccgtttatgtttttctttaattttaatgactttcaaattattggcgcaagtccagaaatattggttagattaagaaataatgtaattactgtaagaccaattgcaggaacaagacctaggggaagaaataataaagaggataatttattaaaaaaagatttaatcaatgataaaaaagaattgtctgaacatcttatgcttctcgacttaggtagaaatgacgccggaaaagtttcaaagataaatacgataaaagttactgaaaaatttaaaattgaaaaatattcacacgttatgcatattgtttctaatgtgacaggtatctatgataaaaaattctctaaatttgaggctttaatggctgggtttccagcaggcacagtttccggagcacctaaaataagagcaatggaaataattgatgaacttgaaaaaaatagtagaaaaatctacgcaggaggaattggttacttttccgcaaatggagatttcgatacctgtatagctcttagaacagcaataacaaaaaataacaaattttatgttcaggccggagctggaattgttgcagatagtaagccaataaatgaatataatgaaacaattaataaagcaaaagctttaataaagtctctagaaaaatgaa

SEQ ID NO: 279010 - DNA, 1048 bp, Unknown
  Bacterial polypeptide expressing nucleotide sequence isolated from the Sargasso Sea
aatagtacaaaaaatgatttgaatattcccgattgtagaattttaaggcctagagaaataattattcacgataattatgataaaaaaatatattttataataaatatttttaaagatgaaaaaatcaataattttaagaaaaagttctcagaaattaatagacaaattgaagaaatggtttttttatccaattacaatacacctagtttagaacagaattttaaaaatttaacaaaaattaaatcaaatattaataagaaaaagtttatacaaaatgtaaaaaaagctaaaaaatacattaaaattggtgatatttttcaagttgttctaagtcaaagatttgaatgcaaattaattaaaaaaccgattgaaatatataaaaaacttagaaaaacaaacccttctccatttatgtattttttcaatttcagtgattttcaaattataggcgcaagcccagaaatccttgtaagactaagaaataacaaaataacaataagaccaatagctggtactagacctagaggaaaaaataaaaaacaagatcaattttttgaaaaagatttattaaaagataagaaagaattatctgaacatttaatgcttttagatctaggaagaaatgatgcaggaaaagtttcaaaaattaattcagttaaggttactgaaagttttaaaatagaaagatattctcatgttatgcatatagtatctaatgttgagggtacttttaataaaaaattttcaaaatttgatacacttttatctggatttccagcaggaaccgtttctggggcacctaaaattagagctatggaaataattgatgaattagaaaatacaagaagaaaagtttatgctggaggaattggttatttttctgcaaatggtgactttgatacatgtatagctttgagaacagcagtatctaagaataataaattttttgttcaatcgggtgctggaattgtagctgatagtaaacctattaatgaattcaacgaaactgtaaataaagctaaagcattaataaaagcactagaataat

SEQ ID NO: 279011 - DNA, 1132 bp, Unknown
  Bacterial polypeptide expressing nucleotide sequence isolated from the Sargasso Sea
ttttccaacactagttggtatttaggatatcctatgatccagcatattgaaaatattaaacttaaaaataaagataatataaaaattcctgatgcaatattaataagaccaaaaatagttgctgtctttgataatattaaagatgttatttctcttatgtctgttacttatccaagtgaaaaaatttcagctgaaaatgcatataaaaaaaatatatcactaatagaaaaaactattaaaaaacttgaaaaaagtgttttaaaacctgcacaaaataaaaatataaaatctaaactaaagtttaaatctaatttcaaaaaagaacatttctataaaatagttaaaaaagcaaaagaatatattaaaaatggagatattttccaagttgttccttcacaaagatttgaaacaaaatataatttaaaggcagtaaatctttatagatcattaagacgactgaatccatctccttaccttgttaatttaaactttgataaaattggacttgttgcatctagtccagaattaatggttcaattaagaaataaaaaagttactataagaccaattgctggaacaagaaaaagaggtaaaaatgcctctgaggatatgtttttatctaatgatttattgaatgataaaaaagaacttgcagaacacttaatgcttttagatttaggaaggaatgatgttggtcgagtttcaaaaaaaggaacagtaaatgttactgaaaaaatgattattgagtattattctcatgtaatgcatattgtttcaaacgttgaaggtaaaatagatgaaaatttagacgctctagatgctttaatggctggatttccggcagggacagtttcaggagcgccaaaaataagagctatggaaattattgaagaacttgaaaatttaaacagaagtttttatgcaggttgcatgggttattttgattctaacggcgatatggatacctgtattagcctaagaacagggcttgtaaaggataataaattatatattcaagctggtgctggaattgtttatgactccgttccaaaaaatgaacatcaagaaattatgaataaggctggtgcattaatggcagctgccgaggattcatacaaatttgatttatgat

SEQ ID NO: 279012 - DNA, 865 bp, Unknown
  Bacterial polypeptide expressing nucleotide sequence isolated from the Sargasso Sea
ttctgcaaccatgtgctggacttaaagcagcacattttagcaggcgacatttttcaggttgtgccctcgcgcacattctctctcccctgcccgtcgccgctacttgcttacgctaaacttaaagaatcaaacccaagcccttacatgttttacatgcaagatgtcactttcagcatatttggtgcctctcctgaatcagcgcttaaatacgaaagagaaagcaatcaagtagagatctaccctattgccggtacccgtccacgcggcaagcgccctgatggcagtatcgacagagatttagacagccgtattgagcttaaccttcgcgaagacaccaaagaaaagtctgagcacattatgctggttgaccttgcccgaaacgatgtggcaaaagtgagtcgcccaggtacgcgctatgtgaaagatttgctaaaagttgaccgttactctcacgtgatgcacttggtgtcgcgcgtggttggccagctacgtgacgacttagatccactgcacgcttatcaagcctgcatgaatatgggcactctagttggcgcaccaaaagtaagcgcagcaacgttaattcgtgaagtagagaaaaaacgccgcggcagttatggcggcgcggttggctacttgaatggtcaaggcgatatggacacttgtatagtcattcgctcagcgtttgtgaaaaacggcacggcttatattcaagcgggtgcaggtgtagtatatgactcggttccacaagctgaagctgatgaaacccgcgctaaggcacaagcggtaattggtgcagtaaaagcagcgctacaagaagaagctgaaagtatcaacgttgcgttaaatgaaggaggcaacgcatgaa

SEQ ID NO: 279013 - DNA, 1024 bp, Unknown
  Bacterial polypeptide expressing nucleotide sequence isolated from the Sargasso Sea
tatgccagacatatatctagtcaaagcagaaaaattaattgtttttgataattttaatcaaaagaaatttgcaatttacaatgcgaatccttctagctcatcttatgaggaagcaattaattccgtttcagagataagtgatagcatagatcaggcttttgaaaaagttggacaagattttaaaaaggtaaaaggtgagcttgagtttcaatcaaatttttcaaagaaagagttcatcgccgcagtcaattcagtaaaaaattatattgctgagggtgatgttatgcaggttgttttagcacaagactttaaaatgccatttcatggcgactcttttcatctttataccgcattaagagagcttaatccttcaccatatatgtattatctcaaccttaatgaatgtaaagttgttggcgcatctcctgaaatattgattaggcttgaaggaagccaagtcacactaagacctattgctggtactcgaaaaaggggtgctaatgaagaagaagataagataaatgaaaaagatcttttaagtgatccaaaagaattagcggaacatttaatgttaattgatctaggaagaaacgatgttggtaaagtttcaaaaataggtagtgttaaagtaactgaaaaaatgatagttgagaaatattcccatgtaatgcacatcgtttctaacgtggtaggacaaatatcagaaggtctaaaggccatggatgtattaaaagcaacacttccagctggtactctttctggtgccccaaaaataagagcgatggaaattattaatgaaatcgagcctagctctagagggatttatggaggagcaattggatatatttcatggaatggcgacattgatacagcaattgctatcagaactgcagttataaaagatcaattaatgcatgtaggtgcgggtgcaggaatcgtagcagattcagatcctgaaaaagaatggcttgagtgcatacaaaaatcacaagtttttattgacgctatggagatgatctcatga

SEQ ID NO: 279014 - DNA, 1582 bp, Unknown
  Bacterial polypeptide expressing nucleotide sequence isolated from the Sargasso Sea
atgaatttacagcaaattactaccaccacaggacaagtggccagcttcagccaaactctgagcattcagcctgatccgctgcaaagcttcagagctttaaccagccagggccaaatggcgttgttactggaatcggctgaaattgacagcaaaaacagcttaaaaagtctgatgctgattgacgccgctttgcgtattgagtgcaattccttagcagtaaaagttgaagccttaacagacaacggcaaaacgctgctgccttatctggcgtctttgctgcaaggcaaagcagagctggaactttcccctactctgttacaggtgcagtttgccaaagccgacccgctactggacgaagaaagccgcttgttgctaccgaattcgctgactgtattacgtttgctgcaacagcagttgcagaacaacagcgacgagcatttagccatctttttaggcggtgtgataggttacgacttagtcgctatggtggaagatttaccccaagtgccaaccgctgaaaaccaatgccctgactacctgttttatctggctgaaactttattagtggtcgatcatcaggcaggcaatagccgtctgattggtaatgtgttttgtggcgctcaagcccagcagcagtattttgttataggtcagcgcctatcagaactgcagcagttattacagcaagcagcagagccaacagcagcaacagagcctgcagccaaagctgaagttaaagtcgatatcagcgacgccgactttgtcgcccaggtcgaaatgctgaaacaaaacattgtggctggtgatgtatttcaggtggtgccgtcgcgttgtttcagcctgccctgccctgatccacaagccgcttacgccaaactcaaacaacaaaacccaagtccttacatgttttacctgcaggacagaaacttcagcttatttggcgcttctcctgaatcagcattgaagtatgaagctcatacagcccaagttgaaatttaccctatagcaggcacacgccgccgtggtttcgctgccaacggcggtgttgaccgcgacttagacagccgtattgaactggaactgcgtcaggacgaaaaagaaaaagccgaacatttaatgctggtcgacttagcccgtaacgacgtcgcccgtatcagcgtgccaggcagtcgttatgtcaaagagctgctcaaagtcgaccgttactcctatgtaatgcatttagtctctcgtgtcgtcggtaccttaaaaccagaactggacgctttgcatgcctatcaggcttgcatgaatatgggcaccttagtaggcgcgcccaaagtgcgggcagcggaactgattcgtggtgtcgagaaaaaacgtcgtggcagttacggtggtgcagtcggctatttagcaggcaatggcgactttgacagctgtattgtgattcgttcggcttatgtgcaaaacggcacagcttatattcaggccggtgctggtgtggtgtacgacagcgtagcgcaagccgaagccgatgaaacccgcagcaaagctcaggctgtgattaacgctattcaatctgcaggagctgccgtatgag

SEQ ID NO: 279015 - DNA, 1459 bp, Unknown
  Bacterial polypeptide expressing nucleotide sequence isolated from the Sargasso Sea
atgaaactcaacacaagttttaaaaaatttaaacaattacataaaaaaaaatataaccaagcgattcatttttctttcaaatgtaacaattatgcttttgttgaaaatctttataaatttattttggttcaaaaaaatagtttcatatttgagtcagttgaaaaaggtaaaataagaggaaggtatactataattggttttaatcctgataaaattcttaatatcaaaaaaaatgtaatagtagaggatgacttaaaaaaaaagaagataattaaaaaaaatatattaaaatatttaaataacctttttaagaattttaaagttaaatcatctaaagagttgcctagaatgtcatcaatgttggtaggatatttttcttatgacattattagattaattgaaaaaattcctaataaatgtaaagatgatttgaacatacccgacattagattaatgcggcctaaaaatttaattatttatgacaatgtgaaaaggaagattttttatattgagaatatatataatgatcaaaaaatatatgattaccaatctgagtatgaaaagataaagaatacgttaaacgagcttcataattacggaaatatacctctgcctgaaaattttcatattagtaataaaaaaataaatataaaatctaatatatctaaatctaaatttaaaaatattgtaagaaaggcaaagacttacataaaaaaaggagatatttttcaagttgttttaagtcaaagattcagtgctgaaataaaaaagcccccattagaaatttataatactctaagaaaatctaacccttctccatttatgttttatttcaattacgatgattttcaagttttggggagtagcccagaaatattggtaagattggtaaagggagaagtaacaattaggcctatagctggtacaagaccaagaggaaaaaacactaaagaagataaaaaattaactgatgaactacttaatgatcctaaagaattatctgaacatctaatgctattggatcttggcaggaacgatgtgggaaaggtctctaaagcaaattctgtaaaagttacagagaagtttaaagtagaaaaatattcacatgttatgcatattgtgtcaaatgttattggaaaattgagaaaaaatttttctctttttgaaacttttttatctgggttccctgcaggaacagttagtggtgcacctaaaataagggctatggaaataattgatgaattggaagtctctaaaagaaaactatatgctgggggtattgggtatttcacctcaaatcaagaatttgatacgtgtattgctttaagaactgctttaattaaaaacaaaaaaatttatgttcaagctggtgctggtgttgtagctgacagtaagcctgaaagtgaatacaaagaaactataaataaggcaaaggctttaatgcaggcgatatattaat

SEQ ID NO: 279016 - DNA, 1396 bp, Unknown
  Bacterial polypeptide expressing nucleotide sequence isolated from the Sargasso Sea
aatgagcacatattttgacattgaattacaggatgagacacccgcatcggtgttcatgaagttgcgtgagcttactccaacttttttactggagagtatcgaaagaggggtcgaccaatcaagatactcatttttgggcataggagcagctcaatccattcaagtgagagatggaaatttcattttaaatggggaaaaagtaagcaagccaagctctcagtccgaagtgatgaatttgtttagaaaaacactcaaagaaacccctgatttaaaacctgcaatcgaagacataccattttcaggaggtatggtcggcttcagttcatttgatatgattcgtcatttcgagaaattgtctgtacccaagggaaaaaaaggcattttaagccctccagattgttcatatctttctccaacttcacttttggtctttgaccatgaagccaataagatggcacttcttcattctggaaatgaggaagaaagaataaatttaaggtctgaaatactcacaatgctcaacaaggagatcacccaaacacataaaaataagacatactccgagccaattggaaatatcaatgaagaaaacttttatgatgccgttgaaacagcaaagcatcatatttttgaaggagatattttccagatcgttttatccattgctttctcaggaagttatgaccttgatccttttgatgtctatcgagcaatgcgattgatcaacccatctccttatatgttttattgtgaatcagatggtttcaaaattgcaggatcttctccagaggctctggttagattgggaggtaataaagcatcactcaggccgatcgcagggacaagaccaagaggcaaagattcagaagaagacaatttaaataaagaatcactactcgcggatgagaaagagatcgcagaacatatcatgttggttgatcttgcacgaaatgatcttggacgtgtcgcaaaacatgggtcaatcgaggtcgaaccatatcaatcgattgaatactatagccatgtgatgcatatcgtcagtggtgttcaaggcaatttagaagatgacaaagatgcctttgatttatttgccgcagcttttcctgcaggaactttggttggcgcaccaaaagtcagagcaatggaattgattgatgaaattgagccagaactcagaggtgtttatggaggcactgtaggctatttttcaaagaatggagacatggatcaggcaattgcaattcgaaccattgttttttcagatgagaaatattgctttcaggcgggtgcggggattgtagctgatagtttgcctgagaatgaatacaaagaagtcttagcaaaaagccagattctcagaacagcattaaaaatggtgaaagagggtgagttatga

SEQ ID NO: 279017 - DNA, 1018 bp, Unknown
  Bacterial polypeptide expressing nucleotide sequence isolated from the Sargasso Sea
tgcaagaattttgagaccaaaaaatcttatagtttttgataacgtagaaaaaaaattattttttatagttaattgtttttctgatgaaaaaatcaacaattatcaagctaagtatgaccaaatacaaaaagaaatagaggaaatgatttttttggcaaactatagttacaaaataaaccaaacaaaaaccaaaattttcaaaccaaaagttaaatcaaatatctcaaaaaagaaattccttatcaatgtttctaaagctaaaaattacattaaaataggagatatttttcaagttgttctaagtcaaaggttcgaaacagatctcaacaaagaaccattggatatttataaaaaattgagaattactaacccttcaccttttatgtatttttttaattttgaagattttcaaattataggtgcgagtcctgaaatacttgttaggcttagagataataagattactattagacctattgctggaacaagacctagaggtaaaaataaaaaagaagataaattttatgaaaaagatcttttaaaggataaaaaagagctttctgaacacttaatgcttcttgaccttggaagaaatgatactggaaaagtttctaaaattaactctgttaaagtaaccgaaagttttaagatagagcgatattcgcatgtaatgcacatagtctcaaatgttgaaggtgattttaataaaaaatttggtaaatttgatacgttattagcaggttttcctgctggaacggtatcaggtgcacctaaaataagagctatggagattattgatgaattagaaacgactagaagaaaagtttacgctggtggtattggttatttttctgcaaatggtgattttgatacttgcatcgcacttagaactgcaatttcaaaaaataaaaaattttatgtacaatcaggtgcaggaattgttgctgatagtaaacctattaatgaatttaatgaaacagttaataaagcaaaagctttaattaaggctttggagtaa

SEQ ID NO: 279018 - DNA, 1492 bp, Unknown
  Bacterial polypeptide expressing nucleotide sequence isolated from the Sargasso Sea
atggaaaaaaaaatttccattgattataaagattttaagaaaaattataattcaaaagaacctcaattaattattctaaaatttagttcagattttgtggacccagttaacagcttcatgaagatatctgatgatatggaaaatagttttctttttgaatcattaaaagatggtgatttaagcggaagatactctgttattggaataaaaccagacaaaattttaaaaatcacaaataaaacatccaaaatatatatagataataataatattgaagaagttattaatgataacccaatcgaagcaattaggtatttcattaatagtagtttaataaaaaaaaatgatgatattccttcgatagcatcaggtatatttggttatattggttatgattttgtagcaaatattgaagatcttcctaaagaaaaaattgatgagtttgatgttcctgatagcattttattgcggccttcaataacagttgtctttgataaagagttaaaagaaatccttatatgtaaggcagtttggtatgttgatggtgttgatgcagataatgcatataattttgctcttgatgaaataaataaaattaaagataaaattcaatctgataaaattatcgaattaaaaaaagaacaaaaaaatttaggcgagtccagatctaattttactaaagaacaatattttgaaaatgttagaaaagctcgcgaatatatcaaagctggcgatatatttcaggttgtacctagtcaaaggctgtctgttaaatttaaagcacatccatttttactatatgagtcattaagaagaattaatccatctccttacatgtattatataaagtttaaagacttttatattgttggatctagccctgaaaccttagtcaaagttgaaaaaaataaagttataattaaaccaattgcaggaacaagacttaaagaaaaaggaaaagaaaatgaaataaaggaatctttattgtctgatcctaaagaattagcagaacatctaatgctccttgatctaggaaggaatgatgtcggaagagtttcaaaaattggctcaataaatgttagagagtcatttcaaatccaggaaacatcacatttatatcatatatactctactgttgaaggcgaattaaaccctaaagaagacagagtaacagctttatgtgcaggttttccggctggaacagttacaggagctcctaaaattagggccatggaaataattaatgaaattgaagatagaaaaagaggtatatattctggagcagtaggttatttttcatcctttggtgatatggacacagctatcgcgctaagaacagcaattataaaagacaataaaatgtatgttcaagccggaggaggagttgtttatgactccgatgaagagtatgaattcaatgaaacattgaataaagctcaagcattattcacagctgcaagggatgtttttaatgaaaagagtaagaaatgat

SEQ ID NO: 279019 - DNA, 963 bp, Unknown
  Bacterial polypeptide expressing nucleotide sequence isolated from the Sargasso Sea
atcaaaaatatcatgatgcgctagccgaagctaatacttcaatagattttgttctcgatctactcaaaaaaccctttgatgaaacatatattccaaccaaccaaaagaaaattaatataagctcaaacacgacaaaagatgactacctcaagatggtagagaaagccaaaaactatatttatgagggagacatcttccaagttgtgctgagccaacgtttcgagtcaaattttgaattgcccccatttgaattataccgatcattacgtagaataaatccatcaccgtttctattttacctcaattttgatgagtttgctgttattggttcaagtccagaaatacttattcggctttttagtgatgaaataacagtaagaccaatcgcgggcacgagaccaagggggaaagatcaggctgaagatgataataataagaactcattactctctgatccgaaagaacttgctgagcatttaatgttgcttgatttaggccgcaatgatgtaggtaaggtatcgcaacttggaagtgtaaaggttacagataaattctttgtagagttatacagccatgttatgcatatagtttctaatgtgatcggaaaacttgatagtaagttcaatatgattgatgtcctaaaagctggatttcctgctggcacagtatcaggggcacctaaaataagagcaatgcaaataatagaagagcttgagaaggagcgcaggtctatatatgctggatgtgttggttacttttcagcagcaggagatatggatacatgcataacactaagaactgcaataattaagggtaactcaatgtatgttcaagcaggtgctggaatcgttgcggactctaatcccgaaagtgaataccaagaatgcaaatcaaaggcctccgccctattcaatgcagcacaagacgcccttgatatgaacagcagcagggcagaaaaatgat

SEQ ID NO: 279020 - DNA, 1048 bp, Unknown
  Bacterial polypeptide expressing nucleotide sequence isolated from the Sargasso Sea
tttgggaggcgcagtaggaaatattgattatgatgcaattaggttatttgaaaatattccaggtaagaaagatttagaaaaaccaataatggaatttggaatttacaacgacggtatactttatgataacaaaaagaaacagtttttctatttttattatgatgaagatagaaaagacaaaattaaaaaaacagatgaagacgtaggaacatttgaaatgtcagatattgatataaatctgaacaaagaacaatttgaacgaattgtcaataaagcaaaggaatatgttcacagtggagatgtatttcaagttgtcttgtctagaagattttcatttgaagcaaaaggagattatttacgagtgtatgaaaaacttcgagaattaaatccgtcaccatatatgtttcacttaaaaatggatgaaaatgtaatcattggatcaagtccagaaatgttattgagagttactggaagagatgtagaaacttttccaatagcaggtacaagaaaaattactgaagatgaagagaaaaatgaaaaattaaaaaatgaattgttaaatgacgaaaaagaacttgcagaacatacaatgcttgtagatttaggtagaaatgatattggaagggtatgcgattatggaactgttaaagtaaaagaactaatggagataaagagattcagccacgttcaacacatagtaacacacgttgtaggtaaattgaatgagaaaaatgacatgtatgacgcatttgaagcagtttttcctgcaggaacagtctcaggagcaccaaaagtaagagcaatggaaataattcaagaactagaaccaactcaaagagaaacatatgcaggagctgtaggttatttttcatttaacggatgctgtgattttgcaattgcaattaggagtatttttgccaataaagaaagaggatttgtacaggcaggtgcaggcattgtatttgattcaattgcagaaaatgaacttaaagaaaccgaacataaagcaaacgcaatgattacggccttaaaggaggcatcaaaatga

SEQ ID NO: 279021 - DNA, 817 bp, Unknown
  Bacterial polypeptide expressing nucleotide sequence isolated from the Sargasso Sea
ttatagtaaaaaaaagtattttcaaattgttgataaagctaaagactacataaccaaaggagatatttttcaagtagtaccttctcaaagatttaaatctaattataatctaagcgctcaaacattataccgttctcttagaaggttaaatccctctccttttttagtaaatcttaactttaataattttggtttagtagcttcaagtccagaaattttagttagattaagaaaaaacaatataactataagacctattgcaggaacaagaaaaagaggaaaaactattaatgaagatattatcttatcaaaagatttgttgaatgatgaaaaagaaattgctgaacatttaatgttactagatcttggaagaaatgatgttggaaaagttgctaaaattggttcagttaatgttactgaaaaaatgattatagaatattattcacatgtaatgcatatagtttcaaatgtagaaggtaaattagatcccaaatttgatgcaattgatgcattaatttcaggttttcctgcaggaacagtatctggagcacctaaaatcagagcaatggaaattatagaagaattagaaaatgttagtagaagtttttacggaggtgcaatgggttattttgattctaatggagatatggacacttgtataagtttaagaaccggattggttaaagataaaaaattatatattcaagctggtggaggaatagtttatgactcagatcctgaaaaagaatatcaagaaaccattaataaagcgaatgcactagttgctgctgcagaagactcgtataaatacgaatag

SEQ ID NO: 279022 - DNA, 817 bp, Unknown
  Bacterial polypeptide expressing nucleotide sequence isolated from the Sargasso Sea
atgtcaaattttacaaaagatgaatatattagctctgttaaaagaatcaaagaatatataaaagacggagatgcaatgcaggttgtattagctcaagatttttatagtacatttgatggcgattcttttaaattatattgtgcattaagaaaaatcaatccatctccttatatgtactatttaaatcttgatgaatgtgaagtagtagggtcctcccctgaaatactagttagattagaagaagatgacatcactctgaggcccattgctgggacaagaaaaagaggtcagaccaaagaggaagacaaaaataatgaacttgatttattaagtgacccaaaagaattggcagaacatcttatgcttatagatctaggtagaaatgatgttggaaggatttctgaaataggaagcgtaaagttaactgagaaaatggtgatagaaagatactcccatgttatgcatatagtctcaaatgtagaaggcaagctttcaaaaggattgacttttattgatgctcttaaagctactttgccagctggaactctatcaggcgctccaaaaattcgagctatggaaataattaatgaacttgaaccaagttctcgtggtatttatgggggtgcaataggatatatttcatggaatggaaatattgataccgcaattgctataagaactgctgttataaaagataaaaaaattcatgttggcgcaggggcaggaatagttgctgactcagatccagaaaaggaatggcaagaatgtgttcaaaaatcaaaagcattcttagatgccatggagatgatttcatgat

SEQ ID NO: 279023 - DNA, 1429 bp, Unknown
  Bacterial polypeptide expressing nucleotide sequence isolated from the Sargasso Sea
aatgtcaaaaaagattcataagaaaatcccggttataagagaggcgctcgccgatctggatacgccattgtctgtctatctcaagttggcgaacgaaccatttacgtatttgcttgagtcggctcaagttggcagcgaagacggaggaaagtgggacagatattcaattattggaatgcgatgccctacgagaatccgagtagtaggaactcaaatcgatgttttcaatgatgatcaaatcgtggagtccctttgtacatccaacccactttcttttattgaagaatttcaatctagatatcaggtggcggattgcgatcaagacattcgcttcataggtgggttggtaggctactttggctacgataccgttcgatatgtcgaaccaaaactcctgtcgagctgtccaaaagacaacttaaacactccggatattttcctgatggtcagcgaagacattattgtctttgataacttaaagggccgaatgaaattagtttctttagccaatcaagatgaccccgattctattgcaagaacatcgaccatcctcgatacaagagtggagaagcttgaaaagacctcgacgccggaccttaaaaccggggaaaacaagcccttatcggaatcggacttctcttccgaatatggcgaaaaagccttcaaagaggatgtagagaaaatcaaggaatacacgaggacaggggatatcatgcaggtagttctgtcacaacgaatgtcggtgccttttgattgtcctcctattaatctctatcgatcactaaggaatctcaacccctctccctatatgtactttatggacatgggagattttcaaattgtgagttcctcccctgagatacttgcgaggcttgagaaagggaagattactaatcgacctctagctggaacgagacgaagaggtcatgaccctgacgaagacatcaggctcgaggtagagttgaagaacgaccctaaggagctcgccgagcacctcatgctgatcgacctagggcgaaacgatgtgggaaaggtttcaacagctggcagcgtttgcgtcactgaaaaattcgttattgaacgttactcccatgttatgcacctatcctcgaacatagagggagatatccttccagagaaaaacgcacttgatttactgcgggctacactaccggttggaactctatctggtgcccctaaagtaagagcgatggaaattatcgacgaattagagcccacaaaacgtggcatctacggcggagcggtaggatatatctcgtggaacggaaatatggacaccgccatagcgatcaggactgccgttataaaggacaaaactctgtatatccaatcgggcggggggatagttcacgattctgtgccggagctggaatggaaagagagccttaataaaggcagagcgaattcg

SEQ ID NO: 279024 - DNA, 1495 bp, Unknown
  Bacterial polypeptide expressing nucleotide sequence isolated from the Sargasso Sea
atgaccgaactcgaatttcaatcgctcgcgaacgaaggctacaaccgcatcccgctgatcgcggaagccctcgccgatctcgaaacgccgctgtccctctacctgaagctggcccagcccgaacgctcgggcgccaactcgttcctgctcgaatcggtggtgggcggtgaacgcttcggccgctattcgttcatcggcctgcccgcccgtacgctcgtacggacccgcaacggcgtgtcggaagtcgtgcgcgacggccaggtcgtcgagacacatgacggcgacccgttccagttcatcgaatcgttccaggcgcgcttcaaggtggcgcaacgcccgggcctgccgcgtttctgcggcggtctcgccggctatttcggctacgacgcggtgcgctacatcgaaaagaagctcgcgaataccgcgccgcgcgacgacctcggcctgcccgacatccagttgctgctgaccgaggaagtcgcggtgatcgacaacctcgccggcaagctgtacctgatcatctacgcggacccgagccaggccgaagcctatacgaaggcgaaacagcgcctgcgcgaactgaagcagcgcctgcgcacgaccgtgcagccgcccgtcacgtcggcgagcgtgcgcaccgagacgttccgcgagttcaagaaggacgactatctggccgccgtgcgccaggcgaaggaatacatcgctgccggcgaactgatgcagatccaggtcggccagcgtctgacgaagccgtaccgcgacaatccgctgtcgctgtatcgcgcgctgcgttcgctgaacccgtcgccgtacatgtactactacaacttcggcgatttccacgtggtcggcgcatcgccggaaatcctcgtgcgccaggaaaagcgcggcgaggaccagatcgtcacgattcgcccgctcgcaggcacgcgaccgcgcggcaacacgcccgagcgcgacgcggaactcgcgaccgagctgctcaacgatccgaaggagatcgccgagcacgtgatgctgatcgacctcgcgcgcaacgacgtcggccgcatcgcggaaatcggctcggtgcacgtaacggaccagatggtcatcgagaaatactcgcacgtgcagcacatcgtcagctcggtcgaaggcaagctgaagcccggcatgacgaactacgacgtgctgcgcgcgacgttcccggccggcacgctgtccggcgcgccgaaggtccgtgcgatggaactgatcgacgaactggagccggtcaagcgcgggctgtacggtggcgccgtcggctacctgtcgttctcgggcgagatggatctcgcgatcgcgatccgcacgggcctgattcacaacggcaacctgtatgtgcaagcggcggccggtgtcgtcgcggattcggtgcccgaatccgaatggcaagagaccgagaacaaggcgcgcgcggtgctgcgtgcggccgaacaggtccaggacggcctcgatagcgacttctgac

SEQ ID NO: 279025 - DNA, 1231 bp, Unknown
  Bacterial polypeptide expressing nucleotide sequence isolated from the Sargasso Sea
ccattagaaatagtaaaggatgagattaagtgctttaaagtaccagagttagaagaattacccgtttttacaggaggtgcagtaggttatttatcttatgaaactatctcatattttgaaaatactgtttcaaaaaaagacaattcaaacttagaagttccagaatcaatatttcttcttactgattctttagttgtttttgatcatgttaagcaaacaatttttataattcattatgcaagaataaatcctgatgatgagcttgagaaaatatttttagaatctcagaaaaaaataaatgaaatttacgaaaaaataaaaaaacctattcctaatgaattcaacaatatctcaaatattagtaactctaataataaatctaatggagaattggttgaagaatatgaaaaaaatatgagtaaagatgaatataaagctgcaatagagaaatgtattgaaaatatttattccggtgaaataattcaggttgttttctcacaaaggcttactaaaaaaactaaagcttctgctatagaaatatatagatgcttaagaacaattaatccttctccatatatgtttttgcttaatttagatgaattccaaatactaggggcttcacctgaattactggtcaagtcatctaataaacagcttagtgtacatcctatagcaggaacaagacctagaggagttgactctgaagaagatgaaaaaattgctaatgagctaataaatgatgaaaaggaactcgctgaacaccttatgttgctagatttagggagaaatgatgttggtagagtatcaatgcctggttcagttaatgtaaatcaaaagatggaaatagaaaaatactctcatataatgcatatagtatccaatgtaacaggaactcttaaagatgaattagacgaatttgatgctctaagagctgcgtttcccgctggaacagttagtggtgcaccaaaggttagagctatgcaacttatatctgagctagaacctgaaaaaagaggaccttattcaggaggtgtaggatatttctcatataatgggaatatggatacatgtattgctataagaactctagtcctcaaagatgaaactgtttatatacaagctggtggaggaatagtagctgattcaaaagttgaaaatgaatatgaagaaactttgaataaaatgatggctttgattcgatcagttgatgaagcagaaagaaatttataat

SEQ ID NO: 279026 - DNA, 1483 bp, Unknown
  Bacterial polypeptide expressing nucleotide sequence isolated from the Sargasso Sea
atgaaaaataaattaacaaaaaaagaatttaacttgcttgcaaaagatggaagaaaagttgtgccttttttcaaaagaataatggcagatacgattacacctattgcagcttgggcaaatttatcaatgcactccgattacggattcattcttgaatctgtggagaaagcaaagaaaaatggtagatattcttatgttggcataaatccatcaaggatttttgaatatgatcaaaggactttatttgaggttattaatggtaaacgaaaaaaaatagatgctaacttctttgattttttgaaaaatttaaatgattcacataaaagccaaaaactagatcaacttccacattttactggaggaattgttggttactttggatatgaaatgattgattttttcgaaaatgttccagtcaaaaaaacaaaatatttacaaatacctgattcaaaatttatgctttttgaagacataatagtttttgatcacttaaatggtgacgctattgtagtatcaaacatcaatcttgaaaaaagtgaagatttaaatgaactttttgatgaggctaattctagagttgattctattggaaatttattacattcgaaccacgaatttagaactccattagtcacaaaatcatttcctacaatttctaactttgaaaaaagtgaatttgaaaaaattgttaataaagcaaaaaaatatgttaagtctggtgatatttttcaagttgtgttgagtcaaagatttgagcgaaaaaccttatctgaacctttgaatgtttacagagcattaaggtctattaatccttcaccatatatgttccatttaaaaattgattcatttgatgttattggtgcttctcctgagcttatgattaaagtacaagaaggtgaagttgaaattcgtccaatagctggtactagattgaggggtaaaaattcaactgaggatgaaagaaatgctcaagatttgttaaacgataaaaaggaattagctgaacacttgatgttgcttgatttaggaagaaatgatgttggaagagtttctgaatttgatagtgtcaaaattaaagaaaaaatgaatattgagatgtattcacatgtgatgcacatcgtttcagatgtcagaggaaaacttatgaaagataaaaatatttttgatgctttaaaaagtggttttcctgccggtacagtttcaggagcaccaaagataagagcaatggagataattaatgaattagaaaatgatagtaggggtattttctcaggagcgattggttttatagattttaacggaaacttaaacacttgcatctcaataagaactatgattttaaaaaacgaaattgcatactttcaagctggagctggtattgtttatgattcgattccatcaaaagagtatgatgaaaccgtaaataaagcaaaagtcatgaatgctgcaattgatcttgctgaaaatggattgataaaatgat

SEQ ID NO: 279027 - DNA, 594 bp, Unknown
  Bacterial polypeptide expressing nucleotide sequence isolated from the Sargasso Sea
ttttagtaaggttagagaaagacgaaataacattacgaccaattgcaggtacaaggaaaagaggcaaaaacgaacaggaagacaaactaaatgaacaagatttgttaaatgatccaaaagagcttgctgaacatttaatgcttattgatttaggcagaaatgatgttggtagagtggctgatataggttcagtaaaagttacagaaaagatgataattgagagatattctcatgtgatgcacattgtttctaacgtagttggtaaattatcttctgaacttagttttatagatgcactgaaagcgacattaccagctggcacattatctggcgcacctaagattagagcaatggaaataattaatgaattagagccaagttcaagaggtatttatggaggtgcaataggatatatttcatggaatgggaatattgatactgctatagcaatacgaactgcaattattaaagacaacttgatacatgttggggctggtgcaggcattgttgcagactcaaatcctgaaagtgaatgggaagaatgtcttcagaaatcgagagtatttcttgacgctatggagatgatttcgtgat

SEQ ID NO: 279028 - DNA, 825 bp, Unknown
  Bacterial polypeptide expressing nucleotide sequence isolated from the Sargasso Sea
atatcatgccaaatttagataaaaatgcatttgaagacatagttaaaaaagcaaaagagtatgttcatagtggagacgtatttcaagtagtactgtctagaagattttcttatgaaggaaaaggagattatctaaaagtgtattcaaaattacgtgaattaaatccatcaccatacatgttccatttgaaaatgaaggataatgttatcataggttcaagtccagagatgttactaagagtaacaggaaagagtgtagaaacattcccaatagcaggtacaagaaagatcactgatgatgaagaaaaaaatcaaaaattaaagaatgagttgctaaatgatgaaaaagaacttgcagaacatacaatgcttgtagatttaggtagaaacgacattggtagggtttgtgattatggtactgtaaaagtaaaagaactgatggaaattaaaagattcagtcatgttcaacatattgtaacacatgtagttggaaaattaagtgataaacatgacatgtatgatgcattccaagcagtatttccagcaggaactgtttcaggagcaccaaaagttagagcaatggagataattcaagaattagaaccaatacaacgagaaacttatgccggagcagttgggtatttttcatttaacggatgttgtgattttgcaatagcaattagaagtatttttgctgattcaaaaaaagggtttgttcaagcaggagcaggaatagtatttgattcaatagcagaaaatgaactaaaagagacagagcataaagcaaatgcaatgattactgcactaaaggaggcatcaaaatgaa

SEQ ID NO: 279029 - DNA, 824 bp, Unknown
  Bacterial polypeptide expressing nucleotide sequence isolated from the Sargasso Sea
aaaagatataaaggtaaaatctaatacgccgaaaaataagtttctaaagatggttaacaaagctaaagaatacattaaacttggagatatttttcaagttgttttaagtcaacgttttgaggcaaaattaacaaaaaaaccattggatatttataaaaaattaagaattacaaatccatcaccttttatgtttttttttaattttaatgattttcaaataattggagctagtccagaaatattagtaagattaagagacaataaaataaccgtacgaccgatagctgggacacgtcctaggggtaaaactactaaagaagatatttattacgaaaaagatttgctaaaagataaaaaagaattgtccgagcatctaatgcttttagatttaggaagaaatgatgccggtaaagtgtctaaaattaactctgtcaaagttaccgaaagcttcattgttgaaaggtactcgcatgttatgcatatagtttctaatgtaatgggcgaatataataaaaaattttcaaaatttaagtctttattagctggttttcctgcgggtactgtgtctggtgcacctaaaattagagccatggaaataatagatgaattggagacatcgaaaagaaaggtttatgctggtggtataggatatttttctgccaatggagaatttgatacatgtattgctttgagaacagcgatagctaaaaataaaaagttttatgttcaagctggtgcgggaattgttgctgacagtaaaccaatcaatgaattcaaggaaacagttaataaagcaaaagctttgattaacgctttaaaataat

SEQ ID NO: 279030 - DNA, 1459 bp, Unknown
  Bacterial polypeptide expressing nucleotide sequence isolated from the Sargasso Sea
aatgttgaatattgatctaaagttatttaagaaaaatcacaaaaaaagtaaaaatcaagttctttaccatgcgataaaatcaaatggtctaaaagaaatagaaaatttaattaataactttttaaatgtaagaaatagcttcgtattcgagtctgttgaaaaaggtttcataaaaggtagatatacaatttttggtaaaaaccctgataaaatttgggaatttaataataataactgcgttttgaagtatgaaaataaaagaaaaaaattaagaggaactccaaaagataatattgagaaaataatcgaaaattttaattttaaaataccaagtgaattaccaccaattagctcaattatatcaggatatttctcttatgatacaataagatatattgagaaaattcctaatacgacaaaaaatgatcttaaaattcctgatgcaagaattttgagaccaaaaaatcttatagtttttgataatgttaaaaaaaaattattttttatagttaattgtttttttgatgaaaaaatcaaaaattatcaagataaatatgaccaaatacaaagagaaatagaagaaatgatatttttggcaaattataattacaaaataaatcagtcaaagactaaggtttccaaaccaaaagttaaatcaaatatctcaaaaaagaaattccttagtaatgtttctaaagctaaaaattacattaaaataggagatatttttcaagttgttctaagtcaaaggttcgaaacagatctcaacaaagaaccattggatatttataaaaaattgagaattactaacccttccccttttatgtatttttttaattttaaagattttcaaattataggcgcaagtcctgaaatacttgttaggcttagagataataaaataactattagacctattgctggaacaagacctaggggtaaaaataaaaaagaagataaattttatgaaaaggatcttttaaaggataaaaaagagctttctgagcacttgatgcttcttgatctaggtagaaatgatactggaaaagtttctaaaattaacaccgttaaagttaccgaaagttttaagatagagcgatattcacatgtaatgcacatagtctccaatgttgaaggtgtatttaataaaaaatatggcaaatttgatactttattagctggctttcccgctggaacagtatcaggtgcacctaaaataagagcaatggagattatagatgaattagaaaccacaagaagaaaagtttatgcaggtggtattggttatttttctgcaaatggtgattttgatacttgcatcgcacttagaactgcaatttcaaaaaataaaaaattttatgtgcagtctggagctggaatagttgcggacagtaaaccaattaatgaatttaatgaaactgtgaacaaagcaaaagctttaattaaagctttggagtaa

SEQ ID NO: 279031 - DNA, 1492 bp, Unknown
  Bacterial polypeptide expressing nucleotide sequence isolated from the Sargasso Sea
aatggaaaaaaatatttccattgatcataaagattttaaaaaaaattataatttgaaagaacatcaattaattattctaaaatttaattcagattttgtggacccagttaatagctttatgaagatatctgatgatatggaaaatagttttctttttgaatctttaaaagatggtgatttaagcggaagatattctgttattggaataaaaccagacaaaattttaaaaatcacaaataaaacatccaaaatatatatagataataataatattgaagaagttattaatgataacccaatcgaagcaattaggtattttattaatagtagtttaataaaaaaaaatgacgatattccttcgatagcatcaggaatatttggttatattggttatgattttgtagcaaatattgaagatcttcctaaagaaaaaattgatgagtttgatattcctgatagcattttattacgtccttcgataacagttgtctttgataaagagctaaaaaaaatccttatatgtagggcagtttggtatgatgatagtattgatgcagataatgcatataattttgctattgatgaaataaatcaaattaaagataaaattgaatctgataaaattatcaaattagaaaaagaacaaaaaaatttaggagagtccaaatctaattttactaaagagcaatattttgaaaatgttagaaaagctcgcgaatatatcaaagctggcgatatatttcaggttgtgcctagtcaaaggctgtctgttgaatttaaagcacatccatttttattatatgagtcattaagaagaattaatccatctccttacatgtattatataaagtttagagacttttatattgtaggatctagccctgaaaccttagtgaaagttgaaaaaaataaagttataattaaaccaattgcaggaacaagacttaaagaaaaaggaaaagaaaatgaaataaaagaatctttattgtctgatcctaaagaattggcagaacatctgatgcttctcgatctaggaaggaatgatgtcggaagagtttcaaaaattggctcaataaatgtaagagagtcatttcaaatccaagaaacatcacatttatatcatatatactctactgttgaaggcgaattaaaccctaaagaagacagagtaacagctttatgcgcaggtttcccagctggaacagttacgggagctcctaaaattagggccatggaaataattaatgaaattgaagatagaaaaagaggcatatattctggagcagtaggttatttttcatcctttggtgatatggacacagctatcgccctaagaacggcaattataaaagataataaaatgtatgttcaagcaggagggggagttgtttatgactctgatgaagagtatgaattcaatgaaacattgaataaagctcaagcattattctcagctgcaagggatgtttttagtgaaaagagtaagaaatga

SEQ ID NO: 279032 - DNA, 1066 bp, Unknown
  Bacterial polypeptide expressing nucleotide sequence isolated from the Sargasso Sea
atagaaaaaattcctaataattgtaaaaatgaccttaacttaccagacgttaggcttttacgcccaagaacattagtaattcacgataatttaaaaaaggaaatattttttatttcaaatgtatttaaagatgaaaaaattttaaattatgaaaataagtttaatgaaataaaatctgaattatttaaattagaaattcaatcattaattaaaaatgttgaaaaaaaagttattcaaaaattaaacaacataaaagtaaaatcaaatacaccaaaaaataaatatcttaaaatggtagataaagctaagaaatacataaaaattggtgatatttttcaagttgtattaagtcagagatttgaggcaaaattaacaaaaaaacccttagagatatataaaaagctaagagtgacaaatccctctccttttatgtttttttttaattttgatgattttcaaataattggtgcaagtcctgaaatattagtaagacttagagataataagattactataaggccaattgctggaacaaggccacgtggcaaaactaaaaaagaagatttgttttttgaaagagatcttcttaaagataaaaaagaactttcagaacatttgatgcttcttgatttgggtagaaatgatgctggaaaagtatcaaagataaattctgtgaaagtaaacgaaagcttcatagttgaaagatattcacatgtaatgcacatagtttcgaatgtagttggtgaatataataaaaaattttcaagatttaaatcacttttggctggttttccagccggaactgtatctggagccccaaaaatcagagcaatggaaattatagatgaattagaaacatcaaaaagaaaagtttatgcaggaggaattggatattttgctgcaaacggagaatttgatacatgtatagctttaagaactgctattgtaaaaaataaaaaattctttgttcaagcaggtgcaggtatagttgcagatagtaaacctaaaaaagagtacgaagaaactgtcaataaagctaaagctttaattaatgctttaagataat

SEQ ID NO: 279033 - DNA, 562 bp, Unknown
  Bacterial polypeptide expressing nucleotide sequence isolated from the Sargasso Sea
gggcacacagctgctgaggatcaggccctggaagccgagctactcgccgatcccaaggagcgagccgaacacgtgatgctggtggatcttggccgcaacgaccttggcagggtctgccaacccggcagtgtggcggtcaaagagctgatgctgattgagcgctattcccacgtgatgcacatcgtctcccaggtggagggcgaactgcagcctcatcacgatgtgtgggatctgctgcgggcctctttcccggcgggaaccgtgagcggcgccccaaagattcgagcgatgcagctgattcatgagctggagcccgatgcccggggcccctactccggggtctatggctcaatggacctttgcggtgccctcaacaccgccatcaccatccgcacgatggtggtgcaacctggccaaaacggctgctggcgtgtgcaagtgcaagccggagcaggcgttgttgccgactcgcagccaaccgctgaacacgaagaaaccctcaacaaagcccgcggcatgctcaaagcactggcttgcttgcaagctgcacaacagccatgag

SEQ ID NO: 279034 - DNA, 1486 bp, Unknown
  Bacterial polypeptide expressing nucleotide sequence isolated from the Sargasso Sea
tatgtccataactcccaacttttctagtttcaaaaaagaatatgaagcaggccaaaaccaagtaatatttgccaagcttacttctgatttagacacaccagtatctatcatgttaaaattggcgggagcaaaaaaaaattcgttcattttagaatctgtcaccggcggtgaaacaagaggaaggtactccataataggtatggaacccgatctaatatggaagtgcgaaggcgatcagagttttcttagctcaggaaataatgaatttaaacatgttgaaggtaatcctcttaatatttttcgaaacctactaaaacaaagcgcaatcaacttacctgaagaccttcctcaagcttctgcagggctattcgggtattttggttatgatatggtaagacatgttgaagaccttccaaatgttaacccggataaaattggtctacctgatgcgatgttcattcgtccatcaataatagcagtactagatggggttaaaggcgaagtaattttggtttcgcctgtattttataacaaaaatacttctattaaacaggcatttgaaaaagctattgaaaaaatagaagacgcagtttttaaattgaaaaaacaaatagttacaaaccgaaacttaggtaaatcaggtgaaatagaagaaccttcgtcaaatttcacaaaagaagcatacaaatcggcagttaaaaaagccaaagcatacataaatcaaggtgatatttttcaagttgtaccctctcaaaggtggacacaaaaattcccttattctcctttctccctttataggtctttaagaaggacaaacccatctccttttatgttttttttcaattttggaagttttcaggttattggcgcaagtccagagatcctagttcgcgtatttggaaatgaggttacagtcagacccatagctggaacccgcccaagaggaaatacatcggaggaagataaagcgttagaagaagaattattggcagatcaaaaagaattagcagaacatcttatgctgctggatttgggcagaaacgatgttggaagagtagccaaaataggaactgttaaacctacagaaaagtttattattgaacgatacagtcatgttatgcacattgtatcaaacgttgtcggagaattaagcgatgagcacgacgccgtttcagctttctttgctgggatgcccgcgggtactgtatccggtgcccctaaagtacgagcaatggaaataattgatgaattggaacctgaaaaacgcggcgtttacggtgggggtgtcggctattttagttctggtggtgatatggatatgtgtatcgcattgcgaacggccgttttgaaagatgatacgttatttatacaagcaggcggtggcgttgttttcgatagcgatccagaagctgaatatatggagacggttcataagtctaacgcgatcagaaaagccgcagctgatgccgcaatgtttgaaaattaa

SEQ ID NO: 279035 - DNA, 1234 bp, Unknown
  Bacterial polypeptide expressing nucleotide sequence isolated from the Sargasso Sea
aatttaattaataactttttaaatgtaaaaaatagttttatttttgagtctgttgaaaagggatttataaagggtagatatactatttttggcagaaatcctgataaaatttgggaatttaataataataaatgtgttttaaattatgaaaataaaaaaaaaatattgaaaggaacaccaaaaaaaaatatcgaaaaaataattgaaaatttcaaatttaaaataccaagtgaattaccacctattagttcaataatttcaggctatttttcttatgatattataagatatattgaaaaaattccaaacagtacggaaaatgaccttgatatgcctgatgcaagaattttaagaccaagaaatcttatagtttttgataatgctgaaaaaaaattattttttatagtaaattgtttttctgatgaaaaaataaataattatgatgataaatatgaacaaatacaaaatgaaattgaaaatttaatttttttagcaaattttaattttaaaataaagtctaacaaaaataagattcataagcctaaaattaaatccaatatcacaaaaaacaaatttctcagtaatgttaataaagctaaaaattacatcaaattaggagatatttttcaggtagttttaagtcaaaggttcgaaacggatcttgtcaaagatccattggatatttataaaaaattgagagtaacaaatccttcccctttcatgtatttttttaactttgaagattttcaaataataggtgctagtcctgaaatacttgtaagacttagagataacaaaataacaatcagacctattgccggtacaagacctaggggcaaaaataaaaaagaggataaattttatgaaaaagatcttttaaatgataaaaaagaactttctgaacacttgatgcttcttgatcttggtagaaatgatacaggaaaagtttcaaaaattaatacagttaaagtaactgaaagttttaaaattgaaagatattctcatgtaatgcatatagtatctaatgttaaaggtgaatttaataaaaaatttgggaaatttgatactttattagctggatttcccgctggtactgtttctggtgcgccaaaaataagagcaatggagattattgatgaattggaaacaacaagaaggaaggtttatgcagggggtattggctatttttcatcaaatggtgattttgatacttgtattgcccttaggacagcaa

SEQ ID NO: 279036 - DNA, 1468 bp, Unknown
  Bacterial polypeptide expressing nucleotide sequence isolated from the Sargasso Sea
atgataactaaagaagaatataacaaatatgctgaggatggatttaacgttattccattaataaaaaacataaatcttgtttcacattcgccagtagaaatctactcaaagattaaagataaaaaaaattcctttctgcttgagtcagttgaaggaggtgagaattgggctcaatactcaatagtagggatagattgtcgaaatactataaagatatcaggaaaaaacattgaaataaaaacagatgaggatcttaatttatttgaatcagaagatcctttaaatgaattaaataaaataataagtaaatataagtcgcccaacataaaaaatatgcctagattttatggaggctatgttggattttttgcatatgaaagcgctcaatatgctgaaaaaaagatacagtctcttccaaaaaaagaatctaagtttgaagaacatatgccagaaatatatttagttaaatcagaaaaattaattgtgtatgataactttagtaaatccattcagattatatacaattcagatccatctaagacttcatatgatgaagcaatccataaactcaaaaaaattgaagatagtattgaaaaatcttcaccttatatcaatccatcatataaaaaagttttaggacagctagagtttgaatcaaattttacaaaaagtgaatttataagctctgtaaatattattaaaaattatataaaagagggagatgtaatgcaggtagtattagctcaggattttcatcgaccatttgacggagattcttttaaattatactcagctttaagagaacttaatccatcaccatatatgtactatctgaatcttgaagaatgtgaagttgttggatcatctcctgaaatattggtacgagtcgaaaataatgatattactctgaggccaatagctggtaccagaaaaagaggaaaaacagaagaagaagatattcaaaatgagtatgatctacttaatgacccaaaagaattagcagaacatctcatgcttatagatttaggaaggaatgatgttggtagaatttcagatattggaagtgtaagactaactgagaagatggtaatagaaagatattctcatgtgatgcatattgtttctaatgtaaatggaaaattatcaaaagaatataattttattgatgcacttaaagccacacttcctgctggaacattatcaggagcacctaaaatacgtgctatggaaataattaatgaacttgagcctagttctagaggtatctatggaggtgctattggttatatatcttggaatggaaatattgatacagcaattgcaataagaacagcggtcataaaaaacaatttaattcatgtaggagctggcgcgggaatagttgcagattcagatcctgaaagtgaatggcaagaatgcattcaaaaatcaaaagtttttttagatacaatggagatgatttcatgat

SEQ ID NO: 279037 - DNA, 730 bp, Unknown
  Bacterial polypeptide expressing nucleotide sequence isolated from the Sargasso Sea
tctctcccttttacagcagatccaatagctttatatagatctattagacaattaaacccttcgccttatatgtattatttgaacttagatgaattttatatagtaggttcttctcctgaaattttagctagactcgaagatgacaaagttactgttaggcccattgcaggaacaagaagacggggtaaagacgatgaagatgatgtagctatggaaaaagatatggtcaatgaccctaaagaaatagctgagcatcttatgctaatcgatttaggcagaaatgatgtgggcagaattgcagaaccaggttctgttgttgttactgaacaatttggagttgaaaaatacagtcatgtcatgcatatggtttctaatgttgaagcggagattagaaaggatttttctgcaattgatgtatttaaagcaacctttcctgcaggaacagtctctggagcaccaaaaataagagccatggagataattgatgagtttgagcctgttaaacgaggtatttacggcggtgcgataggttatttatcctggcagggtaatatggatatggctatagctatcagaacggctgtaataaaagacgatgttctatatattcaggctggaggaggttgggtagctgattctgttcctgatcttgagtggaaagagtctcttaataaaggcagagcaatatttaaggctgctgaaatggttcaggaaaagttggaaggttaat

SEQ ID NO: 279038 - DNA, 1033 bp, Unknown
  Bacterial polypeptide expressing nucleotide sequence isolated from the Sargasso Sea
tttaatataccagacgttagacttcttcgtcctagaacattagttattcatgataatttaaaaaaagaaatattttatataagtaatatttttaaagacgaaaaaattaagaactatcaaagtaaatttaatgaaattaaatctgatctttttaaattattcattcaatcctctattaaaaatttaaataaaccactcaaagaaaagataaaaaacattaaagttaaatccaacacttctaaaagtaaatttttaaaaatggtcaataaggcaaaaaaatacattaaacttggtgatatttttcaagtggtattaagtcaaagatttgaggctaaattatcgaaaaatccaatagatatttataaaaagttaagagtaactaatccctctcctttcatgttcttctttaattttaatgattttcaaataataggtgccagtcctgaaatcttagtaaggttaagagataataaaattactgtaagaccaattgcaggaacaagaccgagaggtaaaacattaaaagaagatctttattatgaaaaagatttattaaaagataaaaaagaactctctgaacatttaatgcttttagatttaggtagaaatgatgctggtaaggtgtctaagataaattctgttaaagtgacagaaagctttattatagaaaagtattcacatgttatgcatattgtatcaaatgtaattggtgattataataaaaagttctcaaaatttaaatctttgctatctggttttcctgcaggaacggtctctggtgccccaaaaataagagccatggaaatcattgatgagctagaaacaacaagaagaaaagtttatgcgggtggtataggttatttttctgcaaacggtgaatttgatacttgtattgccttgagaacagctgtcgccaaaaataaaaaattctatgttcaagctggtgcaggaattgttgctgatagcaaacctataaacgaatatgaggagacggttaataaagctaaagctttaattaatgcattaagataat

SEQ ID NO: 279039 - DNA, 790 bp, Unknown
  Bacterial polypeptide expressing nucleotide sequence isolated from the Sargasso Sea
atggcaagaaatttaaaaggcgtaatgccagcgttattaactccattcgataaccaacagaaactggacatcgagagcctgcgccgtctggtgcgtttcaatattgggcaggggatcgatgggctctacgttggtggctcaacgggtgaggcttttgtccagaaccgcgctgaaagagagcaggttctggaaattgttgctgaagaagcaaaaggcaaggtgacgctgatcgcccatgttggcacggtgagcaccgaagagagccaacagctggcgagcgctgcgcatcgatacggatttgatgcggtttcggccgtcacgccgttttactatccgttcagctttgaagagcactgcgatcactaccgcgcaattatcgattccgccggtggcttaccgatggtggtctataacatcccggcactgagcggcgtaaaactgacgctggatcagatcaacacgctggtgacgttgccgggcgttggcgcactgaagcaaacttctggcgatctctatcagatggaacagatccgccgcgctcatcccgatctggtgctttataacggttatgacgagatcttcgcttctggactgctagcaggcgcagatggtggtatcggtagcacttacaacatcatgggatggcgttatcagggaattgtgaaagcgctcaaagaaggtgacattcgcacggcgcaaaagctgcaaaccgagtgcaataaggttatcgatctgcttattaaggttggcgtgttccgcggcctgaaaacagtactgcactatatggatg

SEQ ID NO: 279040 - DNA, 778 bp, Unknown
  Bacterial polypeptide expressing nucleotide sequence isolated from the Sargasso Sea
tatggcggttaatttacgtggagtcatggcagcactgcttacgccgtttgacggggaacaaaagctggataaagagagtctgcgccggctggtacgtttcaatttgagtcagggaatcgacgggttgtacgttggcggttcgaccggtgaagcttttgtgcaaagtagtgcagaacgtcagcaagtgctggagatcgtagcggaagaagcgaagggaaaaatgacgctgattgcccatgttggctgcgtcagcacgctggagagccagcgactggctgaagctgcggagagctatggctatgatgccgtgtccgccgtcacgccgttctactatcccttcagctttgaagagcactgcgcccactaccaggccattattgattcagccaatggcttaccgatggtggtctacaacatcccggcgctgagcggcgtgaagctctccctggatcagatcaatacgctggtgaggctgccgggcgtgggggcattgaagcagacctcaggcgatctttaccagatggagcagatccgccgggcgcatccggatctggtgctttacaacggctatgacgagatttttgcttctggcttgctggccggcgccgatggcgggatcggtagcacctataacattatgggctggcgctatcaggggatcgtgaaagcgctgcgggcgggcgatatagcggaagcgcaaaggctgcagtgtgaatgcaacaaggcgatcgatctgctgattaaaaccggcgtattccgggggctgaaaaccgtgctg

SEQ ID NO: 279041 - DNA, 607 bp, Unknown
  Bacterial polypeptide expressing nucleotide sequence isolated from the Sargasso Sea
aatgcgaagtgctttggaagattcccgcgaagacacaaatataggggtaataatcttaacaggagagggggataaggccttctgctccggaggtgaccagcgcgtgcggggagactcaggatataaggacaatgaaactggtcattcaaggcttaatgttttagattttcaacgggaaataagatcatgcccaaagcctatcgtagccatggtagctggctatgctattggcggcggacacgttttgcatgtaatgtgtgatcttactattgctgcagataatgctatctttggccagacaggtcccaaagtaggttcatttgacggaggttacggatcaagttatcttgcaagaattgttgggcaaaaaaaagctagggaaatctggtttctctgccgccaatacaatgcacagcaggcccttgagatgggacttgtaaactctgttgtgccactagaaaatctggaagaggaaacacttcagtggtcaagggagatgctaaagaactcaccaatggccctgcgctgtttgaaatctgcaatgaacgcagattgtgacggtcaagcaggcattcaggaactggcaggtaacgccacaatgcttttt

SEQ ID NO: 279042 - DNA, 611 bp, Unknown
  Bacterial polypeptide expressing nucleotide sequence isolated from the Sargasso Sea
ttgcagtggaggagatcaaaatgttaaaggtacagggggatatattggtgatgatggagttccaagactaaatgttctagacttacacaaaagaataagggagttacctaaacctgtaatcgccatggtaaatgggtatgcaattggaggaggtcatgttttacatgtggtttgtgatttgaccattgcaagtgataatgcaatttttggtcaaactggtcctaaagttggaagttttgatgggggctttggttcatcataccttgcaagacatgttggacaaaagaaggctagggaaatatggtttctttgtaagcagtattcagctcaagaggcattagaaatggggatggttaataaagttgttccttttgataagctagaagaaactgtattggagtggtgtgctttaatgcagaaaagaagtcctttggcattgagaatgattaaaagaagtttgaatgctgaacttgatggtcaacatggactaatgcagctcgcgggtgatgctacactcctatattatttgacggaggaggctcaggagggtaaggaagcatttttagaaaaaagagaccctaactttagaaaatatcctaaattcccataaa

SEQ ID NO: 279043 - DNA, 478 bp, Unknown
  Bacterial polypeptide expressing nucleotide sequence isolated from the Sargasso Sea
tatgaactcagaatattggaaaaaagccctcgaatttgaagatataatttttgaaaaatccgaagatggcatcgccaagatcaccatcaaccgcccggaagttagaaacgccttcagaccttttacggtcagagagatgcagcaggctttggaagatgcacgtgaggactctggaattggagtgatcattcttactggttctggagaaaaagcattttgttccggaggagatcaacggatccgaggtgatgccggttatcaggattcggaaacaggtcatttgagattgaatgtcctcgattttcaaagacagatccgaagttgtccaaaaccagtagttgcaatggttgcaggatatgccatcggcggtggtcatgttttgcatgtgatgtgcgatctcagtattgctgcagacaatgctgtgttcggtcaaaccgggcccaaggttggttccttcgacggaggctatggttccagt

SEQ ID NO: 279044 - DNA, 819 bp, Unknown
  Bacterial polypeptide expressing nucleotide sequence isolated from the Sargasso Sea
gatggacggcgcgcgcagacgcgtggcggggatcgccaaccacatcaccgccgccccgggctgcccgatgagcgatgacgacggcttttctcgagaaacctacgcgcgcgccgatccctctcgcggcagttcgtacgagcgcgtgcacggaaacgtgagtcgtgaacctgtgatatggattccgtgcacgccaggcgcggacgaacgcacgggagcgacgtacgagctcaaagacgtgatttatgagaagtcaccagagggcattgctcgcgtgactataaacaggcccgagcgcagaaacgctttcacgccgaggactgtgaaagagatgcgatggtgcatggacgacgcgagagatgacatgtcggtcggtgtggtagttctcaggggtgcgggagatttggcgttctgtagcggtggtgatcagagcgcgcgagggaagggcggatacgtggaggccaaggcgggcgggtcggaggagacgcccagactgaatgttttggatttgcagatgcagattcgtagaatgccgaaaccggtgatcgcgagcgttgcgggttacgccgtcggaggcgggcacattcttcatatggtgtgtgatctcaccattgcggcggataacgcggtgttcgggcagactggaccgaaggtcgggtccttcgacgccggatacggctcgactcacatggctcgactcatcggccagaaaaaagcgagagagatgtggttcttagcgcgtttttataacgcgagcgacgcgttgaagatgggattagtgaacaccgtcgtgccgctggcggaacttgaggtcgagacggc

SEQ ID NO: 279045 - DNA, 572 bp, Unknown
  Bacterial polypeptide expressing nucleotide sequence isolated from the Sargasso Sea
tatgaactcagaatattggaaaaaagccctcgaatatgaagatatcatttttgaaaaatcagaagaaggcatcgccaagatcaccatcaaccgcccggaagttagaaacgcattcagacctttaacggtcagggagatgcaacaggctttggaagatgcacgtgaggactcaggaattggagtgatcattcttaccggtgctggagaaaaagcattttgttccggaggagatcaacggatccgaggtgatgctggttatcaggattcgggaacaggccatctgagattaaatgtcctcgattttcaaagacagatccgaagttgtccaaaacccgtcgttgcaatggttgcaggatatgccatcggcggcggtcatgtattgcatgtgatgtgcgatctcagtatagcagcagacaatgctgtgttcggacaaaccgggcccaaggtcggttccttcgacggaggctatggttccagttacctggcaagaattgttgggcagaaaaaagccagagaaatctggtttctttgtcgccagtacgatgcccgtcaggctcttgaaatgggtcttt

SEQ ID NO: 279046 - DNA, 544 bp, Unknown
  Bacterial polypeptide expressing nucleotide sequence isolated from the Sargasso Sea
atgattaaaaattactgggaaacaagcggtaactacactgacataaaatatgaaaaatcaaaagaaggaattgctaaaattacaatcaatcgaccagaggttagaaacgcatttcgaccactcacagtccgtgaaatgaggcatgcacttgaagattcccgagaagacacaaacataggagtaataattctaactggagaaggtgataaggccttttgctccggaggtgatcagcgtgtgcgaggagactccggatataaggacaatgaaaccggtcattctaggcttaatgttttagattttcagagggaaataagatcatgtccaaagcctgtagtagcgatggtcgcaggatatgcaattggaggaggacatgttttgcatataatatgtgatcttactattgccgcagataatgccatttttggccaaacaggtcctaaagtgggatcatttgacggaggttacggatcatcttatttagcaagaatcgttgggcaaaaaaaagcgcgggaaatatggtttctatgtcgccaagtatagt

SEQ ID NO: 279047 - DNA, 649 bp, Unknown
  Bacterial polypeptide expressing nucleotide sequence isolated from the Sargasso Sea
agtgatcattcttaccggtgctggagaaaaagcattttgttccggaggagatcaacggatccgaggtgatgccggttatcaggattcgggaacaggccatctgaggttgaatgtcctcgattttcaaaaacagatccggagttgtccaaaacccattgtagcaatggttgcaggatatgccatcggcggcggtcatgtattgcatgtgatgtgcgatctcagtattgcagcagacaatgctgtgttcggtcaaaccgggcccaaggtcggttccttcgacggaggctacggttccagttacctggcaagaattgttgggcagaaaaaagccagagaaatctggtttctttgccgccagtacgatgcccgtcaggctcttgaaatgggtcttgtcaatacagtagttcctttggctcaactcgaggaggagaccatccaatggtgcagggagatgctgagaatgtcaccaattgctctcaggtgcctgaaagccgcaatgaatgctgactgcgacggccaagccggcctgcaggaactggcaggcaatgcaaccatgcttttttatatgtccgaagaaggacaggaaggacgaaatgcctacctcgaaaaacgcccaccggatttcagccgctttacccgccacccctaa

SEQ ID NO: 279048 - DNA, 829 bp, Unknown
  Bacterial polypeptide expressing nucleotide sequence isolated from the Sargasso Sea
atgaactcagaatattggaaaaaagccctcgaatttgaagatatcatttttgaaaaatccgacgaaggcatcgccaagatcaccatcaaccgcccggaagttagaaacgccttcagacctttgacggtcagggagatgcagcaggctttggaagatgcacgtgaggactcgggaattggagtgatcattctaaccggtgctggagaaaaagcattttgttccggaggagatcaacggatccgaggtgatgccggttatcaggattcgggaacaggccatctgaggttgaatgtcctcgattttcaaagacagatccggagttgtccaaaacccgtcattgcaatggttgcaggatatgccatcggcggcggtcatgtattgcatgtgatgtgcgatctcagtattgcagcagacaatgctgtgttcggacaaactgggcccaaggtcggttccttcgacggaggctatggttccagttacctggcaaggatcgttggtcagaaaaaagccagagaaatctggtttctttgccgccagtacgatgcccgccaggctcttgaaatgggtcttgtcaataccgtagttcctttggctcaacttgaggaggaaaccattcaatggtgtagggagatgctgagaatgtcaccaattgctctcaggtgcctgaaagccgcaatgaatgctgactgcgacggccaagccggcctgcaggaactggcaggcaatgcaaccatgcttttttatatgtccgaagaaggccaggaaggacgaaatgcctacctcgaaaaacgcccaccggatttcagccgctttacccgccacccctaac

SEQ ID NO: 279049 - DNA, 913 bp, Unknown
  Bacterial polypeptide expressing nucleotide sequence isolated from the Sargasso Sea
tttgcccggctcctcgcggagtgggtcaaccaacaacaagaagagaagcgtcatgattgaagcaatgactgaagcggaactctatgcccccgtcgagtggcgtgattgctccgccggttacgaggatatcctctatcacaagtccgacgatggcattgccaagatcaccatcaaccgcccccaggtacgcaacgccttccgcccccgcaccgtcaaagagatgctgcaggcgctggccgatgcccgttacgacgatcaggtcggcaccatcatcctgaccggctttggcgagaaggccttctgcgccggcggtgaccagaagatccgtggcgactacggtggctatcgcgatgacgaggggacccatcacctcaacgtgctcgacttccagcgcgacatccgcacctgtccgaaaccggtcgttgccatggtggccggctacgcggtcggtggcggccacgtgctgcacatgatgtgtgacctgaccatcgccgccgacaatgcccagttcggccagaccggcccgaaagtgggctccttcgacggcggctggggtgcctcctacatggcgcgcatcgtcggccagaagaaggcccgcgaaatctggttcctctgccgtatgtacgatgccaagcaagccctcgacatgggcctggtcaataccgtcgtgccgctggcggagctggagcgtgaaaccgtgcgctggtgccgcgagatgctgcagaacagcccgatggcgctgcgctgcctgaaggccgccctcaacgccgactgcgacggccaggccggcttgcaggagctggcggggaatgccaccatgctgttctacatgaccgaagagggtcaggaagggcgcaacgcgttcaacgagaaacgccgtcccgacttctccaaatacaagcggaatccctga

SEQ ID NO: 279050 - DNA, 532 bp, Unknown
  Bacterial polypeptide expressing nucleotide sequence isolated from the Sargasso Sea
cgattttcagcgccagatccgcacctgcccgaaaccgatcgtggcgatggtggcggggtattccatcggcggcggtcacgttctgcatatgatgtgcgatctgacgattgccgcagaaaatgccatcttcggccagaccggcccgaaagtcggctcatttgacggtggctggggcgcatcctacatggcgcggatcgtcggacagaaaaaagcgcgcgaaatctggttcctgtgccgtcagtacgatgcgcagcaggcgctggatatggggctggtcaacaccgtcgtcccgctggcagatctggaaaaagagaccgtgcgctggtgtcgagaaatgctgcaaaacagcccgatggcgctgcgctgcctgaaggcggcgctgaatgccgattgcgatggccaggcggggctgcaggagctggcggggaatgccaccatgctgttctacatgaccgaagagggacaggaagggcgtaacgctttcaaccagaaacgtcagccggacttcagcaaatttaaacggaatccataa

SEQ ID NO: 279051 - DNA, 578 bp, Unknown
  Bacterial polypeptide expressing nucleotide sequence isolated from the Sargasso Sea
aatggcatttccttccactgtaagcattgttgaagtaggcccccgtgacggcctacaaaatgaaaagcagatattgagtgtggacgacaaagttgcacttattaacctgctttctgaaacgggccttacacgcattgaagccggtagctttgtatcgcctaaatgggtgccacaaatggcggattctgggaatgtgtttaacgcactaaccaagaaaccaggtatacagtattcagcgttaacccccaacctgaaagggctagaagcagcacttgaggcaggcgttgacgaaattgcagtgtttggcgctgcgtctgaatcgttttcacaaaaaaacatcaactgtacgattagtgaaagcctgcaacgctttgagcctgtacttgaattggctaagcaacacagcattccggtgagaggttatgtgtcctgcgtgatgggttgcccttatgaaggtgaaattgccccaagtgccgtggcacaagtgtcaaaggcgctacttgatatggggtgctacgagatttcgttgggcgacaccattggtacgggtacgcccggtgccacaaaagcgctattgg

SEQ ID NO: 279052 - DNA, 536 bp, Unknown
  Bacterial polypeptide expressing nucleotide sequence isolated from the Sargasso Sea
tatggtattgccgaagaaagtaaagatggttgaagtgggcccgcgggacggcctacaaaatgaagctgagattgttccggcttcggttaaagtagagttgattgatcgactggttaccgctggctttaagtcagttgaggctggtagttttgtgtcgccgaaatggataccgcaaatggcgggtacggcggatgtgatggcgtcaattgtccgaaaagaaggggtgacctattcggtcctgacgccaaatatgaagggcttcgaaggggcagtcgcagcgaaagcgagtgaagtcgccatttttggtgcggcgacggaagccttttctcagaaaaatatcaattgttcgatagacgaaagccttgaacgatttcggcccgtcgccgaagcagctcatgagatagggcttccggtgcgtggttacatttcctgtggattgggatgcccgtatgagggtgaggttgcgcctagctctgtggccgctgtggcggctaagctcgattctatgggctgctatgaaatatctttaagcgata

SEQ ID NO: 279053 - DNA, 647 bp, Unknown
  Bacterial polypeptide expressing nucleotide sequence isolated from the Sargasso Sea
cgtcaagcgggcgtggtttacagcgccctcacgccgaatgtcaaaggcttagagctggcgctggatgcaaaagcttccgaagtcgctatctttggtgcagcgtcacaaagctttagccaacgcaatatcaactgttcgattgaagagtcgattgaacgctttatcccgttgatggacatggcaaaagccgccaatatcccagtacgtggctatgtgtcctgcgttttaggttgcccctatgaaggggaaatcgcggcgagcgaagtggcaagagtgtctgaaatcctttacaaaatgggctgttacgaaatttcactcggcgacactatcggtgtaggcacgccgttaaaagcccgtaaaatgctgcaggccgtgatggagcgagtcccggtagaaaagctcgccctgcactttcacgatacctatggccaagcattagccaatattatcgcctgcatcgacttaggtgtgcgcagctttgacgcctctgtggcgggcctaggtggttgcccgtatgcaaaaggcgcatcgggcaatctggcaagtgaagacttggtctatatgctccacgggctcggtttgaagacgggtatcgatttagaaaaactggcattagcgggttttgggatcagcaaacaattaaatcg

SEQ ID NO: 279054 - DNA, 178 bp, Unknown
  Bacterial polypeptide expressing nucleotide sequence isolated from the Sargasso Sea
gcagcgtcacaaagctttagccaacgcaatatcaactgttcgattgaagagtcgattgaacgctttatcccgttgatggacatggcaaaagccgccaatattccagtacgtggctatgtgtcctgcgttttaggttgcccctatgaaggggaaatcgcggcgagcgaagtggcaagag

SEQ ID NO: 279055 - DNA, 276 bp, Unknown
  Bacterial polypeptide expressing nucleotide sequence isolated from the Sargasso Sea
catgccgcaacaggtgcgactggtcgaagtgggcccgcgcgatggcctgcaaaatgaaaaacagccgatcagcgtcgccgacaaggtgcgtctggtcgatgacctgagcgctgccgggctgagttatatcgaagtcggcagcttcgtctcgcccaagtgggtgccgcagatggccggctcggccgaggtgtttgccgccatccagcaacagcccggcgtgacctacgcagcgctggcgcccaatctcaaggggtttgagggcgcgctggaagccgg

SEQ ID NO: 279056 - DNA, 705 bp, Unknown
  Bacterial polypeptide expressing nucleotide sequence isolated from the Sargasso Sea
aatgagcctacctgctaaggtcaagctggtggaggtaggcccccgcgatggcctgcagaatgagtcccacccggtcagcagcgctgaccgcatccgactgatcaacgaccttggtgctgccggcctacccgtgatcgaagtcggcagttttgtatcgccaaagtgggtaccccagatggcggggtcagagcaggttttcgccggaataaaccgttatgcaggcagtacctacaccgcgttaacacccaatatgaaaggctttgaacaggccctgactgctggcgcccaagaggtagcagtgtttgctgctgcatccgagggcttctcacagaaaaacatcaactgctcaatcagcgaaagtctccaacgattcgagcctgttctggccgcggccgcgcaagccggtattcgggtgcgtggatatgtttcctgtgtgctcggctgtccttatgacggagacgttccagcttcacaggtggcagcggttgctcgtgagctttacgccatgggctgctacgaaatttccttgggcgacaccattggcaccggcactcctggcgccacccgccagttgattgcccgcgtatcagatgtggtaccccatgctgcgctagctgggcattttcacgacacctacggccaggctttggcaaatatctacgccagcctgctcgaaggtgtgcaggtattcgacagttcggtagc

SEQ ID NO: 279057 - DNA, 708 bp, Unknown
  Bacterial polypeptide expressing nucleotide sequence isolated from the Sargasso Sea
ttcccctaaatgggtgccacaaatggcagattcggcagatgtgattaacgcacttaacttaccaaatattaacttaagcgcgctgacaccaaacttgaaaggtgcgcacgcggcccatgatgctggtattaaagagtttgcaatttttaccgccgcaagcgagtcgttctgtaaaaaaaacatcaactgctcagttgacgaaagtatcacacgcttcagtgaagttatgaactttgcaaaagagcataatattcgtgttcgtggttacgtaagttgtgtacttggctgtccttacgaaggagacatagacgctaaagctgtgcttgatgtaacacaaaagctattagatttaggctgttacgaagtaagccttggagacacgattggcgtaggtactgcaaaaaaagtaactcaactcatagaattacttttaatgcatatagacagcaaccggcttgcagtgcattttcatgatacctacgggcaagcgctcacaaatatttacgcagcgctaagcctaggaatatcaacggttgacgcagcagttgccggccttggtgggtgcccttatgctaaaggcgcgtcaggaaatgttgccactgaagatgtcgtttacttactcgatggccttggcataaaccatggaattgatttacaaaggcttgttgatgcaggttgggccattactgatgcgcttaacaaaacgcc

SEQ ID NO: 279058 - DNA, 729 bp, Unknown
  Bacterial polypeptide expressing nucleotide sequence isolated from the Sargasso Sea
gatggctgagaaaattagtgtttttgaggtagggcccagagatggtctgcaaaacatcaaaaacgaaatcccaataaataagaaaattgaactaattaatatcctgagtactacaggaatagaaaaaatagaatgcggcagttttgtgagtgccaagtgggttcctcagatgaggggcaccaatgaaatttttgaggaaataataagaagagacggtgttaaatacaccgctttgacaccaaacctaaagggttttgaaaatgcattgcacgttaaggttgatgaggtagcagtctttgctgctgcttcagagactttttctcaaaaaaatgttaattgctcaatagacgaaagtttagcaagattccgagatattttcgaaaaggctaggaaaaaaaagatacccgtaagagggtatgtgtcatgtgtagtagagtgtccttatgaaggctatgttactccaaaacgtgttttggaggtcacctcaaagcttcttgagatgggatgctacgaagtttccttaggagacacaattggaaagggtaccccaaaaaaaattgatgaactatttaatgttatttgtgaaagtttaaatccagagcaacttgcaggacattttcatgatacatcagataatgcaattaagaatgttgaagtcggtctccaatatggaataacatcatttgacaccgcgataggtggacttggcggctgctcttatgcccctgg

SEQ ID NO: 279059 - DNA, 904 bp, Unknown
  Bacterial polypeptide expressing nucleotide sequence isolated from the Sargasso Sea
tttgcccaaagccgtgcgacttgttgaagtaggcccacgcgatggtctgcaaaatgaaaaagctgtgtcgctggaggccaaagtcgagttggtcaaccgtttagcagaaactggcttgcgcaccattgaaaccggcgcttttgtctcgccaaagtgggtaccccaaatggctgattctgctgctgtatttgcacaaatcagccgtacagcaggtattcagtacacagctttgacccctaatctgcaaggttatgaagcagccaaagctgcaggagctactgaagttgcggtatttggcgctgcttcagaggcttttacccaaaaaaatatcaactgcagcatcgccgaaagccttgagcgttttgcccctgtgatggcgcaagccaaactggatggcattaaagtacggggttatgtctcttgtgtggtcggctgcccttatcagggcgacgttgacccctgtgaagtagcacgggttgctaaagctttactcgatatgggctgctacgaaatttcgttaggcgacaccataggcgttggcacaccagctaaagtcaatgccatgctggacgccgtgcttgaagttgtcccagtggcccaactggctgtgcattttcacgatacctatggccaggcgttaagtaatatttacgcggcgctacaacgtggtatagctgtggtggacagctcagtcgcaggtttaggcggctgtccttacgctgccggtgcgtcaggcaatgttgccactgaagaagtagtgtatttgctaaacggccttggcataacgactggtgttgatttacaacggctggcccctattggctggtttatcagcgagcagctggggaaagctcctagttctaaagtaggattggcgcttaaggccaaatgccagcagaattaa

SEQ ID NO: 279060 - DNA, 949 bp, Unknown
  Bacterial polypeptide expressing nucleotide sequence isolated from the Sargasso Sea
atgtctgcactggatctttcgaacttaagcgcgacctcggtaagcgccagctcggatagggttagcctattcgagatggggccccgtgatggcttgcagaatgaggccgccgtcccgacacaggccaaagtcgctttgattgaatccctcgccgatgcaggtgtgaagcgaattgaagcaggcagttttgtgtcacccaaatgggtgccacaaatggccgatagcggcgaagtattgcgccaaattcgccgtcaagcgggcgtggtttacagcgccctcacgccgaatgtcaaaggcttagagctggcgctggatgcaaaagcttccgaagtcgctatctttggtgcagcgtcacaaagctttagccaacgcaatatcaactgttcgattgaagagtcgattgaacgctttatcccgttgatggacatggcaaaagccgccaatatcccagtacgtggctatgtgtcctgcgttttaggttgcccctatgaaggggaaatcgcggcgagcgaagtggcaagagtgtctgaaatcctttacaaaatgggctgttacgaaatttcactcggcgacactatcggtgtaggcacgccgttaaaagcccgtaaaatgctgcaggccgtgatggagcgagtcccagtagaaaagctcgccctgcactttcacgacacctatggtcaagcattagccaatattatcgcctgcatcgacttaggtgtgcgcagctttgacgcctcagtggcgggcctaggtggttgcccatatgcaaaaggcgcatcgggcaatctggcaagtgaagacttggtctatatgctccacgggctcggtttgaagacgggtatcgatttagaaaaactggcattagcgggttttgggatcagcaaacaattaaatcgtcttaatggctctaaagtcgccaatgcaattttgcagggcgccaaagcctaga

SEQ ID NO: 279061 - DNA, 934 bp, Unknown
  Bacterial polypeptide expressing nucleotide sequence isolated from the Sargasso Sea
catgacgttccccaccgccgtcaagatcgtcgaagtcggcccgcgcgacgggctgcagaacgagaagaccttcgtgccgaccgacgtgaagatcgcgctcgtcgaccggctgtcgcacgccggcttccgcaacgtcgaggccgcgtcgttcgtgtcgccgaaatgggtgccgcagatggccgacggcgccgacgtgatggccggcatcgagcgccgcgcgggcaccgtgtactcggtgctcacgccgaacctgaagggcttcgagaatgccgtcgctgcgcgcgcggacgaagtcgtgatcttcggcgcggcgagcgaggcattctcgcagcggaacatcaactgcagcatcgccgaaagcatcgcgcgcttcgagcccgtcgcgaaggcggcgaaggatgcgggcctgcggctgcgcggcagcgtgtcgtgcacgctcggctgcccgtaccagggcgaagtgcctgtcgcatcggtcgtcgacgtggtcgagcgcttcgcggcgctcggctgcgacgagatcgacatcgccgacacgatcggcgtcggcacgccgaagcgcacgcgcgaagtgctcgcggccgtcacgcgcgtgttcccgcgcgaacgcctgtcgggccacttccacgacacctacggccaggcgctcgcgaacatctacgcggcgctgttcgaaggaatcgagatcttccacgcgtcggtggccggcctcggcggctgcccgtatgcgaagggcgcgaccggcaacgtcgcgaccgaggacgtgctgtacctgatgcagggcctcggcatcgacaccggcatcgacctcgcacaggtcgtcgccgccggcgacttcatctcgaacgcgatcggccgcactaacgtgtcgcgcgccggtcgcgcactgctcgccaaggcgcagagcgcggccgacgctgcgaactgcgcatga

SEQ ID NO: 279062 - DNA, 904 bp, Unknown
  Bacterial polypeptide expressing nucleotide sequence isolated from the Sargasso Sea
aatgagacctgaccaaatccgtattgttgaagtgggacctcgcgacgggcttcagaacgaagcccagccgctcacgccccaggaacgggtcgcattgatcgaacaactggccgacgcgggactgcgggatatcgaagccggatcctttgtctcaccgcgctgggtcccgcagatggcgggcagcgacgaggtgctcatagccctctcggagcgaaaagatcttcggttgcccgttctcgttcccaacaagaaaggttacgagctgtcccgcgttgcgggcgcccgcgaaattgccgtctttggagcggcttctgaaaccttctcgcaacgcaacatcaactgcagcattgctgacagccttgcgcgtttcggtgaagtctgcgccctggccaaagcagacggtgtcgtgatccgcggttatatctcctgcgtgctgggctgcccctacgaaggcagcgtggatattgcgcaggtcgcccgtctggcagcccaactcgcggagatgggctgctcggagatttccttgggcgacacgatcggggtggggacaccggataaggcacgcgctctaaccaaagcctgcgctagtgaagtcggcttggataatctttccgtgcatttccacgatacctatggccaggcgcttgccaatatcctggcatgtatcgagatcggcgtgacctcagtagacgctgccgtgggcggtctgggcggctgtccctatgcatccggttctgccggcaatgtggcgaccgaggacgtggtttaccttttggagggtctcggcattaactgctcggctgatctcgagcagcttgtcacaataacggagtcgctcagccgtcggcttgggcatcctccggcctcccgtgttgcccgggcccagctcgccaaacgcgcttaa

SEQ ID NO: 279063 - DNA, 949 bp, Unknown
  Bacterial polypeptide expressing nucleotide sequence isolated from the Sargasso Sea
aatgtctgcgctggatctttcgaacttaagcgcgacctcggtaagcgccagctcggatagggttagcctgttcgagatggggccacgtgatggcttgcagaatgaagccgccgtcccgacacaggccaaagtcgccttgattgaatccctcgccgatgcgggcgtgaagcgaattgaagcaggcagttttgtgtcacccaaatgggtgccacaaatggccgatagcggtgacgtattgcgccaaattcgccgtcaagcgggcgtggtttacagcgccctcacccctaatgtcaaaggcttagagctggcgctggatgcaaacgcttccgaagtcgctatctttggtgcggcgtcacaaagctttagccaacgcaatatcaactgttcgattgaagagtcgattgaacgctttatcccgttgatggacatggcaaaagccgccaatatcccagtgcgtggctatgtgtcctgcgttttaggctgcccctatgaaggggaaatcgcggcgagcgaagtggcaagagtgtctgaaatcctttacaaaatgggctgttacgaaatttcgctcggcgacactatcggtgtaggcacgccgttaaaagcccgtaaaatgctgcaagccgtgatggagcgagtgccggtagaaaaactcgccctgcacttccacgacacctatggtcaagcattagccaatattaccgcctgccttgacttaggtgtacgcagctttgatgcctcagtggcgggcctaggtggttgcccgtatgcgaaaggcgcatcgggcaatctggcgagtgaagacttggtctatatgctccacgggctcggtttgaagacgggtatcgatttagaaaaactggcattagcgggttttgggatcagcaaacaattaaatcgtcttaatggctctaaagtcgccaatgcaatcttgcagggcgctaaagcctag

SEQ ID NO: 279064 - DNA, 949 bp, Unknown
  Bacterial polypeptide expressing nucleotide sequence isolated from the Sargasso Sea
aatgtctgcgctggacctttcgaacttaagcgctacctcgttaagcgccagctcggatagggttagcctattcgagatggggccccgtgatggcttgcagaatgaggccgccgtcccaacacaggccaaagtcgccttgattgaatccctcgccgatgcgggcgtgaagcgaattgaagcaggcagctttgtgtcacccaaatgggtgccacaaatggccgatagcggtgacgtattgcgccaaattcgccgccaagcgggcgtggtttacagcgccctcacccccaatgtcaaaggcttagagctggcgctggatgcaaaagcttccgaagtcgctatctttggtgcagcgtcacaaagctttagccaacgcaatatcaactgttcgattgaagagtcgattgaacgctttatcccgttgatggacatggcaaaagccgccaatattccagtacgtggctatgtgtcctgcgttttaggttgcccctatgaaggggaaatcgcggcgagcgaagtggcaagagtgtctgaaatcctttacaaaatgggctgttacgaaatttcactcggcgacactatcggtgtaggcacgccgttaaaagcccgtaaaatgctgcaggccgtgatggagcgagtcccagtagaaaagctcgccctgcactttcacgacacctatggtcaagcattagccaatattatcgcctgcatcgacttaggtgtgcgcagctttgacgcctcagtggcgggcctaggtggttgcccatatgcaaaaggcgcatcgggcaatctggcaagtgaagacttggtctatatgctccacgggctcggtttgaagacgggtatcgatttagaaaaactggcattagcgggttttgggatcagcaaacaattaaatcgtcttaatggctctaaagtcgccaatgcaattttgcagggcgccaaagcctag

SEQ ID NO: 279065 - DNA, 502 bp, Unknown
  Bacterial polypeptide expressing nucleotide sequence isolated from the Sargasso Sea
atgtttcctaaagaagtgagtattgttgaagtaggtcctcgagatggccttcagaatgaaaagcaggccttaagcgccgaacaaaagattgaacttattcaacttctttctaaaactggccttaaccgaatcgaagcaggaagctttgtatcgcccaaatgggtgccccaaatggcgaactcggatgcggtttttaaggcgcttagccccgaagacaagattcattattctgcattgacacccaaccttaagggcttggaagcagctattgaagcgggtgcgaaagaggttgcagtattcggtgctgcctctgaatctttttcacaaaagaacattaactgttctataagcgagagcttaaagcgtttcgaggcagtgtttgacctggcaagcgaaagcaaaatcaaagtgaggggctacgtttcatgtgtaatggggtgtccttatgaaggtgaaatttcacctagtgccgttacacaggtgagtaaggaactttattgac

SEQ ID NO: 279066 - DNA, 793 bp, Unknown
  Bacterial polypeptide expressing nucleotide sequence isolated from the Sargasso Sea
cctcagcgccgccggcctgagctacgtggaagtcggcagcttcgtctcgcccaagtgggtgccgcagatggccggctccgccgaagtgttcgccagcatccagcgccagccgggcgtcacctacgccgccctggcgcccaacctgaaaggcttcgaggccgccctcgcggccggcgtggaagaagtggcggtgttcgccgccgccagcgaggccttctcgcagaagaacatcaactgctcgatcaaggacagcctggaacgcttcgtgccgctgatggaagccgccaaggcccacggcatccgcgtgcgcggctacgtttcctgcgtgctgggctgcccctatgagggcgaggtggcacccgagcaggtcgccagcgtggcccgtgagctattcgccatgggctgctacgaaatctccctgggcgacaccatcggcaccggcaccgccggcaagacccgccacctgatcaacgtggtcggccgcgaagtgccacgccacctgctggccgggcacttccacgacacctacggccaggccctggccaatatctacgccagcctggaggaaggcatcaacgtgttcgacagctcggtggccggcctcggcggctgtccctacgccaagggcgccaccggcaacgtcgccagcgaggacgtgctctacctgctcgacggcctcggtatccacaccggcatcgatatggatcgactgatcgccgccggccagcgcatctgctccgtgctggacaagcccaacggctcgcgagtggcccgagcgctgggcagacactag

SEQ ID NO: 279067 - DNA, 916 bp, Unknown
  Bacterial polypeptide expressing nucleotide sequence isolated from the Sargasso Sea
tttcaagggaatatggatgtcatcaaattagaggaattgataaaaactaaagggaaggaaaatataccagtttgtttactaactattacaaataactcaggaggtggacagccagtttctatggaaaatatacgagcagttcgcactctccttgataaatatggcatcccactttacttagacgcctgtagatttgctgaaaatgcatattttataaaacttcgagagccaaagtataaagacgcaaatgttaaagatattatattggaaatgatgtctttagctgagggatgtactataagcgcaaaaaaggatgggctcgtaaatattggtgggttactatgcacagacgatgatttattagctaagaaagaaaaggatttattgatacttactgaaggatatccgacatatggcggcttagccggacgcgatttagatgcgatggcagttggcttacaagaagtcatggatgaagactatttgcagtatcgattggctcaatcaaaatatcttggggaacatttaatgaagattggatatcacaccattcaacctccagggggtcatgcaatttatattgatgcaaaatcaacattagaccatataccttcactagaattccctggacatgcattggctgtagaattgtataaaactggtggtatacgttcatgtgaaattggatctgttatgtttggaaaagttgatagtaatacccgtaaagaaatcccagctaaaatggaattacttcgccttgcgctaccaagaagaactcatacgcagagccatatagactatgtaatagaggttgcaaaagatgtccttgaaagaaaaaatactattaaaggattgaaaattattgatcagcctaaaacgcttaggcattttagtgcttcatttgaatttatataaa

SEQ ID NO: 279068 - DNA, 1067 bp, Unknown
  Bacterial polypeptide expressing nucleotide sequence isolated from the Sargasso Sea
tttgtgtatcagaaaattgatcctcacactcaaaagcttcaagctcatcaatgttttcttcaaaaatatttacaatattttgatgtatttcaaccataaagataatgatatcgtgattaaagtcagttacaatccctgtatgaagttcaagacaataattgaaccatttaaaataaaatctgttgaatctctgcctataacgacacctgaagaaagagaaggatatttaaaacgtgaacattggaatgtttttggtctcaaatcgcaggaagtaactgtagacttgctgactgattcaggaactggttcaatgtcttcggaacaatgggcagcgattatgcgtggagatgagtcatatgctggctcccattcttggcagagatttcatgatgtagtctcagatcttacaggttataagcatataattcccactcatcaaggaagagcaagcgagaaaattttagcaacgataactgttaaagaaggagatattattcccagcaacagtcattttgatacaacaagagcaaattttgaatttgttaaagcagaagcactagacctgctctgcaaggagggattagatttattatcgccatctccatttaaagggaatatagaccttgataaacttgaaaaaatacttaaagagaaaaatgacaaaattccatttgtacttatgaccataacaaacaatacaggtggaggacaaccagtttctatggaaaatctaaaaaaagtaaaagagctttgtggtaaatataataaaatgtttttacttgacgcttgtcgttttgctgaaaatgcatggtttgtttcacaaagagaagatgaatacaaagatgttgaaataagagatattacaaaagaggcatttagacttgcagatggctgcacaatcagtcttaaaaaggatggttttggaaacattggaggaattttagccttcaatgatgatgatttagctgaacaggcaagaaacttactgattttaactgagggattttcaacttatgggggactggcaggtagagatctggatgcattggctcaaagcctaaaagaaa

SEQ ID NO: 279069 - DNA, 535 bp, Unknown
  Bacterial polypeptide expressing nucleotide sequence isolated from the Sargasso Sea
attgattctcacagaaggttttcctacatatggaggacttgcagggagagacttagacgctttagcccaaggattaaaagagataacagataaaaattatttagaatatcgagctagatcaatctcgtatttaggagaaaaagcaattagctatggtattcctgttgttcaacctgcaggaggtcatgccttgtatattgatgcaaaaaccttcttgcctgacattccaccacatgagtacccagggcattcggtagcgtgtgaaatatatttgttaggtggtgttagagcagttgaacttggaacgcttgcttttggagtagctggggaaaatggtgaacctgatactcctgctacacatgagttagttagattggcagcacctagaagaacatacacacaaagtcattttgattatgttgcagaggttttggaaaaattagctgagaaaaaagatgagcttaaaggttataaaattattgagcaaccaaagctccttaggcactttacagctaagcttgaacctttaaaataa

SEQ ID NO: 279070 - DNA, 687 bp, Unknown
  Bacterial polypeptide expressing nucleotide sequence isolated from the Sargasso Sea
attgaagaaatttcaaacagttattgaaccttttattattaaaagtgttgatccaattcggatgacttctgaaaaagaacgaattgttgcacttgaaaaagctaaatataatctatttaaaatccctgcacatatgatcctgattgatttgcttacggatagtggaacaggagcgatgagtagcgaacaatgggctgcaattatgaggggtgatgaatcgtatgctggtagtgctagttttgatcgtttagagaaaaccgtaaaagaattatttgggtttaaacatgtaataccagcgcatcaagggcgtgctgctgagagaatattattttcaacaatttgtaaaaaaggcgatattgttccaaacaatactcattttgatactacaagagcaaatgttgaatctcagggtgcaacagcaattgatttggtaatacctgaaggtcttgacccaagcaacacacatcattttaaaggcaatatggatattatcaaattagaagaattaattaaaaacaataaagatagtattccagtatgtttacttaccattacaaataattctggaggtgggcagccagtctcaatggaaaatataagagcagttcgtacgttacttgacaagtatggtataccactttatttagatgcatgcagatttgcagaaaatgcatattttattaagct

SEQ ID NO: 279071 - DNA, 526 bp, Unknown
  Bacterial polypeptide expressing nucleotide sequence isolated from the Sargasso Sea
aacagaaggctttccaacttatggaggactagcaggaagagacctagacgcattagcacaaggattaattgagattacagatgaaaactatctccaatatagggcaaggtcaatagcttatctaggagaaaaggctatcagctatggtttaccaatagttcaacctgcaggaggtcatgctttatatatagatgcaaaaacatttttacctgatattcctcctcatcaatatccaggacaagctgtcgtttgcgaactctatcttcttggaggtattagaactgcagaattagggacgtttgcttttggagttgctggtgaaaatggtgaaaatgatactccagctactcatgaattagtaagacttgccgcaccaagaagaacttatacccaaagtcattttgattatgtagctgaagtattagaaaaacttgttgaaaataaagataagttaaaagggtatgagattaccgaacaatcaagattcttaagacatttcacagcaaagcttaaacctttaagctag

SEQ ID NO: 279072 - DNA, 1384 bp, Unknown
  Bacterial polypeptide expressing nucleotide sequence isolated from the Sargasso Sea
cttgaaaaaatttcgaacagttattgagccttttatcatcaaaagtgttgatcccatcaagatgacttctgagcaggagagagttaatgcgctagaaaaagcacgatataatctatttaagattcctgcagatatgatccttattgatttattaacagatagcggcacaggagcaatgagtagtgaacaatgggctgcaataatgagaggggatgaatcatacgctggaagtcgtagctttgaacgtttggagaaaactgtaaaagaattatttggttttaaacatgtaatacctgctcatcaagggcgcgctgcagaaagaatattattctctacaatttgtaaaaaaggggatatagtaccaaataatacgcattttgatacaactcgagcgaatattgaatttcaaggggcaacagcaattgatttagtaattccagaaggtctcgatccgtcaaatcctcatcctttcaaagggaatatggatgtcatcaaattagaggaattgataaaaactaaaggcaaggaaaatataccagtttgtttgctaactattacaaataactcaggaggtggacagccagtttctatggaaaatatacgagcagtccgtactctccttgataaatatggtatcccactttacttagatgcctgcagatttgctgaaaatgcatattttataaaacttcgagagccaaagtataaagatgtaaatgttaaagatatcatattggaaatgatgtctttagctgagggatgtactataagcgcaaaaaaagatgggctcgtaaatattggtgggctactatgtacagacaatgatttattagctaagaaagaaaaagatttattgatacttactgaaggctatccaacctatggtggtttagctggacgcgatttagatgcgatggcagttggcttacaagaagtcatggatgaagactatttgcagtatcgattggctcaatcaaaatatcttggggaacatttaatgaagattggttatgacaccattcaacccccagggggtcatgcaatttatattgatgcaaaatcaacgttagatcatattccttccctagaattccctggacatgcattggctgtagaattgtataaaaccggtggtatacgctcatgtgaaattggatctgttatgtttggaaaagttgatagtaatacccgtaaagaaatcccagctaaaatggaattacttcgccttgcgctaccaagaagaactcatacgcagagtcatatagactatgtaatagaggttgcaaaagatgtctttgaaagaaaaaatactattaaaggattgaaaattattgatcagcctaaaacacttaggcattttagtgcttcatttgaattattataa

SEQ ID NO: 279073 - DNA, 604 bp, Unknown
  Bacterial polypeptide expressing nucleotide sequence isolated from the Sargasso Sea
tttgggaaatattggtgggcttacttgcttttaaatgatgatcagttagcagaggatgctaagaatttgttaattttaacagaaggctttccaacttatggaggactagcaggaagagacctagacgcattagcacaaggattaattgagattacagatgaaaactatctccaatacagggcaaggtcaatagcttatctaggagaaaaggctatcagctatggtttaccaatagttcaacctgcaggaggtcatgctttatatatagatgcaaaaacatttttacctgatattcctcctcatcaatatccaggacaagctgtcgtttgtgaactctatcttcttggaggtattagaactgcagaattagggacgtttgcttttggagttgctggtgaaaatggtgaaaatgatactccagctactcatgaattagtaagacttgccgcaccaaggagaacttatacccaaagtcattttgattatgtagctgaagtattagaaaaacttgttgaaaataaagataagttaaaagggtatgagattaccgaacaatcaagattcttaagacatttcacagcaaagcttaaacctttaagctaga

SEQ ID NO: 279074 - DNA, 982 bp, Unknown
  Bacterial polypeptide expressing nucleotide sequence isolated from the Sargasso Sea
gtttcagatctaactggttacaaacacataattccaacacaccaaggaagagcaagtgaaaaaattcttgcaacaattactttaaaagaaggagatattattccgagtaacagtcactttgatacaactagggccaatttcgaattcgcacaagctaacccaattgatttactttgtgaagagggcttagacctactttccccatcaccttttaaaggaaatattgatttagataagcttgaggaactattaaagggtcctgaaagtgaaaaggtgccttttgttttaatgacaataactaacaataccggcggaggccagccagtatccatggataacttaaagaaggtaaaagacctatgctcaaaatacaacaaaatgtttttacttgatgcctgtcgttttgcagaaaatgcatggtttgtatcgcaaagagaagataaatataaagatgttgaaataagagatattgcaaaggaagcattcagactagccgatggatgcacaattagtttaaaaaaagatgggtttggaaatatcggtgggcttctcgcccttaatgatgattctcttgcagaagcagctcgaaatctattgattctcacagaaggctttccaacatatggaggactcgcaggtagagacttagatgccttagcccaaggattaaaagagataacagataaaaattatttagaatatcgagcaagatcaatctcgtatttaggagaaaaagcaattagctatggaattcctgttgtccaacctgcaggtggtcacgccttgtatattgatgcgaaaacattcttgcctgatattccaccacatgagtatccagggcattcggttgcatgtgaaatatatttgttaggtggtgttagagcagttgagcttggaacacttgctttcggggtagctggggaaaatggtgaacctgatactcctgctacacatgagttagttagattggcagcacctagaa

SEQ ID NO: 279075 - DNA, 715 bp, Unknown
  Bacterial polypeptide expressing nucleotide sequence isolated from the Sargasso Sea
agtgctttctgatcttactgggtacaaacacattattccaacacatcaaggtagggcaagtgaaaaaattcttgcaacaattagcgttaaggaaggcgacatcattcctagcaatagccactttgatactacaagagcgaactttgaatttgcacagtcaaatcctatagatcttctttgtgaggagggcttagaccttttatctcctgcaccatttaaagggaatgttgatttagagaaattagaagaactcttgaaggggcctgatagtaacaaaattccgtttgtattaatgacaattacaaacaacacaggtggtggtcaacctgtctcaatggataacttaaaaaaagttaaagagctttgtacaaaatacaacaagatgtttttattagacgcatgtagatttgcagaaaatgcatggtttgtctcacagcgagaagaagagtataaaaatgttgaaataagagaaatagcaaaagaagctttccgacttgctgatggttgcacaattagtttgaaaaaagacggattcggcaatattggtggagttcttgcgtttaatgatgattctttggctgaagctgcaagaaacttattaattcttactgaggggtttccaacatacggaggattagcaggtagagatttagatgctttagcacaaggtcttaaagagataactgataaaaactacttggaatatcgtgcaaga

SEQ ID NO: 279076 - DNA, 866 bp, Unknown
  Bacterial polypeptide expressing nucleotide sequence isolated from the Sargasso Sea
aagtaacaaaattccatttgtactgatgacaattacaaacaacacaggtggtggccaacctgtctcaatggataacttaaaaaaagttaaagagctttgtacaaaatataacaagatgtttttattagatgcatgtagatttgctgaaaatgcttggtttgtctcacaacgagaagaagaatataaagatgttgagataagagaaatagcaaaagaagctttccgtcttgctgatggttgtacaattagtttgaaaaaagacggattcggcaatattggtggagtgcttgcgttaaatgatgattctttggctgaagctgcaagaaatttactgattcttactgaggggtttccgacatatgggggattagcaggtagagatttagatgctttagcacaaggtcttaaagaaataactgataagaactacttagaatatcgtgcgagatcaatttcctatttagctgaaaaagcattgagttatgatatacctgttgttcaacctgcaggcggtcatgcgttgtatattgatgcaaaaacttttttaccagacattccacctcatgaataccctggtcactcggttgcctgtgaaatctacttaattggtggtgtgagagctgtcgaattgggaacgcttgcctttggtgttgcaaatgaaaatggggaacccgatacaccggcaacacatgaacttgttcgacttgcagctccaagaaggacatacacacaaagtcattttgattatgttgctgaagtattagaaaagttagctgagaaaaaagataagttaaaaggatataagatccttgagcaaccaaaattactaagacactttacagctagacttgaacctttaaaataat

SEQ ID NO: 279077 - DNA, 1081 bp, Unknown
  Bacterial polypeptide expressing nucleotide sequence isolated from the Sargasso Sea
gtatttggcttgaagtctcaagaggtaactgttgatttattaacagactcaggaacaggttcaatgtcttccgaacaatgggcagcgattatgcgtggtgatgaggcttatgcaggttctcattcatggcagagatttcaagatgttgtatcagaccttacaggttacaaacatataattcctacgcatcaaggaagagcaagtgaaaaaattttagcaacaataactttaaaagagggagacattgttccaagtaacagtcactttgatacaacaagagctaatttcgaatttgcacaagctaatccaattgatttactttgcggggagggcctagacctactttctccatcaccttttaaaggaaatattgatttagataagcttgaggaactattaaagggtcctgaaagtgaaaaggtgccttttgttttaatgacaataactaacaatactggcggaggacagccagtatccatggataatttaaagaaggtaaaagacttatgcttaaaatacaacaaaatgtttttacttgatgcctgtcgttttgcagaaaatgcatggtttgtatcgcaaagagaaaataaatacaaagatgttgaaataagaaatattgcaaaggaagcattcagactagccgatggatgcacaattagtttaaaaaaagatgggtttggaaatattggtgggcttctcgcacttaatgatgattcccttgcagaagcagctcgaaatttattgattctaacagaaggttttccaacatatggaggactcgcaggtagagacttagatgctttagcccaaggattaaaggagataacagataaaaattatttagaatatcgagcaagatcaatctcgtatttaagtgaaaaagcaattagctatggtattcctgttgttcaacctgcaggtggtcacgccttgtatattgatgcaaaaacattcttgcctgatattccaccacacgagtacccagggcattcggtagcttgtgaaatatatttgttagggggtgttagagcagttgaacttggaacacttgctttcggagtagctggggaaaatggtgaac

SEQ ID NO: 279078 - DNA, 739 bp, Unknown
  Bacterial polypeptide expressing nucleotide sequence isolated from the Sargasso Sea
atgaatttcagaaccatcattgaaccttttgtcatcaagagtgtggaaccgcttcaaatgacaacagaagcagagcggatacaggccctggaggaggcagaatacaaccttttcaagattccatccagtttggtaatgatagacctgctgaccgacagtggtaccggtgccatgagcaatgaacaatgggcagcaatcatgcgtggagatgaatcctacgccggcagcccaagctttgaacgattggaagcaacagtgaaggatctcttcggttttcaacatgtcatcccaacgcaccagggccgggcagcggaaaggatttttttttcaaacatggttaaggccggacaagttgtaccgaaaaatacccattctgacaccacccggggaaacatcgaatttcttggcgcagaagcggtagatctggtgatccccgaggggctggacccccagaagagacatcctttcaaaggcaacatggatgttaataaactggaggaacttattgaaacaagaggcccggaaaagattccactctgcctgcagaccattaccaataattccggaggcggacagccagtatctatggaaaacatcctttccgtcagaaaagtcctggaccgtttcggaattcccctttatttggacgagtgtcgttttgccgaaaatgcttatttcataaagactcgcgaaatgagtacgaagacaaatccatcaaaaccattgttcgtgaattaat

SEQ ID NO: 279079 - DNA, 1384 bp, Unknown
  Bacterial polypeptide expressing nucleotide sequence isolated from the Sargasso Sea
tatggactttgagacaataatcgaacctttcaaaataaaatctgttgagtctttacctatcaccactcctgaagagagaaaagaatatcttgcaagagaacattcaaatgtatttggtcttaaatcacaagaggtaacaatcgatttactgactgattcaggtacgggctcaatgtcctctgaacaatgggcttcattaatgagaggagacgaatcatatgcaggttctaaatcatggcaaagatttgaagaggttgttagagacctaactgggtataaacatataattccgacacatcaaggaagagccagtgaaagaatacttgcttctatatgtgtaaagagcggagatattattcctagcaatagccattttgatactactcgagctaattttgaatttgctgaatcaactccagttgacttactttgtaaagaaggactcagcttgttagacccttcagattttaagggtaatgttgacctagaaaaattagaggaacttcttaaaagtgaggatggttcaaaagttccatttgttctcatgaccataacaaacaataccggcggaggacagcctgtatcaatggagaatttaaaagcagtaaaagcattatgtaagaaatataagaaaatgtttttacttgatgcctgtagatttgctgaaaatgcatggtttgtctcacaaagagaagatagttataaaggtaaaaaagttagagacattgctaaggaagcctttaggcttgcggatggttgttcaataagtttgaagaaagatggttttggaaatattggtggcttacttgctttaaatgatgatcagttagcagaggatgctaagaatttgttaattttaacagaaggctttccaacttatggaggactagcaggaagagacctagacgcattagcacaaggattaattgagattacagatgaaaactatctccaatacagggcaaggtcaatagcttatctaggagaaaaggctatcagctatggtttaccaatagttcaacctgcaggaggtcatgctttatatatagatgcaaaaacatttttacctgatattcctcctcatcaatatccaggacaagctgtcgtttgtgaactctatcttcttggaggtattagaactgcagaattagggacgtttgcttttggagttgctggtgaaaatggtgaaaatgatactccagctactcatgaattagtaagacttgccgcaccaagaagaacttatacccaaagtcattttgattatgtagctgaagtattagaaaaacttgttgaaaataaagataagttaaaagggtatgagattaccgaacaatcaagattcttaagacatttcacagcaaagcttaaacctttaagctag

SEQ ID NO: 279080 - DNA, 1381 bp, Unknown
  Bacterial polypeptide expressing nucleotide sequence isolated from the Sargasso Sea
tatgaagttcaagacaatcattgaaccgtttaaaattaaatctgtagagtctctacccataactactccagaagaaagaaaaagtttcttagaaagagaatactggaatgtatttggtttgaagtctcaagaggtaactgttgatttgttaacggattcaggaactggctcaatgtcttctgaacaatgggctgcgataatgcgtggtgatgaagcatatgcaggctctcactcttggcaaagatttcatgatgttgtatcagaacttacaggttacaaaaatataattcctacgcatcaaggtagggctagcgaaaagatattagcgacagtgatggtaaaagagggagatataataccgagtaatagtcactttgatacaacaagagctaattttgaatttgtcaaagctgaacctttagatttactttgtaaagaaggattagatttattgtcccctgcaccttttaaaggaaacatcgatcttgaaaaacttgaagatattttaagtaaaaaaagtgaaaaaattccatttgttttgatgacaattacaaataatacaggtggcggtcaaccagtctcaatggagaatcttaaaaatacaaaaaaactttgtgagaaatacaacaaaatgctgttactagatgcctgtaggtttgctgaaaatgcatggtttgtgtcacagagagaggaagattataaggatgtagaaataagagagataactaaagaagcttttaggcttgctgacggttgcacaattagtttgaagaaggatggtttcggcaatattggaggagttttggcatttaatgacgatgagcttgctgaagcctcaaggaaccttttaattttgactgaaggttttccaacatatggtggccttgctggaagagatcttgatgcacttgcacaaggtcttaaagagattacagataaaaattatcttgaatacagagcaaggtcaatctcatatttgggtgaaaaagctttgagttacggtatcccaattgttcagcctgcaggtggccatgccttatacatagatgcaaaaacctttgttccacacataccttctcatcagtatcctggtcattcagttgcgtgtgagatatatttaattggtggcgttagagctgttgaattaggtaccttggcatttggagtcgctggtgaaaatggtgaacctgataaaccagcaactcatgagttagtaagacttgcagctccaagaagaacttatacacaaagtcattttgactatgtggcggaagttcttgaaaaacttgctgaaagtaaagaaaaacttaaaggctatgaaattattgagcaaccacaacaattaagacactttactgctaaattaagaccattaacatga

SEQ ID NO: 279081 - DNA, 1387 bp, Unknown
  Bacterial polypeptide expressing nucleotide sequence isolated from the Sargasso Sea
atgcgtcgtatacccgagccgtttcgtatcaagatggtcgagcccatcaaacagaccactggcgccgagcgccgcgccgccctcgaggctgctggctggaaccccttcctgctgctggccgaggatgtctacatcgatctgctgaccgacagcggcaccggcgccatgtccgatcgtcagtgggccggcatcatgatgggggatgaagcctatgcgggcagccgcaacttcgtcgagctggagcgcgcggtgcgcgagatctttggctatcagcatgtgatgcccacccaccaggggcgcggggccgagcagatcctcttccccgagctggtcaagcgctgccagggcaaggcgccggtcttcatctccaactaccacttcgataccaccaaggcgcacgtggagttggctggcgcgcgggccatcaacctgctcaccccgaaagccctcgacaccacggccccctacgcctggaagggggatttcgatctcagccgcctgagcgacaccatcgagaccctgggggccgacaacgtggccggcatcatcatcacggtcacctgcaacagcgccggcggccagccggtctccatggccaatatgcaggcggtctccgagctggcccgttgccaccatattccggtggtgatcgacgccgcccgcttcgccgagaacgcctggtttatcaaggagcgggatccggcctatgccaagcgcagcatcaaggatatagtgcgccagatgtttgcgctgggggacatcttcaccatgtcggccaagaaggacgggctggtcaatatcggcgggctctgctgcttcaaggaagatctcgagctgttccgtgcggtgcaggtgcgctgtgtggcgatggaggggtttgtcacctatggcggccttgccgggcgggacatggcggcgcttgccatcggcctgcgcgaggggatggatgaggagtatctgacttatcgcatcagtcaggtggcgtatctcggcgagcggctggccgaggcgggcatcccgatccagacccccaccggcggccatgcggtgtttgtggatgccaaaaagttgctgccccatattccgtccgagcagttcccggcccatgcgctcgcctgcgcgctctatctggaaggaggcgtgcgcggggtggagataggctccctgctgctcgggcgcgatcccactaccggcaagcaggaggcggcggacttcgagctgttgcgcctcaccattccgcgccgggtctacacccgggatcacatggactatgtggccgactgcctgatcgcggtgaaagcgcgggccagcgacattcgcgggctcacctttgactacgagccgccgctgctgcgccacttcaccgcgcggctcaagccggtctgat

SEQ ID NO: 279082 - DNA, 1438 bp, Unknown
  Bacterial polypeptide expressing nucleotide sequence isolated from the Sargasso Sea
gatgtatttcaaccataaagataatgatatcgttattaaagtcagttacaatctctgtatgaagttcaagacaataattgaaccgtttaaaatcaaatctgttgaatctctccccataactactcccgaggaaagaaaaagctttttagaaagagaacattggaatgtatttggcttgaagtctcaagaggtaactgttgatttattaacagactcaggaacaggttcaatgtcttccgaacaatgggcagcgattatgcgtggtgatgaggcatatgcaggctctcactcttggcaaagatttcatgatgttgtatcagatcttacaggttacaaacatataattcctacgcatcaaggtagggccagcgagaaaatattagcaacagtgaccgtaaaagagggagatataatacccagtaatagccacttcgatacaacaagagctaactttgaatttgtaaaagctgaacctatagatttactttgtaaagaaggattagatttattgtcacctgcaccttttaaagggaacatcgatcttgaaaagcttgaagatattttaagtaaaaaaggtgaaaaaattccatttgttctgatgacaattacaaataatacaggtggtggtcaaccagtctcaatggagaatctaaaaagtactaaaaagctttgcgaaaaatataacaaaatgcttttactcgatgcatgtaggtttgctgaaaatgcttggtttgtttcacagagagaagaagattataagggtgtagaaattagagatataacaaaagaagcatttaggcttgctgatggttgcacaattagtttgaaaaaggatggttttggcaatattggaggaatcttggcgtttaatgatgatcagcttgccgaagcttcaaggaaccttttaattttgaccgaaggctttccaacttatggcggccttgccggacgagatctagatgcacttgctcaaggtctcaaagagattacagataaaaattatcttgaatacagagcaaggtcaatctcatatttgggtgaaaaagctttgagttacggcattccaattgttcagcctgcaggtggccatgccctctacatagatgcaaaaacttttgttccacacatacctcctcatcaatatcctggtcattcagttgcgtgtgagatatatttaattggtggagttagagctgttgaattaggtactttggcatttggggttgcaggtgcaaatggtgagcctgacaaaccagcaactcatgaattagtaagactcgctgctccaagaagaacttatacacaaagtcattttgattatgtagcggaagttcttgaaaaactagctgaaagtaaagaaaaacttaaaggctatgaaattattgagcaaccaaaacaattaagacactttactgctaagttaagaccattgacatga

SEQ ID NO: 279083 - DNA, 436 bp, Unknown
  Bacterial polypeptide expressing nucleotide sequence isolated from the Sargasso Sea
gatgcgccagttgaatcaaactggttggatgcataacaggctgcgtatgatagtggccagctttttggtgaaagatttgcatattgattggcgttggggtgagcagtatttcatgtcgaagctgattgatggtgactttgctgccaataacggtgggtggcaatgggcggcctcaacaggcacagatgcagccccttacttccgtatttttaatcctgtgactcaaagtgaacgatttgacccggacggcgtatttataaaacgtatgttgccggagcttgctgatataccaaaaaaacaaatccattggccacatcctttgccgatgtggaatgagtacgttaaacctgtggtggatcacagcaaagcccgattgaaaaccttagagttattccatactgttaaaaaaccgcaggatgaagtggatcatgaatga

SEQ ID NO: 279084 - DNA, 652 bp, Unknown
  Bacterial polypeptide expressing nucleotide sequence isolated from the Sargasso Sea
gtgcttagttaaagctaaagcatataacaacgacatgctggacgatggcgacaaaggcatagtgcattgggtttcagaaattctgtggcgagaattttacagacatataatttataatttccctaaagtatcaaaaaaccttccttttattgattacacaaaaaatatcccatggaatgacgatagcgttgctctgcaaaggtggaaggatggtaaaactggaattccaatcgttgatgcaggtattagggaaatgttagcaacaggttggatgcacaatagattaagaatgattgtcgcaatgtttttgagcaagaatttattaataaattggcaggaaggtgaaaagttttttatgactaaacttatagatggtgatattgcttctaataacggaggatggcagtggagtgcatcaactggaactgatgctgctccttatttcaggattatgaatccagaaactcagtccataaaattcgatcctgatggtgagtatattaagaagtggatacctgagctgagagactgtagtgcgactgatgttcacatgccggctaatcccagtaaatatggctaccctgagccaattgtggatctgaaagaatcaagaaaaaatgcaattgatgtattctccgcaatcaaaagttaa

SEQ ID NO: 279085 - DNA, 730 bp, Unknown
  Bacterial polypeptide expressing nucleotide sequence isolated from the Sargasso Sea
atgcatgaaaatgaatttgatatctatagctatgataaatctagaataaatcaagacttatggccggttggtgagagcaatgtaaagacaatgatttctaattttttagaaaaaaaaggaagcttgtataagactgatagaaactttccttcgatgaaagcaacatccatggcttcaccttatctaaatacaggtgttgtttcatctaagtggtgcttgaatcagtcaagaaattttaattttgatgctttagatgagggagataaaggaatcgttcattgggtatctgagatactttggagagaattctatcgccacataatatttaacaatccaagagtatcaaagggtaaaccctttcaaatgcgatacgagaatattccttgggataacaattcagagtttattgaagcatggaaaaatgggagaacaggcatacccattgttgatgcaggtatcagacagatgattgaaacaggatggatgcataatagactaagaatgattacggcaatgtttttatctaagaatttgcttgttgattggaaaattggtgaggaattctttatgaagcaccttattgatggtgacattgcctcaaataatggcggttggcagtggagtgcatctacaggaactgatgctgctccatatttcagaataatgaatccagaaactcaatcactaagatttgatgaaacaggagaatatattagaaagtatgtaaaag

SEQ ID NO: 279086 - DNA, 640 bp, Unknown
  Bacterial polypeptide expressing nucleotide sequence isolated from the Sargasso Sea
tatgccgcagttaaagataatgaccctggttcaaaaacatggctcaatgaattaatttggagagaattttatcaaatggttgtttatcattttccttatgtaaaatcaggtgcatttcaaaaaaaatatcaacatttaaagtttcctggaaatgaaaccttactaaatgcctggaaaaatggccaaacaggatttccaattgtagatgccgcaatgcgctgccttaatgaaacaggctggatgcataaccgactacgaatgattgttgcttcttttttaacaaagattttactagtcgattggaaaaaaggtgagcgctattttgcctggaaattattagattacgagtttgcatccaataacggtggttggcaatgggcaagtggcacaggttgtgatgccgctccttacttccgtattttcaatcctacatctcaatccaaaacatatgatgaacatggtgaattcattaaaaaatggtgcccagaacttaacctattatcatcaaaacaaattcatgagccaattaccgcaaaagatctgccagtaaattttgaactaggaaagacttacccaaaaccaatagtaaattataaagaccagcgtctaaaagctcttgagttatataagtcagtctagt

SEQ ID NO: 279087 - DNA, 361 bp, Unknown
  Bacterial polypeptide expressing nucleotide sequence isolated from the Sargasso Sea
ttagacaagggagataaaggaatcgttcactggttatcagaaatactttggagagaattctatcggcacataatatttaattatccaagagtatcaaaaggcaaacctttccaaattcgctatgagaatatcccttgggagaataatccagaatttattgaaccatggaaaaatggaagaacaggtatacctatagttgatgcaggaatcagacaaatgattgaaacagggtggatgcataatagattaagaatgattgtggcaatgttcttatctaagaatttgctggtggattggaaaataggcgaagaattttttatgaagcatcttatagatggagatattgcttcaaataatggtg

SEQ ID NO: 279088 - DNA, 778 bp, Unknown
  Bacterial polypeptide expressing nucleotide sequence isolated from the Sargasso Sea
gatctcgaatttcttagagaaaaaaggaaccctttacaaaactgataggaactttccttcgatgaaagcaacatctatggcttccccttatttgaatacaggtgttgtttcttcaaagtggtgcttgaatcaatcaagaaattttaattacgatgctttagacgagggagataaaggaatcgttcactgggtatcagaaatactttggagagaattctatcggcacataatatttaattatccaagagtatcaaaaggcaaacctttccaaatgcgttatgagaatatcccttgggagaataatccagaatttattgaagcatggaagaatggaagaacaggtatacctatagttgatgcaggaattagacaaatgattgaaacagggtggatgcataatagattaagaatgattgtggcaatgttcttatctaagaatttgctggtggattggaaaataggcgaagaattttttatgaagcatcttatagatggagatattgcttcaaataatggtggttggcagtggagtgcttctacaggaactgatgctgctccgtatttcagaataatgaatccagaaactcaatcattaagatttgatgaaacaggagaatatattaggagatatgtaaaagaacttcgagattgcccaaataaagaagttcatatgccaagcaatccaaaagatcttgggtatgttgagccaattgttgatttaaaaacttcaagacaaaaagccatcgatgtatttggcagcattaaaaaagataattaa

SEQ ID NO: 279089 - DNA, 907 bp, Unknown
  Bacterial polypeptide expressing nucleotide sequence isolated from the Sargasso Sea
cttgtacggccacactgaatacgagttacgtgagcgtgttcgggatagcaatgtcagtgccactttcgctaatgcgggtaaagcctgcttttggtttgaccgcaaagccgtgatgcctccggggtcaatactcagcaaaaccggtggcatttatcagatttttacgccttttaagaaaacctggctggcgcgtttacgtgaagcggggatacgctgtttccctaaaccgaaagctttagcagaaacaaaactgcagttgccacaatggcctttgatgaagcaaggagatggcagttcagaggcttatgctgtggatgaactgcatattctcgaacagatgcgccagttctgccgggataaagctagcttttatcaaacagagcgtgactttccggctttggatggaacctcatctttatcggcttatctggcgataggcgttgtttcagcgcagcagtgcattagtcgtctgcaattggaagctgcgaatgactgggacagagaaaaatcaggggctgcagtctggttatctgagctggtatggcgggatttttatcatcatattctgatggcttttccagagctgattaaacacaaagccttccaaaaagatacggacggtattgtctggcctaataatcagcaactgtttcaagcctggtgtaatggacaaaccggttatccgatagtagatgctgcgatgcgccaactgaatcaaaccggttggatgcacaacagactacggatgatagtagcgagtttcctggtcaaggatttacatatcgactggcgctggggtgaacagtatttcatgtcgaagctgattgatggcgacttcgccgctaacaacggcggctggcagtgggcagcttcaacaggcacagatgctgcaccttatttccgtatt

SEQ ID NO: 279090 - DNA, 879 bp, Unknown
  Bacterial polypeptide expressing nucleotide sequence isolated from the Sargasso Sea
tttggaaaatgctgaaaaaatttatttagataaaggatattcaaaaaatttatttcctaaaagaaaaaattctaaaaaaaaatttttaaaagatgtatcaaaaaaagaagacatacttaaacatgctaattggcaaaataaatttttagagcactggaacccttcagaaaaagaagcattagaagttttaaaggaatttttatacaaaaatattacaaattatggtgatcagagagatattccaagtgttaagggaacttctagactttctccttatttagcttcaggccaaattcacgttgaaactatttgggaagaatgtgaaaaattaaaaattaaaaaaagaggatatagaaaatttattaatgaacttggatggagagagtttagttacagcctaataaattattttcctgagatgctaaaagaaaatttaagaaaggaattcaacaattttccttggcaagagaataaaaaatttctaattgcttggaaaaaaggattaacaggatatcccatagtagatgctggaatgagagagttgtatgaaacaggctggatgcacaatagagtaagaatgataacagcttcttttttggtaaaacatttaagaatacattggaaagagggagaaaaacattttcaaaattgtttgttagattttaattctgcgaataatactgcagggtggcagtgggtttcaggatgtggtgctgatgcagctccttattttcgaatatttaatcctattttgcagggagaaaaatttgataaaaaaggggaatatgtaaaaaggtgggttaaagaattaaaagaaattcctgaagagtttattcacagaccttgggagatggaaaataaaattcaaaattttgaatt

SEQ ID NO: 279091 - DNA, 1408 bp, Unknown
  Bacterial polypeptide expressing nucleotide sequence isolated from the Sargasso Sea
tatgagatcagtttgttggttcagaaatgaccttagagttgaggataatcctgctctttataatgcttgtcttacatcaaaatcagttattggaatttttattgttactcaatttcaatggaaagagcacgatgacgctaaagtaaaaattaatttttggtttaggtcattattaaaactcagagatagcctagagaaactcaacatcccgttagttattttggaaactaaagattacgagaatatagcagaaacaatttttaaatttactcaagataataaagtagataatctctactttaataacgaatatccaattaatgagctaagaagagatagaaaagttttttctgaacttaaagagaaaggtataggggtttttaattatcatgaccaagtaatacatgctcctgggactttaaaaacacaaagcgatacaaattttagtgtctacagtccttttaaaaggaagtggtttgctgagcttaaagatgaacaacttaagctcttaccaatacctgaaaaaaaagaagcttcacatttaaaaagttcagatatttctcaatatatttctcaaagtgatacttctaattctcattactggcaaactggtgaagaatttattcaagaaaaaattaaaagttttctttcaactaaaggctcaaagtataaagaggatagaaattttccaggcatagaggcaacatcaaaactatcaccctacataaattctggaatagtttcatcaaaatggtgtcttgttaaggcaatggaaaataataatggtttcttagatgagggtgataaaggtatcgtacattgggtatcagagattctttggagagagttttataaacatataatttataacttccctaaagtttcgatgggaaaaccattcatatcaaatacttccaatattaaatggaatattgatgaaagtgcactgaatagatggaaaaaaggggaaacaggaatacctattgttgatgcaggtatgagagaaatgaatgaaacaggttggatgcataatcgtttgagaatgataacagcaatgtttttgagtaaaaatcttcttatcaattggcaagagggtgaaaagtattttatggaaaatttagttgatggtgacatagcatctaataatggaggctggcaatggagtgcttcaacaggcacagatgcagccccatattttaggataatgaatcctgaaactcagtccttaagatttgatcctaaaggtgactatataaagttttggataccagaattaaaagattgcccaataagcgaaattcatatgccatctgagccagagaaatatggatattttaaacctctagttgacttaaaaatatcgaggcaaaaggcaatagaggcatttcaagacttaaagaatttataa

SEQ ID NO: 279092 - DNA, 940 bp, Unknown
  Bacterial polypeptide expressing nucleotide sequence isolated from the Sargasso Sea
attcctattccttcaccagtaagtcagataaatatctctcatcagaatgaatttgatatttataactatgataaatctgaaataaatcaagatctttggcctgtcggcgagactaatgcacagataatgatctcaaatttcttagagaaaaaaggaactttgtataaaaccgataggaactttccttcgatgagagcaacatctatggcttccccttatttgaatacaggtgttgtttcgtcaaagtggtgcctgaatcagtcaagaaatcttaattatgcggtaagtctagctccacctcttaaatataataatgctttagatgagggagacaaaggaattgttcactgggtgtctgaaatactctggagagaattctatcggcacataatatttaactacccaagagtatcaaaaggtaaacctttccaaatgcgttatgagaatatcccttgggagaataatccagtgtttattgaagcatggaaaaatgggagaacaggcatccctatagttgatgcaggcataaggcaaatgattgaaacaggatggatgcataatagattaagaatgatcgtagcaatgtttttatccaagaatttgctagtagattggaaaataggtgaaaagttttttatgaagcatcttatagatggtgatattgcctcaaataatggcggttggcagtggagtgcttctacaggaactgacgctgctccgtatttcagaataatgaatccagaaactcaatcacttagatttgatgaaacaggcgaatatattaagaaatatgtaagagaacttcgagattgtccaaataaagaagttcatatgccaagcaatccaaaagatttaggttatgttgaaccaattgttgatttaaagacttcaagacaaaaagccatcgacgtatttggcagcattaaaaaagataattaaa

SEQ ID NO: 279093 - DNA, 1414 bp, Unknown
  Bacterial polypeptide expressing nucleotide sequence isolated from the Sargasso Sea
gatgaaaaatttagtttggtttagaaatgatctaagggtttatgacaatcctgctttggatgcagcatgtaatgctaataatgaggttgtagcggtctatattgtcagtgaatcacagtgggatgagcataatgattctgtaaataagatttcattttggtttagatgcttagttgagctcgagaaagagcttaaaaaaataaatattcctctaatcattttaaaatcagatttttataaagatcatccaaaaaaacttctagagttttcaactgaaaataatttagacaatatcttctttaatattgaatatccagtaaatgaaagaaaaagagacgaagaagttactcagacttttgaaaatcaaaataagggagtattttcattccatgatcaggttattcataaacctggaacattaaaaacaaaagctgggggagatttctcagtttatagtccctttaaaagatgttggtttgctgaattagattatgcaatgcttgaagaaattcctattccttcaccagttagtcagataaatatctctcatcagaatgaatttgatatttataactatgataaatctaaaataaatcaagatctttggcctgtcggcgagaccaatattcagataatgatctcaaatttcttagagaaaaaaggaactttgtataaaaccgataggaactttccttcgatgaaagcaacatctatggcttctccttatttgaatacaggtattgtttcgtcaaagtggtgcctgaatcagtcaagaaattttaattatgattctttagatgagggagacaaaggaattgttcactgggtgtctgaaatactctggagagaattctatcggcacataatatttaactacccaagagtatcaaaaggcaaacctttccaaatgcgttatgagaatatcccttgggagaataatccagtgtttattgaagcatggaaaaatgggagaacaggcatccctatagttgatgcaggcataaggcaaatgattgaaacaggatggatgcataatagattaagaatgatcgtagcaatgtttttatccaagaatttgctagtagattggaaaataggtgaaaagttttttatgaagcatcttatagatggtgatattgcctcaaacaatggcggttggcagtggagtgcttctacaggaactgacgctgctccgtatttcagaataatgaatccagaaactcaatcacttagatttgatgaaacaggcgaatatattaggaaatatgtaaaagaacttcgagattgcccaaataaagaagttcatatgccaagtaatccaaaagatttaggttatgttgagccaattgttgatttaaagacttcaagacaaaaagccatcgacgtatttggcagcattaaaaaagataattaa

SEQ ID NO: 279094 - DNA, 1435 bp, Unknown
  Bacterial polypeptide expressing nucleotide sequence isolated from the Sargasso Sea
gatgagtaacacagcattttctttagtttggctgcgtaatgacttacgtgtctacgacaatcaggccttatttgaggcctgtcaggcagggttacctgtggtagcactttttgttgccacaccggatagctggctgcagcattttatggcaccgatgaaacaagattttattcgtcgtcgtgtgcaacagttacagactgaacttgcggctttgaatatccctctactggcgattgaaggaagtcattactctgctctaccagagctgatgcagcagttgatcgatgcaggtgcagaagccttgtacggccacactgagtatgaactgcgtgagcgtatgcgtgaccgcaaggtcagtgctacttttgctaatgcgggtaaagcctgttattggtttgaccgcaaagctgtgatgccaccgggttccatactcagcaaaaccggtggcatttatcagatctttacaccatttaagaaaacctggctgacaggtttgcgtgaagctggtgtgcgctgttttcctaaacccaaaatgatgccggacataaagctgcgactgcccgaattgcctttgatgaaacaaggagatggcagctcgctggcttatacagtagatgagctacaggttcttgagcagatgcgtcagttctgccgggacaaagcagctttttatcaagcagaacgcgactttccggccttggatggtacttcgtctttgtcggcttatctggcgattggggttatttcagcgcagcagtgcattagccggctgcaactggaagctgcaaatgactgggacagagagaaatccggtgctgcggtctggttatctgagctggtgtggcgggatttttaccatcatattctgatggcttttccagagctgattaaacacaaagcgtttcaaaaagacacagatggcattgtctggccaaataatcctgcgttgtttcaagcctggtgtgatggaaaaaccggttatccgatagtggacgctgcgatgcgccaactgaatcaaactggctggatgcataacagactacgcatgatagtcgcgagttttctggtcaaagatttacatatcgactggcgctggggtgaacagtattttatgtcgaagctgattgatggagattttgcggccaataatggcggctggcaatgggcggcttcaacaggcacagatgcagcgccttatttccgcatctttaatcctgtcactcaaagcgaacgttttgacccggatggcgtatttataaaacgtatgttgccagagcttgctgaagtgccgaaaaaacaaattcactggccccatcctttgcctatgtggagtgactatgtcaaacccgtggcagatcacagtaaagccagacttaaaaccttagagttgtttcacactgtaaaaaaaccgcaggatgtaatggatcatgaatga

SEQ ID NO: 279095 - DNA, 1220 bp, Unknown
  Bacterial polypeptide expressing nucleotide sequence isolated from the Sargasso Sea
tatgactactgctttattctggttcagaaaagacctcagattgaaggacaatatcgcatgggcgaaggcatgcgaagctcatagaatccacccagtattagttttagaacctgagcttatttcaaatgccggatcataccgacggcgacagtttttcttaaatgtttccgctctagctgcagaaatcaaatcaataggcggggagctaagtgtcatacaaggacctgcgaaagatgtccttccccgatatatcatagagaacaacgttgactgcatatatttcaatgcagatacgacacccttttctcgacaaagagatgagcatatagctaaagatatcagtattcccattaatacaagttggagtgggttagttcacccccccgaaactgtgttaacccaaaaaggtgaaatctctaaagtctttactccgttctataaaaaatgggtcacgcttcctgctccaccctcaatccaagaaagtcgacctaccttcgtagacgttcaacagaacacacaggatgaaactcaagacttaataccaagcacctccaatgagggacacaaagctgctatagaaagatttgaaagattcttaaaagtagtagatgactaccaagagtcccgaaattttccttctgaagatgggacatcttttctttcctcggatcttcattttggcacgatagggccaagggagatcctacacaggctttctccgaacagagaaggccataggcagttcattcgacaacttgcttggcgtgactggtactcccacctattattcgcaaatcaagatatccccaacaaagctgcaaatccatcgtatgacagtattccatggagagatgatcccgaagaatttgagaactggaagaaaggtcaaactggataccccattgtcgatgccggcatgaggcagctatcggcaactggatggatgcacaacagggtcaggatgatcaccgcttcatttctcgttaagcacctgctaatagactggagaaagggcgagaagtactttcgcaagatacttattgacggtgacgtagctcagaactgtggaaactggcaatgggtagctggtacaggtttcgacgcagcgccctactttagagttttcaatcctatgcttcagtcgaaaaaatttgaccctatgggtcgctatatccggcgttgggtccagaactggaaggtttatcaaatgccgaaataca

SEQ ID NO: 279096 - DNA, 1084 bp, Unknown
  Bacterial polypeptide expressing nucleotide sequence isolated from the Sargasso Sea
gatgtcaaaaaaaagtttagtttggataagagatgatttaagaattaaagataatccagctctatcttacgcaacaaataatcacgaaattgtatcagtattatatatatataattcgtatctatttgatggaaaaagggaagctcagaaatggtggttatataaatcattagtaagtttaagaaaacacctattaaattctaatataaacttagaaatcatatctggtaaagagataaatctattaaagaaaataaaaaaagaacaaaatttatcaatatactggaataaagtttacgaacctaatcaagaaaaattagaaaaagaatttatagatcatctagaaaaagaaaaaataaattataagttttttaaaggaaatattttacttgaatttcaggaagtaaaaaaagatgatggaacaccttttaaagtatttactccattttggaaaaatgcagaacaaaaatatttaaaaaagaatccttcaaaacctttgacaattaaaaaactaaagaaaattgaaaaaatttttaaaaaaacaacaaatgaaaaagaaattttaccaattaaaaattggtataaaaaatttgaaaattactggcaaccatcagaaagtgaggctttaaaaacttctaaggaatttattaaaaataaaatttctaaatatggtgatactagagattttccaaatatagagggtacttcaaaaatttccccatatttaaagcatggacaaattggggttgaaacattatggagattctgcaatgaaataaaaaataaaggtaaaggttatagaaaatacgttaatgaattaggatggcgagagttttctcatagtcttattaataattttcctgaaatgcttgaaggtaaccttagaaaagaatttgataattttccttgggtagtaaataaaaaatatttacaaacatggaaaaaaggaatgactggttaccctattgtagatgcgggaatgagagaattatatgaaactggttggatgcataacagactgagaatgatagtggcttcattcttagtgaaacatttaagaattcattggaaagaaggagaaaaa

SEQ ID NO: 279097 - DNA, 1414 bp, Unknown
  Bacterial polypeptide expressing nucleotide sequence isolated from the Sargasso Sea
atgagaaatttagtttggtttaggaatgatctaagggtttatgacaaccctgctttggatgcagcatgcaatgctaataatgaagttgtagccgtatatattgtcagtgaatcacagtgggatgagcataatgattctgtgaataagatttcattttggtttagatgcctggttgagctcgaaaaagagcttaaaaaaataaacattcctctgattattttaaaatcagatttttataaagatcatccaaaaaaacttctagagttctcgactgaaaataatttagataatgtcttctttaatatcgaataccctgtgaatgaaagaaaaagagatgaagaagttactcagacctttgaaaatcaaaataagggagtattttcattccatgatcaagttattcacaagcctggaacattgaaaacaaaagcaggaggagatttctcagtttatagtccctttaaaagatgctggtttgctgaattagattatgcaatgcttgaagagatccctattccttcaccagtaagcccaataaatatttctcatcagaacgaatttgatatctataactatgataaatctgaaataaatcaagatctatggcctgttggcgagactaatgtgcaaataatgatttcaaattttttagagaaaaaaggaaccttgtataagactgatagaaactttccctcgatgaaagcaacatctatggcttccccttatttaaatacaggtattgtttcatcaaagtggtgcctgaatcagtcaagaaattttaattatgatgctttagatgagggagacaaaggaattgttcattgggtatctgagatactctggagagaattctatcgacacataatatttaactacccgagagtatcaaaaggcaaacctttccaaatgcgttatgagaatatcccctgggagaataatccagagtttatcgaagcatggaaaaatgggaaaacggggatacctatagttgatgcagggatcagacaaatgattgaaacaggatggatgcataacagattaagaatgattgttgcaatgtttttatctaagaatttgctggtagattggaaaataggtgaagagttttttatgaagcatcttatagatggagatatcgcttcaaataatggcggttggcagtggagtgcttctacaggaactgatgctgctccgtatttcagaataatgaatccagaaactcaatcacttaaatttgatgagcaaggcgaatatattaggaaatatgtaaaagaacttcgagattgctcaaataaagaagttcatatgccaagtaatccaaaagatttaggttatgttgaaccaattgttgacttaaagacttcaagacaaaaagccattgatgtttttggcagcttaaaaaaagaaaattaaa

SEQ ID NO: 279098 - DNA, 1414 bp, Unknown
  Bacterial polypeptide expressing nucleotide sequence isolated from the Sargasso Sea
gatgagaaatttagtttggtttagaaatgatctaagggtttatgacaatcctgctttggatgcagcatgtaatgctaataatgaggttgtagcggtctatattgtcagtgaatcacagtgggatgagcataatgattctgtaaataagatttcattttggtttagatgcttggttgagctcgaaaaagagcttaaaaaaataaatattcccctaatcattttaaagtcagatttttacaaagatcattcaaaaaaacttctagagttttcaactgaaaataatttagacaacatcttctttaatattgaatatcctgtaaatgaaagaaaaagagatgaagaagttactcagacttttgaaaatcaaaataagggagtattttcattccatgatcaggttattcataaacctggaacattaaaaacaaaagctggaggagatttctcagtttacagtccctttaaaagatgttggtttgctgaattagattatgcaatgcttgaagaaattcctattccttcaccagtaagtcagataaatatttctcatcagaatgaatttgatattcatagctatgacaaatctaaaataaatcaagatctttggcctgtcggcgagactaacgtccagacaatgatctcaaatttcttagagaaaaaaggaaccttatacaaaactgataggaactttccttcgatgaaagcaacatctatggcttctccttatttgaatacgggtgttgtttcgtcaaagtggtgcttgaatcaatcaagaaattttaattacgatgctttagatgagggagataaaggaattgttcactgggtgtctgaaatactttggagagaattctaccggcacataatatttaattatccaagagtatcaaaaggcaaacctttccaaatgcggtatgagaatatcccttgggagaataatccagattttatcgaagcatggaaaaatgggagaacggggatacctatagttgatgcaggaatcagacaaatgattgaaacagggtggatgcataatagattaagaatgattgtggcaatgttcttatctaagaatttgctggtggattggaaaataggcgaagaattttttatgaagcatcttatagatggtgatattgcttcaaataatggtggttggcagtggagtgcatctacagggactgatgctgctccgtatttcagaataatgaatccagaaactcaatcactaagatttgatgaaacaggtgaatatattaggaaatatgtaaaagaacttcgagattgcccaaataaagaagttcacatgccaagtaatccaaaggatcttggctatgttgagccgattgttgatttgaagacttcaagacaaaaagccatcgacgtatttggcagcattaaaaaagataattaa

SEQ ID NO: 279099 - DNA, 1170 bp, Unknown
  Bacterial polypeptide expressing nucleotide sequence isolated from the Sargasso Sea
gatgagaaatttagtttggtttagaaatgatctaagggtttatgacaatcctgctttggatgcagcatgcaatgataacaatgaagttgtagcggtctatattgtcagtgaatcacagtgggatgagcataatgattctgtaaataagatttcattttggtttagatgcttggttgagctcgaaaaagagcttaaaaaaataaatattcctctaatcattttaaaatcagatttttataaagatcatccaaaaaaacttctagagttttcaactgaaaataatttagacaatatcttctttaatattgaatatcctgtagatgaaagaaaaagagatgaagaagttactcaggcttttgaaaatcaaaataagggagcattttcattccatgatcaggttattcataaacctggaacattaaaaacaaaagctgggggagatttctcagtttatagtccctttaaaagatgttggtttgctgaattagattatgcaatgcttgaagaaattcctattccctcaccagcaagtcagataaatatttctcatcagaatgaatttgatatttataactatgacaaatctaaaataaatcaagatctttggcctgtcggcgagactaatgtaaagataatgatctcaaatttcttagagaaaaaaggaactttgtataaaactgataggaactttccttcgatgaaagcaacatctatggcttctccttatttgaatacaggtgttgtttcttcaaagtggtgcttgaatcaatcaagaaattttaattatgatgctttagacgagggagataaaggaatcgttcactgggtatcagaaatactttggagagaattctatcggcacataatatttaattatccaagagtatcaaaaggcaaacctttccaaatgcgttatgagaatatcccttgggagaataatccagaatttattgaagcatggaagaatggaagaacaggtatacctatagttgatgcaggaattagacaaatgattgaaacagggtggatgcataatagattaagaatgattgtggcaatgttcttatctaagaatttgctggtggattggaaaataggcgaagaattttttatgaagcatcttatagatggagatattgcttcaaataatggtggttggcagtggagtgc

SEQ ID NO: 279100 - DNA, 440 bp, Unknown
  Bacterial polypeptide expressing nucleotide sequence isolated from the Sargasso Sea
tttggatgcggcgatgcgtcagctcaacgccacgggctggatgcataatcgattacgcatgattaccgccagttttttggtgaaggacctgctgattgactggcgtaaaggcgaacaatatttcatgtcgcaactgattgatggtgacctcgcggccaataacggcggctggcagtgggcagcctcaaccggaaccgacgccgcaccgtatttccgtatctttaaccccacgacgcagggcgaaaaattcgaccgtgacggtgagtttatccgccagtgggtgccggaactgcgcgacgtgccgggtaaagccattcatgacccgtggtcgtgggcagaaaaagcgcaggtaacactaagttatcctcgcccgattgtggatcataaacaggcaaggctggcgacgctggcggcatatgaggcggcgcgtaaaggatagc

SEQ ID NO: 279101 - DNA, 952 bp, Unknown
  Bacterial polypeptide expressing nucleotide sequence isolated from the Sargasso Sea
agggcgtggcatgcccgagagcctcaaccatttccgttaccgcctcgatcgaggcaacaccgagggagttcatccccttgtgatggagacggaaaccaaggtcattcgagcggagggctgtgcccgagcagctgagcagctcaaggcaaagggcttcacgccagatttgatctgtgcccatcccgggtggggtgaaccattgtttctgaaggcgatctggcctgatacgcccctgctttgctaccaggaatttttctacaacgagttcggcttcgactccaacttcgatccggaattccaggacaaccgcggttggcaagagcaggcgaagctcacgatgaaaaacgcctatctgcatctcaccctcgagcaggcggattggaacatctctcccacgcactttcaggccagcagctttcccgagcactggcggcgtcggatcagcgtgatccatgacggtgtggacacaagtaaggccgttcctaattcagccccggggccgctcaagcttcccgatggcactcttctcgaaaagggacaactgatcgtcacctttgtgaatcgctgtctggagccctatcggggctgtcatacgttcattcgcgctattcctgagctgcaacggagcaaccctgaggcccgtttggtgatcgtgggacaaaccaagggggtgagttacggagctgcgtgttccgacggtgaatggaaggatcggtttctggcagagatcgagggtcagtacgacccaagccgtgtgcacttcacgggcacgctgccttatggccaatttgtgccactcctgcagctcagtgcttgccacgtctatctcacctatccctttgtgatgagctggagcctgctggaggctatggcttgtggttgtgctgtcgtaggatccaacaccgcaccggtgcgtgaagctattcgccatggccagaacggcctcttggtg

SEQ ID NO: 279102 - DNA, 793 bp, Unknown
  Bacterial polypeptide expressing nucleotide sequence isolated from the Sargasso Sea
aatggcaacaggaggctcaacaaatttagtacttcacattcccgcaatggctaaggcagcaggcataaatttggctatggaagattttgaagatatagcaaaactaatacccctcatggctaaaatttatccaaatggtttagctgacgtaaatcactttcatgccgctggcgggctttcgtttatgataaatgaattgttaaatgaaggcttacttcacgatgacgtaaaaaatgtaagtgggcatgggatgaaccagtaccgaagtgaggctcggctaatagacaatgatataaaattttcaccgggtgccgtgaattctgctaaccaaaaaattcttcgcccattcaaggacccatttcaaagaactggggggttaaagcaagttaatggtaatttaggtagtgctataacaaaggtttcggctgttgagccagatctcagagtaattaaagctccagtccgaatttttcacgatcaagaagcaatcaagagagcgtttaaaagcaatgaattcaaagaagatacgatatttgtggtccgttttcagggaccgcgtgcaaatggcatgcccgagttacacagtttaactccagtactgtccaccttacaagaccgaggcttaaaggttgcattggttaccgatggtagaatgtccggggcatcaggaaaagtgccatccgccatacatgttacacccgaagctgctaatggcgggcctatttcaaagcttcgagatggtgatattgttttgctagatgctgacaatggaatacttgaagttcaaactgag

SEQ ID NO: 279103 - DNA, 916 bp, Unknown
  Bacterial polypeptide expressing nucleotide sequence isolated from the Sargasso Sea
atggaactatccttgccgtcaagagacgctattgcaatggctactgctgttggattgagccatggcgtatacgacgctgccatgtgtcttggagtttgcgataagattgttccgggccttgtaattggtgcattaagtcatggtcacattccaatgattatggttcccgctggaccaatgtctagcggtttaccaaatgcagaaaaaacagctatcagacagcagtttgcacaaggcaagattggacgggaagaacttttaaaggctgagtcggccgcttatcatgggccaggtacatgtacgttttatggtactgcaaactcaaatcaaatgttaatggaaataatggggcttcatctgcccggtgctgcatttgaacatcctcattctgatcttcgtaatgctttgaatgttgcggctgctaatcagtccgtcctaatcaatcgacggggaacatcgccaagaccgctgggtcgaatgctagatgaacgcagttttgtaaatgcaattgttggactgcatgcgacgggaggttccacaaaccacacgttacatttacctgcgatggcagcggcggcgggtattgaactactttgggatgattttgctaaactctcaaaagttgtacctttgcttgcaaaaatctatccgaacggtcttgcagatgttaatcattttcatgctgctggtggaataggttttgtactacgtgagttattagaggcaggcttattggatgctaccgcggctactgtctggggtaattcgcttgcagattatgtggttgagccgcgacttgattcaaatggactcaaccatatttctgccccaaaaagctcattggatcaggacattttgaggtcagtttcagcgcccttcagtttgaatggtgggttagtggtactctctggtaatt

SEQ ID NO: 279104 - DNA, 847 bp, Unknown
  Bacterial polypeptide expressing nucleotide sequence isolated from the Sargasso Sea
ttgtttgattactaatgtaaaaaatactgaaagtcctaaatggttaaaagataaattaatttcaattggtcaaaagccaatttcagcaatagttgatgttacaaattatgttatgtttgatatcaaccgtccacttcacgcttatgatgctgataaaattgaaaagggaataatagttcgaaactctaaatctggagaaaaatttactgctctagataataaaaattatgaattagacaatggtatgtgtgtaataagtgataataaaggtgttttaggcttaggtggaattattggaggtactagatctgggacagaatttgatacaaaaaatatattattagaatctgcatattttaaaccttcattaactagaaggacagcaaaaaaattaaaccttgatacagatgcaaaatttagatttgaaagaggtattgatcctttatctattgaagatggtttaaataaagcagcactactaattaaagaaatctgtggaggtgaaattagtaaaatagatattcaaaaaattgaaaattttaaaactaaaacaattaagtttgatcccaatttgtttatgaaaatatctggttttaaaatttctctaaatgaaattctaaaaattttacaagatcttgggtttaaaataaaaaaacagaaaaaaaatttaaatttaataattccatcttggagaccagatatttcacaagaaatagatattgttgaagaattagtaagaatatgtggttatgataaaataaaaattatagatccagttaaagaaagaataaaatctactttaaaccaatcgcaaaaattatttcattttttacaaagagcaattgca

SEQ ID NO: 279105 - DNA, 834 bp, Unknown
  Bacterial polypeptide expressing nucleotide sequence isolated from the Sargasso Sea
tgcggcgctgctgctcggcatctgcgacaagatcgttcccgggttgctgatcggtgcgctgcgcttcgggcatctgcccgccgtgttcgtaccggccgggccgatgccgtccggtctggccaacaaggacaaggccgcggtgcgccagcgctatgccgaaggcaaggccagtcgcgacgagctgctggcggcagagatgcaggcctaccacagtcccggtacctgtaccttctacggcaccgccaacaccaaccagatgctgatggaggtcatgggcctgcacttgccgggctcttccttcgtcaaccctggcacgccattgcgcgatgcgctgaccgccgaggccgcgcggcaggccactcgcctgacgccacagggcggcagcttcacgccgctcggtgagctcgtcgacgagcgcgtattggtcaacgccatcgtcgcgctgcatgccaccggcggctcgaccaatcacaccctgcacatgccggccatcgcccaggcggcgggcatccagctgacctggcaggacatggccgacctttccgccgtggtgccgacgctggcgcgggtctatcccaatggttcagccgacatcaatcacttccatgccgcgggcggcgtcgcgctgctggtgcgcgagctgctcgcggccggcctgctgcacgaggatgtgcataccgtgatgggtcgcggcctcaatcgctacacccgggagcccttcctcgaagacggtcggctgacctggcgtgaaggcgctgcggcgagcctggacgaaagcatcctgcggcctgtcgcgcggccgttctcggccgaaagcgggctgcgggtgatgag

SEQ ID NO: 279106 - DNA, 822 bp, Unknown
  Bacterial polypeptide expressing nucleotide sequence isolated from the Sargasso Sea
attagatacaaaaaatatattattagagtcagcctattttaaaccgagatcaataagaaatactgctaaaaaattaaatattgatacagatgcaaaatttaggtttgaaagaggtattgatccattatccattgaagatggtttaaataaagcagcattattaatcaaagaaatttgtggtggtgaaattagtaaagtagatattcaaaatattgaaacctttaaaactaaaataattaagtttgaccctagtttatttaaaaaaatatctggttataaaatttctgttaaagaaatgcttaaaattttaaatgatcttggatttaaatctaaaaaagaaaaaaattatttaaaattaactattccttcttggagacctgacattttacaagaagaagatatagtcgaagaattagtgagaataagtggttatgataagataaaaattatagatccaatcaaagaaagaaccaaatctactttaacccagtctcaaaaattatttcattttttacaaagatcagtcgcatcaaaaggttatttagaggcaatcacatggtcgtttacagactctaattataaccattattttaagggcacttataaagaaattaaaattgtaaatccaataagttctgagcttggagttttaagaaattcaatattttcaaatttaattatgtatatgaataaaaatttagatagaggttttaaagatttatcaatatttgaaataggtccaatttttactggctctgatccaggacaacaaaatacagtagtttgtgctttgtcagctggtaaaaaatcaagatcatcttg

SEQ ID NO: 279107 - DNA, 904 bp, Unknown
  Bacterial polypeptide expressing nucleotide sequence isolated from the Sargasso Sea
ttttggtaagataaaggatattaaagaaaaaaaaattagttctaatactaagcaaactgtaaaagtaaaaattaataatgaaaaagatcaagcatgtacagcttttggcagttgtttgattactaatgtaaaaaacactgaaagtcctaaatggctaaaagataaattaatttcaatcggtcaaaagccaatttcagcaatagttgatgttacaaattatgttatgcttgatatcaaccgtccacttcacgcttatgatgctgataaaattgaaaagggaataatagttcgaaactctaaatctggagaaaaatttactgctctagataataaaaattatgaattagacaatggtatgtgtgtaataagtgataataaaggtgttttaggcttaggtggaattattggaggcactagatctgggacagaatttgatacaaaaaatatattattagaatctgcatattttaaacctgcattaactagaaggacagcaaaaaaattaaaccttgatacagatgcaaaatttagatttgaaagaggtattgatcctttatctattgaagatggtttaaataaagcagcattactaattaaagaaatctgtggaggtgaaattagtaaaatagatattcaaaaaattgaaaattttaaaactaaaacaattaagtttgatccgaatttgtttatgaaaatatctggttttaaaatttctataaatgaaattctaaaaattttagaagatcttgggtttaaaataaaaaaacaaaaaaaaaatttaaacttaacggtcccatcttggagaccagatattttacaagaaatagatattgtcgaagaattagtaagaatatgtggttatgataaaataaaaattatagatccagttaaagaaagaaattaa

SEQ ID NO: 279108 - DNA, 1462 bp, Unknown
  Bacterial polypeptide expressing nucleotide sequence isolated from the Sargasso Sea
tgttacgcaagggcgtgacggcatggaattatcgcttttttctcgtgatgtgattgcaatgtctaccgctgtttcactttcacatgatgtgtttgatggcgttttttgtttaggcgtatgtgacaaaattgtcccaggtttattaattggcgcattatcatttggccatttacctgtgttctttttacctgcgggtccaatgcagtcgggtatcccaaataaagaaaaagcacgtattcgccaaaagtttgcacaaggcctagttagccgcgaagatttattagaagctgaaagtgcatcttaccacagcgcgggtacttgtacgttttacggtactgcaaactctaaccaaatgttaatggaaataatgggcttacaccttccgggtagctcgtttattaacccgtatacagagcttcgtgatggattaacgggtaatgctgtagaaaccatgcttaagcagcttacagatgataaagaaagcccgtgtttagcagaggtaattagcgaaaaaaccattattaatggtttagttggcttgctatcaacaggtggctctaccaaccacgctattcatattgttgcaattgcaaaggctgctggtattcaagtgacgtggaaagacatgtctgatttatcagaagttgtaccactacttacgcgtatttaccctaacggctctgcggatgtaaatcattttcaagcagccggcggcatgggcttcttaatgcgcgaactagcaagcgcaggctacttacacacagacgttaaaacaatgcttggcgatggtcttgcgccatacatgacagagccgcgtttagataaagacgaaagcctgatcatgagcgattcaaatggtccaagcaaagtgaaatgggttgattgtcctgctaattcacttgatgaagaagtgcttcgtcctgtaagtaatccatttagcaaacaaggtggcttacaactgcttactggtaatttaggtaaagcggttattaaagtgtctgctgtagctgaggagcatcaagttgttactgcacctgctaaagttttcaactcgcaaggagcattacaagacgcgtatacccgcggcgagttaaatcaagactttatagctgtgcttaaagagcagggccctaaagcgaaaggtatgccagagcttcataaattaacgccagtaatggcaacccttcaagaccaaggttttaaagttgctattgtaactgacggtcgtatgtcgggtgcatcaggtaaagtaccagctgcaattcacctagcaccagaagccgttgaaggtggcataattgcaaaaattcaagagggcgacttagttactttagatgcccctaacggaattttaaaagtacatgttagcgacgacgagcttgcaaaacgtgagcttgaaattagccagccaagcttaacatttggtacgggacgtgagttatttactggatttagaaatatc

SEQ ID NO: 279109 - DNA, 463 bp, Unknown
  Bacterial polypeptide expressing nucleotide sequence isolated from the Sargasso Sea
aaaggggcaaattggataaaaagacacttttctaatcatagagtgcacattcttaattttccaggtgacccttatccaattcacattgatgctacttttacacctataagaccgggtctagttttaaataattcatcaaggcaattaccagaggaacaaaaaaaaatattttataataatgattgggaaatagtggatgcagctcaacctgctcataatcaacccccccctttatgttattcaagcgtttggttaagcatgaatgttttagtagttgatcccaaaactgtttgcgttgaagaaagcgaggtataccagttagagcagttagataaactaggtatggaagtaataccagtgccatttagagatgcatatccttttggaggtgcattacattgcgcaactacggatgtttatagagaaggcagttgcgaagattattttccaaaacaaaattgaa

SEQ ID NO: 279110 - DNA, 838 bp, Unknown
  Bacterial polypeptide expressing nucleotide sequence isolated from the Sargasso Sea
atgataccgacaaactttaaaaaattaaaaattcttaatcaagaatatgatgttgctgacataagtaatattacaaatattgaaaacttacctttttctcataggatattaattgaaaatataatacgacaaaaattactaggcagaaataataatgccgatgatcaagtaaaatcaattattgaggggaagattggaacggcaatcaatttttctcctaatcgaattcttagccatgatattttaggcaaggtaatgttagtggactttttggcttatcgagaagccttagaaaataaaggtattagtcaagatttagttcagccagacgtgccagtagatgttgtaattgatcactcccttcaagttgattattttggaagtgacgaagcaaaaattaaaaatttaaaaagagaatatgaacgaaattctgaaaggttttcctttttaagatggtgctcaaaaaatttaaaaaaagttaatgttattcctcctggtgttggaatttgtcatcaagttaatattgaatatttatccaaagtagtttggagggaacaaaaacaagacctaaatttaattcacccagatacttgcattggaaccgatagccatactccaatggtaaacgctattggtgtgctcggttggggagttggtggtgttgaagctgaaatttctatgttaggaaaaactattccaatgactgttcctgaggtagtaggggtaaatttaaataataatttaaatgaaggaattacatctacagatctagttttacatataacaaagcttttaagggcaaataaagtagtaggaagttttatagaattttttggtg

SEQ ID NO: 279111 - DNA, 1282 bp, Unknown
  Bacterial polypeptide expressing nucleotide sequence isolated from the Sargasso Sea
tattccaaacaaagaaaaagcccgggtacgacagttgtatgctgagggcaaagtagggcatgacgagttattagattcggagtctgcctcttatcacagcgctggtacttgtactttctacggtactgccaactcgaaccagcttgtagttgaagtgatgggtttacatttaccaggatcgtcttttgttaatccgggtactgcattacgtgatgaactgacgaaagctgcagcccgtcaggtgactcgtttaacagacttaggcactgattatttacctatctccaaaatcgtggatgtcaaagccgttgtcaacggtattgtgggtttactggccactggtggctctaccaaccacaccatgcacttgatagctgttgcccgctcagctggttttatcgtgaactgggatgactttgctgatttgtcgcatgcgactccactgatcaccagaatttacccgaacggtcaggccgacattaaccacttccagcaggctggtggtatggcgtatttaattcgtactttattagacaatggcttgttgcatgaagatgtgaatacagtggcaggccctggtttgcgtcgttacacccaaactcctgtattgcaggatggcaaattagtgtgggtggatggcccgacagagtcgtctgatctaacagtgttagctgatgcggctaaaccctttaaagatcacggtggtttgcaggtgttatccggcaacgtgggccgtggtgtgattaaaacctcagcacttcgtgaaggtactgaaatagtgcaagcacctgctgtggtgttttccagccagcacgaattagatgccgcttttaaagctggtgaattgaataaagattgtgtagtcgttgtgcgtttccagggcccacgtgcctgtggtatgccagagctgcataaactgactccgcctttgggtgtattacaagaccgcggtttccatgtcgctttagtgacagacggtcgtatgtccggtgcttcaggtaaggtaccagccgctatccacgtcacaccagaagcggttgacggcggtgtgatcgctaaaatccagaccggcgatatgatgctggtggatggtattaacggtgtattaaaagtattagtgtcagatgaagagctggctaaacgccaagctgcaacccgtgatatgagcgacagtcactggggcatgggccgtgagatgtttggcggtatgcgtatggtgatcaccggtgcagaacaaggtgcctgtagtctgtttaacacagaggatcaataccatggctga

SEQ ID NO: 279112 - DNA, 727 bp, Unknown
  Bacterial polypeptide expressing nucleotide sequence isolated from the Sargasso Sea
gatgagaaagtccctgttggccgccgccctgttgctctgccccgccgccttcgccgccaccccccattgggaatacagcggtgaggccggcccggcgcagtgggccagactgaccccggaatttggccagtgcgcgggcagcaaccagtcgccggtcaacctcgacggtctggtcgaggccgagctggccccgctgcagtttcactacctggcggggggccgcagcgtcaccaacaacggccacacggtgcaggtcgactatgccccgggcagcagccttgagctcgacggcatgcgctttgagctcaagcagttccacttccacgcccccagcgaaaacctcatcaagggccactcctatccgctggaagggcacctggtgcatgccaacgccaagggtgagctggcggtggtggcggtgatgttcgagccgggccaggccaatgcggccctgagccaggcctggcaggtgctgccagccaaggccggagaaagccacgccttcaaggagccgatctcggccgaacaactgctgcccgccaaacgcgactactaccgcttcagcggctcgctaaccacgccgccctgctcggaaggggtgcgctggctggtgatgaagcagccggtgcaggtgagccaggctcagatcgacgccttcaaggcggtgatgcaccaccccaacaaccgccccgtgcagccgctgcacggtcggctggtgctgcaataa

SEQ ID NO: 279113 - DNA, 1562 bp, Unknown
  Bacterial polypeptide expressing nucleotide sequence isolated from the Sargasso Sea
aatgaaaaaaatgttactaatcatatgtctaactatttcaactacggtattcgcacaaaccagttctcttgtaattgggggtgtgctagacctcacagtgcctgaaggtggatcttctggaaaggccttacaacttgttgctatagatagtattgcagacctcagtgtttatgctgttggtgttgccaataatggtggtggaactgacggggttgaagcaaatcttcctgcagttgcattagctccaggtgaaagtttctggtttttacgagataccattgcatatcgaaattactttggagatgtttttggtcaatacaatgttaattacgcgattgatggagatgtttcccaaaacggagatgatgccatagaattatttatgatttcaggaggagttgaaacagttgtagatctatatggagatccggctacagatggatcaggagaaacttgggaatatatggatgcttgggcgtatcgtattgatcgtactcctagcgcaacttttgatataactcaatggacaattgctactcccaattgttctgatggatcgacaacaaataatagttcagactgtccatatccaattggagttgttcgatttactttgaatacatccactgcttatggatttaccgattccagcacattggtcattcgaggaagttttaatggctgggctggtaatgattgggaaatggaaaatgttggtggtgattattggacatatcaaaccttagacttagatgatactgtaactcatgaatttaaatatgtaatggttggtgaaagtggtgatacatgggagtcaactagcaaccgtactttaacctttggtgcagatgtaccagatacggcccttgctatggatttctggcaaaatggtacaactcccccatacacaccaacggatagtgtagatgtttggtttcgggttagcacggctggtatcccagattatgatgattgtgatacaatgtatatagctggcaccatgaatggttggtctggtcaacctttaaatgatgaaaattgtacttattggtctggtcaatattctttcggtgttggtgatactattgaatacaaattccaaaatggacttggtggctgggaaagcactggtaatcgtgttgttgtagtaaatcaggacactaccttacaatgggtatattttaatgatactccccctgcagaaggtcctaatggtatgattgttcattttactttgaacacctctaccgctccaggatttacggactcaacaaatacaattgtcattcgtggatcattaaatggatgggatggagttgaatgggaaatggaaaatgttggaggagattactggacttatactacagatactctagctgcaaatactgatgtaaatgctgagtataaatacgttatgattgatgccttagataatgtcaattgggaatcaacagctaatcgtgagttcgccatggcaaactcggaaatagaattattcgttgattactgggaaagtggtgtcactcccccatacacaccaacggatagtgtagatgtatggt

SEQ ID NO: 279114 - DNA, 143 bp, Unknown
  Bacterial polypeptide expressing nucleotide sequence isolated from the Sargasso Sea
tataagtaatatttatgctagagaagaattcagacaccattctttctttagtgatattgctacaggctctattgtcggatttggtttagacggatatgaatttgcattaaacaaaataatgagggggaaagatggatcttaga

SEQ ID NO: 279115 - DNA, 355 bp, Unknown
  Bacterial polypeptide expressing nucleotide sequence isolated from the Sargasso Sea
ggaagaaattgaaaagaaattaggattaatggcttcggagagtgggcatgaactaatttgctatcaaagcaatgccgaacatgacttggtagagcaaattcatcttgcaaaaaaagaaaatgtaaagtgcatagtatttaatcctggagctttcacccatagcagtattgcgattagagatgctctcgcaggtgttgaaataccttttatagaagttcatatctctaatatttatagtagggaagactttaggcaaaaatcttttttatcagatattgctaaaggcgtaatttcaggtcttggtatagaaggatatgaattagcattagattctggaataaaaaaatattcttaa

SEQ ID NO: 279116 - DNA, 269 bp, Unknown
  Bacterial polypeptide expressing nucleotide sequence isolated from the Sargasso Sea
aataattgacttcttgcatttaaatagaggaaaagtagactattgtattttaaatgctggtgcactgactcattattcttatgctttaagagatgccatagttggcactcaaattccaacagttgaagtacatttatcaaatatccataaacgagaaaattttagaaaatcttcggtcataaaaaatgtttgcattggacagttttttggcgaaggaaaacaaagttatataaatggcataaagcatattttggagataaaaaaatgaa

SEQ ID NO: 279117 - DNA, 134 bp, Unknown
  Bacterial polypeptide expressing nucleotide sequence isolated from the Sargasso Sea
cccgcgaagattccgtcgtcactcgtatttatccgatatcgccaaaggtgtgatttgtggtttgggggccaaaggctaccactacgcactggaatcggcggtgtcgtccttatcaaccattccatcaaattaat

SEQ ID NO: 279118 - DNA, 414 bp, Unknown
  Bacterial polypeptide expressing nucleotide sequence isolated from the Sargasso Sea
ccaatctaaaccttttgggaatacgagagccaagtatttatggcgcggatacactcggcgatattgaaaattggatcaatgatgaattgaggaatcaaaatatcaaattacaatggtaccagtctaaccatgaaggcaaaattttagatagactacatagagcaatgaacgataaatccgatgggatcattataaaccctggggcctacacacactattcatatgctattcgtgatgcaatatctgcaatatctattcccactatagaggtacatttgagtgatataaaatcaagagaaaagtttaggcagacatcagtgattgaggatgcttgcctggagcaaatctcaggattaggaaagaatgggtacttagaagctgtatatgctttagaaaaatatataaatagataat

SEQ ID NO: 279119 - DNA, 301 bp, Unknown
  Bacterial polypeptide expressing nucleotide sequence isolated from the Sargasso Sea
agatcttactttcttccaatcaaataatgaaggtgagatagttgattgtattcaagactcgatgaaaaatgccaatgggattattattaatgctggaggactttcacatacatcggtcgctatattagacgcactccttgccattaaagcacccaaaatcgaagttcatatttcaaatctttttatacgagaagattttaggcaccattcatttattagtaagggtgtcaacggaattatttgtggctttggtgcaaatggttatttgctagcagttgatggaatagtaaatttattataa

SEQ ID NO: 279120 - DNA, 109 bp, Unknown
  Bacterial polypeptide expressing nucleotide sequence isolated from the Sargasso Sea
tatgccaaaaatattaattctaaacggaccaaatttaaattttttgggaactcgtgaacccgagatttacggcaaattttctctctccgaggttgaggagatatgtaaa

SEQ ID NO: 279121 - DNA, 295 bp, Unknown
  Bacterial polypeptide expressing nucleotide sequence isolated from the Sargasso Sea
tctaacgttgagggagaaatagttaattttattcaggaaactagaaaggttcatcaaggtatcattattaacgctggtggatacacacatacatctgtggctatacttgatgcgctgcttgcggtaaaaaaaccaacgattgaattgcacataactaacatttacaaaagagaggatttcaggcataaatctttgatcagcaaagcagcagatggaataatttgcggcttaggtgctgatggttatattatggctctcaatggaatcaaaaaaattataaataatgaaaattgat

SEQ ID NO: 279122 - DNA, 217 bp, Unknown
  Bacterial polypeptide expressing nucleotide sequence isolated from the Sargasso Sea
ggcattcactcatacatctgtagctattagagatgcattagaaatatataaaaaaaagaaaatagaggtccatatatcaaatatttacaaaagagaggaatttagacaaaaatctttaataagtgatgtagtaaatggtggaatttttggtcttgggagtgaaggatatattttagccataatagcaatgcataaaatgttaaaaaatgaaaattaa

SEQ ID NO: 279123 - DNA, 160 bp, Unknown
  Bacterial polypeptide expressing nucleotide sequence isolated from the Sargasso Sea
tttccacgtgcataaacgagaagaatttaggcaccactcctatttttcagatatagcaattggagctctttcaggacttggagtcaaaggttatttgcttgcagcagaatttgcagttgattatatagaacaaaaagggaatatcaaatcaggtatttga

SEQ ID NO: 279124 - DNA, 178 bp, Unknown
  Bacterial polypeptide expressing nucleotide sequence isolated from the Sargasso Sea
aatgtctaaaaaaaaagttttagtaatctctggcccaaatttaaaccttcttggaactcgagaaaaaaatatttatggtgatgtttctcttaaagaaatttattttaaattagagaatattagtgtaaacaaaaatcttctggttgaatgcaagcagtcaaactctgaaagtgaaatt

SEQ ID NO: 279125 - DNA, 178 bp, Unknown
  Bacterial polypeptide expressing nucleotide sequence isolated from the Sargasso Sea
cctgggggtagagattccctacgtggagctgcacctcagcaacacccatgcccgggagccgtttcgacatcgctcttacctggctgatcgcgctgttggcgtggtttccggtttcggggcaatgagctactcactggccctgcaaggcctcattgatcaccttcggcagaacggatga

SEQ ID NO: 279126 - DNA, 160 bp, Unknown
  Bacterial polypeptide expressing nucleotide sequence isolated from the Sargasso Sea
atgaaaaatgatattctaattattaatggccctaatcttaatatgctcggaacaagggaaccagatgtctatggtttggaaaccttagaacaaatagaagcaaaatgtatatcctggggagaacaatatagtcttcatattaatttttccccaaagtaat

SEQ ID NO: 279127 - DNA, 227 bp, Unknown
  Bacterial polypeptide expressing nucleotide sequence isolated from the Sargasso Sea
tattaacccaggtgctttgagtcattatagtatagcgataagagacgcaatatcttcaatacataataacgttaacgttgtagaagtacatatatcaaatatttttaaaagagaaaaatttcgccatcattcagttatttctgaagtatgcagctcttcggtaattggatttgggacagaaggttataaattagctttgaataaatttattacatttacggagtaaa

SEQ ID NO: 279128 - DNA, 436 bp, Unknown
  Bacterial polypeptide expressing nucleotide sequence isolated from the Sargasso Sea
tatggacaataaaattttaattattaatggccctaatctagaaatgttaggtaaacgcaaagagagcgtttatggaaatttcacattaaaagatttggaaaacgagctacttaaggagtctgaaacattaggatgtaatcttgattttttccaaagtaatatagaaggagaaataatcaataaaataaatggcttagacgagtcgtacgttggtatcataatcaatcctggtggtttgactcatacctcggtttcattacacgattcccttgaaattaaaacaatatttaaaatagaagttcatttatccaatatatactctagagaggactttcgaagaaagtctctcatagcaccagcttgtgattgttcaattataggtatgggtaaagatggatttatttacgcattaagatatttaataaaaaatatataa

SEQ ID NO: 279129 - DNA, 388 bp, Unknown
  Bacterial polypeptide expressing nucleotide sequence isolated from the Sargasso Sea
tagagagccagagatttatggctcaaaaaaccttgatgatatccaaaaagaattgaccatcattgccaatgaattggggcataagctactacactttcagagtaattcagaaagtgaaatagtggagtggattcatagcaatgctgatgatgcaaaatttttaattattaacccaggtgcattcactcatacaagcatttctataagggatgcgatattaggtacaaatatttcttttattgaaattcatataagcaatattttctctagagaagaattcagaaaagaatcatatttttctgacattgctgaaggcgtgatctctgggcttggatatacagggtacgaacttgcattaagggccgctttagagatgcttaagaaataa

SEQ ID NO: 279130 - DNA, 183 bp, Unknown
  Bacterial polypeptide expressing nucleotide sequence isolated from the Sargasso Sea
aatgaaaatactagtcatacacggtccaaatttaaatctacttggtttaagagagcctgacgtttatggctcaactacaatggaagaaattaatcaaggtttactcgatgtagcaaattctaatgatattgagattgaagcttttcagagtaacgcagagcatgaaattgttactaagcttca

SEQ ID NO: 279131 - DNA, 430 bp, Unknown
  Bacterial polypeptide expressing nucleotide sequence isolated from the Sargasso Sea
atgaccatactaatactacaaggaccgaatcttaatcttttaggaaaaaaatctactgagatcggggattcgctgactctaaataaattgaatagagcaatacgattacatattagagataaagatataaaactaaaaattgttcaaacacataaggaatacattgcccttaactttatccaaagaaataggaatcaggcgaaaggcttaatagttatcccaacatcctgggcaaaatataatcaaaccatcttagaaacaataaatcttacgggcctacaaaccgcagttatttattttaaccagtcgtatagctttgggacatcggaagatgaatcaattcttaagggtgataatattaaaaatttcacagggcaccctattgatgtaactatatcagcaattgactatatagctaatattaaataat

SEQ ID NO: 279132 - DNA, 313 bp, Unknown
  Bacterial polypeptide expressing nucleotide sequence isolated from the Sargasso Sea
aaaatatattcaagtcaaccttatttattttcaatccaatattgaaggagagttaatcaaccaaattcaaaacgctcaagttgatggcattattttaaatgctggcggttatacccatacaagtgttgctcttagagattgcatatcagctgttgacactcccgttatagaggttcatttatctaatattgcttctagagagtcttttcgtcatgaatctttaatcacacctgtatctaagggatgtattatgggctttggactagagagttatgagcttgccatgtattattttttaaatagacaggtgtaa

SEQ ID NO: 279133 - DNA, 277 bp, Unknown
  Bacterial polypeptide expressing nucleotide sequence isolated from the Sargasso Sea
gaacatgaaattgttgaaaaaattcatgcgtctaaggaagataatgtttcaaagattctaatgaatccaggtgcatttacacatacaagtatttcaatacgagatgctcttattggcgtaggcattccgttttatgagatccatatttcaaatatatttgccagagaagaatttagacataaatcttatttttctgatattgcagagggtgtcatatgtggaatgggaactaagggctacgaatttgccctaaaaaaagcaattaattctaattaaa

SEQ ID NO: 279134 - DNA, 340 bp, Unknown
  Bacterial polypeptide expressing nucleotide sequence isolated from the Sargasso Sea
gagcgcgcgggcgcgagcctgacctgtctgcagagcaatagcgagcaggagataattgaggcgattcatcaggcgcgcgccgacggaacgcagttcatcatcatcaatccagcggcctttactcatactagcgtcgcgttgcgcgacgccttggcgggtgtcgatattccatgcatcgaggtgcacatttccaacgtatacgcccgcgaaccttttcgacaacacagttatatctcggacatcgccgaggcggtgatctcgggactcggtagctttggctacgactgcgcactggctgcagtgctccagtccctagacacccattccacgacccattgaa

SEQ ID NO: 279135 - DNA, 273 bp, Unknown
  Bacterial polypeptide expressing nucleotide sequence isolated from the Sargasso Sea
attttataggcagactgcatgaagccagagacgatggtacagaatttatgatagttaactttggggggttcactcacacaagcgtagcgatcagggacgcaataatagcttctgagattccattcattgaagtacatctctctaaccttttttcccgcgaggagtataggcaattttctttttttagcgatattgctgttggctgtatcgtgggcctgggcgcacaaggctatgaacttgcgctggaagcaactttcaaaaggcttgaatagt

SEQ ID NO: 279136 - DNA, 229 bp, Unknown
  Bacterial polypeptide expressing nucleotide sequence isolated from the Sargasso Sea
tatgataaataattctattttagtaatttctggccctaacttaaatcttctaggcaatagagaagaaaaatattatggcaatatttcattagatgaaatccataagaaaatcaaaaaaataggtaatacaaataatattattattgagtgcaaacaatctaattctgaaagtgaaataataggatggatacaaaatgccaagaataattttaaagcaataattatcaat

SEQ ID NO: 279137 - DNA, 363 bp, Unknown
  Bacterial polypeptide expressing nucleotide sequence isolated from the Sargasso Sea
aagacattgaagatatgtgtaaaaataaatgtgataaattaaatttaagttgtgtcttttaccaatcgaatatcgaaggtgagattattaataaaattcatgacgcaattgaccaaaacatgaaggcaattattataaatgctgctgcatacacacatacatctatagcaattcttgacgccttaaaaatgtttaaaggcatagtgattgaagtacatattacaaacatacatgctagagaagagtttagacaacattcatttatttcaaaagttgcccaaggtattatagcaggatttggagaagaatcatatttaatggcaatagattatctttacaaattaaataataaaaaggtctaaa

SEQ ID NO: 279138 - DNA, 280 bp, Unknown
  Bacterial polypeptide expressing nucleotide sequence isolated from the Sargasso Sea
gagggagaattggtcaatataattcaaaattctagaaaaaaatttgatggtataattatcaatgctgctgcttttactcacacatcagtggctataagagatgcattggatatttttaaaaagccaatcatagaacttcatatatcaaatatatacaaaagagaggaatttagacaaaaatctcttattagtgatatagttacaggaggtatttttgggttaggtgctgatggttatattttagccataatttctatgcaaaagcttttacaagaatgaa

SEQ ID NO: 279139 - DNA, 466 bp, Unknown
  Bacterial polypeptide expressing nucleotide sequence isolated from the Sargasso Sea
tatgataaataaatccattctagtaatttctggtcctaatttaaatcttctaggtaatagagaagaaaaatattatggcaatatttcattagatgatatctatgaaaaaatcaaaaaaatagcactttcgaatgatattaccatagaatgtaagcaatcaaattcagagagtgaaataataaaatggatacaaaatgccaaaaatagttttaaggctataataattaatgctggtggatatactcatacctctgtctcaattagagattctttaaaattatttgatggattgataatagaaattcatatgtctaacgttcattctagagaggattttagacatagatctttgatctcaggagttagcagcggaattataataggctttggtgaacaatcatattatttggctgtaaatgctgcagtagacaaaataaagggaggaaaaaattatggtcaaaaatga

SEQ ID NO: 279140 - DNA, 265 bp, Unknown
  Bacterial polypeptide expressing nucleotide sequence isolated from the Sargasso Sea
atgcggatattattaattaacggtccaaatttaaatatgttaggccgaagagaacaggctctctatggttctgacacacttgacaatgttgtaaaaaacttaaaaaatatagccgtttcaaaaaacattgaactcatctccttccaatctaatgatgagtccgaaatagtttcgtttattcaacaaaatgctgattctagccaaggtataattatcaatgctggcgctatgacacattacgctctttcccttaaagatgctttac

SEQ ID NO: 279141 - DNA, 397 bp, Unknown
  Bacterial polypeptide expressing nucleotide sequence isolated from the Sargasso Sea
attaggagaaagagaacaatcacaatatggtacaatcacatatgaggaacttaaagatatatgtttaaaaaaatcaaatgaattagatataaagcttgaatttgttcagtctaatattgaaggtgaaatagtcacattgatacaaaaagcaaaagaaaattgtgatgggataataatcaatgcagccgcttttactcacacatcagtagctatcagagatgcccttcaaatatttaataaaattaaaattgaagtacatatttcgaatatctataaaagagaggaatttagaaaaaagtcattgattagcgatgtcgtagatggtgggatatttggtttgggtagtaatggttatattttggccataatggcaatgcataagatgattaaaaaatga

SEQ ID NO: 279142 - DNA, 219 bp, Unknown
  Bacterial polypeptide expressing nucleotide sequence isolated from the Sargasso Sea
ttatcaatccaggtgcatttacacatacaagtatttcaatacgagatgctcttattggcgtaggcattccgttttatgagatccatatttcaaatatatttgccagagaagaatttagacataaatcatatttttctgacattgcagagggtgttgtatgtggaatgggaactaagggctacgaatttgccttagaaaaagcaattaattctaattaaa

SEQ ID NO: 279143 - DNA, 204 bp, Unknown
  Bacterial polypeptide expressing nucleotide sequence isolated from the Sargasso Sea
tatgagtaaaaaccgtattcaatttattgatggacctaatttaaatatgcttggtgaaagagagccagaaatttacggttctatgactttggatgaagttcacaagaatgtaaaggattacatcactcaaaactacaaagaaattgatgtcaatttttttcaatctaattctgaaggtgatattgtagactgtatacaaaaatc

SEQ ID NO: 279144 - DNA, 427 bp, Unknown
  Bacterial polypeptide expressing nucleotide sequence isolated from the Sargasso Sea
aatgaaaattttagtcataaatggagtcaatctcaacatgctcggccaacgagagactgatatgtatggagatctctcactttccgatctagagaacaacatcaaatctataaattttgatgcagatatcgatttttttcaaagcaattcggaggaagaaataattcaaaaaattcatgctcagaagcaggataaatacgattttggtgtgtttaattttggtgcgcatactcacacaaatatagctataagagatgctattttgtctgtaaagtttaagttctatgaagtacatatttcaaatgtctttgccagagaggaatttaggcatgtgtcattttttagtgatattgcagaggggtgtattgtaggcctaggtttagatggttatgaatatgcaattcgaaagattttaaaggaggaataa

SEQ ID NO: 279145 - DNA, 286 bp, Unknown
  Bacterial polypeptide expressing nucleotide sequence isolated from the Sargasso Sea
caattcagaaagtgagattgttgattggattcttgaaaatgctgatagtgcattatttttaataatcaatccaggtgcttttacacacacaagtatttctataagagatgcaatactaggaacaaatatatctttcattgaagttcacataagtaacatcttctctagagaagaattcagaaaagagtcttatttttcagatattgcagaaggtgtgatttcaggactggggtttgaaggctacgaactcgcattaaaagccgtacttgaaatcataaagaaataa

SEQ ID NO: 279146 - DNA, 436 bp, Unknown
  Bacterial polypeptide expressing nucleotide sequence isolated from the Sargasso Sea
atggacaataaaattttaattattaatggccctaatctagaaatgttaggtaaacgcaaagagagtgtttatggaaatttcacattaaaagatttggaaaacgaactacttaaagagtctgaaacattaggatgtaatcttgattttttccaaagcaatatagaaggagaaatcatcaataaaataaatggtttagacgagtcgtacgttggtatcataatcaatcctggtggtttgactcatacctcggtttcattacacgactcccttgaaattaaaacaatatttaaaattgaagttcatttatccaatatatactctagagaggactttcgaagaaagtctctcatagcaccagcttgtgattgttcaattataggcatgggtaaagatggatttatttacgcattaagatatttaataaaaaatatataaa

SEQ ID NO: 279147 - DNA, 307 bp, Unknown
  Bacterial polypeptide expressing nucleotide sequence isolated from the Sargasso Sea
caattccgagagtgagcttgtcgattggatccaagctgcaaagggaacagtcgacggtattatcatcaatgctggagcctattcgcatacatctatcgctattctggatgcactcactgcggtggctttacccatcgtcgaagtgcatttatcaaacctctccaagcgcgagatgttccggcaccattcttatgtaacgtcggctgctgttggccttatcacaggattcggagccaagggctatcctctggctgtcgaggccatgtcatcgattctcaaagccaatacacaagatatgtcaaactag

SEQ ID NO: 279148 - DNA, 424 bp, Unknown
  Bacterial polypeptide expressing nucleotide sequence isolated from the Sargasso Sea
atgaacattttaatattacaggggccaaaccttaatcttttgggtttaaagtcatctaataagaagagtagattaaccttagataaattaaataagcagataagaaacttttcaaagaatagtgaaatcaaccttaggtttctgcaaacccataaacaattccaagctataaactttttacaaagaaatagaaattgggcaaatggaatactctttataccgacatcttgggcaagagataattatacaatacttgagactatcaatcttattcaaataaaaacatctgttatttattttgacgatgatttttcttttgggacaagcattgaggactccatttttattgatgacaaaatagaaagttttacgggaactccaattgaggcgtgcattcaagggattgaatacttagctaaataaa

SEQ ID NO: 279149 - DNA, 199 bp, Unknown
  Bacterial polypeptide expressing nucleotide sequence isolated from the Sargasso Sea
atgagagttttatttctaaatggaccaaatttaaacatgctaggggaaagagaagagtctttgtatggacagcttactttgaatgaaattaacgatttaattcaaaaaaaagcagataatatgggaatcaaagtggatttctttcaatctaatgaagaaggaaagttagtatcaaggattcaagaatcctctggaaagg

SEQ ID NO: 279150 - DNA, 424 bp, Unknown
  Bacterial polypeptide expressing nucleotide sequence isolated from the Sargasso Sea
atgaatattttgatactacaaggaccaaacctgaatctacttggtctaaggtctaaaacaataagtaaaagacttaccctagataaactaaataagggcataaagaaccatgctgttagtaaggatgtaaaattaaaagttaatcaaacacataaacagtttcaggctgttaattttttacagcgtaatagaaattgggccaatggcctcctatttattcctacaagttgggcacatgctgaatatactctttttgaaacgatcaagatcattgacctccctacatcaatagtatacttcaatgaaccttttagtcttggcggtaaagaagactcttctattttagttggaaataatatgaagtcattcactggtgagccactggaagtttgtgagagaggattagaccaccttataatataaa

SEQ ID NO: 279151 - DNA, 430 bp, Unknown
  Bacterial polypeptide expressing nucleotide sequence isolated from the Sargasso Sea
gatgaccatactaatactacaaggaccaaaccttaatcttttaggaaaaaaatcagctgagattggagattctataactctaaataaattgaatagagcaatacgattgcatgttaggaatacaaagattaaactaaaaattattcaaactcacaaagaatacattgcccttaattttatccaaagaaatagaaaccaagcaaaaggcttaatagttaccccaacatcatgggcaaagtacaatcaaactattctagagaccataaatctatcaggactacagactgcagctatttattttgatccaccttttagctttgggacatcagaagatcaatcaatacttaaaagtgatactataaaggcgttcactgggcaccctattgatataaccatatcagcaattgactatatagctaatattaaataa

SEQ ID NO: 279152 - DNA, 364 bp, Unknown
  Bacterial polypeptide expressing nucleotide sequence isolated from the Sargasso Sea
aatgatatattcttctggcttaaatgaagttgcgaaagagataaatgttgaacttagtcatcaacaattcaattcagaggctgaattaatagaagaaattcatttagcaaagaaagataaagtagattttataatttttaatccaggagctttcactcatacaagcattgctttaagagatgctctgctaggtgtttcaattccatttatagaaatccatatatcaaatgtttttgctagagaagattttagaaaaaagtcatatctttctgatatcgcagtgggtgttatatcagggcatggaatatttggatatgaattagcattaatgtcagcatataatattattaataaaggtaaatag

SEQ ID NO: 279153 - DNA, 1920 bp, Unknown
  Bacterial polypeptide expressing nucleotide sequence isolated from the Sargasso Sea
ctcagaacataacgataagaggaattgggcagtttaatggtaacccaggagtgtcagtaagtactgatggtatttttcaatctagagcacattcttcacagttaggtgaaatggatcttgagagggtagaagtattgagaggcccacaaggtacactctatggaagaaattcaattgggggagttgttaatctcataacaaaaaatcctactcaagatatggatgggtatgtcaaattaggttacggtgaatatgacactactactgctgaggctgcctttggtggtggaatttctgaaaataccagctttagattggtagtacatggaactgaacaaggtgaaggtttttatgattgtctgaatgttggatgtggggagcaaggctatacagacaagcaagcctttcgattaaaaataaaatcagatctaactgatacggtttctgcagaccttatggttgcttctgttgaaacagaaggtacaccagatccctacggatggttgacggataatagagaattagctgcggcttttggctttcctcaaattgcagctgaaccaatatctttaaaacctcatgaaatctatcaaacaccaacttctgaatcagtgaacggtaccaatatgacagatagagaatacgatgttacatctttaactctaaaaatcgacactgaacttggcacattaacttcaataacagcaaaacaaagctttgatgatcagtttaatttagaccgagatggttcggctggtgtatatctagatacatttgatatatccgagacagaaactttcacccaagaaattaatttaaatattgaaagagatacaatgagccttgtatttggtcttttttacatggatgacgaaacgtcaagacatactcactttgataatcctcaacctatattaggttttcctgtccctagtatgtttgattttaaacatgacaagatggacacagaatctgaagcatattttgcagatggcacattcgatctaagtgatacaactagattaagtttaggagtaagaagaacaacagatgaatttaccagcaaacaagataattttatatctatcctaatgcctatgcctgttattgcggctcaaacttgtgatagagaagttgttacagaatattcttctactacttctagggcagtaatacagcatgacctgtcttcagatagtaatgtttacgcatctctcagtgaaggctacaaagctggtggttatgccacttatgagtgtaccgaaccgtatgatccagaagaagtaacttctctagagtttggatttaaaggctctcttagtgaaaatactagtttgaatgcttctttattcagatatgactacacagattttcaagttttgcaggttgttggaatacaaacggtaacaagaaatgctggtgacgcaactgtaaatggattagaaattgaagcgctatcaaatgttaatgactctcttagtataaattatggtctgacccttttagatgcaacttatggagaattcctaaacacaaacggtatacagccacaattaggagagcagcaattagacggtaactatttaactaatgcccctaaagtttctatcaacttgggactaaactatacaagtcctatggcatcaggtgcttcattaacttatcgtgcgaatgcttcttataaatcaagaatttatttctcagagtttaatgagtactctcaagatgcgtacactattgttgatttaaatttaatatgggaaagtgccgatgaaactatgagatctagattctttataaagaatgctactgatgaagattatatttcgggatatttatcttctgctactggtggaggtcgttttggtcagtggggttatccacgaacagcaggaattgaaatacaaagaaatttttaat

SEQ ID NO: 279154 - DNA, 237 bp, Unknown
  Bacterial polypeptide expressing nucleotide sequence isolated from the Sargasso Sea
aggtagattttatcgttatcaatcctgctgcttttactcatactagtattgcaattagagatgcacttttagcggtccagtcaaagtttgttgaagtccatctttctaatatttttagcagagaggattttagacaaaattcatatgtttcatctatctctcttggtgttatatctggttttggacatgagggatacttaatggctcttgatgccttaagtagtttgaacaaataaa

SEQ ID NO: 279155 - DNA, 442 bp, Unknown
  Bacterial polypeptide expressing nucleotide sequence isolated from the Sargasso Sea
tatgagtttaaatatactttttcttaacggcccaaatattaatctattaggtcaaagagaacaatcacaatatggttccataacttatgaagaactaaaaaaaaagtgtgaagaaaagtgtaaagatcttaatttaaaaattgaatttatccaatcaaatgtagaaggtgagattgtttctataatacaatcagcaaatgaaaaatttgatgggattataataaatgctgcggcattcactcatacctctgtagctattagagatgcattggaaatatttaaaaaaaagaaaatagaagttcatatatctaatatttacaaaagagaggaatttagacaaaaatcactgataagtgatgttgtaaatggcggaatttttggtcttggaagcgaaggatatattttagccataatagcaatgcataaaatcttaaaaaaatga

SEQ ID NO: 279156 - DNA, 412 bp, Unknown
  Bacterial polypeptide expressing nucleotide sequence isolated from the Sargasso Sea
aaatggaccaaatcttgaaatgttaggtaagcgcaaagagagtgtttatgaaaatttcaccttaaaagacttagaaaatgagttacttaaagagtcagagtcacttggctgtagccttgatttttaccaaagcaatattgaaggtgaaataataaataaaataaacggtcttgatgagttatatgttggaattatcataaatccaggcggtcttactcatacatcagtttcattgcacgactcattagaaattaaatcaattatgaaaatcgaagttcatctatctaatatatactcaagagaggacttcaggagaaagtctttaatagctccagcgtgtgattgttcaattattggaatgggtaaagacggatttatttatgcgttaagatatttaactaaaaagctctaa

SEQ ID NO: 279157 - DNA, 547 bp, Unknown
  Bacterial polypeptide expressing nucleotide sequence isolated from the Sargasso Sea
gatgaataaaaaaaccttaattagttcatttgatgatgatgattatttatctaaaactttaaaagaatcattagcagaagttttcacagatgagtcgcctgaaggaagcatcattattataaatggtccaaatttaaattttttaggtattagagaaattgaaaaatatggaagtattagttatgaggaattaataaagaaggtaaaaagaagaacaaaaggaaacgtagaattttttcaatcaaattcggaaggagaaattgtaaaattaatacaagaacttgtaaaaattgaaaatgataaacctgatatcgtaatcattggattagttattaatcctggaggcttaacccacacaagcgtgacgttgagggatgcgctttcaattctatttatgccaatagttgaggtacatataactgatataactaaaagagaaaattatagaaaaacaaatttgatttctgacctatgtgttaaatcaatcattggcaaaggcattgatgggtatattgaaggagttgatttcttaaatgaaaaaaattaa

SEQ ID NO: 279158 - DNA, 401 bp, Unknown
  Bacterial polypeptide expressing nucleotide sequence isolated from the Sargasso Sea
ggcactagagagaaagacaaatattggaagcacctctcttacagatatacaaaaaaaatgtgaggactactctaaaaaaattggtctacaagttgattttaaacagtcgaatgtagaaggtgaaatagtaaattttattcaaaatacaaaagacaatcaccatggtatcattatcaacgctggaggatatacacacacatctgtagcaatacttgatgctctgctagcagtaaaaaaaccaactatagaattacatataacaaacatttacaaaagagaggatttcaggcataaatctttaattagtaaagctgctgatggaataatttgtggattaggcgctgatggatacattatggcactcgatggaataaaaaaaattattgataatgaaaattgat

SEQ ID NO: 279159 - DNA, 439 bp, Unknown
  Bacterial polypeptide expressing nucleotide sequence isolated from the Sargasso Sea
aatgaaaattcaaataatcaatgggccaaacataaacttattaggaaccagggaacctcatatatatggctctgaaagccttgaagatatcaaaaaatggtttgaaggtgaaattgatacaaccagccatctagttcattggtttcaatctaatcatgaaggtgaaattattgatcaaattcataaaacaattaatgcattcaatggaataataattaacgctggtgctttgacgcattattcatacgcaatacgtgatgctattaaatctgtaaatattccaacggttgaggttcacttatctgacataacttcaagagaagactttagaaaaatttctgtgattagtgatgtttgcatcaatcaaattaaaggcattggaaaaaatggatacctaaaggcatttaaattgctaatggagcatactaatcaggaatga

SEQ ID NO: 279160 - DNA, 248 bp, Unknown
  Bacterial polypeptide expressing nucleotide sequence isolated from the Sargasso Sea
aaaagataatcaagtgaaatgcatcataattaatccaggagctttaactcatagcagtatagccttgagagatgcattaacaggtgtcaacattcctttcattgaagttcatatttcgaatatttacgcgcgagaagattttagacagaaatcttacctatctgatatagctgagggagtgatttcaggtttaggtgtagaaggttacgaactagctctagttaaagcaatgaaaaaatttaattgat

SEQ ID NO: 279161 - DNA, 460 bp, Unknown
  Bacterial polypeptide expressing nucleotide sequence isolated from the Sargasso Sea
atgataaataattctattttagtaatttctggccctaacttaaatcttttaggcaatagagaagaaaaatattatggaaatatttcattagatgaaatccatgagaaaatcaaacaaataggaaattcaaataattttaccatagaatgtaagcaatcaaattcggaaagtgaaataatagaattgatacaaaatgccaaaaataattttaaggcaatagtaattaatgctggtggatacactcatacctctgtctcgattagagatgccttaaaattatttgatgaattagtaattgaaattcacatgtctaatattcattcaagagaagatttcagacataaatctatgatctcaggagttagtagcggaattataataggatttggtgatcagtcatattatttggctgtaaacgctgcaataaataaaataagtggggtaaataattatggctaaa

SEQ ID NO: 279162 - DNA, 430 bp, Unknown
  Bacterial polypeptide expressing nucleotide sequence isolated from the Sargasso Sea
aatgcgtaaaatagtcatcattaatggtccaaatttgaactttttaggtaagagagaaatatcaaaatatggcactacaacttatcaagagttagttagtgaacttgaagaacatgcaaaaaaaactaatgatctggttttttttcaatcaaatcatgaaggcgaaatctgtgattacatacaaaaaataattaatgagaaaattgatggagtcatcgtaaatcctggtgcctacacgcatacaagtgtttcattgagagattctttgttacttctgtcagttcctatcattgaagttcacataagtgacataaaagaacgtgaatcgtttagaaaaactaatttaattaatgacatttgcgagaaatcatttataggtcatggggttaatggatataagatgggtatagattatttaaatgaaaaataa

SEQ ID NO: 279163 - DNA, 223 bp, Unknown
  Bacterial polypeptide expressing nucleotide sequence isolated from the Sargasso Sea
tgctgcatttactcacacctcagttgcaattagagatgctttagaaatttttaaaaaacctattattgaagtacatatttcaaatatctacaaacgtgaagaatttagaaaaaaatctttaataagtgacgtagttactggtggaatatttggcctaaatgctgatggttatattttagccataatttcaatgcaaaagctaatccaaaatgaaaatagataa

SEQ ID NO: 279164 - DNA, 224 bp, Unknown
  Bacterial polypeptide expressing nucleotide sequence isolated from the Sargasso Sea
gattctgatgaacccaggcgcatttacacatacaagcatttcaatacgagatgctcttatcggtgttggcattccgttttatgaaatacatatttcaaatatatttgctagagaagaatttagacataaatcatatttttctgatattgcagagggtgttgtatgtgggatgggtactaagggctatgaatttgccctagaaaaagcaattaattctaattaaa

SEQ ID NO: 279165 - DNA, 147 bp, Unknown
  Bacterial polypeptide expressing nucleotide sequence isolated from the Sargasso Sea
tagaggttcatatttctaatatttatgctagagaagaatttagaaaaaaatcttacttatcagacattgctgaaggggtcatatcgggtttaggcgttcaaggttatgaacttgccttagaggttgctataaaaaagtttaattgaa

SEQ ID NO: 279166 - DNA, 418 bp, Unknown
  Bacterial polypeptide expressing nucleotide sequence isolated from the Sargasso Sea
tttgaatggtcctaacttaaacttacttggagatagagagccagatatttatgggaatgtatcattaaaggatatagagaaatctctaagtaattatggtaaaaaaaataattctgaaatttattttaaacaaacaaatcacgaaggggaattaattgaatttgttcatgaagcctcgaaaaaagcaaatgcaattattattaatcctgcgggatattcacatacatctgttgctttattagatgctcttctaacagttaaaattcctataatagaagtacacatatcaaatatttttaaaagagaagattttagacacaattcatatgtttctaaagctgcaattggtgttataagcggtttaggaattgaaggttatttatatgcgcttaaatttcttttggatgagctaaaataa

SEQ ID NO: 279167 - DNA, 232 bp, Unknown
  Bacterial polypeptide expressing nucleotide sequence isolated from the Sargasso Sea
tatgaaaatacaaataattaatggtcctaatttaaatcttcttggtgttagagaaaaagatatttatgggagtttatcatttgatgaatattttctaaaactcaaaaccaaatttaaaaatattgagttatttcattatcaatctaacattgaaggagagttaattaataaaattcaagatgttggatttgattttgatggtataatattaaatgctgcagcatatactcac

SEQ ID NO: 279168 - DNA, 448 bp, Unknown
  Bacterial polypeptide expressing nucleotide sequence isolated from the Sargasso Sea
atgaaaaaaattataattcttaatggtccaaatctcaaccttttaggtgaaagagaaaaaaatcagtatggaactttcactttaaatgatattcaaaaagactgtaaaatatttgcaaaaaaaaacgaccttaatattacttttttccagtcaaatatagaaggcgagattgtagaaaagatacaaaattcaagaaatgatcaaaatggtttaattatcaatgcaggtggttacactcatacatctgtagctatacatgacgccttaaaaattattaagattccaattattgaattgcatataagtaatatttataatagagaagatttcagacataaatctttgataagtagcgtagctaatggggtgatttgcggttttggagctaaaggatatttaatggcgatagatgcaatgaaaaaatatataaacgatgaaaatagataaa

SEQ ID NO: 279169 - DNA, 340 bp, Unknown
  Bacterial polypeptide expressing nucleotide sequence isolated from the Sargasso Sea
agtacatgaaatcgattgtaaatcatttcagtcaaactcagaaggggaaattattgattggcttcataataattgtagtgctgattttctgcttttaaatccgggagcactttctcataccagtgttgggctacgtgatgctgtgcttggtgtgaaaatcccttttattgaaattcatctttccaatgtgcataaacgagaagaatttaggcaccattcctatttttcagatatagcaattggagctcttacaggacttggagtcaaaggttatttgcttgcagcagagtttgcagttgattatatagaacaaaaagtaaagataaactcagatatttga

SEQ ID NO: 279170 - DNA, 146 bp, Unknown
  Bacterial polypeptide expressing nucleotide sequence isolated from the Sargasso Sea
tatgaaaaatatacttttaatcaatggtccgaatcttaatctcttggggaatagagagcctgagatttatggctcaaagagcctagatgatattgaaaacgatctttcagtaatagctgatgagagtgggtatcaattactttcat

SEQ ID NO: 279171 - DNA, 270 bp, Unknown
  Bacterial polypeptide expressing nucleotide sequence isolated from the Sargasso Sea
aatgagtaataaaattattattattaatggtccaaatcttaatctattaggagaaagagaacaatcacaatatggttctatgaattttgaagatttaaaggataattgtttaaaaaaagctaaagagattggaattaatttagaatttgttcaatcaaatattgaaggggagttggttaatttaatacaagatgccagagaaaattacgacggaatgataattaatgctgctggattcactcatacatcagttgcaatcagagatgctct

SEQ ID NO: 279172 - DNA, 343 bp, Unknown
  Bacterial polypeptide expressing nucleotide sequence isolated from the Sargasso Sea
atgaagaaaataattataattaacggtccaaatttaaatttgctaggtcaacgtgaagacgatatttatggaaaagacacactagatgaaataaaaaataaatgtgagaaaaaaggtaaagagcagaaactagaagttaatttttatcaatcaaacaatgaaggagaaataataaacaaaattcatgaagcaagtagtttgtatgatggtatcataatcaatcctgcagcttttacgcattcttcaatagcaatacttgattcacttagagcaataaataaaccaaaaattgaaattcatttatctaatatttattctagagaagaatacagaaaaaaaagta

SEQ ID NO: 279173 - DNA, 451 bp, Unknown
  Bacterial polypeptide expressing nucleotide sequence isolated from the Sargasso Sea
aatgaaaaataaagttattgttattaatggtccaaatcttaacctattaggtgaaagagaaaaagataaatatggaaaaattagtttacaagatgttgaaaataattgtaaagaattttcaaaaaaaaatgaaattcaaattgaattttttcaatcaaatattgaaggagaaattgttaatgctatacaaaattcccgagataaacaagatggattaataataaatgctggtgggtacacccacacttcagttgctattcatgatgcgcttaaagtgctgaaaattccaataattgaattgcatataacaaatatttataacagagaagagtttaggcataaatctcttgttagtaaagttgctaaaggtattgtttgtggttttggtacaaatggatatattatggcattagatgcaattaaaaaaataatagaagatgaaaatagataa

SEQ ID NO: 279174 - DNA, 439 bp, Unknown
  Bacterial polypeptide expressing nucleotide sequence isolated from the Sargasso Sea
aatgaaaaaaatattaattattaatggccctaacctaaatctattaggtaatagagaagatgatatttatggtaaagacagtttagataagattaaatctgattgtgaaaaaaaaggtatagagaagaaattagaaattatttttttccagtctaataatgaaggggaaataattgataaaattcatgaagtaaatgataaatttgatggcctaattattaatccagcagcatttactcattcatcaatagccattctagattcattgagagcaataaataagcccaagatagaaattcatctttcaaatatttattcaagagaagagtatagaaaaaaaagtattacttccgaaggagtgcatggtctaatatgtggatttggtggaaatagttatcttctaggaattgaagcaatatgcaaattaatttataaataa

SEQ ID NO: 279175 - DNA, 387 bp, Unknown
  Bacterial polypeptide expressing nucleotide sequence isolated from the Sargasso Sea
aatgtctaaagctagtaaaatatatgttttgaatggtcctaacttaaacttacttggagatagagagccagatatttatgggaatgtatcattaaaggatatagagaaatctctaagtaattatggtaaagaaaataattctgaaatttattttaaacaaacaaatcacgaaggggaattaattgaatttgttcatgaagcctcaaaaaaagcaaatgcaattattattaatcctgcgggatactcacatacatctgttgctttattagatgctcttctaacagttaaaattcctataatagaagtacatatatcaaatatttttaaaagagaagattttagacacaattcatatgtttctaaggctgcaattggtgttataagcgg

SEQ ID NO: 279176 - DNA, 262 bp, Unknown
  Bacterial polypeptide expressing nucleotide sequence isolated from the Sargasso Sea
atgaataataagataattataatcaatggtccaaatcttaatctattaggtgaaagagaacaatcacaatatggatctactacatttgaagaattaaaagaaatttgtttgaataagtcgaaagaattgggtttggtagctgatttttctcaatcaaatattgagggggaaattgttaacttgatacaaaactctagaaaaaattttgatggaattataatcaatgctgcagcttttacacatacctctgtagctattaggg

SEQ ID NO: 279177 - DNA, 445 bp, Unknown
  Bacterial polypeptide expressing nucleotide sequence isolated from the Sargasso Sea
atgagtaaattaataataattaatggccctaatcttaatctattaggtgaaagagaacaaactcaatatggtagcaaagattataaattccttgaagaaatttgtctaaatagagcaaaggatttaaaaattaatatagaaataaaacaatcaaatgttgagggagatattgtaaatattattcaagatgctcgtaaaacgcatgatggaattataattaatgccgctggatatagtcatacttcagttgctattagagatgctttaagtatttttaaaaaacctatcattgagcttcatatatcaaacatttataaaagagaggaatttaggcataaatctctcataagctcagttgttactggtattatttgtggactaggaataaatggctatattttagccataaactctatgcatgaaattttaaataatgaaaattaat

SEQ ID NO: 279178 - DNA, 439 bp, Unknown
  Bacterial polypeptide expressing nucleotide sequence isolated from the Sargasso Sea
atgaaaaaaattttaataataaatggacctaatttaaatatgttaggtaaaagagaaaaaaaattttatggaaactcaacattagaagatattaaatctctttgtgaaaatgtttgtaaaaaaaataatttgaaatgtgattttttccaaagtaacaacgaaggtgaaataattgataaaatacatagtgttgaaaaaggatatgatggaataattataaatcctgctgcttatactcatacatcagttgctatacttgatgctttaaaggttaatacaaaaccaaaaattgaaattcatatttcaaacatatattcaagagaggaatatagaaaaaaaagcataacatctgaagctgtcaatggtttaatttgtggttttggtgaaaatagttatgctctgggaattgaagcaataagtaaattaatttataaataac

SEQ ID NO: 279179 - DNA, 157 bp, Unknown
  Bacterial polypeptide expressing nucleotide sequence isolated from the Sargasso Sea
tatgaaaatattaataataaatggaccaaatctaaatcttctaggaaatagagaaaaggatatttatggtgaaaacactttgcatgacattcaaaatctctgtgataatgagtgcaaaaaattaattgcaaatgtgatttttttcaaagcaacatag

SEQ ID NO: 279180 - DNA, 439 bp, Unknown
  Bacterial polypeptide expressing nucleotide sequence isolated from the Sargasso Sea
aatgaaaaaaatattaattattaatggccctaacttaaatctattaggtaatagagaagatgatatttatggtaaagacagtttagataagattaagtctgattgtgaaaaaaaaggtatagagaagaaattagaaattattttttttcaatctaataatgaaggggaaataattgataaaattcatgaagtaaatgataaatttgatggtttaattattaatccagcagcgcttactcattcatcaatagccattctagattctttaagagcaataaataagcccaagatagaaattcatctttcaaatatttattcaagagaagagtatagaaaaaaaagtattacttccgaaggagtgcatggtttaatatgtggttttggtgggaatagttatattctaggaattgaagcaatatgcaaattaatttataattaa

SEQ ID NO: 279181 - DNA, 445 bp, Unknown
  Bacterial polypeptide expressing nucleotide sequence isolated from the Sargasso Sea
atgagtaaattaattataattaatgggcctaatcttaatctattaggtgaaagagaacaaactcaatatggtagcaaagactataaataccttgaagaaatttgtttaaatagagcaaaagatttaaatatcgatatagaaatgaaacaatcaaatgttgaaggggatatcgtaaatattgttcaagatgctcgcaaaacacatgatggaattataataaatgctgcaggatatagtcatacatcagttgctataagagatgctttaagtatttttaaaaaacctattatagaacttcatatatctaatatttataaaagagaggattttagacataagtctttaataagtgcggttgttactggtataatttgtggattaggaataaatggctatattttagccataaattctatgcatgaaatcttaaaaaatgaaaattaat

SEQ ID NO: 279182 - DNA, 313 bp, Unknown
  Bacterial polypeptide expressing nucleotide sequence isolated from the Sargasso Sea
atgaacaataagataatcataattaatggcccaaatcttaatctattaggagaaagagaacaatcacaatatggatcaataacttttgaaaaattgaaagatatttgtctagataaatcaaatgaattgggattaactttagaattttttcaatctaatgtagagggggaaatagtcaatcttatacaagattcaagagaaacttttgatggtataataattaatgctgcagctttcactcatacatcggtagctataagagatgctttgagtatttttaaaaaacccaataatagagttacatatttctaat

SEQ ID NO: 279183 - DNA, 184 bp, Unknown
  Bacterial polypeptide expressing nucleotide sequence isolated from the Sargasso Sea
atgaaaaaaatattaataataaatggccccaacctaaatttacttggtaatagggaaaaacaattttatggagatacaactttagaaagattagaaaatttatgttctaataaatgcaaagaaaataatttagaaatggaatttgttcaaagtaatcacgagggtgaattaatagaaaaaatac

SEQ ID NO: 279184 - DNA, 451 bp, Unknown
  Bacterial polypeptide expressing nucleotide sequence isolated from the Sargasso Sea
tatgacatctaatattaaaataataaatggtccaaatttaaatttgttgggagaaagagaaaaagaagaatacggggtttccacattaagtgaaataaaagaacaatgtgagaaatttgcacaaaacaacgaccagaaacttacattttttcaatctaatatagaaggtgaaattgttgacgaaattcaaaaatgtagaaaaaactgtaatggattgataattaatgctggaggttatacccatacatcagttgcaatacatgatgctcttaaaattatcaaaattccaattattgaattgcatatcactaacatctataatagagagtcttttagacataagtctttaataagtagtgttgcaaaaggaattatatgtggttttggagtaaacggatatacaatgtcattaacagctttaaaaaatttaataaataatgaaaataaataa

SEQ ID NO: 279185 - DNA, 208 bp, Unknown
  Bacterial polypeptide expressing nucleotide sequence isolated from the Sargasso Sea
atggtattacacggacccaaccttaatctgttgggtacccgcgagcccgagatctacggttcggaaacgctggacgagataaaccatcgtcttcaaaccgaggccgagcgtgcgggggcgagcctcacctgtctgcagagcaacagcgagcaggagatgatcgaggcgattcatcaagcgcgcgccgatggcacgcagttcatcatta

SEQ ID NO: 279186 - DNA, 445 bp, Unknown
  Bacterial polypeptide expressing nucleotide sequence isolated from the Sargasso Sea
atgaaaaaaaaattaatacaatttattgatgggccaaacttaaatatgctcggtgaaagagagccagaaatttatggatctatgactttggatgaagttcataaggttgtaaaggatcacatcactcaaaactataaaaatattgatataaatttttttcaatctaattctgagggtgatattgtagattgtatacaaaagtcaaaaaatactgcatctggcttaataatcaatggaggcggcttttcacatacatctgtagcgatattggatgcacttttaacaatagaaattccaaaaattgaaattcatttatccaatttgtttagaagagaagactttaggcaccactcatatataagtaaaggagtgcatggagtaatttgtggatttggaccaaatagctatgtgctcgcagttgaaggaatggttaaattaatataaa

SEQ ID NO: 279187 - DNA, 448 bp, Unknown
  Bacterial polypeptide expressing nucleotide sequence isolated from the Sargasso Sea
aatgaacaataaaattattattattaatggtccaaatcttaatctattaggtgaaagagaacaatcacaatatggttcattaacctttgaaaaaattaaagataattgtatcaaaaaatgtgaagaattagacttagtagttgattttactcaatcaaatattgaaggggaattagtcaatataattcaaggggctagaaaaaaatttgatgctatgattataaatgctgctggatttactcacacatcagttgcaattagagatgctctagatttatttaaaaaaccaataattgaattacatatttctaatatttataaaagagaacaatttaggcaaaaatctttgataagtgatgtggtcactggaggaatcttcggtttaggcactgatggttatattttagccataattgcaatgcaaaagattttaaaaaatgaaaattga

SEQ ID NO: 279188 - DNA, 133 bp, Unknown
  Bacterial polypeptide expressing nucleotide sequence isolated from the Sargasso Sea
gatgaatattttattgataaatggaccaaatctaaatcttttgggcactagagaacctgaaatatatggtaataaaacattgagtgatatagaaaaaagatttactaaagttgctaaaagaaaaaatattaat

SEQ ID NO: 279189 - DNA, 445 bp, Unknown
  Bacterial polypeptide expressing nucleotide sequence isolated from the Sargasso Sea
gatgagtaaaaaatttatacaatttgtcgatgggcctaatttaaatatgcttggcgaaagagagccagaaatttacggatctatgactttggatgaagttcataagactgtaaagaattacgttgcacaaaactataaagaaattgatgtgaatttttttcaatctaattctgaaggcgatattgtagactgtatacaaaaatcaaagaatactgcatctggcctgataatcaatggcggcggtttttcgcacacttcagttgcaatattagacgcacttttaacaatagaaatcccaaaaattgaaattcatttatctaatttatttaggagagaagactttagacatcattcatatataagtaaaggagtgcacggagttatttgcggatttgggccaaatagctacgtgctcgcagttgaaggaatggttaaattaatataa

SEQ ID NO: 279190 - DNA, 440 bp, Unknown
  Bacterial polypeptide expressing nucleotide sequence isolated from the Sargasso Sea
aatactttttattaacggaccaaatcttaatctattaggtgaaagagaacaatcacaatatggtaagattacctatgagcacttaaaagacttatgcattaaaaaatcaagagaattagatattaaaattgaatttgtgcaatctaatattgagggtgaaatagtcacatggatccaagaagctaaggataaacaagatggaattataatcaatgcagcaggatttactcatacttctgtagcaattagagatgctcttcaaatatttaataaaccaaaaatagaattacatatatcgaatatatataaaagagaagaatttaggaaaaaatcattaataagtgacgtagtaagcggtggtatatttggtttaggcagtaacggttatattttggccataatagcagtacataagatgttagtagatgaaaataaataaa

SEQ ID NO: 279191 - DNA, 448 bp, Unknown
  Bacterial polypeptide expressing nucleotide sequence isolated from the Sargasso Sea
atgaaaaataatattattgttattaacggtccaaatcttaatctattaggagaaagagaacaatcacaatatggatctattaaatatgaagaattaaaaaataaaagtttaaattattccaaaggcctaggaatcaatgtttattttacccaatcaaatattgaaggagaaattgtaacaacaatccaggaagcaagaaaaaaatatgatggtttgataattaatgccgcaggattcactcatacttcggtagcaattcgtgatgctttaactatttttaagaagccaagtattgagctacatatttcaaatatatacaaaagggaagaatttagacaaaaatctatgataagtggtgtggtaacagcagtaatttgtggtttaggtgctaatggttatattttggccataaatgcaatgcaagaattactaaaaaatggaaattgat

SEQ ID NO: 279192 - DNA, 172 bp, Unknown
  Bacterial polypeptide expressing nucleotide sequence isolated from the Sargasso Sea
aatgactaataaagtaattattattaatggtccaaatcttaatctattaggtgaaagagaacaatcacaatatggatcagatacatttgagcaattaaaagaaaaatgcttaacaaaatcaaaagaaattggtttagaggtaaactttacacaatcaaatttagaaggtgaa

SEQ ID NO: 279193 - DNA, 451 bp, Unknown
  Bacterial polypeptide expressing nucleotide sequence isolated from the Sargasso Sea
aatgaataataaaataattattattaatggtccaaatcttaatctattaggagaaagagaacaatcacaatatggatcaactacgtttgaccaacttaaagaaaattgttcaaaaaaagctcaagaaattggtcttgatattgagtttgctcaatctaatgttgaaggagagcttgttaatataattcaagatgctaggaaaaaatttgatggtatgattataaatgctgctgcatttactcatacttctgtggcaattagagatgctttagatttatttaaaaaaccaataatcgagctacatttatctaatatttataaaagagaagagtttagacataaatcacttattagcggtgtcgtaactggaggaatttttggattaggtgcggaaggatatattttggccataatttcattacaaaagactttgcagaatgaaaatagataa

SEQ ID NO: 279194 - DNA, 190 bp, Unknown
  Bacterial polypeptide expressing nucleotide sequence isolated from the Sargasso Sea
atgactaataaaataattattattaatggtccaaatcttaatctattaggtgaaagagaacaatcacaatatggatcagatacatttgatcaattaaaagaaaaatgcttaaaaaaatcaaaagaaattggtttagaagtaaactttacacaatcaaatttagaaggtgaaattgtaaatatcattcaag

SEQ ID NO: 279195 - DNA, 364 bp, Unknown
  Bacterial polypeptide expressing nucleotide sequence isolated from the Sargasso Sea
aatgaataataaaattattattattaatggcccaaatcttaatctattaggtgaaagagaacaatcacaatatggatcgacttcttttgaacaacttaaagaaaactgcttaaaaaaagggaaagaaattggtttagaagtatactttgcacaatcaaatattgagggagagctagttagcatcatacaagaagctagaaaaaattttgatggtattattataaatgctgctggttttacccatacttccgttgcaataagagatgctcttgatctttttaaaaaaccaatcattgaacttcatatatcaaatatttataaaagagaggaatttagacataaatcgcttataagtggcgttgta

SEQ ID NO: 279196 - DNA, 323 bp, Unknown
  Bacterial polypeptide expressing nucleotide sequence isolated from the Sargasso Sea
gatgaaaaaaattataattcttaatggcccaaatctcaaccttttaggtgaaagggaaaaaaatcaatatggaagtttcactttgcaggatttggacaaaaattgtaaagattttgcagaaaaaaatgcgataaaacttactttttatcaatcaaatttagaaggtgaattagtagaaaaaatacaagacgcgagaaaaaatcaagatggattaattattaacgcaggtgggtatacgcatacctcagtggctatacacgacgctttgaaaataattaaaattccaattattgaattgcatataaccaatatttataatagag

SEQ ID NO: 279197 - DNA, 448 bp, Unknown
  Bacterial polypeptide expressing nucleotide sequence isolated from the Sargasso Sea
atgcataaagttttaattataaatggtcccaatcttaatcttttaggtgaaagagagaaagataagtatggaaaattttcacttaaagatattgaaaaaagttgccattcattttctaaaaacaataatattaacttaactttttttcaatctaatattgaaggagaaattgttgatgaaatacaaaaatctcgtaacgaacaagattgtttaataataaatgcaggtggctatacacatacatcagtggctattcatgacgcccttaaaattttaaagataccaattgtagaattacatataactaacatttacaatagagaagattttaggcataaatcattaataagtaaagttgctacatcaataatttgcggctttgggattttaggatatactttatctctagaagcatctataaacttaataaaaaaaaatgaaaattgat

SEQ ID NO: 279198 - DNA, 445 bp, Unknown
  Bacterial polypeptide expressing nucleotide sequence isolated from the Sargasso Sea
aatgattaaattaataataattaacggtcctaatcttaatctattaggtgaaagagaacaaactcaatatggtagcaaggactacaaatatctagaggaaatttgtctaagaagagcaaaagatttgaatattgatttagaaatgaagcaatcaaatcttgaaggagatattgtaaatattatacaagatgctcgtaacacacacgatggaatcataataaatgccgctggatacagtcatacatcagttgctataagagatgctttaagtatatttaaaaagcctattatagaacttcatatatcaaatatttataaaagagaggattttagacaaaagtcgcttataagcgcagtcgttactggtataatttgtggattaggattaaatggctatattttagccataaactctatgcatgaaatcttaacaaatgaaaattaa

SEQ ID NO: 279199 - DNA, 168 bp, Unknown
  Bacterial polypeptide expressing nucleotide sequence isolated from the Sargasso Sea
aatgagtcataaaattcttgttattaatggtcccaatcttaatcttcttggaacaagagaaaaggaaaaatacggacaatctactttgggggatatcaatgctagatgtgagggacatgcaaaaaagttgggtcttagtatagaattcaagcaatctaatgtggaggg

SEQ ID NO: 279200 - DNA, 295 bp, Unknown
  Bacterial polypeptide expressing nucleotide sequence isolated from the Sargasso Sea
atgaaaaaaataaaatttatagatggtccaaatttaaatctactaggaaagcgtgagcctgaaatttatggctttgagacactagatgatattcataaactagtaaacgctcatataaaagaaaaaaaatatgatgttgaggcatcattttttcaatcaaattctgaaggggaaattgtagattgtgtgcaaaattcaaatcaaacctctgatggactcataataaatgctgcaggcttttctcacacctcagttgctttattagatgctttacttgcaattgaaatcccataag

SEQ ID NO: 279201 - DNA, 427 bp, Unknown
  Bacterial polypeptide expressing nucleotide sequence isolated from the Sargasso Sea
tataattcttaatggaccaaacctcaaccttttaggtgagagagaaaataatcaatatggcagtgttactctagaagaaattgaaaaaaggtgtcaggaatttgcaaaaaaaaataaaattgcgttaactttatttcaatctaatattgaaggagagttagtagaaaaaattcaaaattcaagaattgaacaacatggattaataataaacgcaggaggttatacgcatacatctgtagctatacatgatgcattaaaaatacttaaaatacctattattgaattgcatataagtaatatttataatagagaagaatttagacacaaatctttgataggtaaactagccaaaggtataatttgtggttttggtgctgatggttacgtaatggcgttaaatgcaatgagaacaattttgaaaaaatga

SEQ ID NO: 279202 - DNA, 319 bp, Unknown
  Bacterial polypeptide expressing nucleotide sequence isolated from the Sargasso Sea
tatggatcttttaattattaatggtccaaatttaaatcttgttgggaaaagggaaccatctatatatggttcgcaaactttggaagacattcaagaggagttatcgactttagctaatagactcgatgcaaaactcaaattctttcaaagtaattcagaaggcgagatgattgattgcattcaaaacagtgttagttccattgacggaatattgattaatgcaggcgcatatacacatacctctattgctcttagagatgctttattaggagttgctattccttacgtggaagtacatttaagtaatatttattctagg

SEQ ID NO: 279203 - DNA, 194 bp, Unknown
  Bacterial polypeptide expressing nucleotide sequence isolated from the Sargasso Sea
tatgaagaacgttttactgttgaatggtccgaatctgaatttgctcggaaagagagagccagatatctatggaacggaatcgctggaaagcatcactgatggactggtgcatgaggctgaaaaccttggtttagagctaatttccttccagagtaatgcagagcatgagcttgtcgataagattcaggctgtgc

SEQ ID NO: 279204 - DNA, 349 bp, Unknown
  Bacterial polypeptide expressing nucleotide sequence isolated from the Sargasso Sea
aatggtcccaatctcaatatgcttggattaagagaaaaagatatatatgggtctgattctcttaatgatgttgaaaaaaggcttgcgataattgcagaaaaaaataactgtgtaattgatttttatcaaagcaatgcggaacatgaactaattgatgtaatacacaattcattaaacaagaacgtcgatgtaataatttttaatcctgctggatacactcatacaagtgtagctttgagggatgctctattggcagtaaatattccattttttgaagttcatatttcagatgttgaatcaagagaggattttagaaaaaaatcatattttagcgatatagctgagaaag

SEQ ID NO: 279205 - DNA, 280 bp, Unknown
  Bacterial polypeptide expressing nucleotide sequence isolated from the Sargasso Sea
tgagggggaattagttaactttattcaatcgattcatcattcacttgactcttgggtagtaatcaacccaggtgcttttacccatacaagtatcgctttaagggacgctttaaatacactaagtgctcaaaataaaattattgaagttcatatatcaaacattgaagaacgagaaaatttcagaaaatttaatctaatcaaagaattttgtgaaatttcaataataggcgagggtatagatggatattttcaagcattggattatataaatgacaaataa

SEQ ID NO: 279206 - DNA, 445 bp, Unknown
  Bacterial polypeptide expressing nucleotide sequence isolated from the Sargasso Sea
atgagtaaaaagtttatacaatttgtcgatgggcctaatttaaatatgcttggtgaaagagagccagaaatttacggatctttgactttggatgaagttcacaagactgtgaaggatcacatcgctctaaactataaagaaattgatgtgaatttttttcaatctaattctgaaggcgatattgtagactgtatacagaaatcaaaaaatactgcatctggattgataatcaatggaggaggcttttcgcatacctcagttgcaatattagatgcacttttaacaatagaaatcccaaaaattgaaattcatttatcaaatttatttaggagagaagacttcagacatcactcatatataagtaaaggggtgcacggagttatttgcggatttggagcaaatagctatgtgctcgcagttgaaggaatggttaaattaatataaa

SEQ ID NO: 279207 - DNA, 151 bp, Unknown
  Bacterial polypeptide expressing nucleotide sequence isolated from the Sargasso Sea
atgattaaaattataattcttaatggaccaaatctcaaccttttaggtgagagagagaaaagtcaatatggaagttttactttaaaagagattgaaaaaaactgtgatgattactcaaacaaaaatgatattaagttgtctttttttcaat

SEQ ID NO: 279208 - DNA, 445 bp, Unknown
  Bacterial polypeptide expressing nucleotide sequence isolated from the Sargasso Sea
aatgtctaaagctagtaaaatatatgttttgaatggtcctaacttaaacttacttggagatagagagccagatatttatgggaatgtatcattaaaggatatagagaaatctctaagtaattatggtaaagaaaataattctgaaatttattttaaacaaacaaatcacgaaggggaattaattgaatttgttcatgaagcctcaaaaaaagcaaatgcaattattattaatcctgcgggatactcacatacatctgttgctttattagatgcccttctaacagttaaaattcctataatagaagtacacatatcaaatatttttaaaagagaagattttagacacaattcatatgtttctaaagctgcaattggtgttataagcggtttagggattgaaggttatttatatgcgcttaaatttcttttggacgagctaaaataa

SEQ ID NO: 279209 - DNA, 403 bp, Unknown
  Bacterial polypeptide expressing nucleotide sequence isolated from the Sargasso Sea
tttgagtaaaataatatatattataaatggacctaatttaaatttacttggaaaaagagaacctgaaaaatatgggaatttttctttagacaaaataaaaacattgtgtagtgaaaaatgcaaaaaatacaacttaggtttaaatttttttcaatcaaatattgaaggtgaattaataagtaatatacataaagctattgatgatggggatggcattataattaatgctggagcattgactcacacttctattggtctcctagatgctttgaaaatgtttaaaggcccaaaaatagaattacacataactaatatttacgctcgtgaaagttttcgccacaaatcatttatttcacctgttgtagatggaataattgcagggtttggttttaattcttacctc

SEQ ID NO: 279210 - DNA, 286 bp, Unknown
  Bacterial polypeptide expressing nucleotide sequence isolated from the Sargasso Sea
aatgaataataaaataattattattaatggccccaatcttaatctattaggtgaaagagaacaatcacaatatggttccatcaatattgatcaattgaaaaatatgtgtgctaaaaaatcaaaagaattaagtttaaatatagattttttacaatctaacattgagggtgatttagtaaattatatacaagacgctaggaaaaaatatgatggaatgataataaatgctgcagcttttactcatacctcagttgcaataagggatgctttagatatttttaagaaa

SEQ ID NO: 279211 - DNA, 421 bp, Unknown
  Bacterial polypeptide expressing nucleotide sequence isolated from the Sargasso Sea
atgaaaatacaaataattaatggtcctaatttaaatcttcttggtgttagagaaaaagatatttatgggagtttatcatttgatgaatattttctaaaactcaaaaccaaatttaaaaatattgagttatttcattatcaatctaacattgaaggagagttaattaataaaattcaagatgttggatttgattttgatggtataatattaaatgctgcagcatatactcacacatctgttggtatagcagatgcaattagaggaattacttcacctgttattgaagttcatatctcaaacactaaatctagggaagatttcagaaaaaaatcatttattagtccacacgcaaaaggagtaattcaaggttttggattgtatagttatgacttagctattttaagttttttaaacaactaaa

SEQ ID NO: 279212 - DNA, 427 bp, Unknown
  Bacterial polypeptide expressing nucleotide sequence isolated from the Sargasso Sea
aatgaaaaagattgtaattattaatggtcctaacctaaatttacttggagagagagaagtagaaatgtatggaacaaagactctaaacgaaattgagaaggagtgttgcgaaatatttaaaaacgataaattaagtttaaactttttccaaagcaactcagaaagtgaaatcattgataaaattcacgtttgtaagaattatgatggaataataataaatgctggagcatttacacatacctcaattgccattcacgatgcactcaagatggttaaaattccaaaaatagaagtacacatttcaaatatttacaacagggaagagtttagaaaaaaatctttcattagccctgtagttaatggtatcattgcaggatttggtactcaagtttatcaggtagcgattagttcattaaaatatttgtag

SEQ ID NO: 279213 - DNA, 283 bp, Unknown
  Bacterial polypeptide expressing nucleotide sequence isolated from the Sargasso Sea
atgacaaaaaaaatccttgtaataaatggtccaaatttaaatcttcttggaacaagagaaaaagaaaaatacggaaacatatcattagatgatatcagtgaaaaatgtaagttacatggaaaaaaaattgatcttgaaatagaatttaagcaatctaacgttgaaggagaaattgttaactttattcaagactcgagaaaaaaaaatgacggaataataataaatgatggtggttatacacatacatctgtggctattcttgatgcattgctcgcagtcaaaa

SEQ ID NO: 279214 - DNA, 445 bp, Unknown
  Bacterial polypeptide expressing nucleotide sequence isolated from the Sargasso Sea
aatgtctaaagctagtaaaatatatgttttaaatggtcctaacttaaacttacttggagatagagagccagatatttatgggaatgtatcattaaaggatatagagaaatctctaattagttatggtaaagcaaataattctgaaatttattttaaacaaacaaatcatgaaggtgaattaattgaatttgttcatgaatcctcaaaaaaagcaaatgcaattattattaatccagcgggatactcacatacatctgttgctttattagatgcccttctaacagttaaaattcctataatagaagtacacatatcaaatatttttagaagagaagattttagacacaattcatatgtttctaaagctgcaattggtgttataagcggtttaggaattgaaggttatttatatgcgcttaaatttcttttggacgagctaaaataa

SEQ ID NO: 279215 - DNA, 337 bp, Unknown
  Bacterial polypeptide expressing nucleotide sequence isolated from the Sargasso Sea
atggctaaaattctcgtactacatggccccaatttaaaccttttaggagtgcgtgaaccgcatatctatggttctgacaatttagatgacattaataaaagttgtaaaaatctgtgcaccgcaaaaggtcatgatttttccttccttcaaagtaacgctgaatcggatttaatagagagactgcacgaagcaagagatgatggcacagactttatgatagtaaactttggggggtttactcacacaagtgtcgcgatcagagatgccataatagcttctgaaattccttttattgaagttcacctctcaaatcttttttcccggcgaggagtttagg

SEQ ID NO: 279216 - DNA, 340 bp, Unknown
  Bacterial polypeptide expressing nucleotide sequence isolated from the Sargasso Sea
ttgagcaaactaatttacataataaatggtccaaatttaaataaacttggtgaaagagaaccatctaaatacggtagtcattctttagaggacttaaaaaccctatgtaaagaaaaaataataaagcacaagttaaaattggatttcttccagtcaaatagtgaaaaagatattatagataaaattcatgaagctcaacaaaaaggagacgcaatattgattaatgcagctgctttcactcatacatcaattgcgataatggatgctttatcaatattccaaggaccaataaaagaaatacatataactaatattcatgctagagaagagtttagacata

SEQ ID NO: 279217 - DNA, 97 bp, Unknown
  Bacterial polypeptide expressing nucleotide sequence isolated from the Sargasso Sea
atgcacctgctgctgctgaacggacccaacctcaatctgctgggccagcgtgagccagggatttacggaagagggacgtggcatcgatcgaagacgg

SEQ ID NO: 279218 - DNA, 445 bp, Unknown
  Bacterial polypeptide expressing nucleotide sequence isolated from the Sargasso Sea
aatgagtaaaattattattatcaatggtcccaatcttaatctattaggtgagagagaacaaactcaatatggtagcaatgattataaatatcttgaggaaatttgtcaaaatagagcaaaagacttaagcatcagtatagaaattaaacaatcaaatgtagaaggagatattgtaaatatgatacaagatgctagaaaaacttatgatggtataattataaatgctgctggatacagccatacatcagtagcaatcagagatgctttaagtatttttaggaaacctattatagaagtgcatatttcaaatatttacaaaagagaagattttagacataaatctctaataagtggagttgttacaggcataatttgtggactcggaataaatggctatattttagccataaattctatgcaagaaatattaaaaaatgaaaattaa

SEQ ID NO: 279219 - DNA, 424 bp, Unknown
  Bacterial polypeptide expressing nucleotide sequence isolated from the Sargasso Sea
tatgaaattaacaataattaatggtcccaatttgaatctccttggctcaagagagactgatatctatgggaatcaagattttgaaactttctttaattcacttagatcaaaatattctaacattaattttgaataccatcaatcaaatgttgaaggtgaattaataaactttattcaagattccagggattcagatggtataataattaatgctgctgcatatactcacacttctgttggaataggtgatgcaataaaagcaattgatacaaaagttattgaagttcatatatctaatactttttcaagagaagaatatagacataactcatatttatcaccagtagttgatgggataattataggatttggactaaaaagctatgaattagcaattgaaagctttctcactaaagatgaataa

SEQ ID NO: 279220 - DNA, 272 bp, Unknown
  Bacterial polypeptide expressing nucleotide sequence isolated from the Sargasso Sea
aatgaataataagataattataatcaatggtccaaatcttaatctattaggagaaagagaacaatcacaatatggatctacttcatttgatgaattaaaagaaatttgtttaaataagtcgaaagaattagatttagtagctgattttactcaatcaaatattgagggtgaaatagttaacttgatacaaaactctagaaaaaattttgatggaattataatcaatgctgcagcttttacacatacctctgtagctattagggatgcattaa

SEQ ID NO: 279221 - DNA, 217 bp, Unknown
  Bacterial polypeptide expressing nucleotide sequence isolated from the Sargasso Sea
tatgaaaaaaatactaattataaatggccctaacttaaacttactaggtaacagagaaaaaaaattttatggtgatacatctttagagagaattaaagcattatgtgaagaacattgcaaaaaaaatgatattggatttgatttttatcaaagcaatcatgaaggagaattaatagaaaaaatccattctgttgatgataattttgatggaatataa

SEQ ID NO: 279222 - DNA, 391 bp, Unknown
  Bacterial polypeptide expressing nucleotide sequence isolated from the Sargasso Sea
aaaaaatttttatggagacacctcattgcaaaatattaaatctatatgtgctgataaatgtaagaaaaataatatggaaatggaatttttccaaagtaatcacgaaggtgagttaatagaaaaaattcattcagttcaaagtgactttgatggtattatcattaatccagctgcatatactcatacatcaatagccttacttgatgcattaagagcaacagctaagccaaaaattgaagtacatatttctaatatttatgcccgcgaggattacagaagaaaaagcttaacttccgaagcagttaatggagtaatttgtggattcggtgaggatagctacttactagcaattgaagcggtgaacaaattaatttataataaaaaattatga

SEQ ID NO: 279223 - DNA, 385 bp, Unknown
  Bacterial polypeptide expressing nucleotide sequence isolated from the Sargasso Sea
gatgaaaaaaattataattcttaacggaccaaatctcaaccttttaggtgaaagagaagaaaatcaatatggaagttttactttaaaggatataggggaaaaatgtgaagattttgctagaaaaaacaaaattaatttaactatgtatcaatctaacattgagggtgaaatagttgaaaaaattcaagagataagaaaagattatgatggtttagtaattaatgcaggaggatatacccacacctccgttgcaatacatgatgctctaaaaattttaaaagttcctataattgaattgcatataagcaatatttataatagagaagaatttagacataaatccctgataagtaaagttgctaaaggaatcatttgcggatttggt

SEQ ID NO: 279224 - DNA, 448 bp, Unknown
  Bacterial polypeptide expressing nucleotide sequence isolated from the Sargasso Sea
atgaaaaataatattatagttattaatggtccaaatcttaatctattaggagagagagaacaatcacaatatggaacaattaagtatgatgatataaaaaatcaatgcttagaatattcaaaaaaattaggaatcaatgttgattttactcaatcaaatattgaaggtgaaattgtaacaacaatacaagaagcaagaaataaatataatggtttaataattaatgctgcgggatttacccatacttctgttgcaatacgtgatgctttgactatatttaaaaaaccatcaatcgaactccatattacaaatatatatagtagagaagaatttaggcataaatctatgataagtgcagttgtaacaggaataatatgtggtttagggacaaatggttatattttggccataaattcaatgcatgaattgctaaagaatggaaattaat

SEQ ID NO: 279225 - DNA, 379 bp, Unknown
  Bacterial polypeptide expressing nucleotide sequence isolated from the Sargasso Sea
atgaaattacaaataattaacggcccaaacctcaacttattaggaacaagagaaacaaaagtttatggaaatatgacgtttgacgaatatttcaaaatacttaaaaagaaatattcaaatgtagatcttcatatttttcaatctaatgttgagggggaaattataaataaaatacaggaagtaggttttgaatatgacggaataattcttaacgcggcagcatatactcatacttcagtaggtatagctgatgcagtcagatcaatcaataaacctgtaatagaagttcatatttctaatacaatttcacgagaagactatagacatatttctttcataggtccacacgccaaaggtataattatgggttttgggttga

SEQ ID NO: 279226 - DNA, 373 bp, Unknown
  Bacterial polypeptide expressing nucleotide sequence isolated from the Sargasso Sea
atgccacatagaataataataatcaatggaccaaatctcaatctattaggtgaaagagaaaagtctcattacggaaattttactttaaaagaattaaaaaataaatgtatccaaaaatcaaaacaattggacattgaaatagagttttgccaatcaaatattgagggagaaatagttaccatgatacaggatgcaagaaagaaatatgatggtattataattaatgccgcaggttttactcattcctctgtagcgataagagatgctttggaaataataaaaaaaccgaaaattgaattacatatatctaatatttataaaagagaagaatttagacaaaaatcacttataagtggagttgtaaacggtttaa

SEQ ID NO: 279227 - DNA, 434 bp, Unknown
  Bacterial polypeptide expressing nucleotide sequence isolated from the Sargasso Sea
tatgtctaataaaaaaataataattataaatggccccaacttaaatatgcttggagaaagagaaccagatgtttatggaacggaaagcctaaaggatttagaggaaataatcaaaaactacctttcagattataaattagatttagatatcatatttttccaatctaatagtgaaggtgatatagtaaattcaattcaagatgcaggtgaaaaattagatggcattattattaatgcaggcggcctatctcatacctcagtttcaattcttgatgctctcttagcgataaaaattccaaagattgaagtccatatatcaaatcttttcactagagaagaatttaggcatacttcttatattagtaagggtgttaatggcattgtttgtgggttcggattaaatggttacctgcttgctattgatggaatcaata

SEQ ID NO: 279228 - DNA, 388 bp, Unknown
  Bacterial polypeptide expressing nucleotide sequence isolated from the Sargasso Sea
tatggatcttttacttattaatggtccaaatttaaatcttgttgggaaaagggaaccatccatatatggttcgcaaactttagaagacattcaagaagagttattgactttagctaatgagcttggtgcaaacctcaaattctttcagagtaattcagaaggcgagatgattgattgcattcaaaacagtgttggttccattgacggaatattgattaatgcaggcgcatatacacatacctctattgctctcagagatgctttattaggagttgctattccttatgtagaagtacatttaagtaatatctattctagggaagaatttcgccataaatcattcctttcagataaaaaattggctttggtttgtggctttggagcaaat

SEQ ID NO: 279229 - DNA, 171 bp, Unknown
  Bacterial polypeptide expressing nucleotide sequence isolated from the Sargasso Sea
tatgaataaaattataattcttaatgggccaaacctcaaccttttaggtgaaagagaggaaaatcaatatggaaattttacccttaaagatatcgagaaaaaatgtaaagagttcgcgaaaaaaaataatattgagctttctttatttcaatctaacatagaaggtgaatt

SEQ ID NO: 279230 - DNA, 317 bp, Unknown
  Bacterial polypeptide expressing nucleotide sequence isolated from the Sargasso Sea
gatggaaatccttttaataaatgggcctaacttaaatcttcttggtaatagagaaaactctatttatggaaatgaaactttggaagatattgagaaaaaactttttggagtctgcaaagagaatgacgtttcttttacttcctttcaaagcaatgctgaacatgaaattgttgaaaagattcatattgccaaagaagataatgtttcgaagattctgataaatccgggtgcatttacgcatacaagtatttcaataagggatgctctttatggtgtaggaataccattttatgaaatccatatttcaaatatatttt

SEQ ID NO: 279231 - DNA, 192 bp, Unknown
  Bacterial polypeptide expressing nucleotide sequence isolated from the Sargasso Sea
aatgagtaataatattataattattaatggtccaaatctcaatcttttaggtgaaagagaacagtcgcagtatgggttaataacttttgatgagttaaagataaactgttctaataaagccaaagaaataggagtaaacatagatttcacccaatcaaatatagagggcgagattgtaacttctattcaaaa

SEQ ID NO: 279232 - DNA, 439 bp, Unknown
  Bacterial polypeptide expressing nucleotide sequence isolated from the Sargasso Sea
gccgaaagtgcttctattaaatggtcccaatttgaatttactgggtaaccgtgagcctgaaatttatggttcaagaactttgaaggaaattgaagagaaggttgagtctattcttaatgatcacaatatcgaatgtgaattttttcaatctaactctgaaggagaaattattaattggattcataaaaaatgtggagctgattttatgcttttgaatcctggagcactaacacatacaagtgttgggttgagagatgcactgcttggtatcgaaataccttttattgaaattcacctttctaatgtttataaaagggaaaaattcagacaccgatcctatttttcagatatagcaattggagctctaaccgggcttggtgttaaaggttatttacttgccgcagagtttgcaattgattatatacgagaaaacagttaa

SEQ ID NO: 279233 - DNA, 445 bp, Unknown
  Bacterial polypeptide expressing nucleotide sequence isolated from the Sargasso Sea
atgtctaaagctagtaaaatatatgttttgaatggtcctaacttaaacttacttggagatagagagccagatatttatgggaatgtatcattaaaggatatagagaaatctctaagtaattatggtaaagaaaataattctgaaatttattttaaacaaacaaatcatgaaggggaattaattgaatttgttcatgaagcctcaaaaaaagcaaatgcaattattattaatcctgcgggatactcacatacatctgttgctttattagatgctcttctaacagttaaaattcctataatagaagtacacatatcaaatatttttaaaagagaagattttagacacaattcatatgtttctaaagctgcaattggtgttataagcggtttaggaattaaagggtatttatatgcgcttaaatttcttttggacgagctaaagtaat

SEQ ID NO: 279234 - DNA, 445 bp, Unknown
  Bacterial polypeptide expressing nucleotide sequence isolated from the Sargasso Sea
aatgtctaaagctagtaaaatatatgttttgaatggtcctaacttaaacttacttggagatagagagccagatatttatggaaatgtatcattaaaggatatagagaaatctcttagtaattatggtaaagaaaataattctgaaatttattttaaacaaacaaatcacgaaggggaattaattgaatttgttcatgaagcctcaaaaaaagcaaatgcaattattattaatccagcgggatactcacatacatctgttgctttattagatgcccttctaacagttaaaattcctataatagaagtacacatatcaaatatttttagaagagaagattttagacacaattcatatgtttctaaagctgcaattggtgttataagcggtttaggaattgaaggttatttatatgcgcttaaatttcttttggataagctaaaataa

SEQ ID NO: 279235 - DNA, 442 bp, Unknown
  Bacterial polypeptide expressing nucleotide sequence isolated from the Sargasso Sea
aatgaaaaataaaattatagttattaacggacctaatcttaaccttttaggagaaagagaaaaagagaaatatggtagcgtttcattagaagatattaagtcagattgttcaaaatacgcaaaaaaaaatgatgtagaactaacttttgttcaatctaatgttgaaggtgaaatagttagtttgatacaaaattctagagacaaatattcaggtctcattataaatgccgctggttatacacatacctctgtgtctattcttgatgctttgatggttctaaaaattcctataatagaattacatataactaatatttacaatagagaagatttcaggcataaatctcttataagtaaagctgctactggtataatttgtggtttcgggactaaaggatacgttatggcaattgaaagcatgaaaaatattctaaaaaaatga

SEQ ID NO: 279236 - DNA, 445 bp, Unknown
  Bacterial polypeptide expressing nucleotide sequence isolated from the Sargasso Sea
aatgagtaaaaagtttatacaatttgtcgatgggcccaatttaaatatgcttggtgaaagagagccggaaatttatggatctatgactttggatgaagttcacaagaatgtaagggattacatcgctcaaaactataaagaaattgatgtgaatttttttcaatctaattctgaaggtgatattgtagactgcattcaaaaatcaaaaaatactgcatctggactgataatcaatgggggtggcttttctcatacctcagtagcaatattggatgcacttttaacaatagaaatcccaaaaattgaaattcatttatccaatttatttagaagagaagactttagacatcactcatatataagtaaaggggtgcacggagttatttgtgggtttggaccaaatagctatgtgctcgcagttgaaggaatggttaaattaatataa

SEQ ID NO: 279237 - DNA, 382 bp, Unknown
  Bacterial polypeptide expressing nucleotide sequence isolated from the Sargasso Sea
aatgaaaattgataaagttttagtaatatcgggaccaaatcttaatttattgggcacaagagaacccgatatttatggttcaacaactttagagataattcaccaaaaccttaaaaaaataggtaaaaaaaataatatagatgtttcatgcaaacagtcaaattcagagtctgagataatcaaatggatacaaaaatctaaaaattattataattctattataattaatgcaggagcatttactcatacatcaattgctattagagacgctttattagctttcgatggtgatataattgaagttcacttgtctaatacatttaaaagagagtcttttcgacatcattcctttatttctagcataagtcgtggcttaatagta

SEQ ID NO: 279238 - DNA, 451 bp, Unknown
  Bacterial polypeptide expressing nucleotide sequence isolated from the Sargasso Sea
atgacaaatagaattttaattattaatggaccaaatcttaatctattaggagaaagagaacaatcacaatatggttcggttagttttgatggacttaaagaaaattgtttaaaaaaatctaaagaattaaatattaacctagattttatacagtcaaatattgaaggtgagatagttacaataattcaagatgctagaaaaaaatatgatggaatgataattaatgctgcaggtttcactcatacttcggtatctataagagatgctttagatgtttttaaaaaacctattatagagctacacatatcaaacatttataaaagagaagaatttagacataaatctatgataagtggtgttgtaactggtgtaatatgtgggttggggacaaatggttatattttagccataaatgcaatgcaagaattgttaataaatggaaatagataaa

SEQ ID NO: 279239 - DNA, 334 bp, Unknown
  Bacterial polypeptide expressing nucleotide sequence isolated from the Sargasso Sea
aatgagcaatattttaattattaatggtccaaatcttaatctattaggagaaagagaacaatctcaatatggttcaataacatttgaaaatcttaaaaaaatttgcttgcaaaaagctaaagaattaaatgttaatttggaatttaatcaaacaaacatagaaggtgaaattgtcacaactattcaagaagcgagaaataaatttgatggtataataattaatgctgctggatttacccatacctcggttgctattagagattcattaactatttttaaaaagcctattatagagttgcacatatccaacatttataaaagagaagaatttaga

SEQ ID NO: 279240 - DNA, 418 bp, Unknown
  Bacterial polypeptide expressing nucleotide sequence isolated from the Sargasso Sea
gctgggtagccgtgagccagaaatatatggatcgactactttgaaggaaattgaagaaaaggtagcttcaatcctgagcgggaatgaaatagagtttgaatcatttcagtcaaactcagaaggagaaattattgattggcttcataaacgtagcgatgctgattttctgcttttgaatcctggagcactgtcacacactagcgttgggcttcgtgatgcagtgcttggtgtggaaatcccttttattgaaattcacctttccaatgtatataaaagagaagaatttagacaccattcctatttttcagatatagcaattggagctctggccggacttggtgtccaagggtatttgcttgccgcagagtttgcagttgattatatagagcaaaaaggggaaaaaaactcaggaaattga

SEQ ID NO: 279241 - DNA, 187 bp, Unknown
  Bacterial polypeptide expressing nucleotide sequence isolated from the Sargasso Sea
atgaaaaaaattataattcttaatggaccaaacctcaaccttttaggtgagagagaaaaagaaaaatatggtgtagtttctttagaaagtattgaaaccaattgtaaagaattcgcaaaaaaaaatggcattaacttgactttttttcaatcaaatcttgagggagaaattgtagacgaaatacaaa

SEQ ID NO: 279242 - DNA, 451 bp, Unknown
  Bacterial polypeptide expressing nucleotide sequence isolated from the Sargasso Sea
aatgagtcaaaaaatccttgttattaatggtccaaatttaaatttgcttgggacaagagaaaaagaaaaatacggtaatatatcgcttgatgatattaagaaaaaatgtgagcttcattgtaaaaaaattggccttgatgttcagtttaaacaatcaaatgttgaaggagaaatagtcaattttattcaagaaactcaaaaaaattatagcggaattatcattaatgcgggaggatatactcatacatctgtagctatactggatgccttgctagcagtaaaaaaaccgacaattgaattgcacataactaacatttacaaaagagaagatttcaggcataaatcattaattagtaaagctgctgatggaataatttgtggcatgggtgtagacggatatattatggctcttaacggaatcaaaaagataataactaatgaaaatcgataa

SEQ ID NO: 279243 - DNA, 446 bp, Unknown
  Bacterial polypeptide expressing nucleotide sequence isolated from the Sargasso Sea
taataaaataattattattaatggtcctaatcttaatctattaggtgaaagagaacaatcacaatatggctctaccacttttgaaaaacttaaagaaaattgtttcaccaaatgtgaggaattaggtttagagctaagttttgttcagtctaatcttgaaggagagttagtaaatattattcaagaaagtataaaatcttatgatggaattataataaatgctgcaggttttacccacacttctgtagcaataagagatgctttggatatttttaaaaagcctataattgaattacatatatcgaatatttataaaagagaggaatttagacaaaaatctttaattagtgatatagtcactggaggaatctttggcttaggctcagatggttatattttagccataatttcaatggaaaaacttttaaaaaatgaaaataaataaa

SEQ ID NO: 279244 - DNA, 445 bp, Unknown
  Bacterial polypeptide expressing nucleotide sequence isolated from the Sargasso Sea
aatgagtaaattaataataattaatggacctaatcttaatctattaggtgaaagagaacaaacccaatatggtagcaaaagccataaacacctagaggaaatttgtctaaatagggcaaaagatttaaaaattgatttagagatcaaacaatcaaatattgaaggagatattgtaaatataattcaagatgctcgaaaaacacatgatggaatcataataaatgcagctggatatagtcatacatcagttgctataagagatgctttaagtattttcaaaaaacctatcatcgaacttcatatatctaatatttataaaagagaggagtttagacacaaatctcttattagtgcagttgttacaggaataatatgtggattgggtataaatggctatattttagccataaactcaatgcatgaaatcttaaaaaatgaaaattaa

SEQ ID NO: 279245 - DNA, 352 bp, Unknown
  Bacterial polypeptide expressing nucleotide sequence isolated from the Sargasso Sea
gctgaacttcagcagcaggctgaacgccttggtgctgagctggtctgtttccagagcaaccacgagggggctttggtggatcagatccagcaggctgcctctgaggtggacgggatcttgatcaacgctggtgccttcacccacacctccattgccatccgcgatgccctgctgggggtgcagctcccgtatgtggagctgcatctcagcaacgtccatgcccgtgaggagttccgccatggctcctatctggctgataaggccgtgggcgtgatctgcggctttggcccgatcagctactacctggccctggaggggatggtggctcacctgcgcagtagccagctgtgac

SEQ ID NO: 279246 - DNA, 439 bp, Unknown
  Bacterial polypeptide expressing nucleotide sequence isolated from the Sargasso Sea
atgaaaaaaattattataattaatggccctaatcttaatcttttaggtaacagagaaaaagatgtttatggtgagatttctattcaagaaatagaaaatcaatctaaaaaaagatgtgatgaattaaatttagaattgtctttttttcaaagcaataatgaaggagaaataattaatcatatacaatccgctgaaaaggaatatgacggactaatcataaatccagcagcttttacccatacctccgtagctttattagatgctttaagggctttatcaaaaccaaaaattgaaatacatttatcaaacatatataatagagaagagtatagaagaaaaagtataacatcagaaggggtaaatggattaatatgcgggtttggtttctggagctatattttagcaatagaagctataaacaatatgattaattcttaag

SEQ ID NO: 279247 - DNA, 217 bp, Unknown
  Bacterial polypeptide expressing nucleotide sequence isolated from the Sargasso Sea
tttgttcatattatataaagtttcagtgattaaattaataataattaatggtcctaatcttaatctattaggagaaagagaacaaactcaatatggtagcaagaactacaaatatcttgagaaaatctgtcttaaaagggcaaagtgtttaaatatcgatattgaaattaagcaatcaaatattgaaggagagatttgtcatattattcaagatgct

SEQ ID NO: 279248 - DNA, 227 bp, Unknown
  Bacterial polypeptide expressing nucleotide sequence isolated from the Sargasso Sea
attgtctaaaatacttctcataaatgggccaaatctaaatcttctaggtacaagagagcctgagatatatggtgatacaacattagaagagattgaaaacaagcttaagtctagtgctgaagatgctggacatgaattaatctgtcttcaatcaaatgcagaatatgaaattatagattcaatccaaaatgctagtaaaaattcaactgatgtaataataataaacc

SEQ ID NO: 279249 - DNA, 307 bp, Unknown
  Bacterial polypeptide expressing nucleotide sequence isolated from the Sargasso Sea
attgactataatttttattttatttttttttctcatagaatataaggttttagtgagcaaaatactaattatcaatggcccaaatcttaatctattaggagaaagagaacaatcacaatatggaaataaagattataattttttagaagaaatttgtttaaatagagctaaagaattaaaaatagacttagatattactcaatctaatgtagaaggtgagattgtaaacatcatacaagaatctagaaatacgcatgatggaataattattaaaggtggaggctatactcatacctctgtagctatt

SEQ ID NO: 279250 - DNA, 208 bp, Unknown
  Bacterial polypeptide expressing nucleotide sequence isolated from the Sargasso Sea
atgaaaaaaaaaattttaattattaatggacctaacctaaatatgcttgggaaaagagaaccagaagtttatggaaaaactactttaaaagaacttgaaaaaaagtgtgtaaatgaatcaaaaaaattagatttaaatatttctttctttcaaagtaattcagaggctgaaataattgatgagatccaaaaaagtctagattatgatg

SEQ ID NO: 279251 - DNA, 442 bp, Unknown
  Bacterial polypeptide expressing nucleotide sequence isolated from the Sargasso Sea
catgatcaaacaaaaaaatattttaattttaaatgggcccaacctgaacctacttggtataagacaacctgaaatatatgggtctcgaactcttaaagatttagaggaaatgtgtttgagtaaaggcaaagcttgttcaatgaatataaaatttgaacaaagtaattccgaatcggaattagtgacttatattcaggaggcaataaagacttcagatggtataattataaatgctgccgcatattcacatacttcagttgcaatcctcgatgccttaaattcttttactgggtatgtaattgaagttcatatatcggatatttctaagcgagaagagttcaggaaattctcatatgtatctttgagggcggactatgtaattatgggcaaaggtctagaaggatatattgaagcattagaaaaaatgcaacgagaacattag

SEQ ID NO: 279252 - DNA, 448 bp, Unknown
  Bacterial polypeptide expressing nucleotide sequence isolated from the Sargasso Sea
atgaataataagataattataattaatggtccaaatcttaatctattaggtgaaagagaacaatcacaatatggatctactacatttgaagaattaaaagaaatttgtttaaataagtcgaaagagttgggtttagtagctgatttttctcaatcaaatattgagggtgaaatagtaagcttaatacaaaactctagagagaattttgatggaattataatcaacgctgcagcttttacgcatacttctgtagctattagggatgcattaagtatttttaaaaaaccaatcattgagttacatatttcaaatatatatagacgtgaggaatttagacaaaaatctttgataagtgacgttgttacaggtggtatttttggtctaggtactgatggttatattttagccataatttcaatgcaaaagcttttacaaaatgaaaattaat

SEQ ID NO: 279253 - DNA, 445 bp, Unknown
  Bacterial polypeptide expressing nucleotide sequence isolated from the Sargasso Sea
atgtctaaagctagtaaaatatatgttttgaatggtcctaacttaaacttacttggagatagagagccagatatttatgggaatgtatcattaaaggatatagagaaatctctaagtaattatggtaaagaaaataattctgaaatttattttaaacaaacaaatcacgaaggggaattaattgaatttgttcatgaagcctcaaaaaaagcaaatgcaattattattaatcctgcgggatactcacatacatctgttgctttattagatgcccttctaacagttaaaattcctataatagaagtacacatatcaaatatttttaaaagagaagattttagacacaattcatatgtttctaaagctgcaattggtgttataagcggtttagggattgaaggttatttatatgcgcttaaatttcttttggacgagctaaaataat

SEQ ID NO: 279254 - DNA, 439 bp, Unknown
  Bacterial polypeptide expressing nucleotide sequence isolated from the Sargasso Sea
atggcaaaaaaaatactaataataaacgggcctaatttaaatcttcttggtgaaagagaggaatctaagtatggaaagactactctgaaggaagttaaaaaaaattgtgaacatcatggtaaatctattgatcttgaaatcatatttgagcaatcaaacatagaaggggaaatcgttacaatgatacaaaaagcaaaaggcgtatatgatgggataattataaacgcagccggttatactcatacctctgttgctattttagatgcacttttggctattaaaattccaactatagaagttcatataacaaatatttacaatagagaggaatttagaaaaaaatccctaataagtaaggctgcaaatggaattatttgcggatttggtataaacggttatattatggcattagattcaattaaaaaaatcttaagtaaat

SEQ ID NO: 279255 - DNA, 295 bp, Unknown
  Bacterial polypeptide expressing nucleotide sequence isolated from the Sargasso Sea
agtaactctgaagaagagattatagaaaagattcattctcagaagaatgaaaaatatgattatggtatttttaattttggtgcgcatacacacacaaatattgctataagagatgccatactctctgtaaagcttcctttctatgaagtccatataagtaatatttatgctagagaagaattcagacaccattctttctttagtgatattgctacaggctctattgtcggatttggtttagacggatatgaatttgcattaaacaaaataatgagggggaaagatggatcttaga

SEQ ID NO: 279256 - DNA, 448 bp, Unknown
  Bacterial polypeptide expressing nucleotide sequence isolated from the Sargasso Sea
atgaaaaaaattataattcttaatggtccaaatctcaaccttttaggagaaagggaaaaaagccaatatggaagttttactttaaaagatattgaaaaaagatgtaaaatttttgcatctgaaaataatatggatctctctttatttcagtcaaatttagaaggtgaattgattgaaaaaattcaggagtcaagaaaaaaagaagatggcttaatcattaacgctggcggttacactcatacatctgttgcaattcttgatgcattaaaaatattaaaaatacctataattgaattgcatattagtaatatctataatagagaagactttaggcacaaatctttaattagtaaagttgctaaaggtataatttgtggttttggcgaaaatggttacataatggctttagaagcaatgaaaaattatttaaaagatgaaaatagataaa

SEQ ID NO: 279257 - DNA, 109 bp, Unknown
  Bacterial polypeptide expressing nucleotide sequence isolated from the Sargasso Sea
atgaatattttattgataaatggaccaaatcttaatcttttgggaactagagaacctgaaatatatggtaataaaacattgagtgatatagaaaaaagatttaactaaa

SEQ ID NO: 279258 - DNA, 439 bp, Unknown
  Bacterial polypeptide expressing nucleotide sequence isolated from the Sargasso Sea
atgacaaaaaaaatactaataataaatgggcctaatttaaatctccttggagatcgtgaagagtccaaatatggaaaagtgacacttgaagaagtcaaaaagaattgtgagttccattcaaaatcaattggattcgaaataagctttcatcaatcaaatatagaaggtgaaatagtaactatgatacaaaaagccaaaggagtttttgatggaataattattaatggtgcgggctatacacatacttcagttgctatcttggatgcattgctggctgttaaattacctacaatagaggtacatattacaaatatatataatcgtgaagaattcagaaaaaaatctttaataagcaaagctgcaaaaggaattatttgtggatttggaataaaaggatatattatggcactagactctatgaaagaagttcttaactaaa

SEQ ID NO: 279259 - DNA, 154 bp, Unknown
  Bacterial polypeptide expressing nucleotide sequence isolated from the Sargasso Sea
atgaatattttattgataaatggcccaaatttaaatttattgggaactagagaacctgaaatatatggtaataaaacattgagtgatatagaaaaagatctaacaaaagttgctaaagaaaagagtattaatcttgaatgttttcaaaagtaat

SEQ ID NO: 279260 - DNA, 373 bp, Unknown
  Bacterial polypeptide expressing nucleotide sequence isolated from the Sargasso Sea
atgaataataagattataattattaatggtccaaatcttaatctattaggagaaagagaacaatcacaatatggttctattacttttaatgaattaaaagaaatttgtttaaataaatctaaagaattaggtttgatcgctgaattttctcaatcaaatatagagggacaaatagttaacataatacaagactccataaaaaattttgatggaattataattaatgctgcagcatttacacatacatcggtcgctataagagacgctttaagtatttttaaaaaacctattattgaattacatatttctaatatatataaacgtgaggaatttagacaaaaatcacttattagtgatatgcaacaggaggaat

SEQ ID NO: 279261 - DNA, 215 bp, Unknown
  Bacterial polypeptide expressing nucleotide sequence isolated from the Sargasso Sea
aatgaaaaaaatattaattattaatggacctaacctaaatctattaggtaatagagaagatgatatatatggtaaagacagtttagataagattaaatctgattgtgaaaagaaaggtatagaaaagaaattagaaattatttttttccaatctaataatgaaggggaaataattgataagatacatgaagtaaatgataaatttgatggtctaa

SEQ ID NO: 279262 - DNA, 439 bp, Unknown
  Bacterial polypeptide expressing nucleotide sequence isolated from the Sargasso Sea
aatgaaaaaaatattaattattaacggccctaacctaaatctattaggtaaaagagaagatgatatttatggtaaagacagtttagataagattaaatctgattgtgaaaaaaaaggtatagagaagaaattagaaattatttttttccaatctaataatgaaggggaactaattgataaaattcatgaagtaaatgataaatttgatggtctaattattaatccagcagcatttactcattcatcaatagccattctagattcattacgagcaataaataagcccaagatagaaattcatctttcaaatatttattcaagagaagagtatagaaaaaaaagtattacttcggaaggtgtgcatggtttaatatgtggatttggtggaaatagttatcttctaggaattgaagcaatatgcaaattaatttataaataa

SEQ ID NO: 279263 - DNA, 304 bp, Unknown
  Bacterial polypeptide expressing nucleotide sequence isolated from the Sargasso Sea
atgaaaatattagttatacatggaccaaatttaaatctgcttggtataagagagccagaggtttatggttcaaccacaatggaagaaatcaatcaaggcttattagataaagcaagctctaataatattgagattgaagcttttcaaagcaatgcagagcatgagatcgttacaaaacttcaagattcaatcaacctaatagactatataattattaatccaggtgccttaactcatactagtattgcaattagagattgtttgcttggtatcggagtgccgttctatgaggtccatatatcta

SEQ ID NO: 279264 - DNA, 367 bp, Unknown
  Bacterial polypeptide expressing nucleotide sequence isolated from the Sargasso Sea
atgataaaaaaaatactaattataaatggtccaaatttaaatcttcttggggaaagagaggaatctaaatacggcaatgctaccttggatgaagttaaaaaaaaatgtgaatctcattcaaaaaacattggttttgaaataaaattcgtacaatcaaatatagaaggtgaaattgtaacgatgattcaaaaagcaaaaaatgtctttgatggtataattattaatgctgctggctatacacatacttcggttgcaattttagatgctttgctagctgtaaaaataccaactatagaagtgcacataactaatatatataatcgtgaagaatttagaaataaaatcgttgataagcaaagctgctaaa

SEQ ID NO: 279265 - DNA, 262 bp, Unknown
  Bacterial polypeptide expressing nucleotide sequence isolated from the Sargasso Sea
tcattctcagaagaatgaaaaatatgattatggtatttttaattttggtgcgcatacacacacaaatattgctataagagatgccatactctctgtaaagcttcctttctatgaagtccatataagcaatatttatgctagagaagaattcagacaccattctttctttagtgatatagctacaggatctattgtcggatttggtttagacggatatgaatttgcattaaataaaataatgagggggaaagatggatcttag

SEQ ID NO: 279266 - DNA, 421 bp, Unknown
  Bacterial polypeptide expressing nucleotide sequence isolated from the Sargasso Sea
atgaaaatacaaataattaatggtcctaatttaaatcttttaggcgttagagaaaaagatatttatggtagtttatcatttgatgaatattttctaaaactcaaaaccaaatttaaaaatattgatttatttcattatcaatctaacattgaaggagagttaattaataaaattcaagatgttggatttgattttgatggtataatattaaatgctgcagcatatactcacacatctgttggtatagcagatgctataagaggaattaattcacctgttattgaagttcatatctcaaacactaaatctagagaagatttcagaaaaaaatcatttattagtccacatgcaaaaggagtaattcaaggttttggattgtatagttatgaattagctattttaagttttttaaataactaaa

SEQ ID NO: 279267 - DNA, 172 bp, Unknown
  Bacterial polypeptide expressing nucleotide sequence isolated from the Sargasso Sea
aatgaacaataaaataattattattaatggtcctaatcttaatctattaggagaaagagaacaatcacaatatggttcaataacttttgaaaaattgaaagcaaattgtttaaaaaaagctgatgaactaaatctagatatggaattctttcaatctaatattgaaggcgac

SEQ ID NO: 279268 - DNA, 116 bp, Unknown
  Bacterial polypeptide expressing nucleotide sequence isolated from the Sargasso Sea
aaatataggcttctaaagggtcctaacttaaatcttttaggaacaagagaaccggaaatctacgggtcagagtctttaagggatatcgaagctaccctatcaaagaattcaaaaaa

SEQ ID NO: 279269 - DNA, 307 bp, Unknown
  Bacterial polypeptide expressing nucleotide sequence isolated from the Sargasso Sea
atttctttcagagtaacttctgaagaagagattatagaaaagattcattctcagaagaatgaaaaatatgattatggtatttttaattttggtgcgcatacacacacaaatattgctataagagatgccatactctctgtaaagcttcctttctatgaagtccatataagtaatatttatgctagagaagaattcagacaccattctttctttagtgatattgctacaggctctattgtcggatttggtttagacggatatgaatttgcattaaacaaaataatgagggggaaagatggatcttaga

SEQ ID NO: 279270 - DNA, 451 bp, Unknown
  Bacterial polypeptide expressing nucleotide sequence isolated from the Sargasso Sea
aatgactaataaaataattattattaatggtccaaatcttaatctattaggtgaaagagaacaatcacaatatggatcagatacatttaaggaattaaaagagaaatgcttgaaaaaatcaaaagaaatcggtttaaatgttaactttactcaatcaaacttagaaggtgaaattgtagaaattattcaagaagccagaaaagaatacgaaggaattataattaatgcagcagggttcactcatacatcagtagcaattagagatgctcttagtctgtacaaaaaaccaataattgagttacatatatcaaatatttataaaagagaggagtttagacacaaatccttaataagtgatatagcaactggtggtatttttggtttaggtacagaaggttatattttagccataatttctatacaaaagatcatagaaaatgaaaatcgataa

SEQ ID NO: 279271 - DNA, 433 bp, Unknown
  Bacterial polypeptide expressing nucleotide sequence isolated from the Sargasso Sea
cctgcatggccccaacctcaacctgctcggtacccgcgagccgggggtgtatgggcacaccacgctggcgcagatcgaccaggccctgctggcccaggcgcaggccgccgggcacgcgctggatgccctgcagtccaatgccgagcacgtgctggtggaccgggtgcaggccgcccgtaccgatggcaccgccttcatcctgatcaacccggccgcgttcacgcatacctcggtcgccctgcgcgatgcgctggcggcggtggacgtgccgttcatcgagatccacctgtccaacccgcatgcccgcgagccgttccgccagcacagctatttcagcgacaaggcggtcggggtgatctgcgggttcggcgcggacagctatcgctatgcgatggatgcggcgctggtgcggctgcaggacgccggcgcctga

SEQ ID NO: 279272 - DNA, 250 bp, Unknown
  Bacterial polypeptide expressing nucleotide sequence isolated from the Sargasso Sea
ccggtttattgtgataatccggcagcgtttacccataccagtgttgcgctgcgcgatgcctttgccgcagtcgggctgccgttcattgaggttcatctttccaatgtgcatacccgcgagcccttccgccataagtctttcttctccgacctcgcgcaggccgtcatatgcgggctggggccgcgaggctatacggcagcgctagacgccgccctggcacaactgggcttcggggataacgccaactgac

SEQ ID NO: 279273 - DNA, 457 bp, Unknown
  Bacterial polypeptide expressing nucleotide sequence isolated from the Sargasso Sea
tatggttaataaaaaaaaattcttggttattaatgggccgaatcttaactttttgggtaaaagagagcccgaaatttatggaaatttaagccttgaagaaatccaaaagtatactgaaaaaaaggtaaactctttttgtaagtacgtgaatattgagtggtttcagtctaatttagaaggtgaaatagtcgaaagaatccaaaaagctagtcaagaggccctagatggactggttataaaccctgcagcatattcacacacgagtgtagctatacttgatgctcttaaactcattgagtataaggttgttgaagttcatttaagtaatacatataatcgggaaagctttcgtcacacgaggttgacggctaaaagcagtgacgccataattgagggctttggaaaagaagtatattttttaagtattatatctcagattacagaagagggtttttaa

SEQ ID NO: 279274 - DNA, 410 bp, Unknown
  Bacterial polypeptide expressing nucleotide sequence isolated from the Sargasso Sea
aatgaaaaaaattcttataattaatggacctaatttaaatcttcttggtaatagagaaaaaaaattttatggagatacaactttagaaaaaattaaaatattatgtgatcaacattgtaaaaaaaataatatagaatgttccttttttcaaagcaatcatgaaggagaattaattgagaaaattcactctgttgatagtgactttgatgggattataataaatcctgctgcatttactcacacatctatagctttacttgatgcacttagagcaacttcaaagcctaaaatagaaatccatatatccaatatttatgctagagaagattacagaagaaaaagcattacatctgaggctgtaaatggtgtaatatgtggttttggtgaaaatggatatgtcctagcaattg

SEQ ID NO: 279275 - DNA, 277 bp, Unknown
  Bacterial polypeptide expressing nucleotide sequence isolated from the Sargasso Sea
aatgagtcataaaattcttgttattaatggtcctaatcttaacttacttggaacaagagaaaaagaaaagtacggtcaatctacacttgaggacattagaaataaatgtgagtctcatgccaaaaagacaggaataataatcaaatttgaacagtctaacgttgaaggtgagatagtaaatatcatacaagatgctaaaaaaaagtatgatggaattgttataaatgcgggcggatatactcatacatcggttgcgattcttgatgctctgctggct

SEQ ID NO: 279276 - DNA, 448 bp, Unknown
  Bacterial polypeptide expressing nucleotide sequence isolated from the Sargasso Sea
atgaataataaaatagttattattaatggtcccaatcttaatctattaggtgaaagagaacaatcacaatatggatctgaatcatttgataaattaaaagaaaaatgtcttaaaaaaactactgatttaaatattgatgctgaattttttcaatcaaatatagaaggcgaaattgtaactaaaattcaagattctagaaaaaactttgatggaatgattattaatgcagcaggttttactcatacttcagtagcaattagagacgcacttagtatatttaaaaaaccaataattgagttgcacatatccaatatatacaaaagagagcaatttagacataaatctcttataagtgaagttgttagtggaggaatttttggattaggtactgagggttatattttagccataatttcattagagaagatgcttagaaatgaaaattgat

SEQ ID NO: 279277 - DNA, 139 bp, Unknown
  Bacterial polypeptide expressing nucleotide sequence isolated from the Sargasso Sea
gatgaatatcttattgataaatggaccgaatctaaatcttttgggaactagagaacctgaaatatatggaaataaaacattgggtgacatagaagaagaatttacaaaagttgctaaagaaaaaagttttaatctttga

SEQ ID NO: 279278 - DNA, 442 bp, Unknown
  Bacterial polypeptide expressing nucleotide sequence isolated from the Sargasso Sea
aatgaataataaaattattattattaatggtccaaatcttaatctattaggagaaagagaacaatctcaatatggatcgatcactttttcggagttgaaagaaaattgtataaataaatctaaagaattgggcttaaatattgagtttactcaatcaaatattgagggcgaaatagttaatttaattcaagactcaataaaaaaattcgacggaatgattatcaatgctgctgcatttactcatacttctgttgcaattagagatgcgctgagtgtttttaaaaaaccaattatagaattacatatatcaaatatatataaaagggaggaatttagacaaaaatctctcattagcgatgtagttactggaggaatttttggcttaggtagtgatggttatattttagccataatttcaatgcaaaagcttctgaaacaatga

SEQ ID NO: 279279 - DNA, 451 bp, Unknown
  Bacterial polypeptide expressing nucleotide sequence isolated from the Sargasso Sea
atgaaaaagaaaattctagtcattaacggaccaaatttaaaccttttgggagaaagagaaaaggataaatatggtagcacgtctttaaaggagatagagggccagtgtttgaatttttcaaaaaaaaataatttgacactctctttttttcaatcaaatgttgagggtgagattattaacgcaatacaagaatcaagaaaaaatatggatggattaattattaatgctggtggatatactcatacctcagtagcaatacacgatgctttaaagcttttaaaaatacctatcattgaattgcatataacaaatatatataatagagaagattttaggcataaatccctaattagtaaattagctacaggaataatttgtggatttggaattaagggatatattatggctcttgaagcaataaaaagtaatttagagaatgaaaatagataaa

SEQ ID NO: 279280 - DNA, 448 bp, Unknown
  Bacterial polypeptide expressing nucleotide sequence isolated from the Sargasso Sea
atgacaaaaaaaatactaataataaatggacctaatttaaatcttcttggagaacgagaagaatctaagtatggcaaagttactctcgaagaagttaaaaaaaattgtgaatctcatgcaaaactaattaatcttcaaattaagtttgatcaatcaaatatagaaggcgaaattgttacgatgattcagaaagctaaaggaaattttgacggaatagttataaatgctgcgggatatacacatacttcagttgcaattttagacgcgcttcttgctgttaaattaccaacaatagaaatacacataacaaatatatataatcgtgaagaatttagaaaaaaatcacttattagcaaagctgctaaaggaattatttgtggatttggtgtaaaaggatatattatggctttagattcaattaaagaaattttaagtaataaaaaatgaa

SEQ ID NO: 279281 - DNA, 228 bp, Unknown
  Bacterial polypeptide expressing nucleotide sequence isolated from the Sargasso Sea
gatgaataaaattataattcttaatggcccaaatctcaaccttttaggtgaaagagagaaaaatcaatatggaaattttacacttaaagatattgaggtttcatgtaaagaatttgcagagaaaaatgaaattacgctaacaatgtatcaatcaaatattgagggtgaactgggtgatagaattcaatcctcaagaaatgaacaaaatggattgataattaatgctgg

SEQ ID NO: 279282 - DNA, 395 bp, Unknown
  Bacterial polypeptide expressing nucleotide sequence isolated from the Sargasso Sea
aatgaataataaaattattattatcaatggtccaaatcttaatctattaggtgaaagagaacaatcacaatatggatcaataacgtttgataaattaaaagaaaattgtatgaataaatctagggaattaggtttacaaattgaattctctcaatctaatatagaaggtgaaattgtcgatataattcaaaaatcaagaaaaaattttgatggaataataataaatgcagctgcgtttactcacacctctgttgctataagagatgcattaagtatttataaaaaacctataattgaattgcacatctctaatatatataaaagagaggaatttaggcgaaaatctcttataagtgatgtagtaactggtggtatttttggtttaggttctgaag

SEQ ID NO: 279283 - DNA, 448 bp, Unknown
  Bacterial polypeptide expressing nucleotide sequence isolated from the Sargasso Sea
atgactaaaataattattattaatggccctaatcttaatctattaggtgagagagaacaaactcaatatggtagcaaggattataaacatttaaaagaaatttgtagtaaacaagcaaatgatctaaatttagatttagagattaaacaatcaaatattgaaggtgatattgtgaatattattcaaaattctcgcaaaatttatgatggaatgattataaatgctgcaggttatagccatacatcagtagcaattagagatgctttaagtattttcaaaaagcctgtaattgagctccacatatcaaatatttataaaagagaggattttagacacaagtcacttataagcggagttgttactggaataatttgtggattgggagtaaacggctatattttagccataaattctatgcatgaaatcttagaaaatgaaaataaataaa

SEQ ID NO: 279284 - DNA, 337 bp, Unknown
  Bacterial polypeptide expressing nucleotide sequence isolated from the Sargasso Sea
aatgaagatattagtactcaatgggccaaatcttaatatgcttggtatgcgcgaggaagatatttatggatctgagacattagatgatattgaggcaaaattaaaaaataaagctgatagcaatgaatgtgaagtttacttttatcaaagcaatgccgagcatgaactaatagatgcaattcatacagcttttgaaaatggtactaattcaataatttttaatcctgcgggttacacacatacaagcgtagccttaagagatgcgattttagctgtgaaaataccattttatgaagttcatatatcagatattaattctagagaagatttagaaaaa

SEQ ID NO: 279285 - DNA, 439 bp, Unknown
  Bacterial polypeptide expressing nucleotide sequence isolated from the Sargasso Sea
atgaaaaaaatattaattattaatggtcctaacctaaatctattaggtaaaagagaagatgatatttatggtaaggacagtttagataaaattaaatctgattgtgaaaaaaaaggtatagataagaaattagaaattatttttttccagtctaataatgaaggggaaataattgataagattcaagaagtaaaagataaatttgatggtctaattattaatccagcagcttttactcattcatcaatagccattctagattcattaagagcaatacataagcccaagatagaaattcatctttcaaatatttattcaagagaagagtatagaaaaaaaagtattacttccgaaggcgtgcatgggttaatatgtggatttggtggaaatagttatcttctaggaattgaagcaatatgcaaattaatttataaataag

SEQ ID NO: 279286 - DNA, 463 bp, Unknown
  Bacterial polypeptide expressing nucleotide sequence isolated from the Sargasso Sea
atgactaataaaataattattattaatggtccaaatcttaatctattaggtgaaagagaacaatcacaatatggatctaatacatttgagcaattaaaagaaaaatgcttaaaaaaatcaaaagaaattggtttagagttaaactttacacaatcaaatttagaaggtgaaatagtaaatatcattcaagaagctagaaaagaatacacaggaatgataattaatgcagcagggtttacacatacatcagtagcaattagagatgctcttagtctgttcaaaaaaccaataatcgaattacacatatctaatatttataaaagagaggagtttagacacaaatctttaataagtgatatagcaactggtggtatttttggtttaggtactgaaggttatattttagccataatttctatacaaaagatcatagagaatgaaaatcgacaaaaaaattattaaa

SEQ ID NO: 279287 - DNA, 439 bp, Unknown
  Bacterial polypeptide expressing nucleotide sequence isolated from the Sargasso Sea
aatgaaaaaaatattaattattaatggccctaacctaaatctattaggtaatagagaagatgatatttatggtaaagacagtttagataaaattaaatctgattgtgaaaaaaaaggtatagagaagaaattagaaattatatttttccaatctaataacgaaggtgagataattgataaaatccatgaagttaatgataattttgatggtctaattatcaatccagcagcatttactcattcatcgatagccattctagattcattaagagcaataaataagcctaagatagaaattcatctttcaaatatttattcaagagaagagtatagaaaaaaaagtattacttcggaaggagtgcatggtttaatatgtggatttggtggaaatagttatcttctaggaattgaagcaatatgcaaattaatttataaataa

SEQ ID NO: 279288 - DNA, 228 bp, Unknown
  Bacterial polypeptide expressing nucleotide sequence isolated from the Sargasso Sea
tatgaaaaaaaaaaaaattttattaataaatggaccaaaccttaatttacttggtcaaagggaatcaattatatatggtagtacttcatttaataaattaaataaatatttaaaaacttattgtttaaataataattgtaatattaaattatttcaaagtaattctgaaagtgaaattattgataaaatacaaaaagctagaaatattatagatggaataataattaa

SEQ ID NO: 279289 - DNA, 325 bp, Unknown
  Bacterial polypeptide expressing nucleotide sequence isolated from the Sargasso Sea
atgagtaagttaataataattaatggacctaatcttaatctattaggcgaaagagaacaaactcaatatggtagcaaggactacaaatatcttgaagaaatttgttcaaaaagagcaaaagatttgaatatcgatatagaaatcaaacaatcaaatgttgaaggagatattgtgaatattattcaagatgcacgcaaaacacatgatggaattataataaatgccgctggatatagtaatacttcagttgccattagagatgctttaagtatttttaaaaaacctattatagaactacatatatcaaatatttataaaagagagg

SEQ ID NO: 279290 - DNA, 436 bp, Unknown
  Bacterial polypeptide expressing nucleotide sequence isolated from the Sargasso Sea
tatgaaaatattagttttaaatggtcccaatctcaatatgcttggattaagagaaaaagatatatatgggtctgattctcttaatgatattgaaaaaagacttgcgataattgcagaaaaaaataactgtgtaattgatttttatcaaagcaatgcggaacatgaactaattgatgtaatacaaaattcattaaacaagaaggtcgatgcaataatttttaatcctgctggatacactcatacaagtgtagctttaagggatgctctattggcagtaaagattccattttttgaagttcatatttcagatgttgaatcaagagaggattttagaaaaaaatcatattttagcgatatagctgagaaagtatttagcggtcatggagttaagggatacgagcttgctttaaatgaagcattaaattttaataggtag

SEQ ID NO: 279291 - DNA, 451 bp, Unknown
  Bacterial polypeptide expressing nucleotide sequence isolated from the Sargasso Sea
aatgaataataaaataattattattaatggtccaaatcttaatctattaggggaaagagaacaatcacaatatggatcaaccacgcttgaccaacttaaagataattgttctaaaaaaggacaagaaattggtctagatgttgaatttgctcaatctaatgttgaaggagaacttgttaatataattcaagatgctaggaaaaaatttgatggtatgattataaatgctgcagcatttactcatacttctgtggccataagagatgctctagatttatttaaaaaaccaataatcgagattcatttgtctaatatttataaaagagaagaatttagacataaatcacttataagtggtgtcgtaactggaggaatttttggattaggtgccgaaggatatattttggccataatttcattacaaaagactttgcaaaatgaaaatagataa

SEQ ID NO: 279292 - DNA, 436 bp, Unknown
  Bacterial polypeptide expressing nucleotide sequence isolated from the Sargasso Sea
gatgaataaaattataattcttaacggaccaaacctcaaccttttaggtgagcgagaaaaagagaaatacggtaatattacattaaaaaatattgaaaaaaattgtaaagaatttgcccaaaaaaataatattgatctagctttatttcaatctaacattgaaggagagttagttgaagaaattcaaaaagcaaggaaagaacatcatggattaatcataaatgctggcggctatactcacacttctgttgcaatacatgatgcattaaaaatactcaaaatgccaataatcgaattgcatattactaatatttacaatagagaagaattcaggcataaatcgctaataagtaaaatagcaacaggcgttatatgtggttttgggactgatgggtatctaatggcactaacagctatgaaggcttatttaaaataa

SEQ ID NO: 279293 - DNA, 442 bp, Unknown
  Bacterial polypeptide expressing nucleotide sequence isolated from the Sargasso Sea
atgagtaataatattttaataattaatggtccaaatcttaatctattaggtgaaagagaacaatcacaatatggctctattacttttgaagagttaaagaaaaattgtttaaaaaaatcaaaagaattaaatattaatctaaattttgcccaatcaaatgtagagggggaaattgtaaatctcatacaaaaagcaagaaataatttcgatggaataataattaatgccgctggatttactcatacttcagttgctataagagatgcattaagtatatttaaaaaaccaataattgaacttcatatttctaatatttataagagagaagaatttagaaaaaaatcactaataagtgatgtggtaactggaggaatatttggaattggtgctgatggttatattttagccataattgcaatgcaaaagatgattaaaaaatgaa

SEQ ID NO: 279294 - DNA, 398 bp, Unknown
  Bacterial polypeptide expressing nucleotide sequence isolated from the Sargasso Sea
caacagagaaaaaaatttttatggtgatacttctctagaaagaattaaatcaatatgtgctgaagaatgtaagaaacataaaattgagtcagatttttttcaaagtaatcatgagggtgaaataatagagaaaattcattctgttcaaaatggttttgagggaattataattaatcctgcagcttacacacacacttcaatagctttattagatgcattaagagcaactagcaaaccaaagattgaagttcatatatcaaatatatatgcaagagaagattacagaagaaaaagtctaacctctgaagcagttaatggaataatttgtggctttggggaaaatggctatatactagcaattgaagcaatgaaaaaattaatttatagtaaagattaat

SEQ ID NO: 279295 - DNA, 105 bp, Unknown
  Bacterial polypeptide expressing nucleotide sequence isolated from the Sargasso Sea
tatgaaaaatattttacttatcaatggacctaatcttaatcttcttggaaaaagagatgtagaaatttatgggaataagacaattaatgacgtggaagatatgtt

SEQ ID NO: 279296 - DNA, 424 bp, Unknown
  Bacterial polypeptide expressing nucleotide sequence isolated from the Sargasso Sea
atgaaattaacaataattaatggtcccaatttgaatcttcttggttcaagagagactaatatttatgggaatcaagattttgaaactttccttaattcacttagatcaaaatattcaaaaattaatttagaatattatcaatcgaatgttgagggtgaattaataaattttattcaagattctagggactcagatggtataataattaatgccgctgcttatactcatacttctgttggaataggggatgcgataaaagcaattgatacaaaggttattgaagttcatatatctaatactttttcaagagaagaatacagacataactcatatttatcaccagtagttgatggtataattataggatttggactaaatagctatgaactggcaattgaaagcttcttacctaaagatgaataac

SEQ ID NO: 279297 - DNA, 451 bp, Unknown
  Bacterial polypeptide expressing nucleotide sequence isolated from the Sargasso Sea
atgaataataaaataattattattaatggtccaaatcttaatctattaggagaaagagaacaatcacaatatggatcaactacgtttgaccaacttaaagaaaattgttctaaaaaaggacaagaaattggtcttgatattgaatttgctcaatctaatattgaaggagagcttgttaatataattcaagatgctaggaaaaaatttgatggtatgattataaatgctgctgcatttactcatacctctgtggccataagagatgctctagatttattcaaaaaaccaattatcgagctacatttatctaatatttataaaagagaagaatttagacataaatcacttataagtggtgtcgtaagtggaggaatttttggattaggtgctgaaggatatattttggccataatttcattacaaaagtctttacaaaatgaaaatagataaa

SEQ ID NO: 279298 - DNA, 466 bp, Unknown
  Bacterial polypeptide expressing nucleotide sequence isolated from the Sargasso Sea
atgtattataagtttattgtgaacaatataataattattaatggcccaaatcttaatctattaggtgaaagagaacaatcacaatatggaaaaataaccttcaatgatttaaaaaacatatgtttagatcattcaaaaaatataggagtaaaattagatttttttcaatcaaatttagaaggtgagatagtaacaaaaatacaaaatgcaaggaaagaatatgatggcataattataaatgcagcaggatatactcatacttcagtttctatccgtgacgctttagatatatttaaaaaaccaattatagaactacatatttcaaatatatacaaaagagaagaatttagacaaaaatcacttataagtaatattgtaacaggaattatttgtggtcttggatcaaatggttatattttggccataaatgcaatgcaagaattgctaaaaaatggaaatagataaa

SEQ ID NO: 279299 - DNA, 439 bp, Unknown
  Bacterial polypeptide expressing nucleotide sequence isolated from the Sargasso Sea
atgaaacacaatataataataattaatggtccaaatttaaatttactaggtgaaagagagaaggaaaaatatggcactgaaactttaaaggacgtagagatagcctgtgataaactagcttcaaaaaacaacattcagctttctttttttcaatcaaatatagaaggagaaattgttacaaagatacaagaatcaagacaaaaaatgaatggcttaataattaatgctggaggctacactcatacatctgtagctatacacgacgctttaaaacttcttaaaataccaataattgaattgcatattacaaatatatacaatagagaagattttagacataaatctatgataagtcaggtttctaatggtattatttgtggttttggaacaaagggttatttaatgtctatcgaagcgataatggatttgataaaataag

SEQ ID NO: 279300 - DNA, 502 bp, Unknown
  Bacterial polypeptide expressing nucleotide sequence isolated from the Sargasso Sea
ttgccgttaactgtaatttttattttaattttttttctcatagaatataaggtttttgtgaataaaatattaattatcaacgggccaaatcttaatctattaggagaaagagaacaatcacaatatggaaaaaaagattataaatctttagaagaaatttgtttaaatagagcaaaagaattaaatatagacttggaaattacacaatctaatgttgagggtgagattgtaaacattatacaaaattcaaggaatacccatgatgggataattattaatgcaggaggttacactcacacctcagtagctattagagattccttaaatatttttaaaaaacctattatagaacttcacatatctaatatatataaaagagaagattttagacaaaagtcattaataagtgatgttgtaactggtggtatttttggacttggtgtagatggttatattttagccataaattcaatgcaaaagttattgcaaaatggaaattgat

SEQ ID NO: 279301 - DNA, 439 bp, Unknown
  Bacterial polypeptide expressing nucleotide sequence isolated from the Sargasso Sea
aatggctaaaatccttgtactacacggcccgaatttaaaccttttaggagtgcgtgaaccacatatctatggttctgacagtttaaatgacattaatgaacgttgtagaaatctgtgtgctaaaaaaggccatgttttttcttcccttcaaagcaatgctgaatcggattttataggtagactgcatgaagccagagatgatggtacagaatttatgatagtaaactttggggggttcactcacacaagcgtagcgatcagggacgcgataatagcttctgagattccattcattgaagtacatctctctaaccttttttcccgcgaggagtataggcaattttctttttttagcgatattgctgttggctgtatcgtgggccttggcgcacaaggctatgaacttgcgctggaagcaactttcaagagacttgaatag

SEQ ID NO: 279302 - DNA, 247 bp, Unknown
  Bacterial polypeptide expressing nucleotide sequence isolated from the Sargasso Sea
atgaatatattagtgttaaacggtcccaacttgaatctattgggtactcgcgagcctgaagtttatgggacagacagtctcaaagatattgaagaaaatcttaagtcaatttcaaaaaaacacaacgtaaatattcgtttttatcagtctaattctgaaaatgaattaataaatgaacttcataatgcgaagcaggaaaatattgacgcgattataattaaatccgggtgcttttacacatactagc

SEQ ID NO: 279303 - DNA, 391 bp, Unknown
  Bacterial polypeptide expressing nucleotide sequence isolated from the Sargasso Sea
atgagcaataaaataattattattaatggtcctaatcttaatctattaggtgagagagaacaatcactatatggatctgtgacatttgataaactaaaagaaaaatgtcttaaaaaatccactgaactaaaaattaatattgaattttttcaatcaaatattgagggtgaaattgtaaataaaattcaagactctaggaaaaattttgatggaatgataattaacgctgcaggttttactcatacatcagtagcaattcgagatgcgcttgatatttttaaaaaaccaataattgaactacatatatcaaatatttacaaaagagagaagtttagacataaatcacttatcagtgaagttgttagtggtggaatttttggtttaagtcctg

SEQ ID NO: 279304 - DNA, 448 bp, Unknown
  Bacterial polypeptide expressing nucleotide sequence isolated from the Sargasso Sea
aatgtcttcgatcttgcttttaaatgggccaaatttgaatcttttaggtgaaagagaaccagatatatatggagatttttctcttgaagatattgaaaaaacaatagaaaagctaggcaaagagaacaatattgataccgaatgctttcaaagtaatgctgagcatgagttagttgacaagattcatgatgcgaaatctaatggagtaaaaattattctattcaatccaggcgccttcacacactcaagcatatctttgagggatgcgatacttggtgtaaatattcccttgattgaaatacatttgtctaacatttatggcagagaagaatttagagaaaagtcatatttttcagacattgctttgggagtgatttcaggatttggaaagcatagttatttaatggcctttcaagcagcaaaaaattatctaataagggaggattaa

SEQ ID NO: 279305 - DNA, 466 bp, Unknown
  Bacterial polypeptide expressing nucleotide sequence isolated from the Sargasso Sea
atgcattataagtttattgtgaataatataataattatcaatggtccaaatcttaatctattaggtgaaagagaacaatcccaatatggaaaaattacatttaatgatttaaaaaatttatgtttagaatactcaaaaaaaataggaataaaattagattttttccaatcaaatttagaaggtgagatagtaactaaaatacaaaatgctagaaaagaatatgatggtataattatcaatgcggcaggatatacccatacatctgtgtctatacgtgacgcactagatatatttaaaaaaccgattatagaattacatatttcaaatatatacaaaagagaagaatttagacaaaaatcacttataagtaatgtggcaacaggaattatttgtggtctaggctcaaatggatatattttggccataaatgcaatgcaagaattgctaaaaaatggaaatagataaa

SEQ ID NO: 279306 - DNA, 193 bp, Unknown
  Bacterial polypeptide expressing nucleotide sequence isolated from the Sargasso Sea
tgctataagagatgccatactctctgtaaagcttcctttctatgaagtccatataagcaatatttatgctagagaagaattcagacaccattctttctttagtgatatagctacaggatctattgtcggatttggtttagacggatatgaatttgcattaaataaaataatgagggggaaagatggatcttag

SEQ ID NO: 279307 - DNA, 439 bp, Unknown
  Bacterial polypeptide expressing nucleotide sequence isolated from the Sargasso Sea
atgaagatattagtactcaatgggccaaatcttaatatgcttggtatgcgcgaggaagatatttatggatctgagacattagatgatattgaggcaaaattaaaaaataaagctgatagcaatgaatgtgaagtttacttttatcaaagcaatgccgagcatgaactaatagatgcaattcatacagcttttgaaaatggtactgattcaataatttttaatcctgcgggttacacacatacaagcgtagccttaagagatgcaattttagctgtgaaaataccattttatgaagttcatatatcagatattaattctagagaagaatttagaaaaaaatcttactttagtgatattgcagaaaaagtttttagtgggcatggaacgaaaggctatgttcttgctttagaggaggctttaaaaaataagaaggtataaa

SEQ ID NO: 279308 - DNA, 445 bp, Unknown
  Bacterial polypeptide expressing nucleotide sequence isolated from the Sargasso Sea
ttgtctaagatacttttaataaatggtccaaatctcaatcttttaggtacgagagagccagaaatttatggtgatacttcattaaatgaggttgaagaaaaattgaaagcaagtgctgaagatgccggacatgaatttaattgttttcagtcaaatgccgaacatgaaataattaatacaatacaacaagctaaacaagacaatatagatgtcattataattaatccaggaccttttacccatacaagcatagcgcttagagatactttcttaagtacaaaaattccttttattgaaattcatatatctaacatatttgaaagagaagaatttcgtaaaaactcgtttttaagtgatataagcattggatgtataattgggtgtggtgttggaggttatggattagctatgagaagagcaaaaaactttcttagagataaataat

SEQ ID NO: 279309 - DNA, 397 bp, Unknown
  Bacterial polypeptide expressing nucleotide sequence isolated from the Sargasso Sea
atgagtcataaaattcttgttattaatggtcctaatcttaacttacttggaacaagagaaaaagaaaagtacggtcaatctacgctcgaggacattaagaataaatgtgagtctcatgccaaaaagacaggaacaatgatcaaatttgaacagtctaacgttgaaggtgaaatagtaaatatcatacaagatgctaaaaaaaagtatgatggaattgttataaatgcgggtggatatactcatacatcagttgcaattcttgatgctctgctggctgttaaaataccaacaatagaattacacataactaatatttacaaaagagaggaattcaggcataaatcattgataagtaaagctgctgatggaattatttgtggattaggagttagtggat

SEQ ID NO: 279310 - DNA, 451 bp, Unknown
  Bacterial polypeptide expressing nucleotide sequence isolated from the Sargasso Sea
atgaaaaaaaaaattattattattaatggtcccaatcttaatctattaggagagagagaacaatcacaatatggatcaattacatttaatgaacttagggaaaaatgtataaaaaaaactgaagaattaaatattagcctggattttgtacaatctaatattgaaggtgagattgttacatatattcaaaatgctagagacaaaaatgatggcctgattattaatgccgcaggctttactcatacctcggtatcgattagagatgcactaaatatttttaaaaagccaatcatagaactgcacatatcaaatatttacaacagagaagaatttaggcataaatctatgataagtgctgttgtaacgggtataatttgcggattaggaacaaatggttatattttagccataaatgcaatgcatgaattgctaaaaaatggaaatagataaa

SEQ ID NO: 279311 - DNA, 448 bp, Unknown
  Bacterial polypeptide expressing nucleotide sequence isolated from the Sargasso Sea
aatgagtgataatttacaaattttagtaatcaacgggcctaacttaaatatgctgggtaaaagagaaacggatatttatggtacaagaactctggatcaaatcacttctgatttagaaaaaaaaataaatgacaaaagcttgtcattagacttttttcaaagtaatcatgaaggtgaaatattagattttatgcataaaaataataataaggttgatggatgtattataaatgctggtgctttaacacactcttcaactgctcttcatgatgcaattaagtctgtagatttcccttgtgtagaagtacatatgtccaacatttactctaggaaagaaagttggagacaaaagtccttgatagctcctgcagttattggaactgttcaaggatttggtgaagaaagttataaagctgctttagaattactagttcaatatattagaaac

SEQ ID NO: 279312 - DNA, 496 bp, Unknown
  Bacterial polypeptide expressing nucleotide sequence isolated from the Sargasso Sea
ttgactgtgatttttattttatttttttttctcatagaatataaggtttttgtgaataaaatacttattattaatggtccaaatcttaatctattaggtgagagagaacaatcacaatatggaaaaaaagattataattttttaaaagaaatttgttttaaaagagcaaaagaattaggaataaaactagaaattcaacaatctaatgttgaaggagaaatagttaatattatacaagaagcaagaaatattcatgatggaataatcataaatgcaggtggatatactcacacatcagtcgctataagagattctttaaatatttttaaaaaacctattatagaacttcatatatcaaatatatataaaagagaggattttagacataagtcgttaataagtgatgttgtaactggtggtgtttttggtcttggtatggatggttatattttagccataaattcaatgcaaaagttattacaaaatggaaattgat

SEQ ID NO: 279313 - DNA, 451 bp, Unknown
  Bacterial polypeptide expressing nucleotide sequence isolated from the Sargasso Sea
atgacaaatagaattttaattattaatggtccaaatcttaatctattaggtgaaagagaacaatcacaatatggctcggttagttttgatcaacttaaagaaaagtgtttaaataaatctaaagaattaaatattaatctagattttatacagtcaaatattgaaggtgagattgtcacgatcattcaagatgctagaaaaaaatacgatgggatgataattaatgctgcaggtttcactcatacttcagtatctataagggatgctctagatatttttaaaaaacctattatagagttacacatatcaaatatttataaaagagaagaatttagacataaatctatgataagtggtgttgtaactggtgtaatttgtggattaggtgcaaatggttatattttagccataaatgcaatgcaagaattgttaaaaaatggaaatagataaa

SEQ ID NO: 279314 - DNA, 436 bp, Unknown
  Bacterial polypeptide expressing nucleotide sequence isolated from the Sargasso Sea
atgaaaaaaattataattcttaatggaccaaatctcaaccttttaggtgagagagaaaaaagccaatacggtgactgcactttaaaagatgttgaaaaaagttgtgaagagtttgctgtagagaataatttaaaaatattcttttttcagtcaaatattgaaggggagttagtagaaaaaattcaagaatctagaaaagatcaagatggcctgattattaacgctggtggatatacgcatacatcagttgcaatacatgatgctttaaaaatattaaagttaccaattattgaattgcatataagtaatatttacaatagagaggaattcaggcataaatctctaattagtaatgttgctaatggagtaatttgtggtttcggaactgatggctatataatggctctgaatgcaatgataaagtatttaaaataat

SEQ ID NO: 279315 - DNA, 493 bp, Unknown
  Bacterial polypeptide expressing nucleotide sequence isolated from the Sargasso Sea
atgaaaataacaataattaatggccctaaccttaaccttcttggaacaagagaaactgacatatatggaagtcagaattttgaatcttacctagattcactaaagtcattatttggaggtgtagacattgattattttcagtcaaacattgaaggtgagattattaattttattcaaaattcaaaaaattctgatggaattatattaaatgctgccgcatacacccatacttctgttggtatagcagatgccgttaaatctattgaatgtaaagttgttgaggttcatatttcaaatactttttcaagagaagaatttaggcacaattcatatctttcgcctgtggtagatggaataattataggatttggattagatagctataggcttgccttgaaagtatacttaaaggtgaatgacttcatcatatgcatcagcaacagcttccatcaaagcttcactcattgttgggtgagggtgaacagcatttagt

SEQ ID NO: 279316 - DNA, 340 bp, Unknown
  Bacterial polypeptide expressing nucleotide sequence isolated from the Sargasso Sea
aatgagtcagaaaattcttgttattaatggtcctaatctaaatttacttggcacaagggaaaaagaaaaatatggtcaatcttcacttgaggatattaaaaaaaaatgtaaaagccacgctgataagctaggtttagatattgaatttaaacaatctaatgttgaaggtgaaattgtaaattttatacaagaaacaagacagaaatataatggtataataataaatgccggcggatatactcacacatcggttgcaatacttgatgctttactagctgttaaaaaaccaacaatagagttgcacataacaaatatttacaaaagagaggatttcaggcat

SEQ ID NO: 279317 - DNA, 320 bp, Unknown
  Bacterial polypeptide expressing nucleotide sequence isolated from the Sargasso Sea
tatgaaaatcttagtgctaaatggtccaaatcttaatctgctaggtataagagaagaagatatatatggaaatgaaactcttcaagatttggagcataagctaaaagaaattgctgatgaagtaaatgctgaaatatctttttaccagagcaatgctgaacatgatttaatcaatgcaattcatgatgcatataaagctgatgttgaattgattatttttaatccagctgcttttactcatacaagcgttgccttaagagatgcacttcttggagttagaattccattttatgaagttcatatttcggatattaaaacta

SEQ ID NO: 279318 - DNA, 442 bp, Unknown
  Bacterial polypeptide expressing nucleotide sequence isolated from the Sargasso Sea
tatgagtagtcttatttatataattaatggtccaaatttaaatctcctaggacaaagagaacctagtatatatggcacccataccttaaaagatattgaaaataactgcttagaaatagcaaaaaaaaataatataaaaataaagtttttacaaagtaatgcagagcacgaaataattaattggatacacaatgcaagagaagatgcgtcaggtattattataaatccagctgcatactctcatacttctatagctatattagatgctttaactttatttgaagaacacataattgaagtccatataagtaatatacataaaagagaaagctttagacataattcatatgtttcccaaaaatctactgctgttatagcaggttttggaatagatggttataaaattgcattagaaaaaatgataaatttgtgttcaaattaa

SEQ ID NO: 279319 - DNA, 448 bp, Unknown
  Bacterial polypeptide expressing nucleotide sequence isolated from the Sargasso Sea
atgaacaaaattttaattataaatggtccaaatcttaatctattaggtgaaagagaacaatcacaatatggtaccactacatttaatgacttgaagcaaatgtgtcaaaaaacttctgaagatattgggataaaattagactttaaacaatcaaatattgaaggtgaattagttaatattattcaagaggcaagaaatgattacaaaggccttattatcaatgctgctgggtttacacatacttcagtagccataagagatgctttaagtatttttaaaaatccaataatagaacttcatatttcaaatatttacaaaagagaagaatttagacataaatctcttattagtggagttgttacaggtataatttgtgggttgggagttaacggctacattttagccataaatgcaatgcatgacttgttaagtaatggaaatagataaa

SEQ ID NO: 279320 - DNA, 451 bp, Unknown
  Bacterial polypeptide expressing nucleotide sequence isolated from the Sargasso Sea
tatgaaaaaaaaaattattattattaatggtcctaatcttaatctattaggcgaaagagaacaatcacaatatggttcaattactttcattcaacttaagaaaaagtgtcttgaaaaaaccaaggaattaaaccttgatctaaactttacccaatccaatattgaaggtgaaatagttacaataattcaaaatgctagaaatgagtatgatggcatgattataaatgccgcaggttttactcatacctccgtttctataagagatgcactggatatttataaaaagcccatcatagaacttcacatatcaaatatttataaaagagaagagtttagacacaaatctatgataagtagtgtagtaactggcatgatttgtggattgggtgcgaatggttatattttagccataaatgcaatgcatgaattattaaaaaatggaaatagataa

SEQ ID NO: 279321 - DNA, 436 bp, Unknown
  Bacterial polypeptide expressing nucleotide sequence isolated from the Sargasso Sea
atgaaaattctaatagtaaacggtgtgaatctaaacatgcttggtaaaagagagacagatttatacggtaatgagacattaaaagaccttgaaaataggttaaattcgctagaatctggtgctgatctgcatttctttcagagtaactctgaagaagagattatagaaaagattcattctcagaagaatgaaaaatatgattatggtatttttaattttggtgcgcatacacacacaaatattgctataagagatgccatactctctgtaaagcttcctttctatgaagtccatataagtaatatttatgctagagaagaattcagacaccattctttctttagtgatattgctacaggctctattgtcggatttggtttagacggatatgaatttgcattaaataaaataatgagggggaaagatggatcttaga

SEQ ID NO: 279322 - DNA, 319 bp, Unknown
  Bacterial polypeptide expressing nucleotide sequence isolated from the Sargasso Sea
atgaatattttgttattgaacggccctaacctgaatatgttaggccaaagagaacccgacaaatacggcacacaaaccttgcaagacatcgtagatgatttgcaggcgcaggctgcgtcaagcaacgtgaccttatcgcattttcagtcaaacgctgagtttgaactgattgatcgcgtgcacgctgctatgggtactgttgatgccattattattaatcctgctgccttcacgcacaccagcgtcgcccttcgcgatgcattattaagtgtcaatatcccgtttattgaagtgcatttgtcgaacgttcacgcccgtg

SEQ ID NO: 279323 - DNA, 451 bp, Unknown
  Bacterial polypeptide expressing nucleotide sequence isolated from the Sargasso Sea
aatgactaataaaataattattattaatggtccaaatcttaatctattaggtgaaagagaacaatcacaatatggatcagatacatttgagcaattaaaagaaaaatgcttaacaaaatcaaaagaaattggtttagaggtaaactttacacaatcaaatttagaaggtgaaattgtaaatattattcaacaagctagaaaagagtacacaggaatgataattaatgcagcagggtttacacatacatcagtagcaattagagatgctcttagtctgtttaaaaaaccaataatcgaattacatatatctaatatttataaaagagaggagtttagacagaaatctttaataagtgacatagcaactggtggtatttttggtttaggtactgaaggttatattttagccataatttctatacaaaagatcatagaaaatgaaaatcgataa

SEQ ID NO: 279324 - DNA, 442 bp, Unknown
  Bacterial polypeptide expressing nucleotide sequence isolated from the Sargasso Sea
atgaaaattttacttattaatggtccaaaccttaatcttctcggttcaagagagactgaaaaatatggtgatttaagtctcaaagaacttgagtctaaacttcgttcaatagcagaggatcaggattgtgaactgcattgcttccaatcaaactcagaagaaaaaattatcaatgaaatacatggtgctggtgttgagaatattggagtcattataattaatccagcagcttttactcatacaagtattgctatacgagatgcatttcttgctgttgatattccattctatgaagttcatataactgatattaaaagcagggaatcgttcaggcatcattcttattttgaagatatagctattgaacaaatttctggaaaaggaattagtggatatgaggacgcagttaataaagcaatcaaaaaatttaggagtagctaat

SEQ ID NO: 279325 - DNA, 433 bp, Unknown
  Bacterial polypeptide expressing nucleotide sequence isolated from the Sargasso Sea
atgggtaaaattgtaatcatcaatggtccaaatttaaattttcttgggcaaagagaaattgataaatatggaacaactacttataaggaattaatttctgaacttgaagactatacgaacaataaggatgaattaattttttatcaatccaatcatgagggagaaatttgtgaatttatccaaaacatttttaataatgaaacgattgacggtttgataattaatcctgggggatatactcacacaagtgtggcaataagagattcattactacttctaaatttacctatcgtggaagtacatatgacagatattagaaaaagggaaaactttagaaaaacaaatttaatttatgatgtttgtgaaaagtcatttgtaggtttgggtattgaaggttacaaaaaaggaattgattatataaatgaaaaatgaa

SEQ ID NO: 279326 - DNA, 445 bp, Unknown
  Bacterial polypeptide expressing nucleotide sequence isolated from the Sargasso Sea
gatgagtaagttaataataattaatggacctaatcttaatctattaggtgaaagagaacaaactcaatatggtagcaaagattataaatatcttgaggaaatttgtcaaaaaagagcaaagtatctaaaaattgatatagaaatcaaacaatctaatattgaaggagacatcgtgaatattattcaagatgctcgtaaaacacacgatggaatcattataaatgcagcaggatatagtcatacatctgttgcgataagagatgctttgagtattttcaaaaaacctataatcgaactacatatatctaatatttataaaagagaggattttagacacaaatctcttataagcgcggtcgttactggcataatatgtggattgggtataaatggatatattttagccataaattcaatgcatgaaatcttaaaaaatgaaaattaa

SEQ ID NO: 279327 - DNA, 439 bp, Unknown
  Bacterial polypeptide expressing nucleotide sequence isolated from the Sargasso Sea
aatgaaaaaaatattaattattaatggtcctaatctaaatctattaggtaatagagaagatgatatttatggtaaagacagtttagataagattaaatctgattgtgaaaataaaggtacagagaagaaattagaaattatttttttccaatctaataatgaaggtgaaataattgataaaatacatgaagtaaatgataaatttgatggtctaattattaatccagcagcatttactcattcatcaatagctattctagattcattaagagcaataaataagcccaagatagaaattcatctttcaaatatttattcaagagaagagtatagaaaaaaaagtattacttccgaaggagtagatggtttaatatgtggatttggtggaaatagttatcttctaggaattgaagcaatatgcaaattaatttataaataa

SEQ ID NO: 279328 - DNA, 442 bp, Unknown
  Bacterial polypeptide expressing nucleotide sequence isolated from the Sargasso Sea
atgaaaatattagtcatacacggtccaaatttaaatctacttggtttaagagagcctgacgtttatggtttaactacaatggaagaaattaatcaaggtttactcgatatagcaaattctaatgatattgagattgaagcttttcagagcaatgcagagcatgaaattgttactaagcttcaagaatcaattaatcaaatagactatattattattaatccaggagctttaactcatactagtattgcaattcgggattgtttgcttggtattggagttccattttacgaagttcatatatctaatatttttgcaagagaagagtttagacataaatcttttttttcagatattgcgagtggcattatttgtggacttggaacacaggggtatgaacttgcattgagtcacattattaagagttttaaggataaaaaataat

SEQ ID NO: 279329 - DNA, 451 bp, Unknown
  Bacterial polypeptide expressing nucleotide sequence isolated from the Sargasso Sea
atgactgaaaaaatccttgttataaatggtccaaatttaaaccttcttgggtcaagagaaaaagagaaatatggaaatacatctttgcaggatatacaaaaaagatgtgcggatcatgcaagtaaaattaatttggatatagattttaaacaatcaaatgttgaaggcgaaatagtgaattttattcaggatgctaataaaaaatacaagggtataattattaatgcaggaggttatacacatacctcagtggctattctcgatgccttacttgctgtgaaaaaacctactattgaattacacataacaaatatttacaaaagagaggatttcaggcataaatcactaattagtaaagctgcggatgggataatatgcggattgggtgttgagggatatataatggctcttaacggcataaaaaacttaataaaaaatgaaaatagataaa

SEQ ID NO: 279330 - DNA, 442 bp, Unknown
  Bacterial polypeptide expressing nucleotide sequence isolated from the Sargasso Sea
atgaagaaaataataattattaatggacctaatttaaatcttttaggaaatagagaacaaaaaatatatggagataagtctcttgatgaaatagaaaaaatttcaaaacaaaaatctagttctttgaatattgattgttttttttgccaaagtaatgatgaaggtgaaataataaatcatatacattctgtagaatcttcatacgatggtctgataattaatccagcagcttttactcatacttcagttgcactattagatgctcttagatctataaataaacctaaaattgaaatccacttatccaatatatataccagagaagaatatagaaaaaaaagcattacttcagaaggtgttgatggtttaatttgtggatttggtagtttaagctatattctagctatagaagcattaagtaatttgatctataataagtaat

SEQ ID NO: 279331 - DNA, 448 bp, Unknown
  Bacterial polypeptide expressing nucleotide sequence isolated from the Sargasso Sea
aatgaaaaatgatattctaattattaatggccctaatcttaatatgcttggaactagagaaccagatgtctatggtttggaaaccttagaacaaatagaagccaaatgtatatcctggggaaaacaatatagtcttcatgttaatttttcccaaagtaatgaagaaggtaagattgttaatttaatacaacaagcccctgacagttttagtgctataattataaatgcaggagcatatactcatacctcaattgctattcatgatgccttgaagggttgcgacttaccaataatagaagtgcacctctcaaatattttcaaacgtgagtcatttagacataattcatatatttctggtactgccgagggattaatatgcggttttggaagcgaaagctatcacttggctataattgcatctgctaacctactaaaaagccagaactaa

SEQ ID NO: 279332 - DNA, 430 bp, Unknown
  Bacterial polypeptide expressing nucleotide sequence isolated from the Sargasso Sea
atgaaagttttatttatcaatggtccaaatttaaatatgttaggaacccgagaagaagatgtgtatggctctttaacattggaccaaattaatgaaaaaattttatctaaggctaatgagctcaaaattgatactgatttttttcagtcaaatgtagagggtaatttagtatctaaaattcaagaatcctctgattttgattatattgttattaatcccgcagcttttactcatactagtattgcaattagagatgcactgttatcaataaaggctaagtttatagaggtacatctttccaatatatatagcagagaagactttagacacaactcctatgtttcatcaattgctattggggtaatttcaggatttgggtttcatggttatttaatggcacttgattatatcttaagtcttaaggactaac

SEQ ID NO: 279333 - DNA, 421 bp, Unknown
  Bacterial polypeptide expressing nucleotide sequence isolated from the Sargasso Sea
tatgaaaatacaaataattaatggtcctaatttaaatcttttgggtgttagagaaaaagatatttatggtagtttatcatttgatgaatattttctaaaactcaaaaccaaatttaaaaatattgatttatttaattatcaatctaacattgaaggagaattaattaataaaattcaagatgttggatttgattttgatggtattatattaaatgccgcagcatatactcacacatctgttgggatagcagatgctataagaggaattacttcacctgttattgaagttcatatctcaaacactaaatctagagaggatttcagaaaaaaatcatttattagtccacatgcaaaaggagtaattcaaggttttggattgtatagttatgacttagctattctaagttttttaaacaactaa

SEQ ID NO: 279334 - DNA, 451 bp, Unknown
  Bacterial polypeptide expressing nucleotide sequence isolated from the Sargasso Sea
atgaataataaaataattattattaatggtccaaatcttaatctattaggtgaaagagaacaatcacaatatggatcgacttcgtacgaccaacttaaagtgaattgttctgaaaaagcacaagaaattggtcttgatgttgaatttactcaatctaatgttgaaggagagcttgttaatataattcaagatgctaggaaaaaatttgatggtatgattataaatgctgctgcatttactcatacctctgtagccataagagatgctctagatttattcaaaaaaccaataatcgagcttcatttatctaatatttataaaagagaggaatttagacataaatcactaataagtggtgtagtaagtggaggaatttttggattaggtactgatggatatattttggccataatttcattacaaaagactttgcaaaatgaaaatagataaa

SEQ ID NO: 279335 - DNA, 451 bp, Unknown
  Bacterial polypeptide expressing nucleotide sequence isolated from the Sargasso Sea
atgtattataagcttactgtgaacgatattataatcattaatggtccaaatcttaatctattaggagaaagagaacaatcacaatatggttctatcacttttgaagagctaaaaaaagaatgtttaaaaaaatcaaaagaattaaatattaatttaaaatttactcaatcaaatatagagggtgaaattgtaaatcacatccaagaagcaagaaataattgcgatggaataataattaatgctgctggctttactcatacctcggtcgctataagagatgcattaagtatttttaaaaaaccaatcattgaacttcacatctccaatatttataagagagaagaatttagacaaaaatcattgataagcggcgtggtaactggaggaatatttggcattggatcggatggatatattttagccataattgcaatgcaaaaattgctataaa

SEQ ID NO: 279336 - DNA, 436 bp, Unknown
  Bacterial polypeptide expressing nucleotide sequence isolated from the Sargasso Sea
atgaaaatcttgataataaatggacctaatttaaatatgcttggaagtcgtgagactgatgtttatggtaacaaatcattaagcgatttagagagcatgttagttgggaaaaaacatgatgtaaatttagaattttttcaaagtaattctgaaaaagagattattgaaaagattcactcacaaaaaactgaaaattacagctatggtatttttaattttggtgcttttactcatactagtattgctataagagatgcgatactttcagtaaagcttccattttatgaagtacacatatcaaatgtttatgctcgagaagaatttaggcataaatctttttttaatgacatagctgtaggttcaattgtaggttttggttttgatgggtatgaatttgctctagataaaattatgagaggtaaagatggatcttaga

SEQ ID NO: 279337 - DNA, 340 bp, Unknown
  Bacterial polypeptide expressing nucleotide sequence isolated from the Sargasso Sea
atgattcaaaaaatccttgttataaatgggcctaatttaaacttactaggaactagagagaaagaaaaatatggcaactccactcttgcagatatacaaaaaaaatgcgagagctactccaaaaaaattggcttagaggttgactttaaacaatcaaatgttgaaggtgaaatagttaatcttattcaaaatacaaaagacaaacataagggtattattataaatgccgggggatacacacacacatctgtagcaatacttgatgctcttctggctgttaagaaaccaactatagaattacatataacaaatatttacaaaagagaagatttcaggcata

SEQ ID NO: 279338 - DNA, 400 bp, Unknown
  Bacterial polypeptide expressing nucleotide sequence isolated from the Sargasso Sea
tatgaaattaacaataattaatggtcccaatttgaatctccttggctctagagagactgatatctatggaaatcaagattttgaaactttccttgagtcacttaaatcaaaatatcctaaaattaatttagaatatcatcaatcaaatgttgaaggtgaattaataaattttattcaagattctagggattcagacggtataataattaatgctgctgcttatactcacacttctgttggaataggtgatgcgataaaagcaattgatacaaaggttattgaagttcatatatctaatactttttcaagagaagaatacagacataactcatatttatcaccagtagttgatggtataattataggatttggactaaaaaagctacgaattagcaattga

SEQ ID NO: 279339 - DNA, 451 bp, Unknown
  Bacterial polypeptide expressing nucleotide sequence isolated from the Sargasso Sea
aatgactaataaaataattattattaatggtccaaatcttaatctattaggtgaaagagaacaatcacaatatggatcagatacatttgagcaactaaaggaaaaatgcttaaaaaaatcaaaagaaattggtttagacgtaaggtttacacaatcaaatttagaaggtgaaatagtaaatatcattcaagaagctagaaaagaatactcaggaataataattaatgcagcagggtttacgcatacatcagtagcaattagagatgctctaagtctgtttaaaaaaccaataattgaattacatatatctaatatttataaaagagaggagttcagacacaaatctttaataagtgatatagcaactggtggtatttttggtttaggtactgaaggttatattttagccataatttctatacaaaagatcatagagaatgaaaatcgataa

SEQ ID NO: 279340 - DNA, 274 bp, Unknown
  Bacterial polypeptide expressing nucleotide sequence isolated from the Sargasso Sea
tttgatttcgtcaatacacaaagctcaaacagataacattgatctcataatttttaatccaggtgcttttactcatacaagtattgctttaagagatgctttattaggagtaaacatccctttctttgaagttcatatttcgaatattttctctagagaggaatttagaaaaaaatcttatttatcggacatagctgagggagtaatcactggacacggtgtttatggctattctttggcacttatgtctgcagttaacaaatataaaaaataa

SEQ ID NO: 279341 - DNA, 442 bp, Unknown
  Bacterial polypeptide expressing nucleotide sequence isolated from the Sargasso Sea
aatgaagaaaataataattattaatggacctaatttaaatctgttaggaaatagagaacaaaaaatatacggcgataagtctcttgatgaaatagaaaaaatttcaaaacaaaaatctagttctttgaatattgattgttttttttgccaaagcaatgatgaaggcgaaataataaatcatatacattctgtagaatcttcttatgatggtctaataattaatccagcagcgtttactcatacttcagtagcattattagatgctcttagatctataaataaacctaaaattgaaattcatttatctaatatatataccagggaggaatatagaaaaaaaagcattacttcagaaggagtagatggtttaatttgtggatttgggagtttaagctatattctagctatagaagcattaagtaatttgatttataataagtaa

SEQ ID NO: 279342 - DNA, 142 bp, Unknown
  Bacterial polypeptide expressing nucleotide sequence isolated from the Sargasso Sea
aatgagtaaaaaaataatacaatttattgatggtcctaacctgaatttattgggaagtagagaacctgaaatctatggttcaatgacacttgaagatattcatgtaatgattaatgaccacataagaaaaaataaattagat

SEQ ID NO: 279343 - DNA, 138 bp, Unknown
  Bacterial polypeptide expressing nucleotide sequence isolated from the Sargasso Sea
aatgagtaaattaataataattaatggacctaatcttaatctattaggagaaagagaacaaactcaatatggtagcaaagactacaaacatcttaaagaaatttgtccaaacagagcaaaagatctaaatatcgaaat

SEQ ID NO: 279344 - DNA, 439 bp, Unknown
  Bacterial polypeptide expressing nucleotide sequence isolated from the Sargasso Sea
atgaataatatacttttaatcaatggtccaaatcttaatctcttggggaatagagagcctgagatttatggctcaaaaagcctagatgatattgaaaaggatctttcaataatagctgatgagagtgggtatcaattactttcatttcaaagcaattcagaaagtgagattgttgattggattcatgaaaatgctgatagtggattatttttaataatcaatccaggtgcttttacacacacaagcatttctataagagatgcaatacttggaacaaatatatctttcattgaagttcatataagtaacatcttctctagagaagaattcagaaaagattcttatttttcagatattgcagaaggtgtaatttcaggactggggtttgaaggctatgaacttgcattgaaagccgtacttgaaatcataaagaaataaa

SEQ ID NO: 279345 - DNA, 442 bp, Unknown
  Bacterial polypeptide expressing nucleotide sequence isolated from the Sargasso Sea
atgaatattttattgataaatggaccaaatcttaatcttttgggaactagagaacctgaaatatatggtaataaaacattgagtgatatagaaaaagatttaactaaagttgctaaagaaaaaagtattaatcttgaattttttcaaagtaatcatgaaggagaaatagtagataaaattcaagagtctgtgaaaagtatccaagggattcttataaatgctggcgcttttactcatacctcgatttctattcgtgatgctttaattggatcgaaaatcccgtttgtagagttacatatttcaaatattttcagtagagaagattttcgtaaagaatcttttcttacagataaagctataggaattattagtggattcggcatatcaagttattctttagctcttgaaggaatcattggatatttaagtagtgaagattaaa

SEQ ID NO: 279346 - DNA, 442 bp, Unknown
  Bacterial polypeptide expressing nucleotide sequence isolated from the Sargasso Sea
gatgaatattttattgataaatggaccaaatttaaatcttttgggcactagagaacctgaaatatatggtaataaaacattgagtgatatagaaaaagatttaattaaagttgctaaagaaaaaagtattaatcttgaatgttttcaaagtaatcacgaaggagaaatagtagataaaattcaggagtctgtagaaagtatacaaggcattcttataaatgctggtgcttttactcatacctcgatttctattcgtgatgctttaattggatcaaaaattccttttgtagaattacatatttcaaatattttcagtagagaagattttcgtaaagaatcttttcttacagataaagctataggaattattagtggattcggcatatcaagttatttcttagctcttgaaggaatcattggatatttgagtattaaagattaa

SEQ ID NO: 279347 - DNA, 392 bp, Unknown
  Bacterial polypeptide expressing nucleotide sequence isolated from the Sargasso Sea
gatgaatattttattgataaatggaccaaatcttaatcttttgggcactagagaacctgaaatatatggtaataaaacattgagtgatatagaaaaagatttaattaaagttgctaaagaaaaaagtattagtcttgaatgttttcaaagtaatcacgaaggagaaatagtagataaaattcaggagtctttaaaaagtatccaaggtattcttataaatgctggtgcttttactcatacctcgatttctattcgtgatgctttaattggatcgaaaatcccttttgtagagttacatatttcaaatattttcagtagagaagattttcgtaaagaatcttttcttacagataaagctataggaattattagtggattcggcatatcaagtt

SEQ ID NO: 279348 - DNA, 442 bp, Unknown
  Bacterial polypeptide expressing nucleotide sequence isolated from the Sargasso Sea
aatgaaaatattagttatacatggaccaaatttaaatctgcttggtataagagagccagaggtttatggttcaaccacaatggaagagatcaatcaaggcttattagataaagcaagctctaataatattgagattgaagcttttcaaagcaatgcagagcatgagatcgttacaaaacttcaagattcaatcaacctaatagactatataattattaatccaggcgccttaactcatactagtattgcaattcgagattgtttgcttggtatcggagtgccgttttatgaagttcatatatctaatatctttgcaagagaggaatttagacataaatcttttttttcagatattgcaaatggtgtcatttgtggacttggaactcagggctatgatcttgcattaagtcatattattaagatctatcaggataaacaataa

SEQ ID NO: 279349 - DNA, 445 bp, Unknown
  Bacterial polypeptide expressing nucleotide sequence isolated from the Sargasso Sea
gatgcattcgatactcgtcctcaacggccccaacctgaacctgctcgggacccgccagcccgaggtctatggcagcaccacgctcgccaatatcgaggacatgtgccgcaaccacgcggaaagctcaggtttctcggtcgccttcctgcagtccaaccacgaaggtcaactcgtcgacgcgctgcacgacgcccgtggcacacatgacggtgtcgttctcaacgccggcgcctacacgcacacctccgtcgcgctgatggacgcgatctcgtccgtgcaactcccggtgatcgaactgcacctttccaatatccacgcgcgcgagagctttcgtcacacgagcttcatcgcgccggtcgcactgggacagatctgcgggttcggcgcccgcggctacacgctcgcgcttgacgcgctgattggtcatctggaggcaaagtcatga

SEQ ID NO: 279350 - DNA, 433 bp, Unknown
  Bacterial polypeptide expressing nucleotide sequence isolated from the Sargasso Sea
gatggaaatccttttaataaatgggccaaacttaaatcttctaggtagcagagaaaactctatttatgggaacgatactttagatgatattgaggaaaatctttcagtaatttgcaaagagaatggtatttcttttgcttcctttcaaagtaatgcagaacatgaaattgttgaaaaaattcatgcagctaaagaaaataatgtttcaaagattctcatgaatccaggcgcatttacacatacaagtatttctatacgagatgctcttattggtgtgggcattccattttatgaaatccacatttcaaatatatttgctagagaagaatttagacataaatcatatttttctgatattgcagagggtgttgtatgtggaatgggaactaaaggctatgaatttgccctagaaaaagcaattaattctaattaa

SEQ ID NO: 279351 - DNA, 221 bp, Unknown
  Bacterial polypeptide expressing nucleotide sequence isolated from the Sargasso Sea
aatgaaaaaagttttaattgtaaatgggcctaacctcaatttgctcgggaaaagagagccagaggtatatggaaatactactttaaaagagcttgaaaaattatgcactcatgaatcaaaaaaattagactttgaagtttctttctttcaaagtaactcagaagctgaaattattaataaaatccaagaatgtaattactgtgatggattaataattaatg

SEQ ID NO: 279352 - DNA, 439 bp, Unknown
  Bacterial polypeptide expressing nucleotide sequence isolated from the Sargasso Sea
atgtctaaattcatgctgcttaatggtccaaaccttaaccttttaggttctagggagcccgaaatatatggttcaaccaccttagatgaagttgaaaaagaactttgttcaaaagcttctataagcggacaccaattactttgttatcaaagtaatgctgaacatgacttagtagagcaaatacatcttgcaaaagaagaaaatataaaatgcattatatttaatcctggagcatttactcatagcagtatagcaataagagatgctctttctggagttggaatacctttcattgaagtgcatatttctaatatttacagtagagaagattttagacagaaatctttcttatcagatattgcagagggtgttgtatcaggacttggggtagaaggttacgcattagcactagagtcaggaataaagaaattttcttaaa

SEQ ID NO: 279353 - DNA, 249 bp, Unknown
  Bacterial polypeptide expressing nucleotide sequence isolated from the Sargasso Sea
tatgaaattaattgttattaacggaccaaaccttaatctacttggagaaagagagcctgaaatctatggtagtgagtccttgaatcaaattaatgaatggattcagaatcatgaatcatgtaagaatttagaatttgaattttttcagtccaattctgaaggtgaaataattgactttttgcattcaaaaagaggaaaagtagattattgtattttaaatgctggtgcgttaactcattattcttatgc

SEQ ID NO: 279354 - DNA, 448 bp, Unknown
  Bacterial polypeptide expressing nucleotide sequence isolated from the Sargasso Sea
atgccgcccatcgtgctggtgctcaacggccccaatctcaacctgctcggcacccgcgagcctgccacttatggccatgaaaccctggccgacattgccgccctgtgtggtcgcagcgccgacaagctgggtctgaagatcgagtttcgccagaccaaccacgagggcgaattgctcgactggatccacggtgcccgcaaccgctgcgcgggtattgtgatcaacccggcggcctggactcacacttcggtcgcgatccgcgatgccctggtggccagtgaagtgccggtgatcgaagtgcatttatccaacgtgcatgcccgtgaagcctttcgtcatcactcgtttgtgtcaccgatcgcccaggccgtgctggccgggtttggcagccatggctaccacctggcactggaacatttcagcctgacgctgaagggacgcacctgat

SEQ ID NO: 279355 - DNA, 300 bp, Unknown
  Bacterial polypeptide expressing nucleotide sequence isolated from the Sargasso Sea
aatgaatatacttgtattgaatggccctaacttgaatctattgggcactcgtgaacctgaagtatatgggacagatactctcaaggatattgaagaaaatctcaaggtaatttctaaaaatcacaatgtaaatgttagtttttatcagtctaattctgagaatgaattgataaatgaacttcatactgcaaaacaggaaaatattgatgcgattataattaatccgggtgctttcacacacactagcatcgccttaagagatgcctttctaggggtaaatataccatttattgaagttca

SEQ ID NO: 279356 - DNA, 439 bp, Unknown
  Bacterial polypeptide expressing nucleotide sequence isolated from the Sargasso Sea
tatgagtaatatacttttaattaatggacctaatttgaatcttctcggaaacagagagccggagatttatggatcaaaaagtcttgatgatatagaaaaagaactttctattatttctactgagatggggcataagctaatatcctttcagagtaattcagaaagtgaaatagtggattggattcatagcaatgctgatgatgcaaaatttcttcttattaacccgggtgcattcacgcatacaagtatctctattagggatgctatcctcgggacaaatatctctttcattgaaattcatataagcaacattttttctagggaagaatttagaaaagaatcatatttttctgatatagctgaaggcgtaatctctgggcttggatttaaaggatacgaacttgcattaagagctgccttggagatgctaaagaaataa

SEQ ID NO: 279357 - DNA, 442 bp, Unknown
  Bacterial polypeptide expressing nucleotide sequence isolated from the Sargasso Sea
atgaatattttattgataaatggaccaaatcttaatcttttgggcactagagaacctgaaatatacggtaataaaacattgagtgatatagaaaaagatttaactaaagttgctaaagaaaaaagtattaatcttgaatgttttcaaagtaatcacgaaggagaaatagtagataaaattcaggagtctgtaaaaagtacccaaggtattcttataaatgctggtgcttttactcatacctcgatttctattcgtgatgctttaattggatcgaaaattccttttgtagagttacatatttcaaatattttcagtagagaagattttcgtaaagaatcttttcttacagataaagctataggaattattagtggattcggcatatcaagttatttcttagctcttgaaggaattattggatatttgagtattaaagattaaa

SEQ ID NO: 279358 - DNA, 439 bp, Unknown
  Bacterial polypeptide expressing nucleotide sequence isolated from the Sargasso Sea
tatgaaaaatatacttttaatcaatggtccgaatcttaatctcttggggaatagagagcctgagatttatggctcaaagagcctagatgatattgaaaaggatctttcagtaatagctggtgagagtgggtatcaattactttcatttcaaagcaattcagaaagtgagattgttgagtggattcatgaaaatgctgatagtgcattatttttaataatcaatccaggtgcttttacacacacaagcatttctataagagatgcaatactaggaacaaatatatctttcattgaagttcatataagtaacatcttctctagagaagaatttagaaaagagtcttatttttcagatattgcagaaggtgtaatttcaggactggggtttgaaggctacgaacttgcattgaaagccgtacttgaaatcataaagaaataa

SEQ ID NO: 279359 - DNA, 442 bp, Unknown
  Bacterial polypeptide expressing nucleotide sequence isolated from the Sargasso Sea
atgaatattttattgataaatggcccaaatttaaatttattgggaactagagaacctgaaatatatggtaataaaacattgagtgatatagaaaaagatttaactaaagttgccaaagaaaagagtattaatcttgaatgttttcaaagtaatcatgaaggagaaatagtagataagattcaggattctgtaaaaagtatacaaggcattcttataaatgctggcgcttttactcatacctcgatttctattcgcgatgctttaattggatcaaaaattccgtttgtggagttacatatttcaaatattttcagtagagaagattttcgtaaagaatcttttcttacagataaagctataggaattattagtggattcggcatatcaagttattccttagctcttgaaggaattattggatatttaagtattaaaaactaaa

SEQ ID NO: 279360 - DNA, 329 bp, Unknown
  Bacterial polypeptide expressing nucleotide sequence isolated from the Sargasso Sea
aatgtctaaagctagtaaaatatatgttttgaatggtcctaacttaaacttacttggagatagagagccagatatttatgggaatgtatcattaaaggatatagagaaatctctaagtaattatggtaaagaaaataattctgaaatttattttaaacaatcaaatcacgaaggggaattaattgaatttgttcatgaagcctcaaaaaaagcaaatgcaattattattaatcctgctggatattcacatacatctgttgctttattagatgctcttctaacagttaaaattccaataatagaagtacacatatcaaatatttttaaaa

SEQ ID NO: 279361 - DNA, 409 bp, Unknown
  Bacterial polypeptide expressing nucleotide sequence isolated from the Sargasso Sea
aatgaaaaaaataaaaattattgatggtccaaatttaaaccttctaggtaaacgtgaacctgaaatttatggattggaaacactaaatgatattcaagccttagttaaatcttatataatacagagaaagtatgaacttgaagcttctttttttcaatcaaactctgagggtgaaattgtagattgtatacagaattcaaatcaatcatctgatggaataataataaatgcggctggattttctcatacttcagtagcagtgttagatgctttacttgcaatacaaattccaaaaattgaagtacacttaacaaatctatttaagcgtgaagattttagacatcactctttcataagtaagggagtaaatggggttatatgtggatttggatctagtagttatttactt

SEQ ID NO: 279362 - DNA, 328 bp, Unknown
  Bacterial polypeptide expressing nucleotide sequence isolated from the Sargasso Sea
atgaaattaattgttatcaatggaccaaaccttaatctacttggagaaagagagcctgaaatctatggtagcgagtctttgaatcaaattaatgaatggattcagaatcatgaatcatgtaagaatttagaatttgaattttttcagtccaattctgaaggtgaaataattgactttttgcattcaaaaagaggaaaagtagattattgtattttaaatgctggtgcgttaactcattattcttatgctttgagggacgctatagttggtgcacaaattcccactgttgaagtacacttatcaaatatacataaaagagagaatttag

SEQ ID NO: 279363 - DNA, 433 bp, Unknown
  Bacterial polypeptide expressing nucleotide sequence isolated from the Sargasso Sea
atgaaaaatatacttttaatcaatggcccaaatcttaatctcttgggtagtagagagcctgagatttatggctcaaagagtctagatgatattgaaaatgatctttccataatatctaatgagagaggatataaactactatcatttcaaagtaattcagaaagtgagattgttgattggattcatgaatatgctgatagtgcattatttctaataatcaatccaggcgcttttacacacacaagcatctctataagagatgcaatacttggaacaaatatatccttcattgaagttcatataagcaacatcttttctagagaagaatttagaaaagagtcttatttttctgatattgcagaaggtgtaatttcaggactgggattcaaaggctacgaacttgcattgaaagctatacttgaaatgataaaga

SEQ ID NO: 279364 - DNA, 445 bp, Unknown
  Bacterial polypeptide expressing nucleotide sequence isolated from the Sargasso Sea
catgcacctgttgctcctcaacggacccaacctcaacctgcttgggcgtcgggaacccgagatctacggcttaagcaccctcaaatcgatcgaagcagagctcaagttggaggcggagagtcacggatgcgacctggagtgtttccagagcaacttcgaagggggattggtggagcggattcacgctgccatggggaacacccagggaatcctgatcaacgccggggcttacacccatacatcggtggctcttcgtgatgcgctcgctggtgtcgcaattccctatgtcgagctgcatctgagcaacacccatgcccgtgaggagtttcgacatcattcctttcttgctgcgggagccattggggttatttgcggctttggtgtgaagagttacgcactcgctctgcatggcctgatccaccatttgcatcaggacacaccgtga

SEQ ID NO: 279365 - DNA, 442 bp, Unknown
  Bacterial polypeptide expressing nucleotide sequence isolated from the Sargasso Sea
atgaatattttattgataaatggtccaaatttaaatttattgggaactagagaacctgagatatatggtaataaaacattgagtgatatagaacaagatctaacaaaagttgcccaagaaaagagtattaatcttgaatgttttcaaagtaatcacgaaggagaaatagtagataagattcaggattctgtaaaaagtatacagggcattcttataaatgctggcgcttttactcatacctcgatttctattcgtgatgctttaattggatcaaaaattccgtttgtagagttacatatttcaaatattttcagtagagaagattttcgtaaagaatcttttcttacagataaagctataggaattattagtggattcggtatatcaagttattccttagctcttgaaggaatcattggatatttgagtattaaagattaaa

SEQ ID NO: 279366 - DNA, 271 bp, Unknown
  Bacterial polypeptide expressing nucleotide sequence isolated from the Sargasso Sea
atgaaaatattagtgctcaatggacctaatttaaacctacttggtactagagaaccggaggtttacgggactgaatcgctggaagatattgaaaaaaacctgcaatcaatatcgtccggtaaatcaatatccataaatttttatcaatccaattctgaaaacgaactaattgaaaggctccatcaggcaaaaaaagattcagttgattacattataataaatccgggagctttcacacatacaagtatagcgcttagagatgcattcttag

SEQ ID NO: 279367 - DNA, 442 bp, Unknown
  Bacterial polypeptide expressing nucleotide sequence isolated from the Sargasso Sea
atgaatattttattgataaatggaccaaatctaaatcttttaggaactagagaacctgaaatatatggtaataaaacattgagtgatatagaaaaagatctaacaaaagttgccctagaaaagagtattaatcttgaatgttttcaaagtaatcacgaaggagaaatagtagataagattcaggattctgtaaaaaatatacagggcattcttataaatgctggggcttttactcatacctcgatttctattcgtgatgctttaattggatcaaaaattccttttgtagaattacatatttcaaatattttcagtagagaagattttcgtaaagaatcttttcttacagataaagctataggaattattagtggattcggcatatcaagttatgccttagctcttgaaggaattattggatatttaagtagtaaaaattaaa

SEQ ID NO: 279368 - DNA, 454 bp, Unknown
  Bacterial polypeptide expressing nucleotide sequence isolated from the Sargasso Sea
tatggctgcaaaattaaagattttagttataaatggcccaaatttaaacatgctaggaaagcgtgaacctgataagtacggttcgcattctttagagcatattatgagcgagttaaacagcgctgctaatagtttaggtgtggcattaacgcatttccaaagtaatagtgagcaagcgctcattgaacgcattcatgatgcttggcaagcggttgattacataataattaacccagcagcatttacgcatacaagcgttgcattacgtgatgcattgttaagtgttgatattccgttttatgaggtgcacttgagcaatgtgcacgcacgtgaagcttttcgccatcattcttatttttcagatgtggcacaaggcgttatatgtggattaggtgcaatgggttaccacgcagcattaaatgcagcggttaaccggtcgcaaaacgcaatttaa

SEQ ID NO: 279369 - DNA, 445 bp, Unknown
  Bacterial polypeptide expressing nucleotide sequence isolated from the Sargasso Sea
atgtcaaaaatacttttattgaatggtccaaatcttaatctcttaggctcaagagaagaagacatttatggaaagaagtcattaaaagaaattgaagagagccttattcagcatgcaaataaccttaatgaggagcttatctgttttcagagcaatgctgagcacgagctagtagacagaattcaagctgctaaaaatgaaaaaattaaaattattctcttcaaccctggcgctttcactcacacaagtgtggctttgagggacgccgttttaggggtcgacataccaatgatagaaattcacataagcaatatatttggtagagaaaaattcagagaaaagtcattcttttccgatatagctctaggggtaatttctggcttaggtgaagaaagctatatgagcgcattaaattttgcaattaaaaaaataggagacttataga

SEQ ID NO: 279370 - DNA, 262 bp, Unknown
  Bacterial polypeptide expressing nucleotide sequence isolated from the Sargasso Sea
attgaaatttctagtattaaatgggccgaatctaaatctgctgggtgagcgggaaccggaagtttacgggacaacaacattagctgagattgataacaggctagtaggtttagctaaggcagaggggcatgagctatcttgttttcagagcaatgccgagcatgagttggtcgataaaatacatgaggcgaagaagtcgggggtggattttattctgattaaccccggcgcttttacacataccagcatagcgttgcgtgat

SEQ ID NO: 279371 - DNA, 445 bp, Unknown
  Bacterial polypeptide expressing nucleotide sequence isolated from the Sargasso Sea
atgttgaatattttattaataaatggcccaaatttaaatttattgggaactagagaacctgaaatatacggtaataaaacattgaatgatatagaaaataatttaactaaagttgctaaagaaaagagtattaatcttgaatgttttcaaagtaatcatgaaggagaaatagtagataaaattcaaggatctataaaaaatatccaaggtattcttataaatgctggcgctcttactcatacctcgatttctattcgtgacgcattaattggatcaaatattccatttgtagagttacatatttcaaatatttttagtagggaagattttcgtaaagaatcttttcttacagataaagctatagggattattagtggattcggcatatcaagttattccttagctcttgaaggaatcattggatatttaagtagtaaaaattaaa

SEQ ID NO: 279372 - DNA, 508 bp, Unknown
  Bacterial polypeptide expressing nucleotide sequence isolated from the Sargasso Sea
tttgccatttattttaatttttattttttttatttttttcatgctatataagttcttaatgagtaataatattctaattattaatggcccaaatcttaatctattaggagaaagagaacaatcgcaatatggatcttcaacttttgaacaaataaagaaaatttgtatagaaaaatctaaagaattaggaattaacttagaattcactcaatcaaatatagaaggtgaaattgtcacaattattcaaaaggcaagaaataatttcgatggtattataattaatgctgcgggatttactcatacttctgtagctattagagatgccttatcgatttttaaaaaacctagcattgaattacatatttctaatatttacaaaagagaagaatttagacataaatctatgttaagtgcagtggtaactggagtaatttgtggattaggtacagatggttatattttggccataaatgcaatgcaagaattactaaaaaatggaaatagataa

SEQ ID NO: 279373 - DNA, 421 bp, Unknown
  Bacterial polypeptide expressing nucleotide sequence isolated from the Sargasso Sea
atgaaattgataataattaatggtcctaatctaaaccttttaggagttagagaaaaaaaaatttacggaaataaatcttttgaatctttatttgatgaacttcaaaaaaagtataatgacatttccctagaacaatatcaatcaaaccatgaaggagaaattattgaaaaaatacaagaagttggtttttcatacgatggaataattattaatgcaggtggttttacccatacatcaatcgcaattagagatgcaatatcttcagttactactccatgcctagaagtacatatttctaatattttatctagagaagaatttaggcaaaatagctatttatctgaagtttctgtaggaattatctcaggtttaggtatgaaaggctatgagttagctattcaatactttaaatcaaaataag

SEQ ID NO: 279374 - DNA, 427 bp, Unknown
  Bacterial polypeptide expressing nucleotide sequence isolated from the Sargasso Sea
actgaatggcccaaatttaaacatgcttggtgttcgtgaaccaaatatatacggttatgagacactaggtgatataaaagagttgtgcaatcaacgtgctatttcacatggcctaaaagtgaattttaaacaatccaatttcgaaggtgaaatcatagccgacattcaaagcgcaagaggcgtggcagctgggatcataattaatggagccgggtacacccatacatctattgctatactcgatgccctaaagatctctgaattaccagtaatcgagcttcatttatcaaacatccatgcaagggaagcatttcggcatcattcctacatagcgaaagccgcaaccggtataatttgcggttttggcgcccatagttatgtcctagcaattgacgcgatggcacgactcatcgaatgtgcagactga

SEQ ID NO: 279375 - DNA, 448 bp, Unknown
  Bacterial polypeptide expressing nucleotide sequence isolated from the Sargasso Sea
atgcacaatgttttaattataaatggtcccaaccttaatctcctaggagaaagagaaaaagacaaatacggcaagatttctttagatgaaattaagaaaaactgcgcatctttttcaaagaataataatattaacttaactttttttcaatctaatattgagggagaaataatagatgaaattcaaaattctagaaaaaaacaagattgtttaattattaatgcaggagggtatactcatacctcggtcgcaatacatgatgctcttaaagttttgaaaatacctattattgaattacacataactaatatatataaacgagaggagtttagacacaaatcactaattagcaaaattgcatcaggagtaatttgtggtttaggaagtgagggctatacattagctttaaaagcttctataaatttattagaaaatgaaaatagataag

SEQ ID NO: 279376 - DNA, 442 bp, Unknown
  Bacterial polypeptide expressing nucleotide sequence isolated from the Sargasso Sea
atgaatattttgttattgaacggccctaacctgaatatgttaggccaaagagaacccgacaaatacggcacacaaaccttgcaagacatcgtagatgatttgcaggcgcaggctgcgtcaagcaacgtgaccttaacgcattttcagtcaaacgctgagtttgaactgattgatcgcgtgcacgctgctatgggtactgttgatgctattattattaatcctgctgccttcacgcacaccagcgtcgcccttcgcgatgcattattaagtgtcaatatcccgtttattgaagtgcatttgtcgaacgttcacgcccgtgaaccgtttcgtcatcattcctatttttctgatgttgcagctggcgtcattgttggccttggtgccatgggctactcgctcgcgctaactgcagcaatcaacttaccgaaatcgcataaataaa

SEQ ID NO: 279377 - DNA, 445 bp, Unknown
  Bacterial polypeptide expressing nucleotide sequence isolated from the Sargasso Sea
aatgtctagaaaaaaaattattattataaatggccctaatttaaatttactgggagaaagagaaccggaagtttatggaacagagacattgaaagatttagaaaggttaacaaaagatcatatccaatcatcaaatttaaatattgatttagttttttttcagtcaaatagtgaaggcgatatagtaaattcaattcaagatgcaggaaaatctttaaatggagttatcattaatgctgggggtttatctcatacttctgtatcaattcttgacgcattattagctattaaaattcctaaaattgaagtccatatttcaaatctttttaccagagaagaatttagacatagctcatacattagtaaaggtgtaagtggcgttgtttgtggatttggattgaatggttatctacttgctattgatggaattaaaaaattaatataa

SEQ ID NO: 279378 - DNA, 439 bp, Unknown
  Bacterial polypeptide expressing nucleotide sequence isolated from the Sargasso Sea
tatgagcaatatacttttaataaatggtcctaatttgaatcttctaggcagtagagagccagagatttatggctcaaaaaatcttaatgatatagaaaaagaattgaccatcattgccgatgaaatggggcataagctactgccctttcagagtaattcagaaagtgaaatagtggaatggattcatgacaatgctgatgatgcaaaatttttaattattaacccaggtgcattcactcatacaagtatttcgattagggatgcgatcttaggaacaaatatctctttcattgaaattcatataagtaatattttctctagggaagaatttagaaaagaatcatatttttctgacatagctgaaggcgtaatctctgggctcggttttaaaggatatgaacttgcactcagagctgccttagagatgcttaagaaataa

SEQ ID NO: 279379 - DNA, 442 bp, Unknown
  Bacterial polypeptide expressing nucleotide sequence isolated from the Sargasso Sea
tatgaataataagattataattattaatggtccaaatcttaatctattaggagaaagagaacaatcacaatatggttctattaccttcaatgaattaaaagaaatttgtttaaataaatctaaagaattaggtttagttgctgaattttctcagtcaaatatagagggagaaattgttaatgtaatacaagattcaataaaaaattttgatggaattataattaatgctgcagcatttactcatacgtcagtcgctattagagatgctttaagtgtttttaaaaaacctattattgaattacatatttctaatatatataaacgtgaggaatttagacaaaaatcactaataagcgatattgcaactggagggatatttggattaggtgctgatggttatattttagccataatttcaatgcaaaaacttctcaaaaaatga

SEQ ID NO: 279380 - DNA, 442 bp, Unknown
  Bacterial polypeptide expressing nucleotide sequence isolated from the Sargasso Sea
atgaatatccttttaataaatgggccaaatttaaatcttttgggtactagagaaccggaaatatatggtaataaaacattgagtgatatagaaaaagatttaactaaagttgctcaagaaaagagtattaatcttgaatgttttcaaagtaatcatgaaggagaaatagttgataagattcaggattctgtaaaaagtatccatggcattcttataaatgctggtgcttttacacatacctctatttcaattcgagatgctttaattggatcaaaaattccatttgtagagttacacatatcaaatatttttagtagggaagactttcgcaaagaatcttttcttacagataaagctattggaattattagtggattcggcatatccagttactccctagctcttgatggaataattgaatatttaaataacaaagattaaa

SEQ ID NO: 279381 - DNA, 289 bp, Unknown
  Bacterial polypeptide expressing nucleotide sequence isolated from the Sargasso Sea
tatgagcaatatacttttaataaatggtcccaatttgaatcttcttggcagtagagagccagagatttatggctcaaaaaaccttgatgatatccaaaaagaattggccatcattgccgatgaaatggggcataagctactatcctttcagagtaattcagaaagtgaaatagttgaatggattcatggcaatgctgatgatgcaaaatttttaattattaacccaggtgcattcacgcatacaagcattttctatagggatgcgatcttaggtacgaatatttctttt

SEQ ID NO: 279382 - DNA, 445 bp, Unknown
  Bacterial polypeptide expressing nucleotide sequence isolated from the Sargasso Sea
catgaaaaaaattttaattataaatggacctaaccttaatcttcttgggaatagagaaaaaaatttttatggagacacttcattagaaagaataaaatctatttgtgaaaaaaaatgttttgaaaatcaaatggaaatggaattttaccaaagcaaccatgagggggagttactagaaaaaattcattcagttcaaaatgattatgaaggtatcataattaatccagctgcttacacccacacatcaatagccttgctagatgctctaagagctactactaaaccaaaaatagaagttcatatttcaaacatttatgcaagggaagattatagaagaaaaagtattacttccgagtctgtaaatggtgtcatttgtggatttggcgaaaatggttacttactagcaattgaagcaatgaagaaattaatttataaagatcaataa

SEQ ID NO: 279383 - DNA, 252 bp, Unknown
  Bacterial polypeptide expressing nucleotide sequence isolated from the Sargasso Sea
gatgaatattttattgataaatggaccaaatcttaatcttttaggtactagagaacctgaaatatatggtaataaaacattgaattatattgaacaagatttaactaaagctgcagaaagtaaaaaaacccttcttgaatgttttcaaagtaatcatgaaggtgaaatagttgataaaattcatgattctgttaataggattcaaggcattcttataaacgctggcgcttttactcatacctcgatttccat

SEQ ID NO: 279384 - DNA, 433 bp, Unknown
  Bacterial polypeptide expressing nucleotide sequence isolated from the Sargasso Sea
aatgccaaaagtacttctgttaaatggtccaaatctaaatttactgggtagccgtgagcctgaaatatatggttcaacaactttggaggaaattgaagaaaaggtggcagccgtcctatgcgggcatgaaattgagtgcgagacatttcagtcaaactcagaaggagacattattgattggctgcataaacatcgtggcgctgatttcctgcttttgaatccgggtgcgctcgctcacactagtgttggtctgcgtgatgcagtgcttggcgttgaaatcccttttattgaaattcacctttccaacgtgaataaacgagaagaattcaggcaccactcctatttttcagatatagcaattggggctctggccgggcttggagtcaaagggtatttgcttgcggctgaatttgcagttgattatatagaacaa

SEQ ID NO: 279385 - DNA, 409 bp, Unknown
  Bacterial polypeptide expressing nucleotide sequence isolated from the Sargasso Sea
atgaaaattttagtgctaaatggaccaaatcttaatctactaggtataagagaagagaatatatatggaagtgagtctcttcaagatgtagagcataagcttaaagagattgctgatgaggtaaatgctcaaatatctttttaccagagcaatgctgaacatgatttaattaatgcaattcatgatgcctatgagtctggtgttgaattgattatttttaatccagctgcatacacgcacacaagcgttgctttaagagatgcactccttgcagttagcattccattttatgaggttcatatttcggatattgaaactagagaagaatttagacaaaaatcttattttagtgacatcgctataaaagtattcagtggtcatggcactaatggatattcacttgcgttaa

SEQ ID NO: 279386 - DNA, 315 bp, Unknown
  Bacterial polypeptide expressing nucleotide sequence isolated from the Sargasso Sea
catgtcacgcatactccttctgcaagggccaaacctgaacctgctcggcacccgcgagccacatatttatggctcgaccacgcttgcagacatagagcaaacactggggccaatagcaaaagccgcaggacatgagctggaacagttgcagagcaatgccgagcacattctcatcgaccggattcatgctgcacgcgacgacgacacctgctttattctcatcaatcccggtgccttcactcataccagcgtggcgattcgcgatgcactcgctggcgttgcgatcccctttatcgaagttcacatctctaatgt

SEQ ID NO: 279387 - DNA, 427 bp, Unknown
  Bacterial polypeptide expressing nucleotide sequence isolated from the Sargasso Sea
atgcttctaaatggtcccaatttaaatttattgggaaccagagaacctgatttatatggatctgaaacattggaagatatagaagcacatcttgttgaaatctctaaagataaaaaatgtaatttaatatgccatcaaagcaatgctgagcatgagttagtggatctgattcattccgcaaaagataatcaagtgaaatgcatcataattaatccaggcgctttaactcatagcagtatagccttaagggatgcattgacaggtgtcaacattcctttcatcgaagttcatatttcaaatatatacgcacgagaagattttagacagaaatcttacctatcagatatagctgagggggtgatttcaggtttaggtgtagaaggttatgaactagctttagttaaagctatgaaaaaatttaattgat

SEQ ID NO: 279388 - DNA, 451 bp, Unknown
  Bacterial polypeptide expressing nucleotide sequence isolated from the Sargasso Sea
atgccaaaagtacttttgttaaatggtccaaatctaaatctgctgggtagccgtgagcctaaaatatatggttcaacaactttgaaagaaattgaagaaaaggtgggatctattctgagcagaaatgaaatagagtgtgaatcatttcagtcaaactcagaaggggaaattattgattggcttcacaaaaatcgtgatgctgtttttatgcttttgaatccgggagcactggctcatactagtgtcggtttgcgtgatgcagtgcttggtgtagaaatcccttttatcgaaatccacctttctaacgtgtataaaagagaagagttcaggcaccactcttatttttcagatatagcaattggagcactggctggacttggagtcaaaggatatttgcttgctacagagtttgcagtagattatatagtacaaaaaagggaattacaactca

SEQ ID NO: 279389 - DNA, 460 bp, Unknown
  Bacterial polypeptide expressing nucleotide sequence isolated from the Sargasso Sea
aatgccaaaagttcttctgttaaatggtccaaatctaaatttacttggaagtcgtgagcctgaaatatacggctcaacaactttgaaggaaattgaagatagagtggcgtcaattatgatttgccatgagattcagtttgaatcatttcagtcaaactctgaaggagaaattattgactggttgcataaatttagcagtgctgattttctattactgaatccaggagctttaacccacaccagtgttggactgcgtgatgctgtacttggagtgggaatcccttttatagaaattcacctttcaaatgtacataagcgcgaggaattcagacatcattcttatttttcagatatagcaattggtgctctggcgggacttggtgtcaaaggatatcttctagccgctgagtttgcagttgaatatataaagcaaaaaggtaatatcaactcattgatttga

SEQ ID NO: 279390 - DNA, 223 bp, Unknown
  Bacterial polypeptide expressing nucleotide sequence isolated from the Sargasso Sea
gatgaatattttattgataaatggaccaaatcttaatcttttgggcactagagaacctgaaatatacggtaataaaacattgagtgatatagaaaaagatttaactaaagttgctaaagaaaaaagtattaatcttgaatgttttcaaagtaatcacgaaggagaaatagtagataaaattcaggagtctgtaaaaagtacccaaggtattcttataaatgct

SEQ ID NO: 279391 - DNA, 451 bp, Unknown
  Bacterial polypeptide expressing nucleotide sequence isolated from the Sargasso Sea
tatggcaaaaacgataaaaatatgcgtgattaatggtccaaatctcaacatgctcggcatgcgggagccggaaatttatggtagtgtcactcttgccgacattgaaactaagtgccgcgaactagcaacccgccataaaatgggcatggattggtttcaatcaaattctgagagcgaactcattcagcaaatccaccactgcgtcggcaaggctaactggattataataaatgccgctggttatactcatacgtcggttgcaattcgtgatgcgttgtcactgttccccggcggtgtcatcgaggtgcatatatccaatactcacacacgcgaagcatttcggcataaatcattaatctcaggcattgcgagaggtgttattgccggctttggtccctcatcatattacatggcagtcgatgccgttcccaatctgacttcggaggcataa

SEQ ID NO: 279392 - DNA, 433 bp, Unknown
  Bacterial polypeptide expressing nucleotide sequence isolated from the Sargasso Sea
atggaaatccttttaataaatgggcctaacttaaatcttcttggaaatagagaaaactctatttatggtaatgatacattggaagatattgagaaaaacctctctgagatttgtaaagaaaatggtgtttctttcacttcctttcaaagcaatgctgaacatgaaattgttgaaaaaattcatgcatccaaggaagataatgtttcaaagattcttatcaatccaggtgcatttacacatacaagtatttcaatacgagatgctcttattggcgtaggcattccgttttatgagatccatatttcaaatatatttgccagagaagaatttagacataaatcatatttttctgacattgcagagggtgttgtatgtggaatgggaactaagggctacgaatttgccttagaaaaagcaattaattctaattaaa

SEQ ID NO: 279393 - DNA, 442 bp, Unknown
  Bacterial polypeptide expressing nucleotide sequence isolated from the Sargasso Sea
gatgaatattttattgataaatggaccaaatttaaatcttttgggcactagagaacctgaaatatatggtaataaaacattgagtgatatagaaaaagatttaattaaagttgctaaagaaaagagtattaatcttgaatgttttcaaagtaatcatgaaggagaaatagtagataaaattcaggagtctgtaaaaagtatccaaggtattcttataaatgctggtgcttttactcatacctcgatttctattcgtgatgctttaattggatcgaaaattccttttgtagagttacacatttcaaatattttcagtagagaagattttcgtaaagaatcttttcttacagataaagctataggaattatcagtggattcggcatatcaagttattccttagctcttgaaggaatcattggatatttgagtattaaagattaa

SEQ ID NO: 279394 - DNA, 433 bp, Unknown
  Bacterial polypeptide expressing nucleotide sequence isolated from the Sargasso Sea
gatggaaatccttttaataaatgggcctaacttaaatcttcttggaaatagagaaaactctatttatggtaatgatacattggaagatattgagaaaaacctctctgagatttgtaaagaaaatggtgtttctttcgcttcctttcaaagcaatgctgaacatgaaattgttgaaaaaattcatgcatctaaggaaggtaatgtttcaaagattcttatcaatccaggtgcatttacacatacaagtatttcaatacgagatgctcttattggcgtaggcattccgttttatgagatccatatttcaaatatatttgccagagaagaatttagacataaatcatatttttctgacattgcagagggtgttgtatgtggaatgggaactaagggctacgaatttgccttagaaaaagcaattaattctaattaa

SEQ ID NO: 279395 - DNA, 433 bp, Unknown
  Bacterial polypeptide expressing nucleotide sequence isolated from the Sargasso Sea
tatgaaaattctagtgattaatggacccaacctgaacctattgggtaagcgagaaagttcaatttatggaaatgaatctttggatgatattatctccagtcttgaaaacatctgcggaaagaaaaatgcttgtctgttaacttttcagagcaatgcggagcatgaaattgttgaaaaaattcattcctgtcaaaacaaaaaagttgattggatgataataaatcctggtgcatttacgcatactagcattgctataagagatgctttaatcggagtcggagtacctttttatgaagttcatatctccaacatttttgctagggaagagtttaggcataaatcatatttttctgacattgctcaaggggttatatgtggatttggtacctctggttatgagagtgccttactgaaaattttggataaaaattaa

SEQ ID NO: 279396 - DNA, 442 bp, Unknown
  Bacterial polypeptide expressing nucleotide sequence isolated from the Sargasso Sea
atgaaaatattagtcatacatggtccaaatttaaatctacttggaataagagaacctgatgtgtatggttcaactacaatggtagagattaatcaaggtttgctcgataaagcaagttctaatgatattgagattgaagcttttcagagcaatgcagagcatgaaattgttaccaagcttcaagagtcaataaatcaaatagactatattattatcaatccaggagctttaactcatactagtattgcaattcgggattgtttgcttggtatcggagttccattttacgaagtccatatatctaatatttttgcaagagaagagtttagacataaatcttttttttcagatattgcgagcggtgttatttgtgggcttgggacacaagggtatgaacttgcactgagtcacattattaagagtaatcaggataaaaaataat

SEQ ID NO: 279397 - DNA, 433 bp, Unknown
  Bacterial polypeptide expressing nucleotide sequence isolated from the Sargasso Sea
gatgagaattttagtaattaatggcccaaatttaaatatgcttggtataaggcaacctgaaatttatggtaaccaaagtttagatgatataaatgatgacctaaagaaatacgcagaaaaacattcaattatgattgaatgttttcagtcgaaccatgaaggggaaattatagatatgattcagcaagcagacaaagattataacggacttattattaacccaggtgctttgagtcattatagtatagcgataagagacgcaatatcttcaatacataataacgttgtagaagtacatatatcaaatatttttaaaagagaaaaatttcgccatcattcagttatttctgaagtatgtagctcttcggtaattggatttgggacagaaggttataaattagctttgaataaatttattacatttacggagtaa

SEQ ID NO: 279398 - DNA, 448 bp, Unknown
  Bacterial polypeptide expressing nucleotide sequence isolated from the Sargasso Sea
atgaataataaaataattattatcaatgggccaaatcttaatctattaggtgagagagaacaatcagaatatggttcaattacatttgaaaatctgaaagaaaattgcaaaaaaaaaagtgatgagcttggtatggaaattaattttgtacaatctaatgtagaaggggaattggtaaacatcatccaggactccagaaaaaaatttgatggaatcattattaatgctgcagcattcactcacacatcaatagctattagagatgcactaaacatttttaaaaaaccaatcatagaagtacatatttccaatatttataaaagagaggaatttaggcaaaaatctcttataagtgatatagtaactggtggtatttttggattaggcgctgatggttatattttagccataatttcaatgcacaagcttttaaaaaatgaaaattaac

SEQ ID NO: 279399 - DNA, 403 bp, Unknown
  Bacterial polypeptide expressing nucleotide sequence isolated from the Sargasso Sea
gatggcagacagagtaaaaattttggtggtgaatggtcccaacctgaatatgctggggatgcgtgaaccggagatttacgggactctaaagcttgaagctattcgagaaaaatgcctcgctatctgcacgaagctaggctttactatggaatggatgcagtcaaattccgaggcaattctgatcgacaccatccaggcagcctgcaacaaattcgattggatcatcgtcaatggtgccggccttacacacacttcggttgcgcttcgtgatgcgctggcactgtttacgggcggcgtgattgaggttcatctgtcgaacatacatgcgcgtgagggcttccgccatacgtcgctgatcactgcaattgcaaaaggtgcaattattggctttggtgcaagttcc

SEQ ID NO: 279400 - DNA, 460 bp, Unknown
  Bacterial polypeptide expressing nucleotide sequence isolated from the Sargasso Sea
atgccaaaggtacttctgataaatggtccaaatttgaatttactgggcagccgagagccagaaatatatggatcaacaactttgatggaaattgaaaaaaaggtggcttccacactgagagaacatgaaatcgattgtgaatcatttcagtcaaattcagaaggtgaaattattgattggcttcataataatcgcaaggctgattttctgcttttaaatccgggagcgttgtctcacaccagtgttgggctacgtgatgcagtgcttggtgtggaaatcccttttattgaaattcacctttccaacgtgcacaaacgagaagaattcaggcagcattcctatttttcagatatagcaattggagctctttcaggacttggagtcaaaggttatttgcttgcagcagagtttgcagttgattatattgaacaaaaagggaagatcaactcaggtatttgac

SEQ ID NO: 279401 - DNA, 439 bp, Unknown
  Bacterial polypeptide expressing nucleotide sequence isolated from the Sargasso Sea
aatgagtcacaaaattataataataaacggtccaaaccttaatttacttggaacaagagaacctgaaatatatggtaacgaaagtcttgaggatttaaagtctatcgttaattctcatatagaaaaaaactttcctggcatgagtgtagatttttaccagtcaaatactgaaggtgatattgttaataaaatacaagagtcagtaagcttaaatggcattattattaatgctggaggtctatctcattcctcagtttcaatacttgatgcactgctctctacgaaaataccgaaaatagaagttcatatctctaatctattttcaagagaagaatttcgtcaaaactcttatgtaagtaaaggtgtagatggttttgtatgtggctttggtatcaacggctatttacttgctattgatgggatctctaaattaatatag

SEQ ID NO: 279402 - DNA, 451 bp, Unknown
  Bacterial polypeptide expressing nucleotide sequence isolated from the Sargasso Sea
atgccaaagatacttattttaaatggaccaaaccttaacctcctcggaacacgtgaacctgagttatacggtaacaatacgctctcagagatcgaacaaatttgtaaaaataaagctcaatctattggacttgaagtaaaatttcagcaaagtaatagcgagggcgagctcgttgattgcatccagttagctgtgaatacaaccaaagggcttcttattaaccctgctgcgtatacccacacgtctgtcgcgattctagatgctctaaaacaataccaagaaccaataatagagattcatttatccaatatttatagccgggaaccttttagacaacactcttatgtttcacccgtggcaaatggtgtaatctgtgggtttggtgcacatggttatttattggctatagacgcaatttaccggttaatttctgataaaaaggaggtctgat

SEQ ID NO: 279403 - DNA, 439 bp, Unknown
  Bacterial polypeptide expressing nucleotide sequence isolated from the Sargasso Sea
atgtctaaattcatgctacttaacggaccgaatctgaacctattgggtaccagagaacctgaaatatatggttccgtaaccttggaagaaattgaaaagaaactagattcgaaagcatctgagagtggacaagagctgatatgttatcaaagtaatgccgaacatgacttagtagagcaaatccactttgcaagaaaagaggacgtaaaatgcataatatttaatcctggagcctttactcatagcagtatagcgattagagatgctctctctggagttggcatacctttcatagaagtgcatatttctaatatctatagcagagaggatttccgacaaaaatcttttttatcagatattgctgagggggttatatctggtttgggtgtagaaggttatgaattagcattagattcaggaatcaagaaatactcttaaa

SEQ ID NO: 279404 - DNA, 451 bp, Unknown
  Bacterial polypeptide expressing nucleotide sequence isolated from the Sargasso Sea
aatgaataataatattacaattattaatggaccaaatcttaatctattaggcgaaagagaacaatcacaatatggtagcataacttttgatgatcttaagaaaatttgtttagaacaagcaaagaaattaaatataaatttagactttcttcaatcaaatgttgaaggagaaattgttaatatcgttcaaaacgcaagaaataaatgcgatggtataattattaatgcggcaggatttacacatacttctgttgctattcgtgatgctttggatatttttaaaaaacctataattgaattacacatatcaaatatatacaaaagagaagaatttagacacaaatctatgatcagcggagtcgtgacaggagttatttgtggattaggagcaaacggttatattttggccataaatgcaatgcaagaattgttagaaaatggaaatagataa

SEQ ID NO: 279405 - DNA, 451 bp, Unknown
  Bacterial polypeptide expressing nucleotide sequence isolated from the Sargasso Sea
aatgccaaaaattctaattctaaatggaccaaatttaaaccttctgggaactcgcgaacctgagatttacgggcgcgacactctatcggatatcgaacgaaaatgcagggtacatggtcaagctattggacacgaaattgatttcagacaaagcaatagcgagggcgaaatagtcgattggatccaacttgcccagcaagagtcagatggaattattataaaccccgcagcttatacgcacacgtctgttgccattctggatgcattaaagcagttcaataaaccgattatagaaatacatatttctaacattttcagtcgggagccgttccggcatcattcctatatatccccggttgcgaacggagttatttgcggttttggtgcaaacggatattccattgcgttagatgcaatttctcaactagtttcaaataaagaggaaaaatga

SEQ ID NO: 279406 - DNA, 262 bp, Unknown
  Bacterial polypeptide expressing nucleotide sequence isolated from the Sargasso Sea
atgaatattttattgataaatgggccaaaccttaatttgttgggtattagagaacctgaaatatatggaaataaaaccttgaatgatattgaaaaagatttaatcaaagttgctaagggaaaaagtattaatcttgaatgctttcaaagtaatcatgaaggtgaaatcgttgataaaatccaatcctcggtaagtactatccatggaatccttattaatgccggtgcttttactcatacttcaatttctataagagatgctt

SEQ ID NO: 279407 - DNA, 442 bp, Unknown
  Bacterial polypeptide expressing nucleotide sequence isolated from the Sargasso Sea
atgaatattttattgataaatggcccaaatttaaatttattgggaactagagaacctgaaatatatggtaataaaacattgagtgatatagaacaagatctaacaaaagttgcccaagaaaagagtattaatcttgaatgttttcaaagtaatcacgaaggagaaatagtagataagattcaggattctgtaaaaagtatacaaggcattcttataaatgctggcgcttttactcatacctcgatttctattcgtgatgccttaattggatcaaaaattccgtttgtagagttacatatttcaaatattttcagtagagaagattttcgtaaagaatcttttcttacagataaagctataggaattataagtggattcggtatatcaagttattccttagctcttgaaggaattattggttatttaagtagtaaaaattaaa

SEQ ID NO: 279408 - DNA, 283 bp, Unknown
  Bacterial polypeptide expressing nucleotide sequence isolated from the Sargasso Sea
caccacgagggagtgctcattgacaagattcacgaatggggcgatgccgggttctccggtctcatcctcaaccccggcggactcacccacaccagcgtggccttgcgcgacgccgtggtcgcatccggtctgaagaccgtggaagtccacctttccaacatccacgcccgggaggatttccggcacaagtcactcatctcgggtatctcagccgccgtcgtggccggcatgaaccaccacggctatttgtctgcccttcgctacctctccgaggaagcctagg

SEQ ID NO: 279409 - DNA, 436 bp, Unknown
  Bacterial polypeptide expressing nucleotide sequence isolated from the Sargasso Sea
tctggtgctgcatggccccaacttgaacttgctgggtagccgcgaacccggggtctatggccgcgacactctggcggagattgatgcggagctccggcagcaggccgagcgccttggcgcccaactcgactgcttccagagcaaccatgaaggggctctggtggatcggatccaccagtcagtcggccaagttcagggaatcttgatcaatgccggtgcctacacccacacctccattgccctgcgcgatgccctgctgggggtggcgttgccctatgtggagctgcacctcagcaacgtgcacgcccgcgagcgcttccgtcaccgttccttcctggccgatcaggcggtgggagtgatttgcggctttggtcccatcagctattacctggcccttgaaggcatggtggcccacctgcgcagtcaggagctgtga

SEQ ID NO: 279410 - DNA, 439 bp, Unknown
  Bacterial polypeptide expressing nucleotide sequence isolated from the Sargasso Sea
tatgagcaatatacttttaataaatggtcccaatttgaatcttcttggtagtagagagccagagatttatggctcaaaaaaccttgatgatatccaaaaagaattgaccatcattgccaatgaaatggggcataagctactacactttcagagtaattcagaaagtgaaatagttgagtggattcatgggaatgctgatgatgcaaaatttttaatcattaacccaggtgcatttacgcatacaagcatttctataagggatgcgatcttaggtacaaatatttcttttattgaaattcatataagcaatattttctctagagaagaattcagaaaagaatcatatttttctgacattgctgaaggcgtgatctctgggcttggatatacaggatacgagcttgcgttaagagccgcgcttgagatgcttaagaaataa

SEQ ID NO: 279411 - DNA, 454 bp, Unknown
  Bacterial polypeptide expressing nucleotide sequence isolated from the Sargasso Sea
atgacacgattgctggtgttgcacggccccaacctgaaccttctcggcacccgggaaccggaggtgtacggccgcgtcacgctcgcacagatcgatcaggcgcttgccgcgcgcgcccgggaagccggcgccgaactgtcgtcgttccagagcaaccatgagggcgcgctggtcgaccgcatccaggccgcgcgggaggaacagaccgatttcatcctgatcaatccggccgcgtacacgcacacgagcgtcgcgatccgggacgcgatcgccggcgttggcatcccgttcgtcgaggttcacttgtcgaacgtgcatcgccgcgaagcgttcaggcaccactcctacttttccgaccaggccgaaggcgtgatctgcgggctcggctggaaaggttatctgtacgcgctcgagcacgcgctggacaagctgcaaggcacgtcgcgcggctgat

SEQ ID NO: 279412 - DNA, 442 bp, Unknown
  Bacterial polypeptide expressing nucleotide sequence isolated from the Sargasso Sea
atgcatctgctgctgctgaacggacccaatctgaatctgctgggccagcgggagccgggactctatggaagcggcaccctggcgtcgatcgaggagaagctgcaggccgaagcgcaggcggccgacgtgaccttggactgctttcagagcaatttcgagggcgccctggtggaaaaggttcaccaggccatgggcaggagccagggcatcctgatcaatgccggggcatacacccacacttcgatcgccctgcgggatgccttgctgggggttgcgatcccctatgtggagctgcatctcagcaacacccatgcccgggaacccttccgccaccgctccctgctggcggatcgggccgtcggtgtggtgatggggttcggtgccgggagttacagcctggccctgcaggggttgctgcatcacctgcggtccagctcatgac

SEQ ID NO: 279413 - DNA, 433 bp, Unknown
  Bacterial polypeptide expressing nucleotide sequence isolated from the Sargasso Sea
atgaatatattagtgttaaacggtcctaacttgaatctattgggttctcgcgagcctgaagtttatgggacagatactctcaaagatattgaagaaaatctcaagtcaatttctaaaaatcacaacgtaaatattcgtttttatcagtctaattctgagaatgagttgataaatgaacttcacactgcaaagcaggaaaatgttgatgcgattataattaatccgggtgctttcacgcacactagcattgccttaagggatgcatttctaggagtagacataccatttattgaagttcatatttcaaatatttatcgtagagaagaatttagaaaaaaatccttcttgtcagatataagtgaaggtttaataacagggctaggagtaagcgggtatgagtttgctctgttgtcaatcataaaacgaggttaag

SEQ ID NO: 279414 - DNA, 439 bp, Unknown
  Bacterial polypeptide expressing nucleotide sequence isolated from the Sargasso Sea
tatgaagattagtataattaatgggccaaatttaaatttattaggtaaaagagaacctgatgtttatgggtcaacttcttttgaagacttttttgaaaaaatgattttaagctttcctgatattgattttgattattatcaatcgaatattgagggtgagttaattaatcaaattcaagatatgggtgactcttcagatggaataatacttaatgcagctgcatttactcatacatcggttggtattgcagatgctgttaaatccattaaatcaagggtaatagaagtccacatttcaaatactttctctagagaatcatttagacacaaatcatttttatctcctgtagtagatgggattattgtaggatttggtcttgatagctatagacttgcagttgaaagtttaattaaggataataaaattaaaggtgtataa

SEQ ID NO: 279415 - DNA, 436 bp, Unknown
  Bacterial polypeptide expressing nucleotide sequence isolated from the Sargasso Sea
atgaatcataaagttctgctcatcaatggccccaatttaaacctccttggccgccgtgagcccagtgtttacggtcatcaaaccttagccgatattgttgcccttttgagtgaacaagctcaagcagcaggtgttgaacttgaacatattcaatcgaatgccgaatttgagctgatcaacgctatccatgccaccgatgcgcagatgatcattatcaaccccgccgcctttacccacaccagtgtggccctgcgtgacgcactgcttggggtggacatccccttctttgaagtgcatttatccaatgtccatgcccgcgagcccttccgccaccactcctatttgtccgataaggccattggggtgatttgtggtttcggcgcccaaggctatgagtttgccctcgcagcggcgattaagagattgaaggcataaa

SEQ ID NO: 279416 - DNA, 439 bp, Unknown
  Bacterial polypeptide expressing nucleotide sequence isolated from the Sargasso Sea
aatgtctaaattcatgttgctaaacggaccaaacctaaacttattgggctcaagagagcccgagatatatggttcagctaccttagaagacattgaaaataagctggatgctatagcttcagagagtggtcatgaacttatatgctttcaaagcaatgcagaacatgacttagtagaccgaattcatcttgcaaagaaagaagatgtaaagtgcatcatatttaatcctggagcgtttactcacagcagcatagctcttagagatgctctttcgggagtagaaatacccttcatagaggttcatatttctaatatatatagcagagaggatttcagacaaaattctttcctttcggatattgcagaaggcgttatatctgggctgggagtagaaggatataaattggcattaaaatcggggattgaaaaatactcttaa

SEQ ID NO: 279417 - DNA, 439 bp, Unknown
  Bacterial polypeptide expressing nucleotide sequence isolated from the Sargasso Sea
catgcacctgctgctgctgaacggacccaacctcaatctcctgggccagcgtgagccaggtatctacggaagcggaacgctggcatcaatcgaagatcgactgaggcaggaggccaccgctgggggggcagagctggagtgcttccagagcaacttcgaaggtgccctcgtggaacggattcatcaagccatggggacgagccaggggatcctgatcaatgccggtgcttacacccacacctcgattgcgctgcgtgatgctctgctgggtgttgcactgccctacgtggagttgcatctgagtaacacccatgcccgggagagttttcggcatcgatcgttgctggcagacaaagcgattggggtggtgtgcggcttcggccccatgagctattccctggcgctgcagggtttgatccagcacttgcgtcagggctga

SEQ ID NO: 279418 - DNA, 427 bp, Unknown
  Bacterial polypeptide expressing nucleotide sequence isolated from the Sargasso Sea
catgcttctaaatggtcccaatttaaatttattgggaaccagagaacctgatttatatggatctgaaacattggaagatatagaagcacatcttgttgaaatctctaaagataaagaatgtaatttaatatgccatcaaagcaatgccgagcatgagttagtagatctgattcattccgcgaaagataatcaagtgaaatgcatcataattaatccaggcgctttaactcatagcagtatagccttaagagatgcattgacaggcgtcaacattccttttatcgaagttcatatttcaaatatttacgcacgagaagattttagacagaaatcttacctatcagacatagctgagggagtgatttcaggtttaggtgtagaaggttacgaactagctttagttaaagctatgaaaaaatttaattga

SEQ ID NO: 279419 - DNA, 433 bp, Unknown
  Bacterial polypeptide expressing nucleotide sequence isolated from the Sargasso Sea
atgaaaatattagtattaaatggtccaaatcttaatcttctagggattagagaggaggatatctatggatcagaatcacttgaagaaatagaattaaagcttaaaaaaattgctgaggaatcagagtgtgagctaaacttttttcaaagcaatgcagagcatgagcttattgaagcaattcataatgcatataaatctaatactaatagaattatatttaatcctgctggatatacgcatactagtgtcgcgcttagagatgctctcttagcagttaagattcctttttttgaagttcacatctcggacattgaatcaagagaagattttagacaaaaatcatatttctctgatattgctaaaaaagtatttagtggacatggtacagatggttacacccttgctttaaaagaagctataaaagataaatagg

SEQ ID NO: 279420 - DNA, 427 bp, Unknown
  Bacterial polypeptide expressing nucleotide sequence isolated from the Sargasso Sea
catgctcctaaatggtccaaatttaaatttattgggaacaagggaacccgatttatatggatctgaaacattagaagatatagaagcaaatcttgttgaaatttctaaagataaaaaatgtaatttaatatgccatcaaagtaatgctgaacatgagttagtagatctgattcattctgcgaaagataaccaagtaaaatgcatcataataaatccaggagctttaactcacagcagcatagctctaagagatgcattgacaggtgtcaacattccttttattgaagttcatatttcgaatatatacgcacgggaagatttcagacagaaatcttacctatctgatatagctgagggagtgatttcaggtttaggtgtagaaggatacgaactagctctagttaaagctatgaaaaaatttaattga

SEQ ID NO: 279421 - DNA, 439 bp, Unknown
  Bacterial polypeptide expressing nucleotide sequence isolated from the Sargasso Sea
atgagtaatatacttttaattaatggccctaatttgaatcttcttggaaacagagagccggagatctatggatctaaaaatcttgacgatattcaaaaagaactatccataattgctgacgagatggggcataagctaataccgttccagagtaattcagaaagtgaaatagtggaatggattcatgacaatgctgatgatgcaaaatttctaattattaacccaggtgcattcacgcatactagcatctctattagggatgccatcttaggaacaaaaattgctttcattgaaattcatataagcaatattttctctagagaggaatttagaaaagaatcatatttttctgacattgctgaaggcgtgatctctgggcttggatatacaggatacgaacttgccttaagggccgcgctagagatacttaagaaataaa

SEQ ID NO: 279422 - DNA, 433 bp, Unknown
  Bacterial polypeptide expressing nucleotide sequence isolated from the Sargasso Sea
atggaaatccttttaataaatgggcctaacttaaatcttcttggaaatagagaaaactctatttatggtaatgatacattggaagatattgagaaaaacctctctgagatttgtaaagaaaatggtgtttcttttgtttcctttcaaagcaatgctgaacatgagattgttgaaaagatccatgcgtctaaggaagataatgtttcaaagattctcatgaatccaggcgcatttacacataccagtatttcaatacgagatgctcttattggtgtaggcattccgttttatgagattcatatttcaaatatatttgctagagaagaatttagacataaatcatatttttcagatattgcagagggtgtcgtatgtggaatgggaactaaggggtatcaatttgccttagaaaaggcaattaattctaattaaa

SEQ ID NO: 279423 - DNA, 439 bp, Unknown
  Bacterial polypeptide expressing nucleotide sequence isolated from the Sargasso Sea
tatgagcaatatacttttaataaatggtcccaatttgaatcttcttggcagtagagagccagagatttatggctcaaaaaaccttgatgatatccaaaaagaattggccattattgccgatgaaatggggcataagctactatcctttcagagtaattcagaaagtgaaatagttgaatggattcatggcaatgctgatgatgcaaaatttttaatcattaacccaggtgcattcacgcatacaagcatttctataagggatgcgatcttaggtacaaatatttcttttattgaaattcatataagcaatattttctctagagaagaatttagaaaagaatcatatttttctgacattgctgaaggtgtgatctctgggcttggatatagaggatacgagcttgcgttaagagccgcactagagatgcttaagaaataa

SEQ ID NO: 279424 - DNA, 448 bp, Unknown
  Bacterial polypeptide expressing nucleotide sequence isolated from the Sargasso Sea
catggccaccctactggtgctgcacggccccaatctgaatctgctgggcacccgcgagcccgataaatatggcgccaccaccctcgccgagatcaatcaggatctggagcagcgcgcccgcgaggctggccatcatctgctgtacctgcagagcaatgccgagtacgaactgatcgaccgcattcacgccgccaagggtgaaggtgtcgactttatcctgatcaatcctgccgcttttacccatacaagcgtcgcattacgtgacgcattgctggcggtgagcatcccattcatcgaagtgcacctgtccaacgtgcacaagcgtgaacctttccgccatcactcctatttttccgacgttgcagtaggggtgatctgcggccttggcgccagcggttatcggctggccctggaagcggcactcgaacaactgaccgggcgcgcctga

SEQ ID NO: 279425 - DNA, 430 bp, Unknown
  Bacterial polypeptide expressing nucleotide sequence isolated from the Sargasso Sea
tatgaagttaattataattaatggaccaaatctaaatttactcggtgaaagagagccagaaatatatggaagtgaaactcttgaacaagttaatgaatggattgagaatcatgaattgtgtaaaaatttagaacttgtattttttcaatcaaactctgaaggtaaactaatagattttttacattcaaaaagaaaaagtgtagattattgtattttaaatgcaggagcattaactcattattcttacgcattaagagatgctatagttggtacccaaattccgacagtagaagttcatttatcaaatatttataaacgagaaaattttagaaaaacatctgttataaaaaatgtttgtatagctcaattttatggtgagggcaaacagagttacattaatggtattaagtatattttggagaagaaataa

SEQ ID NO: 279426 - DNA, 427 bp, Unknown
  Bacterial polypeptide expressing nucleotide sequence isolated from the Sargasso Sea
atgcttctaaatggtcctaatttaaatttattgggaaccagagaacctgatttatatggatctgaaacattagaagacatagaagcacatcttgttgaaatctctaaagataaaaaatgtaatttaatatgccatcaaagcaatgctgagcatgagttagtagatctgattcattcagcaaaggataatcaagtgaaatgcatcataattaatccaggcgctttaactcatagcagtatagccttaagagatgcattgacaggtgtcaacattccttttatcgaagttcatatttcaaatatatacgcacgagaggattttagacagaaatcttacctatcagacatagctgagggagtgatttcaggtttaggtgtagaaggttacgaactagctttagttaaagctatgaaaaaatttaattgat

SEQ ID NO: 279427 - DNA, 451 bp, Unknown
  Bacterial polypeptide expressing nucleotide sequence isolated from the Sargasso Sea
tatgtcgcaaaaacaccgaattctcctgctcaacgggccgaacctgaacctgctgggcaaacgggaaccgggcatctacggcagcaagacgctcgatgagatcgtcgccgatctgacgcacaacgccggcgaactcggggtcacactggaacacctgcaatccaatgccgaacatgagttggtcggccgcattcaccaggccatgggtcaggtggatttcatcatcatcaacccggccgccttcactcacaccagcgtcgccatccgcgatgcgctgctgggtgtggccatcccctttatcgaggttcacctgtccaacgtccatgccagggaacccttccgtcatcactcctatctgtctgatgtcgccaaaggggtcatttgtgggctgggggccgatggctaccaattcgctttaaccgcggccgtgcaccagttgcgcgcggcttga

SEQ ID NO: 279428 - DNA, 439 bp, Unknown
  Bacterial polypeptide expressing nucleotide sequence isolated from the Sargasso Sea
atgagcaatatacttttaataaatggtcctaatttgaatctccttggcagtagagagccagagatttatggctcaaaaaatcttgatgatatagaaaaagaattgaccatcattgcagatgaaatggggcataagctactgccctttcagagtaattcagaaagtgaaatagttgaatggattcatgacaatgctgatgatgcaaaatttttaattattaacccaggtgcattcacgcatacgagcatttctataagggatgcgatcttaggtacaagtatctcttttattgaaattcatataagtaatattttctctagggaggaatttagaaaagaatcatatttctccgacatagctgaaggcgttatttctggtcttggatttaaaggatacgaacttgcactcagagctgccttagagatgcttaaaaaataga

SEQ ID NO: 279429 - DNA, 415 bp, Unknown
  Bacterial polypeptide expressing nucleotide sequence isolated from the Sargasso Sea
atgagaaaaatcttaatcatcaacggtccaaacctaaacctattgggtaaaagagagcccgatacttatgggaataccacttttgatgattattttaaagaattaattaaagatttccctgatttagaattgcacacttttcaaagcaatgttgaaggagaaatcattaatgaattacacgaaaaaggtttttcttttgatggtattgtgctaaatgctggaggatatacccatacttcagtggcaattgctgatgctgttgctgctattgactcaccagtaattgaagttcacataagcaacgttcatgctcgagaagaatttcgtcatcaatcgatgatggcaaaaaactgtaaagggataatcgctggttttggtttagactcttacagattggccttggcttctttttgat

SEQ ID NO: 279430 - DNA, 439 bp, Unknown
  Bacterial polypeptide expressing nucleotide sequence isolated from the Sargasso Sea
aatggcaactttcttactacttaatggtccaaaccttaatcttcttggtacgagagaaccagaagtttatggtgatgttacccttgaagaaattcaaaataaattagaagaaatgtgtaaaaaatctggaacagatttagtctcttttcaaagcaatgccgaacatgaactggtggacaggatacaagaggctcaatctgaaggcattaaatgtatcatattcaacccaggtgcttttactcacagtagcatagcattaagagatgcgctgaatggtactggtcagaagtttattgaggttcatatttctaatatttatggaagggaagatttcagacaaaaatcttttctttcagatatagcagatggagttatatctggtttagggactaagggttatgaattagcattagaagttgctatcgaaagatatagttag

SEQ ID NO: 279431 - DNA, 460 bp, Unknown
  Bacterial polypeptide expressing nucleotide sequence isolated from the Sargasso Sea
tatgtctacaaacttacgtattttgctgctcaacggccctaacttaaatatgttaggcaaacgtgagcctcaaatttatggcgccgccactttaccgcaaattgttgatggcttaactgcccatgccaaagagctgaatgctactttgactcatctgcaatctaacgccgaacatgagctcatcaacgctattcagcaaagccttggacaacaggactttattattatcaacccgggcgcatatacccataccagcgtggcgattcgtgatgcgctgctggccgtggctatcccttttattgaagtgcatttgtccaatgtacatgcgcgggaagaattccgtcgtcactcgtatttatccgatatcgccaaaggtgtgatttgtggtttaggggccaaaggctaccactatgcactggaatcggcggtgtcgtccttatcaaccattccatcaaattaa

SEQ ID NO: 279432 - DNA, 442 bp, Unknown
  Bacterial polypeptide expressing nucleotide sequence isolated from the Sargasso Sea
gatgaatattttattgataaatggaccaaatcttaatcttttgggtactagagaacctgaaatatatggtaaaaaaacattgagagatatcgaacaagacttaactaaggttgcagagagtaaaagggtattccttgagtgttttcaaagtaatcatgaaggtgaaatagttgataaaattcatgattctgttaataggattcaaggcattctcataaatgctggcgcttttactcatacttccatttccattcgagatgctttaattggatcaaaaattccatttgtagaattacatatttcaaatatttttaatagagaagactttcgtaaagaatcttttcttacagataaagctataggaataattagtggattcggtatatctagttattccttagctctcgagggaataattggatatttaaggagtaaaagttaa

SEQ ID NO: 279433 - DNA, 433 bp, Unknown
  Bacterial polypeptide expressing nucleotide sequence isolated from the Sargasso Sea
atggaaatccttttaataaatggccctaacttaaatcttctaggcagtagagaaaactctatttatgggaacgatactttagaagatattgagaaaaatctttcagtaatttgcaaagagaacggaatttcttttggatcctttcaaagtaacgcagaacatgaaattgttgaaaaaattcatgcggctaaggaaggtaacgtttcaaagattctcatgaatccaggcgcatttacacatacaagtatttcaatacgagatgctcttattggtgtgggcattccgttttatgaaatccatatttcaaatatatttgctagagaagaatttagacataaatcatatttttctgatattgcagagggtgttgtatgtggaatgggtactaagggctatgaatttgccctagaaaaagcaattaattctaattaaa

SEQ ID NO: 279434 - DNA, 442 bp, Unknown
  Bacterial polypeptide expressing nucleotide sequence isolated from the Sargasso Sea
atgaatattttattgataaatggaccaaatcttaatcttttgggcactagagaacctgaaatatatggtaataaaacattgagtgatatagaaaaagatttaactaaagttgctaaagaaaaaagtattaatcttgaatgttttcaaagtaatcacgaaggagaaatagtagataaaattcaggagtctgtaaaaagtatccaaggtattcttataaatgctggtgcttttactcatacctcgatttctattcgtgatgctttaattggatcgaaaattccttttgtagagttacatatttcaaatattttcagtagagaagattttcgtaaagaatcttttcttacagataaagctataggaattattagtggattcggcatatcaagttattccttagctcttgaaggaattattggatatttgagtattaaagattaaa

SEQ ID NO: 279435 - DNA, 439 bp, Unknown
  Bacterial polypeptide expressing nucleotide sequence isolated from the Sargasso Sea
atgaaaaaaattcttataatcaatggaccaaatctaaatttactaggtaatcgtgaaattggtgtttatggaaaagaatctttaagcgatattgaaaataaatgtttagaaaaatgcaaatcattagaaataaattgtgaatttgttcaaaacaataatgagggggaaattatcaatttaattcaatcagtagaaaaaaattttgatggattaattattaatccagcagcttacacacatacttctgttgctatccttgatgctttaaggtcagtaacaaaacctaaaattgaaatccatttatcaaatatttatactagagaagaatatagaaaaaaaagcattacttctgaagcagtaaatgggctaatttgtggttttggggcttatagctacattcttgcaattgaagctattaaaaatatgatttataattaat

SEQ ID NO: 279436 - DNA, 442 bp, Unknown
  Bacterial polypeptide expressing nucleotide sequence isolated from the Sargasso Sea
gatgaatatactattaataaatggaccaaatcttaatcttttgggtactagagaacctgaaatatatggcaataaaacattgagtgatatacagaaagatttaactaaagttgcccaagaaaagagtattaatcttgaatgttttcaaagtaatcacgaaggtgaaatagtagataaaattcaggagtctgtaaaaagtatccaaggtattcttataaatgctggcgctttcactcatacctctatttcaattagagatgctttaattggatcaaaaattccatttgtagaattacatatttcaaatatctttagtagagaagaatttcgtaaagaatcttttcttacagataaagctataggaataatcagtggattcggaatatcaagttattccttagctcttgaaggaatcattggatatttaagtagtaaagattaa

SEQ ID NO: 279437 - DNA, 445 bp, Unknown
  Bacterial polypeptide expressing nucleotide sequence isolated from the Sargasso Sea
aatgtctacagtaaaaaaaatatatgttttgaatggacctaacctaaatctgcttggagaaagagaaccggatatctatggaaatttatctttaaaagatatagaaaaaaccctcatcgattatgctaaggattatgatgttgaaatttattttaaacaatcaaatcacgagggagaactaatagaactagttcaagaagcttcaaaaaaagcaaatgcaataattattaatcctgcagggtactcacatacctctgttgcattattagatgcccttttagcttctaaaatacctgttttagaagtacatatatctaatatttttaaaagagaagactttaggcataattcttatgtttcaaaatctgccattggagttataagcggattaggcatcgatggctatttatactcacttaagtttcttttagattatcttaaatga

SEQ ID NO: 279438 - DNA, 448 bp, Unknown
  Bacterial polypeptide expressing nucleotide sequence isolated from the Sargasso Sea
aatgaaaaatattttaattattaatggtccaaatcttaatctattaggcgaaagagaacaatcacaatatggttcaataacatttgatcaactgaagaaaaattgtttagaaaaagctaatgaattaaatataagtttagattttgttcaatcaaatgtagagggtgaaattgtcactttgatccaagaagcaagaaaaaattatgaaggtttgataataaacgcagctggttttacacatacttccgtcgctatacgtgatgcattagatatattcaaaaaaccaagtatagaattacacatatcaaatatttataaaagagaagagtttagacataaatcaatgataagtgccgttgttaagggtgtaatttgtggtcttggtgcaaatggttatattttggccataaatgcaatgcatgaattgctaaaagatggaaataaataa

SEQ ID NO: 279439 - DNA, 155 bp, Unknown
  Bacterial polypeptide expressing nucleotide sequence isolated from the Sargasso Sea
aatgaaaatacttgttttaaatggtcccaatttgaatcttttaggtaaacgtgagcctgagatatatggttatgagactttagacgatattgctaaaagcttggacaatatagctaatcagcatgaaatatcattatttcacgaccaaaaaaatt

SEQ ID NO: 279440 - DNA, 460 bp, Unknown
  Bacterial polypeptide expressing nucleotide sequence isolated from the Sargasso Sea
atgccaaaagtacttcttataaatggtccaaatttgaatttactgggcagccgagagcccgaaatatatggatcaacaactttgatggaaattgaaaaaaaggtgacttccacactaagaggacatgaaatcgattgtgaatcatttcagtcaaactcagaaggggaaattattgattggcttcataataatagcagggctgattttctgcttttaaatccgggagcattgactcacaccagtgttgggctacgtgatgcagtgcttggtgtggaaattccttttattgaaattcatcttaccaacgtgcataaacgagaagaattcaggcaccattcctatttttcagatatagcaattggagctctttcaggacttggagttcaaggttatttgcttgcagcggagtttgcagttgattatatagaacaaaaagcgaaggtcaactcaggtatttgac

SEQ ID NO: 279441 - DNA, 451 bp, Unknown
  Bacterial polypeptide expressing nucleotide sequence isolated from the Sargasso Sea
atgaatcaagaaatcaaaatattaattataaatggtcctaatctaaatatgcttggtaaaagagagcctgaagtttatggttcaagaacattagaagaaatcaataatgatctgaataaattctctaaagatataaatataaatcttgagttttatcaaagcaaccatgaaggagaaatattagatttcatgcatagcaaaaataatgatattgatggatgtgtaataaatgctggtgcactaacacattcctctactgctcttcatgatgcaataaaatcggttaagttcccttgtgttgaagtccatatgtctaatatttactcaaggccagaaatatggagacaaaaatcattaatagctccagctgttattggaactgttcaaggttttggagaaactagctacaaatcagcaattgaattactagcattgtctattcgatcttaaa

SEQ ID NO: 279442 - DNA, 316 bp, Unknown
  Bacterial polypeptide expressing nucleotide sequence isolated from the Sargasso Sea
cacgtcttgaagatcgagtttcgccagaccaaccatgaaggtgaactgctcgactggattcatgccgcgcgcgggcgctgcgccggcatcctgatcaatccggccgcctggacccatacctcggtggccatccgcgatgccctggtggccagcgaactgccgatcatcgaggtgcacctgtccaacgtgcacaagcgtgagccgttccgtcatcactccttcgtctcgccgatcgccgtcggtgtcatttgtgggctcggcagtcagggttaccgactgggcctgcagtacttcgctcaatcgctcaagggttaag

SEQ ID NO: 279443 - DNA, 436 bp, Unknown
  Bacterial polypeptide expressing nucleotide sequence isolated from the Sargasso Sea
aatgaatcataaagttctgctcatcaatggccccaatttaaacctccttggccgccgcgaacccagtgtttacggtcatcaaaccttagccgatatcgttgccattttgagtgaacaagctcaagcagcaggtgttgaacttgagcatattcaatcgaatgccgaatttgaactgatcaacgcgatccatgctaccgatgcgcagatgattattatcaaccccgcagcctttacccacaccagtgtggccctgcgtgacgcactgctcggggtggatattcccttctttgaagtgcatttatccaatgtccatgcccgcgagccattccgccaccactcctatttgtccgataaggccattggggtgatttgtggtttcggcgcccagggctatgagtttgccctcgcggcggcgattaagagattgaaggcataa

SEQ ID NO: 279444 - DNA, 433 bp, Unknown
  Bacterial polypeptide expressing nucleotide sequence isolated from the Sargasso Sea
aatgaaaatattagtattaaatggtccaaatcttaatcttctaggtataagagaggaagatatctatgggtcagaaacgcttgaagaaatagaattaaagcttaaaaaaattgttgaggaatcagagtgtgaactaaacttttttcaaagcaatgctgagcatgagcttattgaagccattcatgatgcatataaatctaatactaataaaattatatttaatcctgctggatatacgcatactagtgtcgcacttagagatgctctcttagcagttaagattcctttttttgaagttcacatctcagacattgaatcaagagaagattttagacaaaaatcatacttctctgatattgctaaaaaagtatttagtggtcatggtacagatggttacacccttgctttaaaagaagctataaaagacaaatag

SEQ ID NO: 279445 - DNA, 541 bp, Unknown
  Bacterial polypeptide expressing nucleotide sequence isolated from the Sargasso Sea
attgcgcgcacactgcgctacacgttgtagagccgcggcgtgtgccgtggcccgctttatgccttacttcgcaggagtacccgtcatgagttttgcatcagtgctggtcctcaacggaccgaatctcaacctgctcggcacgcgtgagccgaccatctacggctcggaaacgctcgacgacgtagccagactttgccgagacgccggcgaacggctggatctgtcgatcgacttctgccaatcgaatgcggaacaccaactcattgactggctgcatgcggcacgtaccaaggtcgacggcatcgtcatcaatcctgccgcttatacgcatacctcggtggcgattgccgatgcactcagcgcgatcgaaaaacccgtcatcgaagtgcatatttcaaacgtgcatcgccgcgaagcattccggcatcactcgtatgtgtcggcgctggccgaggcgatcatcgtcggctgcggtacgcaggggtacgtgctcgcactggagcggatggcagtcatcctgaagaatcgggcggccaaatga

SEQ ID NO: 279446 - DNA, 433 bp, Unknown
  Bacterial polypeptide expressing nucleotide sequence isolated from the Sargasso Sea
tatgaaaattttagtgctaaatggtccaaatcttaatctactaggtataagagaagagaatatatatggaagtgagtctcttcaagatgtagagcataagcttaaagagattgctgatgaggtaaatgctcaaatatctttttaccagagcaatgctgaacatgatttaattaatgcaattcatgatgcctatgagtctggtgttgaattgattatttttaatccagctgcatacacgcacacaagcgttgctttaagagatgcactccttgcagttagcattccattttatgaggttcatatttcggatattgaaactagagaagaatttagacaaaaatcttattttagtgacatcgctataaaagtattcagtggtcatggcactaatggatattcacttgcgttaaaggaggctttgaaaaaaagttaa

SEQ ID NO: 279447 - DNA, 457 bp, Unknown
  Bacterial polypeptide expressing nucleotide sequence isolated from the Sargasso Sea
gatgagcaagcacaaggtgctcgtgctgaacggcccgaacctgaatttgttgggcacacgcgagccccatatctacggcgcggaaacgctcgccgatgtcgagcagcgctgccgtacggcgggcgaggcgctcgggctggaaatcgagttccgccagtcgaacgccgagcaccagctgatcgactggctgcatgccgcgcgtcacgacacgcacggcatcgtgatcaacccggccgcctatacgcatacgtcggtggcgctggccgacgcgctttccgcgatcgcgaagccggtgatcgaagtgcatatctccaacgtccatcgccgcgaagcgttccgccaccattcctacgtatcggcgctcgccgaagccgtgatctgcggctgcggcaccgaaggctacgtgttcgcgctgcagcgtctggcgacgctgttcgcgcagggggccgcgcgatga

SEQ ID NO: 279448 - DNA, 323 bp, Unknown
  Bacterial polypeptide expressing nucleotide sequence isolated from the Sargasso Sea
ccaagcgacggcctcgaaggaggaggccgagaaacttgctggtttgttatcccttgatgcagaaacaacagcggcactgcaggagtacccaaccaagggaagccttgagccagtgattcccactgatcctttgatttatcgtttttacgagatcatgcaggtgtatggcatgcctctgaaagatgtaattcaggagcatttcggagatggaattatgagtgccattgatttcactatagatgtcgataaagttgaggaccctaaaggtgatcgtgtcaaaattgtaatgtgtggtaagtttttaccctacaagaaatggtaaa

SEQ ID NO: 279449 - DNA, 398 bp, Unknown
  Bacterial polypeptide expressing nucleotide sequence isolated from the Sargasso Sea
gctggccgcgcccacgcaggccacggtgacggccactttgatggctgccaagaaagccaagggtctcagcttcgctgatctcgaggcggccatgggtctcgatgaggtttgggtggcctctctgttttatggacaagcgactgcatcgaaagaagaggctgagaagctggcagaactgctctctctcgacccggcaatgactgctgcgatccaggagttccccaccaagggaagtctcgaaccggtgattccgactgacccgctgatttatcgcttttatgaaatcatgcaggtttatggaatgcctttgaaagatgtgattcaggaaaagttcggtgatggcatcatgagtgctattgatttcaccttggatgtggaaaaagtcgaagatcccaagg

SEQ ID NO: 279450 - DNA, 436 bp, Unknown
  Bacterial polypeptide expressing nucleotide sequence isolated from the Sargasso Sea
atgtctttaacagccacgttgatggccgccaaaaaggccaaaggaatgagttttgctgatctcgaggcggccatgggtctcgatgaggtttgggttgcatccttgttttatggccaagcgactgcctcgaaggaggaggccgagaaacttgctggtttgttatccctcgatgcagaaacaacggctgcgctgcaggagtatccaaccaagggaagcctcgagccagtgattcccactgatcctttgatttatcgtttttacgagatcatgcaggtgtatggcatgcctttgaaagatgtgattcaagagaagtttggtgatggcatcatgagcgccatcgacttcacgcttgatgtggacaaggttgaagatcccaaaggtgatcgcgtcaaaatcaccatgtgtggaaagttcctgccttacaaaaagtggtgaa

SEQ ID NO: 279451 - DNA, 454 bp, Unknown
  Bacterial polypeptide expressing nucleotide sequence isolated from the Sargasso Sea
ttggcagcaccatctgccgacaccatcacggcaactttgttggccgctaaaaaggccaaagggatcgcattctcagaacttggtcgtctgctcggccgtgatgaagtctgggttgcttctttgttctatggtcaatcaacggcttcagtagcagaagcccagcagcttgcagaagtcctgaatcttgatcctgcaatcaccgaagccttgcagagctatcccaccaaaggctccttagagcctgtgatcccaactgatccgttgatctatcgcttctacgagatcatgcaggtttatggaatgccgatgaaggatgttattcaagaaaaatttggcgatggcatcatgagcgccatcgatttcacactcaatatcgataaggttgaagaccccgccggtgatcgtgtgaaggtcaccatgtgcggcaagtttctgccctataaaaagtggtaaa

SEQ ID NO: 279452 - DNA, 388 bp, Unknown
  Bacterial polypeptide expressing nucleotide sequence isolated from the Sargasso Sea
tcctttgaagatttaggtaaattgattaatagagatgaagtatgggttgcaagcctattttatgggcaagctacagcttctgtagaagaagctaatattttaataaaggctctcgatttacaatcagaattagaagatcaattaataacaccgccagtaaaaggctgcctagatcctgttattcctacagatcctcttatttatagattctatgaaataatgcaagtatatggactcccaatgaaggatgtaatacaagaaaaatttggtgatggaattatgagtgcaattgacttttcaattgaagttgataaggtagaagacccaaaaggggatagggttttagtaaaaatgtgcggtaaattcttgccctacaaaaagtggtaag

SEQ ID NO: 279453 - DNA, 436 bp, Unknown
  Bacterial polypeptide expressing nucleotide sequence isolated from the Sargasso Sea
atgtctttaacagccactctcatggccgcaaagaaggccaaaggaatgagtttcgctgacctcgaagcggctatgggcctcgatgaagtctgggttgcttcgttgttttacggccaggcgaccgcctcgaaggaggaggccgagaagctcgccggtttgttgtctctggatgctgaaaccacagctgcactgcaggagtatccgaccaagggcagtcttgacccggtgattcccactgatcccttgatttatcgtttttatgaaatcatgcaggtgtatggcatgcctctgaaagatgtgattcaggagaagttcggtgatggaataatgagcgcgatcgacttcacccttgatgtcgacaaagtggaagatcccaaaggtgatcgcgtcaaaatcaccatgtgcggtaagttcctgccttacaaaaagtggtgaa

SEQ ID NO: 279454 - DNA, 401 bp, Unknown
  Bacterial polypeptide expressing nucleotide sequence isolated from the Sargasso Sea
tgaagagcagttgagctgggcccaattggccgaagtgatcggccacagcaaggagtggagcaccgcagcgctgctcgggcagatgacgttgaccgaagcgcaggccaaggcggttggcgcggcgctggatctgcccgaagaggccgtcatgctgctgcaggtgacgccgtacaaggggtcgctgcccacgtcggtgccgacggatccgttgatctaccgcttctatgaactcatcagcgtgtacggcacgacgttcaaggcgctgatccacgaagagtttggcgacggcatcatgagcgcgatcgacttcaacatggatctcacgcgcgagcccgaccccaagggcgatcgcgtgcgcatcgttatgagcggcaagttcctgccctacaagacttactgaa

SEQ ID NO: 279455 - DNA, 393 bp, Unknown
  Bacterial polypeptide expressing nucleotide sequence isolated from the Sargasso Sea
ttggcctggactgggccgcacttggccagggcatcggcatgtcgccggtgtggacgacctccgcctgcctgggcatgaacagcatgcccaaggcgcaggcagatgccctgtgcgagatgctcgaattgccggcggaggtctccaccgcactgcaggcgttcccgcacaagcactgggacaaggccgtgcccactgacccgttgatctaccgcttctacgagatgatcaacgtctacggcgagaccatcaaggaactgatccacgaggaattcggcgacggcatcatgagcgccatcgacttcagcatggacatttcccgcgtcgccgaccccaagggcgaccgtgtgcagatcgtgctcaacggcaagttcctgccctaccgcagctggtaaa

SEQ ID NO: 279456 - DNA, 472 bp, Unknown
  Bacterial polypeptide expressing nucleotide sequence isolated from the Sargasso Sea
atgttgcaatcccaattcgcccaaaccccacgcctggccctggccgacaccgttatcgacctcaaggcacgcaaaaacctgtcgtggcaggacctcaccgacggcaccgggctgagcctggcattcgtcaccgcagccctgctcggccagcacccgctgcccaaggaggcggccgacatcgtgtgcggcaaactcggccttgacgaggacgccagccgactgctgcaaagcgtcccactgcgcggcagcttcccgagcggtgtaccgaccgacccaaccatgtaccgtttctacgaaatgctgcaggtctacggctctaccttgaaggctctggtgcatgagcaattcggcgacggcatcatcagcgccataaacttcaagctggacatcaagaaagtcgaagacccggacggcggctctcgtgcggtcatcaccctggacggtaaatacctgccgaccaaacccttctgat

SEQ ID NO: 279457 - DNA, 324 bp, Unknown
  Bacterial polypeptide expressing nucleotide sequence isolated from the Sargasso Sea
aatgtcaaaaattaaaaaaattaaaggaaggcagattttcgatagtagaggtaatcccactattgaagttgatattacacttgaagatggtagtttcggtagggcatcagttccttcaggagcttctacaggagcatatgaagcttatgagcttagagatggagaaaaaactttatctggaaaaactgtattaaaagccgttgagggtatcaatactgagataagtaatgtgctttgtggaatggaagcatctgcgcaagaagaaatcgacaataaaatgattgagctagactcaacaaataacaaatctcgattaggagcaaa

SEQ ID NO: 279458 - DNA, 481 bp, Unknown
  Bacterial polypeptide expressing nucleotide sequence isolated from the Sargasso Sea
aaaaatatagaactctttggtgaatctttaacaggccaggaaatgattcaaaccctcaatgaatgggcttcacgttttccattgatctgcattgaagacggtcttcatgaggaagcctgggaattttggcctgaattgactcaagctcttggcaatctgtgcctgacccttggggatgattttctctgtaccaatcccggacgtatccgtaaagctgttgaaacttccgcctgtaatgcgcttctgttaaagttaaaccaggtcggcactcttagtgaaggtgcggaggcctgcaggctcgctcgtgaggcaagttggaaagtggtcgtttctgcacgcagtggggagacggaagatgactggttggcagatctggcattcggatgggctgctgactatatcaaagtcggttcgattacccagtcagaacgcctgtccaaatacaaccgactgctggaaatcgaatcatcctacgattgaa

SEQ ID NO: 279459 - DNA, 340 bp, Unknown
  Bacterial polypeptide expressing nucleotide sequence isolated from the Sargasso Sea
atgagctcaattttaaatattatcgcctatgaaatactagatagtagagggattccaaccttatacaccgaagtagagttagaaaatggtgttaaaggtgcagcatcagtaccatcaggagcatcaactggtgttcatgaagctcttgaacttagagataaagataacaagaggtttaatggaaaaggagttcttgataatatcagaataattaattctttaatttttgatgctctggctggcttagatgctagacgtcaaaaagatattgataaacttctaatagacctggatggtactaaaaacaagaaaaagctgggagcaaatacaatactttctg

SEQ ID NO: 279460 - DNA, 130 bp, Unknown
  Bacterial polypeptide expressing nucleotide sequence isolated from the Sargasso Sea
ttgtttcacacagatctgggaaacagaagatcaactatagcagatttatcagtgggaatgtgctccggtcaaataaaaacaggatctatttcaagaacggacagaacttcaaaatacaaccaattttaag

SEQ ID NO: 279461 - DNA, 264 bp, Unknown
  Bacterial polypeptide expressing nucleotide sequence isolated from the Sargasso Sea
aatgagcaaaatcatacgagtcgttgcaagacaggtatatgacagcagaggaaatcctacgattgaggctgaagtattttctaataatttaagcgcatcggctatttgtccttcaggtgcatcaacaggcacttttgaagcttatgaaaaaagagacaaaagtaataaaaaatatttaggaaaaagtgttttaataccagttgcgactgtgaatagattaatttcaaaaaagttgaaaaatttgaatattcatgaccaagaaag

SEQ ID NO: 279462 - DNA, 184 bp, Unknown
  Bacterial polypeptide expressing nucleotide sequence isolated from the Sargasso Sea
aatgtcaaaaattaaaaaaattaaaggaaggcagattttcgatagtagaggtaatcccactattgaagttgatattacacttgaagatggtagtttcggcagggcatcagttccttcaggagcttctacaggagcatatgaagcttatgagcttagagatggagaaccaactttatctggaaaa

SEQ ID NO: 279463 - DNA, 222 bp, Unknown
  Bacterial polypeptide expressing nucleotide sequence isolated from the Sargasso Sea
aatgtcaaaaatatcgaatgtaaatgctattcaagtttttgattctagaggcattcctacaattgcttgcgaaataaaacttgataacggaatatctgcgtcggcaatggttccaagtggagcatccactggttcgaaggaagcaatagagctcagagacagtgattcaattatcacggaaaaggagttcataatgcgatttcaaatattaaataataaata

SEQ ID NO: 279464 - DNA, 496 bp, Unknown
  Bacterial polypeptide expressing nucleotide sequence isolated from the Sargasso Sea
catttttataaggaagaaaaatatgaactcgatggtgaatcattatcgggtcaggaaatgattcaaacccttaatgaatgggcttcacgttttccattggtcagcattgaagacggtattcatgaggaggcctgggaattttggcctaaattgactcaagctcttgataatctctgcctgacccttggggatgattttctctgcaccaatcccggacgtatccgtagagctgttgaaacttcggcctgtaatgcgcttctgttaaagttgaaccaggtgggcactgtaagtgaaggtgccgaggcctgcagactcgctcgtgaggcaggttggaaagtggtcgtttcggcacgcagtggggagacggaagatgactggctggcagatctggcattcggatgggctgcagacttcatcaaagtcggttcgattacccagtcagaacgcctggccaaatacaaccgactgctggaaatagaatcatcctacgattgaa

SEQ ID NO: 279465 - DNA, 193 bp, Unknown
  Bacterial polypeptide expressing nucleotide sequence isolated from the Sargasso Sea
aatgagcaaaatcaaaagagttgtagctagacaggtttatgatagtagaggaaatcccaccattgaggctgaagtattttctaataatttaagtgcatcagcaatttgtccttcaggtgcttcaacaggaacttttgaggcctatgaaaaaagagataagatcaataaaaaatacttaggaaaaagtgtttta

SEQ ID NO: 279466 - DNA, 109 bp, Unknown
  Bacterial polypeptide expressing nucleotide sequence isolated from the Sargasso Sea
aatgacaagatcggatagagtagcgaaatacaaccaattaattagaatagaagaggctttaaagggtaaatcacaatatgctggtaattcgattctaaaacaaaattaa

SEQ ID NO: 279467 - DNA, 349 bp, Unknown
  Bacterial polypeptide expressing nucleotide sequence isolated from the Sargasso Sea
atgagcccgccagatgagaccgctgtgttcgactctctcgaccttgtgatcgacaccgtggtggcacgggaagtcctggactcccgcggcaccccaacggtcgaagccgaggtgttgcttgagggaggcgctggtggccgggcgattgtgcccagcggtgccagcaccggtgcccacgaagcccatgagctgcgagatggcgacgccatgcgctacttcggcaagggagtcaaccaagccgtcagcaatgtggaagagcggctggcaccggccctctgcggactgagtgccctggatcagggcgcggtcgatgccgccatgaatgaactcgatggcagcgccaacaaat

SEQ ID NO: 279468 - DNA, 142 bp, Unknown
  Bacterial polypeptide expressing nucleotide sequence isolated from the Sargasso Sea
atgaaaataaaaaatattctttctcgttctgtattagattccagaggaaaccccacaatagaagttgatgtccaacttgcggatcactcaattggaagagcaattgtcccatctggagcatctactggtaaatttgaggctg

SEQ ID NO: 279469 - DNA, 166 bp, Unknown
  Bacterial polypeptide expressing nucleotide sequence isolated from the Sargasso Sea
aatgagtaaaattacaaaaattaaagctcgtcaagtatttgacagcagaggaaatcccactattgaagctgaagttttttcaaaaaattattccgcatcagcaatttgtccatcaggagcttctacagggtcatatgaagcatatgaaaaagagatacaaataata

SEQ ID NO: 279470 - DNA, 105 bp, Unknown
  Bacterial polypeptide expressing nucleotide sequence isolated from the Sargasso Sea
cgcgatctgacagactagccaagtataaccaacttatccgcattgaagaggaattaggtgataccgccgtatatgcagggcattcaatcttaaagtcgaaataga

SEQ ID NO: 279471 - DNA, 472 bp, Unknown
  Bacterial polypeptide expressing nucleotide sequence isolated from the Sargasso Sea
aatgtcaaaaattacaaaagtagtttcaaggcaaatatttgatagtaggggcataccgacaatcgaaacagaaatattttgtggaaaagtttcttcaaaagctatttgtccttcaggtgcttcgactggttcatatgaggcatttgaaaaaagggatatctcaaataaaaaatatttaggaaaaagtgttttttctgctgtaacaaatgtaaataaaataatttcaaaaaaaattctaaataagaatgttcataaccaggaattgattgactcaattcttattaaactagatggaacaaagcaaaaaaataaattaggcgcaaatgcaattttatctgtctctattgctgtcaaaaaattatcagcaaaattaaaaagaataccattgtataagaactttttaatcaaaaaaaattttaagttacctttcccacttatgaatatcattaaatgggggtgcgcatgccaataa

SEQ ID NO: 279472 - DNA, 727 bp, Unknown
  Bacterial polypeptide expressing nucleotide sequence isolated from the Sargasso Sea
aaataaaaactttcttctttatttttataataatccaataattcagcttttgattggttttccacttatattgtttatttttattaatgttaacaacattatatactttcaaaacaagaatgaaatattactgttcttattacctatagtattatgtttatttgtatttgttttaacctcttttagaaaaactagatttttaggtgagccccataggtatatagaatattgctcgatatttataattgcttattatgttacaaacttcaataataatcgatatatagcatccttattaattgtactttatgttttttcgattattgtcacaactattttaagtttgagaataaaagaagtaaaacagaatgaagaaaaatcgatagtaaaagtaaaagaatatatttatcatcaatcaaaaaataatacatataaaattttttgtaataatttaaatgtaacaaaacaactgttggatataaaaaatttgtttttttggggttttacaaactcaaaaaaaataggtaattattcttttgaagatatttatgaagaatatcctatagtttcagataaaatagtagctgatttaattgcaaaatataaaattgatttagcattatttgataattcaacgagttttaatatatcaaaaaacaaaattttattgaataattttgattttgtttttgctgccggatctttaaatctatataagttgaaataa

SEQ ID NO: 279473 - DNA, 130 bp, Unknown
  Bacterial polypeptide expressing nucleotide sequence isolated from the Sargasso Sea
ttgcactgcaagagcatcagcaaatgctttagacctaccactatataggtatcttgggggatccattatccaatctccttccagtcccattaatgaatgtaataaatggtggtgcacatgcaccaaatag

SEQ ID NO: 279474 - DNA, 227 bp, Unknown
  Bacterial polypeptide expressing nucleotide sequence isolated from the Sargasso Sea
gatgagtaaaatatctcgagttaaagctcgacaagtttttgatagcagaggaaatcccacaattgaagcagaggtatttgtaaacaattatagctcatcttcaatatgcccatcaggagcttcaactggatcttatgaagtacatgaaaaaagagataaatctaacaaaaaatatttagggaaaagtgtatacaaagcaattaatattataaacaaaaaaatatcaa

SEQ ID NO: 279475 - DNA, 201 bp, Unknown
  Bacterial polypeptide expressing nucleotide sequence isolated from the Sargasso Sea
aatggcaaaaattaaaaagattataggtagacaagtttttgacagccgaggtaatccaacagttgaggcagaattattttcagaaattggttctactttagcaattgtaccttcaggtgcatcacccggaacacatgaagcctacgaattaagagataagaaaaataacgagtatttgggcaaaagtgtttttaaggcggt

SEQ ID NO: 279476 - DNA, 184 bp, Unknown
  Bacterial polypeptide expressing nucleotide sequence isolated from the Sargasso Sea
atgtcaaaaattacaaaagtcatagcaagacaagtttatgatagtagaggaaatcctacaattgaagctgaagtctttgctaataacatgaaagcaagagctatatgtccatctggtgcttctactggttcacatgaagcatatgaaaaaagagattttttggacaaaaaaatatttaggaaga

SEQ ID NO: 279477 - DNA, 837 bp, Unknown
  Bacterial polypeptide expressing nucleotide sequence isolated from the Sargasso Sea
tttaatgtacccatcaaattaattaaagatgccgctgcggccgttcatcagtttgatgatccgccggatgacttagcagccccggaatcgctgctttctgcacagtcagatgccgacgcatcgcaacttgcggcggttgcctcaatcgacgccgcagccgagtccgctcttcaggtcacactcgcagccgaggccaacaacctcgttgccgcaaaaaattatacggttgcggtgtcagctaaggcgggagcggcagcaagagaagcagcacgtatcgaggcggcaacagaggacctattgtcagcgaaggcggcggcgactgcggcttacaaccaggccctggcggcgaaggccgatgcggcgtcgtcggagacagcagcccaaagtcgtctatccgacgtgcgggcaacaaaatctgcagctgaagcagcggaaaagtctgcggcagccgcggcaattgcgtcgtcggctgcggcagccactctatccgaggctaaagttgtccatgaagtgacagttgctgaggctgccgctgcggcctcggcgctggcatcagttgcatcggctcagtcaattgaccccgaggcttattcggcggtcgatcaagcgaatacgcgcgcgcaaaatgctctcgcgaagtccgtcgccgcactggaagacgccgaggaggcggcgaccgccgcggcaacggcgtcgacggaggcggcggcccagtctgttttggcgacaacagctgctgctggtgttaatgaagccgttgcagaggcggcatatggagcggcgcaggttgcaaggacgcaggcggaaacggctgtagcgtcagcactctcggcgaaa

SEQ ID NO: 279478 - DNA, 265 bp, Unknown
  Bacterial polypeptide expressing nucleotide sequence isolated from the Sargasso Sea
aatgaagattaaagacattaaagcttacgaattattagattcaagaggtaatcctacagtaggggttgaggtttttttatctgatgaaagtgtaggactggctttagttccttcaggagcgtctactggaaagtacgaagcaattgaaaaaagagatagtcagaaagatagatatcttggaaggggagttctggttgcagtaaataacattcacaatgatattttgcctttattgagagataaggatgcgtccgatctattcggt

SEQ ID NO: 279479 - DNA, 323 bp, Unknown
  Bacterial polypeptide expressing nucleotide sequence isolated from the Sargasso Sea
aatgtctaaaatttctaaagttgttgctagacaagtttttgatagtagaggaaatccaactatagaaacagaagtatttgtgaaagatattagtgcgtcagcaatttgtccatctggagcatcaactggaacttatgaagctttcgaaaaaagagatattaataataaaaaatatcttggaaaaagcgttttaaaacctgttgaatttataaataaggtaatatcaaataaattaaaaaattttaatgtccatcaacaagaaaaaatagataatttattaataaggcttgatggtacaaaacaaaaaaaaagagttggagcta

SEQ ID NO: 279480 - DNA, 229 bp, Unknown
  Bacterial polypeptide expressing nucleotide sequence isolated from the Sargasso Sea
atgattgataaaattttaaatatttactctaggcaagtgcttgattcaagaggaaacccaacgatttatacgcttgttaaaacttctagtggaaacactggatttagttatgttccctcaggagctagtacaggctcaaaagaggctttagagttaagggataacgacccaaaatatttcaatggtaaaagcgttttatctgctgtaaaaaatgttactgatgaaatag

SEQ ID NO: 279481 - DNA, 130 bp, Unknown
  Bacterial polypeptide expressing nucleotide sequence isolated from the Sargasso Sea
aatgagcaaaatatctcgagttaaagctcgacaagtatttgatagcagaggtaatccaactattgaagcagaagtattttcaaaaaatcttagtgcatccgcaatatgcccctctggagcatcaacggga

SEQ ID NO: 279482 - DNA, 197 bp, Unknown
  Bacterial polypeptide expressing nucleotide sequence isolated from the Sargasso Sea
aatgagcaaaatcaaaagaattatagccagacaggtttatgatagtagaggaaatcccaccattgaggctgaagtattttcaaataatttaagtgcatcagcaatttgtccttcaggtgcctcaacaggaacttttgaggcgtatgaaaaaagagataagagtaataaaaaatacttaggaaaaagtgttttaatac

SEQ ID NO: 279483 - DNA, 133 bp, Unknown
  Bacterial polypeptide expressing nucleotide sequence isolated from the Sargasso Sea
aatgcatatcaaatcaattgacgcaattgaaatacttgactctagaggcgtcccttcaatccatacatctgtcgttttaaattcaggacataaaggagaagccatggttcctagtggggcttcaacaggaaaa

SEQ ID NO: 279484 - DNA, 166 bp, Unknown
  Bacterial polypeptide expressing nucleotide sequence isolated from the Sargasso Sea
atgggtgtttcggctcgcagtggggagacggaagatgactggctggcagatctggcgttcggatgggctgcagactatataaaagtcggttcgattacccagtcagaacgcctggccaaatacaaccggctgctggaaatcgaatcatcctacgatggaagttagc

SEQ ID NO: 279485 - DNA, 424 bp, Unknown
  Bacterial polypeptide expressing nucleotide sequence isolated from the Sargasso Sea
aatgagcaaaatcaaacgagtcgtcgcaagacaagtatatgacagcagaggaaatcctacgatagaggctgaggtattttccaatagtcttagtgcatcagcaatttgtccgtcaggagcatcaacaggaacatttgaagcttatgaaaaaagagacaaaagtaataaaaaatatttaggaaaaagcgttttaataccagtagcaactgtaaataaattaatttcaaaaaagttaaaaaatcaaaatattcatgatcaagaaagaatagatagtattcttataaaattagatggcactaagcaaaaatctaaattaggcgcaaacacaatattagctgtatctatggctacaaaaaaactctctgcaaaagttaaaaaaatacctttatataaaaactttattgttaaaaaaaattttaaactt

SEQ ID NO: 279486 - DNA, 419 bp, Unknown
  Bacterial polypeptide expressing nucleotide sequence isolated from the Sargasso Sea
gatgaacaaaattacaaaggttattgctagacaagtttttgatagtaggggaaaccctactatagaagctgaagttttttcaaaaaatataagtgcatcttctatttgtccttccggagcatctacaggaacatatgaggcgtatgaaaaaagagataaatcaaacaaaaaatatttaggaaaaagtgttttaaaaccagtctcttttataaataaaataatatcaaaaaaactaaaaaaccaaaatgttcatagtcaagaaagaatagatcatattttaataaaactagatggaactaagcagaaaagtaaaataggtgcaaatgctatacttgctatatcaatggcggttaaaaagttatcagcaaaaataagaaaaatacctctttataaaagttttactgttaagaaaaatttta

SEQ ID NO: 279487 - DNA, 283 bp, Unknown
  Bacterial polypeptide expressing nucleotide sequence isolated from the Sargasso Sea
aatgggctcggaggtgtaccacaacctcaaaggcgtgatcaagaagaagtatggccaggatgcgtgcaacgttggcgacgagggcggcttcgcgccgaacatcctggacaacacggaaggtctcgatctcgtggtcgaggcgatcgagaaggcgggctacaccggtgccgcgccgccatcccgcgtcactgcgtgcccgtccacgacctgcctttcgcgcggccttttgcgggcttgccccgggggacgatgttttgccccacgcgtcacgcaggcaaggtga

SEQ ID NO: 279488 - DNA, 481 bp, Unknown
  Bacterial polypeptide expressing nucleotide sequence isolated from the Sargasso Sea
tatgagtggagaaaaatataactacaaagaacaaagtttaactcctgaagaacaagtagattttgtattaggattaattgaggaatataatttacactcagtagaagatcccctagatcaagaagattatgaatcatgggcctcattgacaaagcaaactgatgcactgattataggtgatgatttgtacgtaacaaattcagatagattggcaaaaggaatagaaatgaaatctactaattcaatactcattaaaccaaatcaaataggaacactaactgacactcaaaagactgtagatttggcagatgaagcagacatggctactgtgatttcacatagaagtggagaaacaactgattcaacgattgctcatttaggtgtagcattcgggtctcatgcaataaagactggaattatgggtggtgaaaggattgcaaagcttaatgaactggtccgaatcagcgagcaactcagatga

SEQ ID NO: 279489 - DNA, 253 bp, Unknown
  Bacterial polypeptide expressing nucleotide sequence isolated from the Sargasso Sea
aatgagcaaaatcaagagagtcattgctagacaaatatatgacagtagaggaaatcctacaattgaagccgaggtgtttactaataatttgagtgcttctgctatttgtccatctggtgcttctactggtacttatgaagcttatgaaaaaagagataaaactaataaaaaatatctaggaaaaagtgttctaaaaccagtaaatattatcaataaaataatatcaaaaaaattaaaaaatataaatgttcat

SEQ ID NO: 279490 - DNA, 140 bp, Unknown
  Bacterial polypeptide expressing nucleotide sequence isolated from the Sargasso Sea
ttatttagcagtaggcaccaattcaaatcaaatcaaaactggatctcttgcaagatcagagagaatatcaaaatataaccaactaattcgtattgaagaagatcttggtagattagctaaaatgaataaaattgattaat

SEQ ID NO: 279491 - DNA, 277 bp, Unknown
  Bacterial polypeptide expressing nucleotide sequence isolated from the Sargasso Sea
atgagttcaatttttaaagttcatgcaagacagatatttgattccagaggaaatccaacaatagaagttgatttaattactgaaaatggagtgcttgggaggtcctctgttccatcaggtgcatcaactggagagcatgaagctgtcgaaaagagagatggtggaaaagattacatgggaaagggtgttaaaagtgcagtgaaaacagttaatgagatattagctcagaagttaataagtttgtctgtttttgatcaaaaaggtattgatgaattaa

SEQ ID NO: 279492 - DNA, 159 bp, Unknown
  Bacterial polypeptide expressing nucleotide sequence isolated from the Sargasso Sea
tatgagccacccatcctctctggcaatttcccaggttcacgcaagggagatcctcgattcgcgggggtttccaacgctcgaagcggaagtgacgctgcaaaacggcatagtgggtcgcgcagcagttccgtctggcgcatccaccgggaagcgtgaggc

SEQ ID NO: 279493 - DNA, 346 bp, Unknown
  Bacterial polypeptide expressing nucleotide sequence isolated from the Sargasso Sea
aatgtcaaaaatatcttctataaaatctatacaagtcttagattcaagaggattgccaacagttgcttgtaggataacacttgaaaattcgcttactgctggagtaatgattccaagtggtgcatccacaggtaacaaagaagcaattgaacttagagataacagatatgaatatatgggaaagggagttatcgatgcagttaacaatatcaatgaaaaaatcaagcctcttctgattggtatcgatccatcggatcaagaacaaattgatacaatgcttattgaattagacggaacacctgataaatcaaatattggagcaaatgcaattcttgctgcatatcta

SEQ ID NO: 279494 - DNA, 1009 bp, Unknown
  Bacterial polypeptide expressing nucleotide sequence isolated from the Sargasso Sea
atgtccagaatagtgacagatttgcgaagcccagggatgcgtgacagagacgccatgtttatgagacgattccgagaagtagagcgtgtatttctgacggttacaagtcaggcaggctttgatgaaatacggactcctactctcgaaccactacacctcttcacaagcgcgaatgcgctgacccctcaggctttggaagaggcatattcgtttatcgattgggatggctggagcggcgaacgggttgtgatgaggccggacgtgactatctcagttgctcggtggtacgttgaaaaccgtgatgcagatggctcgggacgagttgcctatgttcagccggcctttcgatttaccgatcgaggggatcgagaacgatggcagtgtggtgtcgagggcattggttcggatcaatccgtgtccgatgtttccatgatcagaacggcaatcgaatttctcgaacatgttggggtagagaggatttcaatttcacttgctcattccaaacttctgagaactcttctcgaaggaggagggttctcagcgggcgagattatagacttccacgagtcgctgattgacggggcggcagaacaaattatcagtacttcgagacttcccgcggagatacaaaattgccttagcttactcgtacatccagaggccacttctgtggattttgcccgaaacgcccattccgtaatttcatctgtagtcgaggaagctgcttcttccatggaagaattgatcgctatcacttcggctcttgaggaacttggcattccttttcaattgcagcctgcggccgtccgaccttatgagtactattcagggattactttcaatatttcaggcgagacgataggagtgactgacaagagtatgtccagctggattctgggcggtcggtacgattcattgatcgaatcgctcgggggtggctctgtaccagccatcgggtgggcgtttgatatcgacaccttttgccagcaagtcactgggtcagattaga

SEQ ID NO: 279495 - DNA, 181 bp, Unknown
  Bacterial polypeptide expressing nucleotide sequence isolated from the Sargasso Sea
ggctcgtgaggcaggttggaaagtggtggtttcggctcgcagtggggagacggaagatgattggttggcggatctggcattcggatgggctgcagactatatcaaagtcggttcgattacccagtcagaacgcctagccaaatacaaccggctgctggaaatcgagtcatcctacgattga

SEQ ID NO: 279496 - DNA, 1143 bp, Unknown
  Bacterial polypeptide expressing nucleotide sequence isolated from the Sargasso Sea
tgtatcacattgcagaagatatggtgaatgggccagaagcaattgcttttaatgatgaaggtaaaatgtacactgcaaatgaggacggtagaataattgtgctatcaagagatggtacaaatccatatgattttgctcaaacaggaggtagaccacttggtctaaaatttgactcgcaaggtaatttgatagttgcagacgcatatgagggtttactttctatagacacaactggagaaatcactacactaaccactgaatgtaacagtcttccattccttcttaccgatgacctagatatttcatctaatggtattatatattttagtgatgctagttctgtaaataaccttgcaaataatggggatgattggggcgaacctaatggtcgacttttagcctatgacccacaaacggaggaaactagtttattactagacagtttatattttgcaaatggagtcgtacttgcacctgacgaaagttatgttttggtcaatgagtcatcattaggccgtgttcgtcgttattggttaactggggcaaatacaggagaaacagaagtattttcatatatttctggaaatgttgattgggaaggatgggttgtgcccgataacataacttataatgatgaaggaattttttgggttgctacatattttggtcccataattggaatagacatatttggtcaaatagtctacgagttgaattttgattttaatttattcggcgaaaatactagcgtaatccaatataatgatagcttgtatttagggacactgcacgatttttttataggaatgattcctcttcctgaagagctactatctgaccataatgttcctcaattagtaacatcaggatatcaattaaatcagaattatcctaatccattcaatccaataacgactcttcgttatgatattcctgaacatagccatgttaatattattatttatgatatgattggcagggaagtaaaaaccttagtaaatcaattccaagatgctggatataagtcagttgtttgggatgctacaaatgactttggacaacctgtaagtggtggaatttatatatatcaaatacaggctggatcatatatcagcgcaaataaaatggtgttgttaaaataga

SEQ ID NO: 279497 - DNA, 250 bp, Unknown
  Bacterial polypeptide expressing nucleotide sequence isolated from the Sargasso Sea
aatgtctaaaatttccaaaattattgcgagacaagtttttgatagtagaggaaatccgactatagaaacagaagtatttgtgaaaaatgttagtgcttcagcaatttgtccttctggtgcatcaactggaacttatgaagcttttgaaaaaagagatataaataataaaaaatatcttggaaaaagtgttttaaaacctgttgaatttataaataaggtaatatctaataagttaaaaaattttaatgtt

SEQ ID NO: 279498 - DNA, 616 bp, Unknown
  Bacterial polypeptide expressing nucleotide sequence isolated from the Sargasso Sea
atgatttacgaatttagaacatatcaaattaaaacaggttctcttcaaaaagtaatgagccttttcaaagataaaattgagggtagaaatacaatttctaaattaggagccttttggtacacagaaataggacaactcaatcaaattattcatgtatggccatatgaaagcatggagcatagaaatgcttcaagagaagaagctataaataaaaaactatggcctcctgattcagctgaatatatggttaaaatgaatacagaattttggaaacctgtctcttttagccctaaatgggaagatagaaatattggacctttttttgaaatgagaatatacacttatccatttaatgaaattcataagatgcttccagcttgggaagaaaaaatagaagcaagaaatagtttagcaccattagttggagcatttgtttcagaggttggagatgtaaataaatttatgcatatatgggcctataaaagcctgcaacatagaactgaagcaagagaaaaattttcttctattggatggcccccaaagtctgatgtgaaagctccaatatttcaggaaaacaaaattgtaatgcctagtgatttttcacctattcaataat

SEQ ID NO: 279499 - DNA, 157 bp, Unknown
  Bacterial polypeptide expressing nucleotide sequence isolated from the Sargasso Sea
atggcaactattgttgatattcatgcaagggagatcattgactctagaggaaatccgaccgtggaggtggatttgtcgcttgatgatggggctttcggtagagcatctgttccttctggagcttctacaggtagttttgaagccatggagctcagag

SEQ ID NO: 279500 - DNA, 661 bp, Unknown
  Bacterial polypeptide expressing nucleotide sequence isolated from the Sargasso Sea
atgctggaacgcttcgacatgcgtgctttgacggctgacgaaggaggtctcgcgccatcttttgaaaatagcattcaagtgctcgaggaagcttgttccgctatcgagcgagccggtctgaaacccgggcaggagatgcatttggcagtggatgtggcatccagccatttttataaggaagcaaaatatgaactcgatggtgaatcattaacgggccaggaaatgattcaaaccatcaatgaatgggcttcacgttttccattggtcagcattgaagacggtcttcatgaggaggcttgggaattttggcctgaattgactcaagctcttgataatctctgcctgacccttggagatgattttctctgtaccaatcccggacgtatccgaagagctattgaaacttcggcctgtaatgcacttctgttaaagttgaaccaggtgggcactcttagtgaaggtgctgaggcctgcagactcgctcgtgaggcaggttggaaagtggtcgtttcggcacgcagtggggagacagaagatgactggttggcagatctggcattcggatgggctgcagactatatcaaagtcggttcgattactcagtcagaacgcctggccaaatacaaccggctgctggaaatcgaatcatcctacgactgaa

SEQ ID NO: 279501 - DNA, 226 bp, Unknown
  Bacterial polypeptide expressing nucleotide sequence isolated from the Sargasso Sea
atgaaatcccatataaaaaatatatattcaagagaaatactagactcaagaggaaacccgacagttgaggtagatttagttcttgaaaatgatatactagcgcgcgcagcagtcccatcgggagcttcaactggtgattttgaagcaatggagctcagagacaataacaaaaatcgatatatgggtaaaggagtccttgctgcagtaataatgtcaataatgaata

SEQ ID NO: 279502 - DNA, 229 bp, Unknown
  Bacterial polypeptide expressing nucleotide sequence isolated from the Sargasso Sea
atgacaaaaattaaagacataaaagccagacaaattttcgattctagaggaaacccaacagttgaggttgatgttataacacatgataatataattgggagagcagcagttccatctggagcatctaccggagaacatgaggcagttgagttgagagatggaggaaatgattacatgggtaagggagttagtatggctgttagcaacgtcaattcaacaataagagaaa

SEQ ID NO: 279503 - DNA, 129 bp, Unknown
  Bacterial polypeptide expressing nucleotide sequence isolated from the Sargasso Sea
catgtccgctattttagatattcaggcgcgtgaaattctggactcgcgcggcaatccaacagttgaagttgatgttgttttggaagatgggtctgtcggccgtgcttcggtaccatcaggggcatctac

SEQ ID NO: 279504 - DNA, 105 bp, Unknown
  Bacterial polypeptide expressing nucleotide sequence isolated from the Sargasso Sea
cagtttttgatagcagaggaaatccaactgtagaggctgaagtttttcaaataatattcatcatcatcaatatgtccatctggagcttccacaggaacatttgaa

SEQ ID NO: 279505 - DNA, 283 bp, Unknown
  Bacterial polypeptide expressing nucleotide sequence isolated from the Sargasso Sea
taaacaaaaaagtaaacttggtgcaaatacaattttagcagtatcgatggcagttaaaaaactttctgcaaaaattaaaaaactaccattatttaaaacctttttagttaaaaaaaatttcagactaccttatccattaatgaatgttattaatggtggagcacacgctaataacggacttagaatacaagaatttatgattagacctgacaaagctaaatctatccaagaaagtataaggatttgttttttagttataaacaatcttaaaaaattgattaaa

SEQ ID NO: 279506 - DNA, 298 bp, Unknown
  Bacterial polypeptide expressing nucleotide sequence isolated from the Sargasso Sea
tatgacaaccattaaatcgatcacagctatagaaatcttggattcaagaggaaatccaactgttggatgcactgtcacgttggacgataatatccaagctaccgcttatgttccttcaggagctagtactggacagcacgaggcatatgaactacgggatgaagagaatgatagatactttggcaaaggtgtacgaaacgcagttgctaatgttaatcaggtaataaatgaagccttaattaatacggactgggagactttgtgggaatttgataaagctcttataggtttagacggt

SEQ ID NO: 279507 - DNA, 184 bp, Unknown
  Bacterial polypeptide expressing nucleotide sequence isolated from the Sargasso Sea
gattatttctcatagatctggtgatagtgaagacacatttattgctgatttggctgttggaactgattctaatcaaatcaaaacaggatccttagctagatctgaaagagtatcaaaatataatcaacttattcgcatagaagaggagcttggaaaatcttctaaaatgaataaagttaattaa

SEQ ID NO: 279508 - DNA, 220 bp, Unknown
  Bacterial polypeptide expressing nucleotide sequence isolated from the Sargasso Sea
atgagcaaaaatcagccaaaaatacaaaaattacatgcccgacaaatcttagactcaagaggaaatcctactattgaagtagaggttagtcttgaaggttgttatggtagagctgctgttccttctggtgcctcaactggacagtttgaagctattgagctaagagataataatagagaatttcatggaaaaggagttaataaagcaataaacaatttct

SEQ ID NO: 279509 - DNA, 286 bp, Unknown
  Bacterial polypeptide expressing nucleotide sequence isolated from the Sargasso Sea
tgaagcaaggcaagtccttgattcaagaggtaatccaactgtagaggcagaagtatttttagaatgtggtgcaagtggtagagcaattgttcccagcggagctagcactggcgctcatgaggcacatgaattaagagatggtggttcaaaatatatggggaagggtgttttaaaccctgttaataaaattcatgaaacaatatccccggctttatgtgggttttcagctttagatccaactgtagtagataaattaatgattgaaattgatggaactcttaataag

SEQ ID NO: 279510 - DNA, 237 bp, Unknown
  Bacterial polypeptide expressing nucleotide sequence isolated from the Sargasso Sea
aatgagtaaaatagtatcagtgaaagctagggaaatcctggatagccgaggtgtaccgacggtagaggtagaaacggctttagatagcggggtaattggaagagcttctattccttctggtgcttccacgggagcttatgaggcgattgaactaagagatggggatcctaagcgttataacggtaaaggcactctcaaggcagtaaacaacattaacaccgaaattcaatctttaat

SEQ ID NO: 279511 - DNA, 451 bp, Unknown
  Bacterial polypeptide expressing nucleotide sequence isolated from the Sargasso Sea
atgagtaagattactaaagtattcgctagacaagtatttgatagcagaggaaatccaacggtagaagcagaggttttttcaaaaaactatagctgttcatcaatttgcccttcgggcgcttcaacaggtagttttgaggctcatgaaaaaagagataataataaaaaaaattataatggtaaaagtgtttttaaagctgtaaaaataattaatacagtcatcgcaaaaaaattaataaataaaaatgttcatgaccaagaaaaaattgatcatacacttttgaaattagacggcactaaacaaaaaactaaacttggtgcaaatagtatgcttgctgtttcaatggctgtaaaaaaattatctgctaaaataaaaaaaattcctctttataaaaattttttagtaaagaaaaattttttattaccttttcccaatgatgaatataattaat

SEQ ID NO: 279512 - DNA, 766 bp, Unknown
  Bacterial polypeptide expressing nucleotide sequence isolated from the Sargasso Sea
gggggaacaggtctcgatccaggacgtcctgattgttcccaatgcagaaagcataaaagactcactggcttcagtttatgaagtctatcaatcagcagcggatgggatgctggaacgctttgacatgcgtgctttgacagctgacgaaggaggtctcgcgccatcctttgaaaatagcattcaagtgctcgaggaagcttgttcggctatcgagcgagccggtctgaaacccgggcaggagatgcatttggcagtggatgtggcatccagccatttttataaggaatcaaaatatgaactcgatggtgaatcattaacgggccaggaaatgattcaaaccctcaatgaatgggcttcacgttttccattggtcagcattgaagacggtcttcatgaggaggcttgggaattttggcctgaattgactcaagctcttggcaatctgtgcctgtcccttggggatgattttctctgcaccaatcccggacgtatccgtaaagcggttgaaacttcggcctgtaatgcgcttctgttaaagttgaaccaggtgggcactcttagtgaaggtgctgaggcctgcagactggctcgtgaggcaggttggaaagtggtggtttcggctcgcagtggggagacggaagatgattggttggcggatctggcattcggatgggctgcagactatatcaaagtcggttcgattacccagtcagaacgcctagccaaatacaaccggctgctggaaatcgagtcatcctacgattga

SEQ ID NO: 279513 - DNA, 310 bp, Unknown
  Bacterial polypeptide expressing nucleotide sequence isolated from the Sargasso Sea
atgagcaaaattacaaaagttgttgcaagacaagtttttgatagcagaggcaaccctacagttgaagcagagatatttgttaaaaatttaagctcaagttctatatgtccatctggagcatctactggaacatacgaagcatttgaaaaaagagataaggtaaataaaaaatatcttggcaaaagtgtatttattccaattaaatatattaatactgtaatctcaaaaaaattaaaaaatcaaaatattcataatcaagagaaaattgatcatactttaataaaattggatggcactaaacagaaaaaaa

SEQ ID NO: 279514 - DNA, 206 bp, Unknown
  Bacterial polypeptide expressing nucleotide sequence isolated from the Sargasso Sea
gatggcaaaaattaccaacgttaaaggtcgtcaagtttttgacagcagaggaaacccaactgttgaagcagaagttttcttagataacgatatttctgctacagctatatcaccgtccggtgcatccacaggagcttttgaagctcacgaattaagagaccaagataaaaataattttttgggtaaaagtgtaaaaaaagctgttg

SEQ ID NO: 279515 - DNA, 160 bp, Unknown
  Bacterial polypeptide expressing nucleotide sequence isolated from the Sargasso Sea
agctgatttagctgttggaatggggatgggacagataaagacaggctctatatcaagaacggatcgaacatgtaaatacaatcaattacttcgtattgaagaagaattaggaacaagagcgaaaatagctaaccttagttatttaggtatacctagatga

SEQ ID NO: 279516 - DNA, 445 bp, Unknown
  Bacterial polypeptide expressing nucleotide sequence isolated from the Sargasso Sea
atgagcagaattaccaaagtaattgctagacaagtttttgatagtagaggaaatcctacagtagaagctgaagttttttcaaaaaatattagctcctcgtcaatttgtccatctggcgcttcaactggaagttatgaagcacatgaaaaaagagacctaaataaaaaaaactataatggtaaaagtgtttataaagcagtaaaaattataaatacaattattgcaaaaaagttaaaaaatcaaaaagttcataaccaagaaaaaatagatcatatcctactaaaattagatggaactaaacaaaaaattaaattaggagcaaacagtatgttggcagtttcaatggctgtaaaaaaattatcatctaaaattaagaaaattcctctttataaaaactttttagtcaaaaataaaaaaggtttaccatatccattaatgaatatta

SEQ ID NO: 279517 - DNA, 391 bp, Unknown
  Bacterial polypeptide expressing nucleotide sequence isolated from the Sargasso Sea
atagcagcgattgaaaaaaatgtttctctatttaaatatttaggaaactctaaaaaatccgaattacctattcctcttttaaatattataaatggtggagttcacgcaaagaacaacttagatattcaggaatttatgatacgccctgataaagccaaatcatttaccgaagcaatgagaataagttttttagttattcaaaacttaaaatctatgcttgacgttactaatgttggagacgaaggtggttttgctcccaacttacaaagtgatgaagaagcaattaaaattataattaattcaatagaaaaatcaggatttaagccaggcgaggatatatcaatttgtttggatgttgctgcaaatgagttaaaggaaccaaaaacaattg

SEQ ID NO: 279518 - DNA, 207 bp, Unknown
  Bacterial polypeptide expressing nucleotide sequence isolated from the Sargasso Sea
taatttcagtgaatcattaagaatgggtactgaaatttttcactcattaaaatcattactagatcaaaaaggtctatctactgctgtaggcgatgagggtggatttgccccaaatttatcatcaagcgaagaagcaggggacttattattagaagcaattcaaaaagccggatttaagcctggtgagcaggtatctttagctttaga

SEQ ID NO: 279519 - DNA, 373 bp, Unknown
  Bacterial polypeptide expressing nucleotide sequence isolated from the Sargasso Sea
tatgaataaaaaaattaaaagtatcaatgctcgtcatatattagattcaagggcaaatccaaccattgaagttgaagttactacgagtgataatatcaaaggtcgtgctgcagttccatctggagcctctactggagcccttgaagctcatgaacttagagataatgatccttcctttaatgggatgggagtaaataaagcaatcgaaaatgttaaaacaataatttcagacactttattaggtgaggatgtaactgatcaaagcaatattgacaataagttaattgaattagatggaactgataacaaaaataatcttggagcaaatgcaatcttagcagtctctatggcctcaatgagagcaagtgcaaga

SEQ ID NO: 279520 - DNA, 415 bp, Unknown
  Bacterial polypeptide expressing nucleotide sequence isolated from the Sargasso Sea
aatggcaaaaatcaaaaatgttatagggcgacaagtttttgatagtagaggaaatcctacagttgaagctgaaatttttttagacaacggttcatccgctactgcaatttctccctcaggtgcatctacaggtgcttatgaagcacacgaattaagagataaagatcagaataaatttttaggaaaaagtgtaattaatgcagttaataatattaatagcaaaatttcaaataaacttaagaatttaaatcctaaccaacaagaaaatattgataaaattttattagaattagatggcagtgaaaataagactaacttaggtgcaaacgcaacattagcagtttcattagctaatgcaaagtgtgcggcgatcgtaaacaacccatctctctataaaagttttgggtgcatctta

SEQ ID NO: 279521 - DNA, 478 bp, Unknown
  Bacterial polypeptide expressing nucleotide sequence isolated from the Sargasso Sea
tatgagtaaaattacaaaagtaatagcaagacaagtttttgatagtagaggaaacccaactatagaagctgaagtttattgtaaaaatataagcgcatcttcaatttgcccatctggtgcatctacaggaacgtatgaggcttatgaaaaaagagataaaacaaataagaagtatttaggaaaaagtgttttaaaacctgtctcttttataaacaaagtaatatctaaaaaattaagaaatcaaaatgtacatgatcaagaaaggatagatcatttgttaattaaattagacggaactaaacaaaaaagtaatataggtgcaaatgctatactttctatttctatggcagttaaaaagctatcagcaaaaaaaagaaaaatacctctttataaaagttttattgttaagaaaaactataagcttccttaccctttaatgaacataattaacggtggcgcacatgcaaacaatggatta

SEQ ID NO: 279522 - DNA, 184 bp, Unknown
  Bacterial polypeptide expressing nucleotide sequence isolated from the Sargasso Sea
atgaatgtaattgataaaatttttggcagacaaattctagattcaagaggtaatccaactgtagaagttgagattactttagataatggtattaaatcccgtgcatctgttccatctggtgcatcaactggagaacatgaagcaatagaaaaaagagacaatgtatcttcaaaatatcttggaa

SEQ ID NO: 279523 - DNA, 229 bp, Unknown
  Bacterial polypeptide expressing nucleotide sequence isolated from the Sargasso Sea
gatgccaaaaattagttatataagagcaagacaaattttagactcaagaggaactccgacagttgaagttgacatggctcttgaagggcaaaaattagtcagaagttcggtgccatctggtgcatctacgggttcatatgaagctgttgagttaagagacaatactaaagatttcttaggtaaaggtgtaagtaaagctgtagaaaatataaataaaataatagctaat

SEQ ID NO: 279524 - DNA, 151 bp, Unknown
  Bacterial polypeptide expressing nucleotide sequence isolated from the Sargasso Sea
atggcaaaaattaaaaaagttaaaggccgacaagtttttgatagtagaggcaatccaacagttgaagctgaagttttttcagaaaatagatctgcattcgcaatagttccatctggcgcatcaactggaacccatgaagcttttgaactaa

SEQ ID NO: 279525 - DNA, 205 bp, Unknown
  Bacterial polypeptide expressing nucleotide sequence isolated from the Sargasso Sea
aaaagaattatgctcatcttatccaatatattcaattgaggatggtatgtcagaagatgattggctaggctggaaatgtttaactgatgaaataggagagaagattcagttagtaggagatgatttatttgttactaatattgatagattaaaaaaaggtattgatgagaatattgcaaattcaatattaattaaactaaaccag

SEQ ID NO: 279526 - DNA, 460 bp, Unknown
  Bacterial polypeptide expressing nucleotide sequence isolated from the Sargasso Sea
aatgagcagaatttcaaaagttgtcgcaagacaaattttcgatagtagaggtaacccaaccattgaagcacaggtatactgtaataaaattagtgcgtcttctatttgtccatctggagcatctacaggtacctacgaagcttttgaaaaaagagactttaataataagagatatttagggaaaagtgtttttaaagcgataaatattgttaacactttaatttctaaaaaactaaaaaatcaaaatatacataatcaagaaaaaattgatcatattttaattaaattagatggtacaaaacataaaaaaaaattaggggccaactcaactcttgcagtttctatggcagtaaaaaaactttcagcaaaattaaaaaaaatacctttgtataaaacttttactagtaaaaaaaattttcttttaccttatcctttgatgaatattataaatggaggagct

SEQ ID NO: 279527 - DNA, 292 bp, Unknown
  Bacterial polypeptide expressing nucleotide sequence isolated from the Sargasso Sea
aatgcctaaaataaaaaatattattggaagagaaatccttgatagtagaggcaatcctacgattgaatgtgacataacattagaagacaactcatttggcagagcaagtgtcccaagtggggcttcaacaggtattcatgaagcattagaacttagggacaaagataaaaatcgttattcaggtaaaggagtattaaaagcaattaataatataaataacaaaattttacctgaaataaaaaataaaaattttgataacataaaatcttttgataattttttaattaattta

SEQ ID NO: 279528 - DNA, 214 bp, Unknown
  Bacterial polypeptide expressing nucleotide sequence isolated from the Sargasso Sea
aatggcaaaaattaaaaaggttaagggtagacaggtttttgacagcagaggaaaccctactgttgaagttgaaatatattctgatgcggatctttatgcatctgcaattgtcccttccggagcatcaacaggaacttatgaagcttatgagttgagagataaaaaaaataaagattatcttggtaaaagtgtttttaagcaattgagaatgtaa

SEQ ID NO: 279529 - DNA, 195 bp, Unknown
  Bacterial polypeptide expressing nucleotide sequence isolated from the Sargasso Sea
caccttcaccctcaccctcacccccgcccccaccctcacccctccccctcaccctcggccagatcaagacgggtgcgccgtgccgctccgaccgcaacgccaagtacaaccagctgatgcgcatcgaggaggagctcggcgctgacgcggtctacgcgggcgcgacgtggcgtaagccgtcctggatggcctgag

SEQ ID NO: 279530 - DNA, 303 bp, Unknown
  Bacterial polypeptide expressing nucleotide sequence isolated from the Sargasso Sea
aaaattatcagccaaagtaaaaaaaatacctttatataaaaattttattgttaaaaaaaattttaaacttccctttcctttaatgaatattattaatgggggtgcgcatgctgataatggccttagaatacaagagtttatgattagacctgataaagcaaaatcatttaatgatgctgttagaatgtgttttttagtaataaataatttaaaagtattattaaaaaaagcaggtcactctattaatgtaggtgatgaaggtggctttgcaccaatgataagcgataatgagagtgctttaaa

SEQ ID NO: 279531 - DNA, 475 bp, Unknown
  Bacterial polypeptide expressing nucleotide sequence isolated from the Sargasso Sea
atgaatataaaaattaaaagcattagtgctcgtcatatattagattcaagagcaaatccaacaattgaagttgaagttactacgagtgataatatcaaaggtcgtgccgcagttccatctggagcctcaactggagcccttgaagcccatgaacttagagataatgatccatcctttaatgggatgggagtaaacaaagcgatagaaaacgttaaaacaataatttcagacactttaataggtgtggatgtaactgatcaaagcaatattgacaacaagttaatcgaattagatggaactgataacaaaaataatcttggagcaaatgcaatcttagcagtgtctatggcctcaatgagagcaagtgcaaatcaacaaaacaaacaactttttgaactcttcccaaaatatttacggaccaccttctctacctgttccttttatgaatattctcaatggaggtgcacacgctgat

SEQ ID NO: 279532 - DNA, 199 bp, Unknown
  Bacterial polypeptide expressing nucleotide sequence isolated from the Sargasso Sea
aatgagtatcattaaacaagtaaaggctagagaaataattgatagcagaggaaatcctacaatagaggttgatgtttatttaaatagtggtgattacgggagagcatctgttccttctggggcatcaactggaaaacatgaagctttagaattaagagattgtaattccaaaatattccaaggtaaaggcgtttctaag

SEQ ID NO: 279533 - DNA, 823 bp, Unknown
  Bacterial polypeptide expressing nucleotide sequence isolated from the Sargasso Sea
ggggggatttctgcctcagcctcactgccttccggggcctcaacgggcggatcagaagccgtggagttgagggatggaaacccgaaccgtttccggggtttgggttgtctgaacgcagtttcaaacctccagcaagtacttgctccagctttggaaggggagagcttcagttcccaggctgcacttgatcacaatcttcaggaacttgacggaacttccgataagtcaaacctgggagcaaataccttgctcgcagtctcattagcctttgcccgagccacagcttgttccagaaaaatgagtttgcatcagtatttttcagaaatccttggagtgaaaccgggaatgcctcgtttgacggtgaaccttttcagtggaggaaaacatgcgggggaacaggtgtcgatccaggatgtcctgattgttcccaatgcagaaagcataaaagactcactggctttagtttatgaagtctatcaatcagcggcggatgggatgctggaacgcttcggcatgcgtgctttgacggctgacgaaggaggtctcgcaccatcctttgaaaatagcattcaagtgctcgaggaagcttgttctgccatcgagcgagccggtctgaaacccgggcaggagatgcatttggcagtggatgtggcatccagccatttttataaggaattaaaatatgaactcgatggtgaatcattaacgggccaggaaatgattcaaatcctcaatgaatgggcctcacgttttccattggtcagcattgaagacggtcttcatgaggaggcttgggaattttggcctgaattgactcaagttc

SEQ ID NO: 279534 - DNA, 315 bp, Unknown
  Bacterial polypeptide expressing nucleotide sequence isolated from the Sargasso Sea
aatgagcaaaataacaaaagtcatagctagacaagtttatgacagtagaggaaaccccacagttgaagcggaggtttttgctaataatatgaaagcaagagctatttgtccatcaggagcttccacgggatcacacgaagcttttgaaaaaagagatgttaaaaataaaaaatatttaggaaaaagtgtattcaaagctgttaacttaattaacacaaaaatttcaaaaaaattaaaaaatcaaaacattcataaccaagaaaaaattgattatattttaattaaaattgatggcacaaaacagaagaaaaagtt

SEQ ID NO: 279535 - DNA, 520 bp, Unknown
  Bacterial polypeptide expressing nucleotide sequence isolated from the Sargasso Sea
atgcagatcaaatcaattgacgctattgaaatacttgactctagaggtgtcccttcaatccatacatcagtcgttttaaattcaggacataaaggagatgctatggttcctagtggggcttctacgggaaaaaaagaggcttttgaacttagagacaatgatgggagatttgatggaaagggcactaaaaaagcgatcgagaatataaaaaactttatacagcctgctttaatgggtaagccaattgaggatcaaaaagaattggatcaaataatgattaatcttgatggcacgagacaaaagaaaaaaataggtgcaaactcgatcctctcggtttctttagcttgcacaagggctgctgcaaatgctatgaacctgcctctttatgactatatacgtattctttttaattctaaatcagataaaggatcaactctttcaattcccaagccaatgttaaatatttttaatggtggagcccattctaataatagaatagatatacaagagtttatgatta

SEQ ID NO: 279536 - DNA, 214 bp, Unknown
  Bacterial polypeptide expressing nucleotide sequence isolated from the Sargasso Sea
atgtccaaaataaaaaaattgattggaagagaaattttagattcaaggggcaacccaactattgaagtggatgttcatcttgctagtgggcaaataggtcgtgctgcagttccttccggtgcatccacaggtcaacatgaagcaattgaattaagggataatgatttatctcggtttggtggtaagggcgtccttaatgtaattgataatataa

SEQ ID NO: 279537 - DNA, 240 bp, Unknown
  Bacterial polypeptide expressing nucleotide sequence isolated from the Sargasso Sea
cacttacggaaacattctcagcaatggaccttgcatttaaaaataattttgttgcaattatttcacatcgctcaggagaaacaggagatcattttattgcagacttggccgtggccacaagtagtgcccatattaaaactggatcggccagccgctctgatcgaatggaaaaatacaatcaattacttcgaattgaagagcacttgggcggccaagcaaaatacttgcccattaaatagt

SEQ ID NO: 279538 - DNA, 313 bp, Unknown
  Bacterial polypeptide expressing nucleotide sequence isolated from the Sargasso Sea
gttgggcgctctccagcagaagcagggcaagttggaggcagccgagaagagctatcgggatgccctccgatgtgacccaaacgacgccagcgcccacaacaacttgggcattctcctggagaagcagggcaagctcgctgcagccgagaacagcttccgggaggccctccgatgcgaccccgactacgccatcgcgcactacaatttgggcattctcctggagcagcagggcaagctcgctgcagccgagaacagcttccgggaggccctccgatgcaaccccgactacgccatcgcgcacatcaatttgggc

SEQ ID NO: 279539 - DNA, 136 bp, Unknown
  Bacterial polypeptide expressing nucleotide sequence isolated from the Sargasso Sea
ttggcggtaggaacgaactccaatcaaataaaaactggatctttagcacgctccgaaagagtagccaaatataatcagctaataagaattgaagagaaacttggaaaatctgcaaaaatgaataaaattgtataat

SEQ ID NO: 279540 - DNA, 304 bp, Unknown
  Bacterial polypeptide expressing nucleotide sequence isolated from the Sargasso Sea
atcattaagaatgggtactgaaatttttcactcattaaaatcattacttgatcaaaaaggtctatctactgctgtaggggatgaaggtggatttgccccgaatttatcatcaagcgaagaagcaggggacttattattagaagcaattcaaaaagccggatttaagcctggtgagcaggtatctttagctttagatgctgctagtactgaattttatagggatggtatttataaatatgaaggtaaaagtttaaatagctctgaaatgatttcatatctttctaaattagtttctaattatccc

SEQ ID NO: 279541 - DNA, 271 bp, Unknown
  Bacterial polypeptide expressing nucleotide sequence isolated from the Sargasso Sea
attttgattaagcctaatcaaattggaacaatttcagagactttagaggtgattaaatttgcaaatattattggatataaaaccattatttcacacagatctggggactcagaagatacatttatatcagatttagcagtaggcactaattcaaatcaaataaaaactggttcattatctagatctgaaagagtatcaaaatataatagattaatacgtatcgaggaagaactaggaaataaaacaaaaatgaataatataaatttatgat

SEQ ID NO: 279542 - DNA, 97 bp, Unknown
  Bacterial polypeptide expressing nucleotide sequence isolated from the Sargasso Sea
gggtcattggcaagatcagaaagagtagctaaatataacaggttattacgcatagaagaagaacttggaaatcaggctaaaatggctaaaatctaat

SEQ ID NO: 279543 - DNA, 649 bp, Unknown
  Bacterial polypeptide expressing nucleotide sequence isolated from the Sargasso Sea
aatggcaaacattacttcagttaaagcaattcaaatattagattctagagggctgccaacagtctcttgcagggttgaaactgacgatggcctatcagccatcagcaaagttccaagcggagcttccaccggtgaaagagaggctcttgaattaagagacggcggtaatgaatatctcggcaaaggagtattaagggcagtaaagaatataaatactaaattagctgatgttttaattggtatggatgcaagaaatcaatttgagattgaccaagccttgatagatcaagatggaactccagcaaagaaaaacttaggagccaatgctgttctcgctgcttcaattgcaaccctaagatcaggtgctaaatccgccaaattacctttatacgagcatgtaaataatctttactgttcaaaatttaaagcaaataagcaattaagtttgcctacaccaatgctgaatattattaatggaggagagcacgccaataataatattgatattcaagagtttatggtaatgccaataggtgctggttcatttaatgagtgcatgcagtgggcaatagaaatctatggagctttaaaatcattgttagcgtcaaaaggccttagtacagcggttggtgatgagggaggttttgct

SEQ ID NO: 279544 - DNA, 379 bp, Unknown
  Bacterial polypeptide expressing nucleotide sequence isolated from the Sargasso Sea
aatgagcaaaattactaaagttgttgccagacaagtttttgatagcagaggaaatcctacagtagaagcagaagttttttcaaaaaatataagtgcatcttcaatttgcccctctggtgcttcaacaggaagttttgaagcttatgaaaagcgagatataaatagaaaagattataatggaaaaagtgtatttgcagcagttaaaataattaattctataattgcaaaaaaattaaaaaatcagagtgtacataatcaagaaaaaattgatcatatacttttaaaattagatggaacaaaacaaaaacttaaactcggtgcaaatagcatgcttactgtctcaatggcagtaaaaaaattatcatctaaaataaaaaaa

SEQ ID NO: 279545 - DNA, 441 bp, Unknown
  Bacterial polypeptide expressing nucleotide sequence isolated from the Sargasso Sea
catgagtgaaataaaatctcttttagcacgagaaatactagatagtaggggtgtacctacggtagaggttgatactattttagaaaatggtttttttggtagagcctcagtcccatctggtgcttcgaccggtgcttacgaagctattgaacttagagataaggataactcgcgccacaatggcagaggaacacttaaggcagtaaacaatattaatactgaggttcgatcgctaattttggggaaagattgccaaaaccaaagtgaaatagatgaatcgttaatcaaattagacggaacaaataataaatcccgcttaggagcaaatgctcttttaggagtatcaatgtctgtcggaaaagctgcggctgcagagaaccaaaggccgttattttcaaatttgtccacgggactagctaaactactacccgttcttatgat

SEQ ID NO: 279546 - DNA, 193 bp, Unknown
  Bacterial polypeptide expressing nucleotide sequence isolated from the Sargasso Sea
atgacaaaaattaaaaaaatttttgcaagacaaatattagattcaagaggtaatccaactatagaggttgatgttatttcatcagataatttgttaggtagagcttcggttccttctggagcttcaacaggttctaatgaagctattgaattaagagatggagataaaaaatactcaggtaaaggtgtatgaa

SEQ ID NO: 279547 - DNA, 635 bp, Unknown
  Bacterial polypeptide expressing nucleotide sequence isolated from the Sargasso Sea
aaattaatttcaaaaaaattaaaaaatcaaaacatccatgaccaagaaagaatagatagtattcttataaaattagatggcacaaaacaaaagacaaagttaggtgcgaatacaatattagctgtatccatggctgttaaaaaattatcagcaaaagttaaaaaaatacctttatttaaaaattttattgtaaaaaaaaaatttaaacttccttttcctttaatgaacattattaatggtggcgcacatgctgacaatggccttagaatacaagagtttatgattagacctgataaagcaaaatcatttaatgaagctgtcagaatgtgttttttagtaataaacaatttaaaagtattattaaaaaaagcaggccacagtattaatgtaggtgatgaaggtggctttgcaccaatgataagcgataatgagagtgctttaaagcttttagttcaagcgatcaaaaaatcaggttttaaaaatggcaaagatatatctatttgtttagatgttgcggcaaatgaattaattaaaaaaggcaaatattcaattcattctaaaaattacataagtgttgatcaatcaattaaaaaatatttacagcttattaaaaaatatcaaataaaatcaatcga

SEQ ID NO: 279548 - DNA, 475 bp, Unknown; identical to SEQ ID NO: 279531
  Bacterial polypeptide expressing nucleotide sequence isolated from the Sargasso Sea

SEQ ID NO: 279549 - DNA, 450 bp, Unknown
  Bacterial polypeptide expressing nucleotide sequence isolated from the Sargasso Sea
tatgtcaaaaatactaaaagtccatggtttacaagtttttgactcaagaggtattccaactgtttcatgtaaaattactctagaaaatggattgagtgcaatatcaatggcaccaagcggagcatctacaggctctaaagaagcgcttgaacttagagacagtgaagagaggtatgctggtaaaggtgtatttaaggctattgataatataaataacgtattagggcctcttattgttggaaaagatccttgtcatcagaatgaaattgataatattcttatatcgtgtgatggaacagttgataaatcaaagatgggagctaatgcaatcctagctgtctcgcttgcagtggctatggttgcatcaaaattaaaacagaaaccgctttatgagcattttgcggaaatatataaggatatttctggaaatgtaccaaaaaaaactattcc

SEQ ID NO: 279550 - DNA, 215 bp, Unknown
  Bacterial polypeptide expressing nucleotide sequence isolated from the Sargasso Sea
gattcaagaggcaatccaacagtcgaggctgaagtcactttaaaagaaggcaccaccggactcgcatcggtgccctcaggcgctccaacaggaagcagggaagcggtggagtcaagagatggggacaaagatatacatctaggaaagggcgtaccagaggccgtcaaaaatatcaatacagaaatacaatctgcactcaaaaatcaggacatcaa

SEQ ID NO: 279551 - DNA, 112 bp, Unknown
  Bacterial polypeptide expressing nucleotide sequence isolated from the Sargasso Sea
tcactatctagaactgatagaactgcaaaatataatcaattattaaggattgaagaagcattacaaggtaaagcaaagtatgctgcatcttctatcttaaataataattgac

SEQ ID NO: 279552 - DNA, 259 bp, Unknown
  Bacterial polypeptide expressing nucleotide sequence isolated from the Sargasso Sea
atgagtataattactaaagtaattgctagacaagtttttgatagcagaggaaatcctacagtagaggctgaagttttttcaaaaaatattagctcatcttcaatttgtccttcaggagcctcaactggaagttttgaagcctacgagaaaagagatttaaataaaaaaaattataacggcaaaagtgtttttaaagctgtaaaaattataaatacaataattgcaaaaaaattaaaaaatcaaaatgttcatagccaag

SEQ ID NO: 279553 - DNA, 261 bp, Unknown
  Bacterial polypeptide expressing nucleotide sequence isolated from the Sargasso Sea
aatgggaaaaattaaaaatatcaaaagccgacaggtttttgatagtagaggcaaccctacggtagaagctgaaattttttcagataatgataatcacgttttagctatagttccttcaggcgcttcgacaggaacttatgaggcttttgagttaagagacaaagaagacaaaaactatcttggcaaaagtgtttttaaagctatagaaaatataaatggccctatattaaaagctttgaaaaatattgatcttagtgatca

SEQ ID NO: 279554 - DNA, 160 bp, Unknown
  Bacterial polypeptide expressing nucleotide sequence isolated from the Sargasso Sea
gctggtcagatcaagacaggtagcgctagtcggactgaccgagtctcgaagtacaatcaactcttaaggattgaggaggagcttggggaaagggcccgctacccgggaactagtatatggtcttcaatctcatcgcctactaagactggagcttcctgaa

SEQ ID NO: 279555 - DNA, 106 bp, Unknown
  Bacterial polypeptide expressing nucleotide sequence isolated from the Sargasso Sea
atgtcaagatctgatagggtagcaaaatacaatcaattgataagaattgaagaggaactagcgacacttgtgccaaataacaaattatcaaaatacattaactaat

SEQ ID NO: 279556 - DNA, 172 bp, Unknown
  Bacterial polypeptide expressing nucleotide sequence isolated from the Sargasso Sea
aatggcaaacattaaactggtaaaaggcaggcaagtttttgatagcaggggaaacccgacagtcgaagcagaagtttttttagataatggtatttcttcaactgctatttcaccatatggagcttcaacaggggcatttgaagcttatgagctaagagatcacaataataat

SEQ ID NO: 279557 - DNA, 130 bp, Unknown
  Bacterial polypeptide expressing nucleotide sequence isolated from the Sargasso Sea
agtaggtactaactcaaatcaaatcaaaactggatctcttgcaagatcagagagaatagcaaaatataaccaattaattcgtattgaagaagatcttggtagatcggcaaaaatgaataaaattgattaa

SEQ ID NO: 279558 - DNA, 334 bp, Unknown
  Bacterial polypeptide expressing nucleotide sequence isolated from the Sargasso Sea
atggtaaaaattaaaaatatcaaaggccgccaggtttttgatagtagaggcaatccaactgtagaagctgaaattttttcagataacatgtcttctttggctatcgttccatctggagcatcaacaggatcacatgaggcatttgaattaagagataaacaaaataagaattatttaggaaaaagtgttttaaatgctgttgaaaatattaatggccctatattaaaagctctaaaggaaattgatgttgaagaccaaaccaaaatagacaatattttaattgaacttgatagaacagagcaaaagaaaaaacttggcgcaaatgctatttagc

SEQ ID NO: 279559 - DNA, 235 bp, Unknown
  Bacterial polypeptide expressing nucleotide sequence isolated from the Sargasso Sea
tatgaataataaaattactaacgttttcgctaggtatgtcctagattcaagagctaatcctacagttgaagttgaaattactttggatgatggctcatggggaagagccgctgtcccttcgggtgcctcaacaggcactcttgaagcgcatgaattaagagataattcaaaagagtttaatggaaaaggagtcactaaggcagtagaaaatgttaataaagttatctcgaagggc

SEQ ID NO: 279560 - DNA, 208 bp, Unknown
  Bacterial polypeptide expressing nucleotide sequence isolated from the Sargasso Sea
attgctcaaactaataggttataatacaattatttctcatagatcaggtgacagtgaagatacttttattgcagatcttgcagttggtacaaattcaaatcaaatcaaaacaggttcactagcaaggtcagagagggtttcaaaatataaccagcttattaggatagaggagatacttggtaaaaattcaagaatgaataaaatttaa

SEQ ID NO: 279561 - DNA, 499 bp, Unknown
  Bacterial polypeptide expressing nucleotide sequence isolated from the Sargasso Sea
tttttataaggaagaaaaatatgaactcgatggtgaatcattatcgggtcaggaaatgattcaaaccctcaatgaatgggcttcatgttttccattggtcagcattgaagacggtcttcatgaggaggcctgggaattttggcctgaactgactcaagctcttgacaatctctgcctgacccttggggatgattttctctgcaccaatcctgggcgtattcgtaaagcggttaaatcctcggcctgtaatgcgcttctgttaaagttgaaccaggtgggcactcttagtgaaggtgccgaggcctgcagactggctcgtgaggcaggttggaaagtggtggtttcggctcgcagtggagagacggaagatgactggctggcagatttggcattcggatgggctgctgactatatcaaagtcggttcgattactcagtcagaacgcctggccaaatacaaccgactgctggaaatcgaatcatcctacgacttaagttag

SEQ ID NO: 279562 - DNA, 232 bp, Unknown
  Bacterial polypeptide expressing nucleotide sequence isolated from the Sargasso Sea
tatgtccacgattgttgacgttcatgcccgccagattctcgacagtcgcgggaaccctacagttgaggttgatgtctgtcttgccgatggaacattcggacgagccgcagtgccgtctggtgcaagtactggtgttcatgaggcatgggagaaaagggatgccgacaacagcacgtaccttggcaagggtgtccttgaagccgttgagaacgtgaacaaccggattgctgaa

SEQ ID NO: 279563 - DNA, 455 bp, Unknown
  Bacterial polypeptide expressing nucleotide sequence isolated from the Sargasso Sea
aatgaaaattcaatcaattgaaggttttgaagtaatagattctagaggaaatcctactgtggctgcaaaggtaaatttagataattctgcttcaggaatagctttagttccttctggagcttctactggtcagcatgaagcaaatgaaaagcgagatgaggatgagactagatatttgggtaaaggtgttcttagtgcagttgaatccatcaataaagaaatttctgggttgctcaaaggtaaagatgccgaagatctgttagccaacgatagaacccttatagaatctgatggaacagaaaataaaaataatttcggtgctaatgccattcttgcagtttctatggcatgcgcaaaagccgcttctaattcgaagaaaatacctttacataagtttatcaattcaaagtactctgagttttgcaataaagaggtagttgcttctttaccaattc

SEQ ID NO: 279564 - DNA, 277 bp, Unknown
  Bacterial polypeptide expressing nucleotide sequence isolated from the Sargasso Sea
atgaaaatagatcaattaaagttttatgagattatagattcgagaggtaatcctacagttgcttgcaagattttttctcgcaaattttcatctataagtatggttccttctggtgcatcaactggttcaaaagaagctcaagaaattagagataacgacaaaaaaagattctttggtaaaggacttaaagaagtaataaagaaaactgaacatcaaatatttgatgcaatttcccaaaaaaatttattggatcaacaagaaattgataatggtctga

SEQ ID NO: 279565 - DNA, 216 bp, Unknown
  Bacterial polypeptide expressing nucleotide sequence isolated from the Sargasso Sea
taagatttgctcaaaaaataggttataccactatcatttctcatagatcaggcgactcagaagatacgtttatagctgatttagcagttggaactaattcaaatcaaataaaaactggctcattatgtagatcagaaagggttgcaaaatttaatcagttattgagaatagaagctgaccttataaaaagcaataatatggctaaattgaaatgat

SEQ ID NO: 279566 - DNA, 1006 bp, Unknown
  Bacterial polypeptide expressing nucleotide sequence isolated from the Sargasso Sea
ttggaaggggagatcttcaactcccaggctgcacttgatcaccgtcttcaggaacttgatggaacttccgataagtcaaatctgggagcaaatacgttgctcgcagtttcattagcctttgcccgagccacagcatgttctagaaaaataagtttacatcagtatttttcggaaaaccttggagtgaaaccgggaatgccccgtttgacggtgaatctcttcagtggaggaaaacatgccggggaacaggtctcgatccaggacgtcctgattgttcccaatgcagaaagcataaaagactcactggcttcagtttatgaagtctatcaatcagcggcggatgggatgctggaacactttaacatgcgtgctttgacggctgacgaaggaggtctcgcgccatcctttgaaaatagcattcaagtgctcgaggaagcttgttccgccatcgagcgagccggtctgatacccgggcaggagatgcatttggcggtggatgtggcatccagccatttttttaaggaagaaaaatatgaactcgatggtgaatcattatcgggccaggaaatgattcaaaccctcaatgaatgggcttcacgttttccattggtcagcattgaagacggtcttcatgaggaggcctgggaattttggcctgaactgactcaatctcttgacaatctctgcctgtcccttggggatgattttctctgtaccaatcccgggcgtatccgtaaagctgttgaaacttcggcctgtaatgcgcttctgttaaagttgaaccaggtgggcactcttagtgaaggtgctgaggcctgcagactcgctcgtgaggcaggttggaaagtggtggtttcggcacgcagtggggagacggaagattactggctggcagatctggcattcggatgggctgcagactatatcaaagtcggttcgattacccagtcagaacgcctagccaaatacaaccggctgctggaaatcgaatcatcctacgattgaa

SEQ ID NO: 279567 - DNA, 127 bp, Unknown
  Bacterial polypeptide expressing nucleotide sequence isolated from the Sargasso Sea
aatggcaaaaatatcacagattatagggcgtgagatattagatagtaggggaaaccctacagttgaagcagatgttattttaaataacggtgttcagtcaagatattccgtgccttctggagcctca

SEQ ID NO: 279568 - DNA, 267 bp, Unknown
  Bacterial polypeptide expressing nucleotide sequence isolated from the Sargasso Sea
ctgtaccagaaaccttagatgctatcaatctatctaaaaaaactggatttggcacaattatttcacatagatcaggtgaaacagaagatacaactatagcagatttatctgtagcatgtggcgtggggcaaattaaaacaggtagcgcatcacgcactgatcgaatatgcaaatacaatcagcttcttagaattgaacaacaattattagataaatcaaattacccggggttagagcttttaggtatccgtgaaaagcaagtataaa

SEQ ID NO: 279569 - DNA, 135 bp, Unknown
  Bacterial polypeptide expressing nucleotide sequence isolated from the Sargasso Sea
ccattgccgatcttgcggtaggcttaggaattggacaaatcaaaactggagctccatgtagatctgatagagtagcaaaatacaatagattgctttggattgaagaagaaagcagcaatattttgcttaaatgaa

SEQ ID NO: 279570 - DNA, 779 bp, Unknown
  Bacterial polypeptide expressing nucleotide sequence isolated from the Sargasso Sea
catggcaaccgatttaacacgcattgaaaaactatcggcactggaaattctggacagccgtggaagaccgaccatcaaatgcttctgcacgttcgaaggggggatttctgcctcagcctctgtgccttccggggcttcaaccggcggatcagaagccgtggagttgagggatggaaacccgaaccgtttccggggtttggggtgcctaaactcagtttcaaacctccagcaagtacttgccccggctttggaaggggaaagcttcagttcccaggttgcacttgatcacagtcttcaggaacttgacggaacttccgataagtcaaatctgggagcaaataccttgctcgcagtttcattagcctttgcccgagccacagcatgttccagaaaaatgagtttgcatcagtatttttcagaaatccttggagtgaaaccgagaatgccccgtttgacggtgaacctcttcagtggaggaaaacatgcgggggaacaggtatcgatccaggatgtcctgattgttcccaatgcagaaagtataaaagactcactggcttcagtttatgaagtctatcaatcagccgcggatgggatgctggaacgcttcgacatgcgtgctttgacggctgacgaaggaggtctcgcgccatcctttgaaaatagcattcaagtgctcgaggaagcttgttccgccatagagcgagccggtctgaaacccaggcaggagatgcatttggcattggatgtggcatccagccatttttataaggaagcaaaat

SEQ ID NO: 279571 - DNA, 540 bp, Unknown
  Bacterial polypeptide expressing nucleotide sequence isolated from the Sargasso Sea
aatggataattcaactatatataagataattgctagggaaatcttggattctcgaggtaatccaacaatagaagtggacgtaacactatcggatggatctttagggcgagcagcagttccttctggcgcctctacaggggagcatgaagctgttgaattgcgtgataatgatactttacgatacttaggaaaaggagtaaaaaaagcagttaaaatagttaacacaactattgcaaatgaaataattggcttagatgcgttaaatcaaaaaaatatagatgaagctatgatttcattagatggaacttcaaataaatcaaagctaggtgctaattcaatacttggcgtttcaattgcagtggcaaaatctgcatcaaattctaagaagatgccattttatgaatatataaatcaaaataaaacctatactatgccgatacctatgatgaatataattaatggcggaagccatgctgataataatgtggattttcaagaattcatggttttcccaataggagcaaggtcattttcaaatgc

SEQ ID NO: 279572 - DNA, 715 bp, Unknown
  Bacterial polypeptide expressing nucleotide sequence isolated from the Sargasso Sea
aaaatcattactgataaaaaaaggtctatctactgctgtaggcgatgagggtggatttgccccaaatttgtcatcaagcgaagaggcaggtgacttattattagaagcaattcaaaaagcgggatttaagcctggtgaacaggtatctttagctttagatgctgctagtactgaattttatagtgatggtatttataaatatgaaggtaaaagtttaaatagttctgaaatgatttcatatctttcaaaattagttacaaattatccaatagtttcaatagaggacggtttagcagaggatgattgggagggttggtcagaattaaacagagaattaggaaataaagtgcagcttgtaggtgatgatttattcgtcactaatacagaaagattaagaaaagggattatggaaaaatctgccaattcaatcctaataaaggtaaatcaaattggaacattaactgaaactttggaagctattgagttagctaaaatgtctggcttcacaagtgttattagtcatagaagtggtgagactgaagatacaacaattgcagatttatctgtcgccacaagatcgggtcagatcaagacaggctctttgagtagaagtgaaaggattgcaaaatacaataggcttttaaaaattgaggaggaactgggaaatcaagcaagatttgctggagctttaggtttaggtcctaaaaatatatag

SEQ ID NO: 279573 - DNA, 695 bp, Unknown
  Bacterial polypeptide expressing nucleotide sequence isolated from the Sargasso Sea
aatgtcaaaaattaaaaaaattaaaggaaggcagattttcgatagtagaggtaatcccactattgaagttgatattacacttgaagatggtagtttcggtagggcatcagttccttcaggagcttctacaggagcatatgaagcttatgagcttagggatggagaacaaactttatctggaaaaactgtattaaaagccgttgagggtatcaatactgagatatgtaatgtgctttgtggaatggaagcatctgcgcaagaagaaatcgacaataaaatgattgagctagactcaacaaataataaatctcgattaggagcaaatgcgatattgggtgtttcactggcatcatcaagagctcaagctaattcagagggtaagcatttattcgaatatttaaactcatcagattcatatattttacctgttcctatgatgaatttgattaatggtggggcgcattctaataattcattatttattcaagaatttatgattatgccagtatctgcagaaacatttaatcatgcaattataactggttctgaaatttttcattcacttaaaaatttattagaaaatgatggatttagcactaatgttggagatgaaggtggtgtagcgccagatttaaaaacaagtgaagatgcattatcctatttgtgtaaagccattgaaaaagcgggttatagac

SEQ ID NO: 279574 - DNA, 442 bp, Unknown
  Bacterial polypeptide expressing nucleotide sequence isolated from the Sargasso Sea
atgattaaaaaatataaaattaaatcaattgaagatccttttgctgagaatgattggagtgcatggaataaactaatgaaatcaatcagcaaagttcaaatagttggtgatgatttgtatgtaacaaatttagaaagacttaaaaaaggatttttaaacatttcatctaatgcgatattgattaagttaaaccaaatagggacggtcaccgaaacaatagaggtgataaaatttgcacaaattattggtttcaaaactatcatttctcataggtcgggagatagcgaggatacttttatagctgatttggctgttggaactaattcaaatcaaattaaaacaggatcattagcaagatctgaaagagttgctaaatacaaccaattaatacgtatagaagaagaacttggaaaaaaggctagaatgaataaaattcattaat

SEQ ID NO: 279575 - DNA, 691 bp, Unknown
  Bacterial polypeptide expressing nucleotide sequence isolated from the Sargasso Sea
atggcaaaaatcaataaaataaaatctcgtcaggtttttgatagtagaggaataccaactattgaaactgaaatttatttatcaaatggaattaaaaattcagccattgttccatcaggtgcatctacaggaagccacgaagcttttgaattaagagatgtcgaaaataaaaaatatcttgggaaaagtgtttctattgctgttgaaaaaataaataatgaaatttcaaagaatctcacaggtttttctattaatgatcaagaaaaaattgacaaaacattaatcgaattagatggaacaaagcaaaagaaaagattaggtgcaaatgcaattttatcagtatccttagcttccagcaaagcttctgcttcatcgaaaaatatttctttatttaaaaatttaggaaatggtacaatactacctttacctttaatgaatataatcaatggcggctctcacgcaaataattcattaaggatacaagaatttatgattagaccagacaaagcaaagtcttttaaagaagcattaaatatttgttttttggtgatacaaaatcttaaaacaattctaaaaaaaaacgattactcaacaaacttaggtgacgaaggtggatttgcaccatctttatcaaataatgaggaagctatcgaatttattttaacatcaatagaaaaatcaggttataaaa

SEQ ID NO: 279576 - DNA, 850 bp, Unknown
  Bacterial polypeptide expressing nucleotide sequence isolated from the Sargasso Sea
aatgccaacgcctatgcttaatattataaatggaggcgctcatgcaaataataatttatcattccaagaatttatgattatacccgtaaactgtaaaacatttaccgagtctataaaaaaagcctctgaagtttttcatacactgaaacaaattttggagaaaaaaaatatttcaaccgctgttggggacgagggtggatttgcaccaaatttaaaaaacgaagatcaagcctgtggactcattaaagaagcaatcacaaaaacaggatataaattaggtaaggatttctttttgtcattggatgtagcagcatctgaattttatgtaaataaaaaatacaaaatcatatcagaggaaaaatcatattctagcagtcaattttcagattacttaatcaaattgtgtaaaaaatattctattatttctcttgaagatccatttgctgaagatgattggaaagcatggcaaaattttaatcatgattatggaactgaaatccaaatcgttggggatgacatatttactacaaatataaatttaatttcaaaaggtattaagatgaaggctgcaaatgcagttttaataaaagtaaatcaaattggcactttaactgaaactatgaaggcaatagaacttgctcaaatgaatggtttagaaattgttatttcacatagatctggagaaacagagaatacattcattgccgatctatcagttgcaacaaattccggtcaaatcaaaacaggttcaatgtctcgatcggataggatttctaaattcaaccaattacttagaatagaggaatattttgattccaaaaaatcattaaaaatcaataagttctactaa

SEQ ID NO: 279577 - DNA, 474 bp, Unknown
  Bacterial polypeptide expressing nucleotide sequence isolated from the Sargasso Sea
aattaaaaaaaccattttctgttgaaaattacttagaattaattaaaaaatatccaataaaatctatagaagatccatttaaagaggatgattggccatcatggaaaaaattatcaacgaattctcaaattcaaattgttggcgatgatttatttgcaacaaataaaacaagattaaaaaaaggcattgaagaaaaatctgccaatgcaattttgatcaaacctaatcaaattggaacagtaagtgaaactctagaagttattgatttagctcataacaatggatttaaaacaatcatatcacatagatctggcgactcagaagatacttttatagccgatttagcggttgcgacaaattcttcacaaatcaaaagcggttcattagctagatctgaaagggtagctaaatataatagacttttaagaatagaagaggaacttggaaattctgctaaaatggctaaaatctaaa

SEQ ID NO: 279578 - DNA, 314 bp, Unknown
  Bacterial polypeptide expressing nucleotide sequence isolated from the Sargasso Sea
aatggaaaaaattaaaaatatacatgcaagagaaattttagatagtagaggtaatccaacagttgagtgtgatgtagaattatttgatggatcatttggaagagcagccgttcctagtggagcatcaaccggaattcatgaagctttagaattaagagatggtgacaaaaatagatattttggaaagggtgtaaaaaatgcagttcaaaatattaatgaactcataaaaaaagatgttatcaatagaatttttgatagttataaagcatttgataaaaatttattatttttagatggtacagaaaataagtcaa

SEQ ID NO: 279579 - DNA, 392 bp, Unknown
  Bacterial polypeptide expressing nucleotide sequence isolated from the Sargasso Sea
tcacaatttacaaatcgttggtgatgacttgtatgttacatcctcagaaaaactaaaaaatggtatagttagaaaagctggaaatgctattttaataaaattaaatcaagttggtacttttactgaaactttaaacgcaattaatattgccaaagagtctaatttcaatactataatttctcataggtcaggtgaaacagaggatacttttatctccgatttatccgtaggtattaattctggtcaaataaaaactggttcagtttcaaggtcagacagagttgctaaatataatcgattacttagaatagaggaagagataggggataagtcagaatatctaggcaagaaaatattaaaaaaaataaataacggtgaaatcattgactaat

SEQ ID NO: 279580 - DNA, 835 bp, Unknown
  Bacterial polypeptide expressing nucleotide sequence isolated from the Sargasso Sea
aaattaccattatttaaatatttagaagtttcacaagcaaaacaaattcctttacccctcatgaatataataaacggaggaacacatgcaaataattcattagaaatacaagaatttatgattagaccagatagtgcaaaaagttttaaacaatgcatgcaaatgtctttcttaattattcaaaatttaaaaaaagaattggaaaaaatgaaaatttctacaagtgttggagacgaaggtggatttgcaccatctctcaaatctgatgatgaggctattgaactcattattaaatcaattaaatcaaacgggtttgaaccaggaaaggatatttctatttgtcttgatgtagccgctaatgaattaaaaaaacctaaaagtattgattattatttaaaattaattaaaaaatatcctattaaatcaattgaagatcccttttccgaggatgattgggagtcacataaaaaattaacagaaaaatcaaatattcaaatagttggcgacgatctttttgtaactaataaaacaaggttaaataaaggaataaaaaacaaatcagctaatgccattttaataaaaccaaatcaaattggcacagtaagtgagactttaaaaacaattagtcttgcacacaaaaatggatttaaaacaataatatcacacagatcgggcgactcagaagacacattcattgcggatctggcagttgcgacaaattcttcacaaattaaaacagggtcacttgcaagatctgagcgtgtatctaagtataatcgtcttataagaatagaagaggagcttggaaattcctcaaaaatggctaaaatctaat

SEQ ID NO: 279581 - DNA, 886 bp, Unknown
  Bacterial polypeptide expressing nucleotide sequence isolated from the Sargasso Sea
aattcaatccttgcagtaagtcttgcaactgctagagcatcagcaaatgctttagacattcccctatatagatatcttggagatccattatccaatcttcttccagtcccattgatgaatgtaataaatggtggtgctcatgcaccaaatagtcttgattttcaggaatttatgcttgttccacatggagttaataatttcagtgaatcattaagaatgggtactgaaatttttcactcattaaaatcattacttgatcaaaaaggtctatctactgctgtaggcgatgagggtggatttgccccgaatttgtcatcaagcgaagaagcaggagacttattattggaagcaattcaaaaagccggatttaagcctggtgagcaggtgtctttagctttagatgctgctagtactgaattttatagtgatggtatttataaatatgaaggtaaaagtttaaatagttctgaaatgatttcatatctttcaagattagtttctaattatcctatagtttcaatagaggacggtttagctgaggatgattgggagggttggtcagaattaaacaaagaattagggaataaagttcagcttgtaggtgatgatttattcgttactaatacagaaagattacggaaagggattatagaaaaatctgccaattcaatcctaataaaggtaaatcaaattggaacattaactgaaacattagaagctattgagttagctaaaatgtctggtttcacaagtgttataagtcatagaagtggtgagactgaagatacaacaattgcagatttatctgtcgccacaagatcgggtcagattaagactggctctttgagcagaagtgaaaggattgcaaaatataataggctttaaa

SEQ ID NO: 279582 - DNA, 499 bp, Unknown
  Bacterial polypeptide expressing nucleotide sequence isolated from the Sargasso Sea
aattcattctaaaaaatacattagcgttaataattcaataaataaatatttaaatctaattaaaaaatatcaaattaagtcaatagaagatccatttggtgaagatgattggaaagcttggactaaatttttaaataaatctaaaaataaaacacaaattgtaggagatgatctttttgttaccaatcttgagagattaaaagtaggttttctaaatttatcagcaaatagtattttgataaaattgaatcaaattggaactgttactgaaactttagaagtaattaaatttgcgcaattaataggttttaaaacaataatttctcacagatcaggagatacagaggatacgtttattgcggatttgactgttggtacaaattcaaatcaaatcaaaactggttcattggcaagatcagagagaatagccaaatacaatcaattaatacgtattgaggaagatcttggtagatctgcaaaaatgaataaaattgactaa

SEQ ID NO: 279583 - DNA, 898 bp, Unknown
  Bacterial polypeptide expressing nucleotide sequence isolated from the Sargasso Sea
tctactggaacatatgaagcttatgaaaaaagagatataaaaaataaaagatatcttggtaaaagtgtattaagcgctgttaatttaattaatacaaaaatttcaaaaaaactaaaaggcaatagtattcacaatcaagagagaatagacactttaatgataaacttagatgggacaaaacataaatccaatttaggtgctaatacaattttagcagtttctatggctgtaaaaaaattatcagctaaattaaaaaaaatacctttatataaaagtttcttaattaaaaaaaattttaaattaccttatcctttaatgaatattattaatggaggtgctcatgcgaataatggacttagaattcaagaatttatgattagacccgacaaggcaaatagcttttcagatgctataagaatttgttttttggtaataaaaaacctaagtataattttaaaaaataaaggtttatcaacttctgttggtgatgaaggtgggtttgcgccgatgattagtaataataatcaagcattagatttaatagttttggcaataaaaaaatcaggttttgttaatggaagagatgtttctatttgtttagatattgcagctaatgaattatttaaagaaaataaatattcaatacattccaagagcttcatttcggtaaaaaaatcaattttagaatataagaaaatgataaagaaatataaaattaaatcaatcgaagatccatttgcagaaaatgattggtatgcttggaataaattaatgagatcaatagataaagttcaaattgtaggtgatgatttatatgttactaatttagaaagattaaaaaagggttttttgaatatttcctctaatgcaattttaatcaagttaaaccaaatggaac

SEQ ID NO: 279584 - DNA, 904 bp, Unknown
  Bacterial polypeptide expressing nucleotide sequence isolated from the Sargasso Sea
atgcctaaaataacgaatataaaagcaagacaaataatagatagcagaggaaatcctactgttgaatgcgatatagagtttgaaaattctatctttggaagagctgcggttccaagtggagcatctactggagtgcatgaggctctagaattgcgagataatgataaatccaaatacaaaggtaaaggagttcttaaagcaataggaaatattaatgaaacaatttctaatgagctagttggaaaatcatttgaagatatttcttcttttgatgattttttattagaacttgatggtacggaaaataaatctaacttaggcgctaatgcaacacttgctgcaagcttagcttttgcaaaatgtttagcttcttctgaaggtcatgaattgtattcttttcttggtaaagaaaatacaatgaatcttccagttccaatgatgaacattattaatggaggatcacatgcagataacgatgttgatattcaagaatttatggtagctcctataggtgcaaataatttttcagaggcacttcaacatggttgcgaaatatttcattcattaaagtcacttttaaaatcaaaaggcttaaacacaaatgttggtgatgaaggtggatttgctcctaatattaatagttctagtgaggtcatagaaacggttttgaaatcagtggaggatgcaggttttaaacccggaaaagatatttatctttcacttgatgttgcgtcaactgaattttataaaaataataaatatgatttacagggagaaaaaattgttttgtcttctgatgagatgattaaatatttagagaaattggtaaatgcttatccaatttattctattgaagatggaatgtcagaggatgattgggatggttggtctaatttaacatcaa

SEQ ID NO: 279585 - DNA, 859 bp, Unknown
  Bacterial polypeptide expressing nucleotide sequence isolated from the Sargasso Sea
ttgtataagacattttttttaaaaaataattttcaattaccttatccactgatgaatattatcaacggtggagctcatgccaacaatggtcttagaattcaagaatttatgatacgaccagatagagcaaaaagtttctcagaagcaatgaggatttgttttgttgtaattaaaaacctaagtgatttaataaaaaacaaaggttattccacatcagttggtgatgaaggtggttttgcacctatgattagtagtaataaccaagctcttgatttgattatttcagcaattaagaaatctggatttgttaatgggaaagatgtttcaatttgtttggatgtagctgcaaatgaactatttaaaaaaaacaaatactcaatccattcaaaaagttttatttccgttgaaaaatcaatcaaagaataccaaaaaattattaagaaatataaaattaaatcaattgaagatccttttgcagaaaatgattggttagcttggaataaattaatgcgttctatcaaaaacgttcagattgtgggagatgatctttatgttacaaatcttgaaagattaaaaaaaggatttttaaatatttcatctaattcgatattaattaaacttaatcagataggtactgtttctgaaactctagatgttattaaatttgctcaaactatcggttataaaacaataatttctcatagatctggagatagtgaggatacattcattgctgatttagcagttggaacaaattctaaccaaatcaaaacaggatctttagcacgatcagaaagagttgctaaatacaatcaattaattcggattgaagaagaactggaaataaggcaagaatgaa

SEQ ID NO: 279586 - DNA, 823 bp, Unknown
  Bacterial polypeptide expressing nucleotide sequence isolated from the Sargasso Sea
ggcgagcacgccgacaacaacgtcgacatccaggagttcatggtgcagccggttggcgcatcgagcttcgccgaggcgctgcgcatgggcgccgagatcttccatcacctcaaggccgtgctcaaggcccgtggcctgaacaccgctgtgggtgacgaaggcggcttcgcaccgaacctggcctccaacgaagacgctctggctgccatcgctgaagccgttgccaacgccggctacaagctgggtgacgacgtgaccctggcgctggactgtgcatcgagcgagttctacaaggacggtcaatacgacctggccggcgaaggcaaggtattcagcggtgaaggtttcgccgactacctggcgggcctgaccgagcgttatccgatcatctccatcgaagacggcatggacgagtccgactgggccagctggaaagtcctgaccgacaagatcggtgccaaggtacagctggttggcgacgacctgttcgtcaccaacaccaagatcctcaagcgcggcatcgacgagaagatcggcaactcgatcctgatcaagttcaaccagatcggctcgctgaccgagaccctggaagccatccagatggccaaggctgctggtttcaccgccgtgatctcgcaccgcagtggcgaaaccgaggacagcaccatcgccgacctggccgtgggtactgccgccggtcagatcaagaccggttcgctgtgccgttccgaccgcgtttccaagtacaaccaactgctgcgtatcgaagagcagctcggcgccaaggcaccatacaagggccgtgccgagttccgcggctaac

SEQ ID NO: 279587 - DNA, 514 bp, Unknown
  Bacterial polypeptide expressing nucleotide sequence isolated from the Sargasso Sea
atggctaagattattaacgtgattggtcgcgagattatggattctcgtggtaacccaacagttgaagccgaagtgcatttagaaggtggttttatcggtatggcggctgcgccatctggtgcttctaccggtagccgcgaagcgctggaactacgtgatggcgacaagagccgttacttaggtaaaggtgtattaacggctgtggctaacgtaaacggccttatccgtgcagcgttaatcggtaaagatgcgactgcacaggctgaactcgatcaaatcatgatcgacttagacggcactgaaaacaaagacaagttaggcgctaacgcgattctggctgtgtctttagcggcggctaaagcggcagcagcattcaaaggcatgcctttatacgctcacattgcggaattaaacggcactcctggccaatacgctatgccagtgcctatgatgaacatcctcaacggtggcgagcaccctgataacaacgttgatatccaagaattcatggttc

SEQ ID NO: 279588 - DNA, 652 bp, Unknown
  Bacterial polypeptide expressing nucleotide sequence isolated from the Sargasso Sea
aatgagtaaaattaaaagagtcgttgccagacaggtatatgatagcagaggaaaccctactattgaagctgaagtattttctaacaatataagcgcatcatcaatttgtccgtctggtgcatcaactggaacttatgaagcgtatgagaaaagagacaaaaataataaaaaatatttaggaaaaagtgttctaaaaccagttgaaacagtaaataaattaatttcaaaaaagttaaaaaaccaaaatattcatgatcaagaaaaaatagatagcattcttataaaactagacggaactaaacaaaaaacaagattaggagcaaatacactgttagcagtttcaatggctgtaaaaaagttatcagcaaaattaaaaaaaataccactatacaaaaactttataattaaaaaaaactttaaacttccattccctttaatgaatattattaatggaggagctcacgcagataatggcctaagaatacaagaatttatgattagaccagataaagcaaaatcatttagtgaagctgttagaatgtgttttttggtaaataataaccttaaatcattattaaaaaataatgggcattctattaatgttggtgatgaaggtggttttgcacctatgataagcaacaatgaaagcgct

SEQ ID NO: 279589 - DNA, 862 bp, Unknown
  Bacterial polypeptide expressing nucleotide sequence isolated from the Sargasso Sea
ataaatcaaacttttggttcaaacacatttgtatcaacttctatggcttttgcgcatgcttgtgcaaatttacaaaatgaaccactttggaaatatttatctataaaggatgaattacaattacctttgcctgaaattcaaatatttggaggaggagctcatgcaagcaaagcaattgatattcaagattttatgataattccaattggtgcaaaaaattatttagaatcattagaaatgacctcattagtttatcatgcggcaggtaaaattttagatggaaaaggacttagaactggaatcgcagatgagggaggatattggccaaattttaaatccaatgaagagggctttgaattacttttacaatctattgagcttgcaggctttagaccatatgatgatataggtatttcagtagatattgctgcttctgaattttatgaaaacaaaaaatataatttaaaaaaagacaaccaaaatttaaattctgaagaatattttgaaattattaaaaattggattcaaaaatatcctatagtttcaattgaggatccttttgatgaaagtgataaatcttcattttctagacttcatcaaatgtttggtaaaaaaattcaaattgttggtgatgatttattagttaccaatgctaattttatttatgaagcgaaaaaattaaatttgtgcaatgctgttttaataaaacctaatcaaataggaacaatttcagaaacatataaagcagtaaaagctgcaaaagaaagtaatatagatcaaatcatatctgctagatctggagaaactgaagatactactataatgcatattgcagtcgcttggggtatagatcaaattaaag

SEQ ID NO: 279590 - DNA, 793 bp, Unknown
  Bacterial polypeptide expressing nucleotide sequence isolated from the Sargasso Sea
ctggaggctttggagctaagggacaataatgccgataattatgatgggaaatcagtattaaacgccatatcaaacataaatcttgaaatttcatccaaaattgaccccaattatgagttcacgcaagaatcattcgatcattttttaattgatttagatggtacaccaaataaggagagattaggtgctaatgcaatacttgcagcaagcattgcatttgcaaaagcaaccgcattaagtagaaatattccactatatcagtcacttacagatgaatcttcatatatgcttccaatacctatgatgaatattatcaatggaggctgtcatgctaataatcgcctagactttcaagagttcatgatattgcccattggctttgatcttatcagctcttctataaaagcaggagctgaaatattccattcattgaggaaatcacttgataagctcaaaatgtcaactgctgtgggtgacgagggtggttttgcaccagatttagatggtaatagagaggcattagaattaattttagaatcaataagtaaagctggatacaaacctggcgaggatatttttctcgctcttgatgtcgcaagcagtgaattttatcataatggccattatgagcttgcctctgagaatctcagtctcacatcaagtgagtttattaaatatctaactgatcttagagctgattatccgattatatctatagaggatggaattgctgaagatgattgggatggctggtttgatttaactaaagagctaggcatgaatactcaattag

SEQ ID NO: 279591 - DNA, 607 bp, Unknown
  Bacterial polypeptide expressing nucleotide sequence isolated from the Sargasso Sea
ggctgttatttctactggcctgaagatgaatgaagatattatgctttcattagatgtggcagcaacagagttttatattgatcataaatataatttaaatggagagaataaaatttttaattctgatcaaatgatagattatttaaaaaaattatcttcagattatccaatttattctattgaagatggattatcagaaaatgattgggaaggttggaaaaatttaactaatgaaataggaaaaaaaattcaattagttggagatgacctttttgttactaacataaataggcttcaggaaggaattgacaaaggtagtgcaaactcgattttagtaaaacttaatcaaattggcacacttactgaaacattaaatgctattaatttagcaaaaaaaaataactatacttctattatatctcatcgttcaggagaaactgaagatactactatttcagatttatctgtggctacttctgttggtcaaataaaaactggatctttgagtagaactgacagaaccgctaaatataaccaattacttagaattgaagagattttagaagataagtgttcttatgctggtagaaatatcttaattaattga

SEQ ID NO: 279592 - DNA, 838 bp, Unknown
  Bacterial polypeptide expressing nucleotide sequence isolated from the Sargasso Sea
atgtcaaaaattaaaaaaattaaaggaaggcagattttcgatagtagaggtaatcccactattgaagttgatattacacttgaagatggtagtttcggcagggcatcagttccttcaggagcttctacaggagcatatgaagcttatgagcttagagatggagaaccaactttatctggaaaaactgtattaaaagccgttgagggtatcaatactgagataagtaatgtgctttgcggcatggaagcatctgcgcaagaagaaatcgacaataaaatgattgagctagactcaacaaataataaatctcgattgggagcaaatgcgatattaggtgtttcactggcatcatcaagagctcaagctaattcagaaggtaagcatttattcgaatatttaaactcatcagattcatatattttacctgtccctatgatgaatttgattaatggtggggcgcattctaataattcattatttattcaagaatttatgattatgccagtatctgcagaaacatttaatcatgcaattataactggttctgaaatttttcattcccttaaaagtttattagaaaatgatggatttagcactaatgttggagatgaaggtggtgtagcaccagatttaaaaacaagtgaagatgcattatcttatttgtgtaaagccattgaaaaagcgggttatagacttgaagaggatatagtctttgctctagatattgctgcatcagagttatataatgatggccaatattttttatctaatgataatgcatctagcagtgatgatttaattgatatgtgggaagatctaacaaaaaaatacccaattt

SEQ ID NO: 279593 - DNA, 901 bp, Unknown
  Bacterial polypeptide expressing nucleotide sequence isolated from the Sargasso Sea
tctgcaaaaataaaaaagataccactttataaaagttttattgttagaaaacactttaaacttccttatccattaatgaatataattaatggcggagcacatgctaataatggacttcggattcaagagtttatgattagacctgataaagcaaaaaattttgctgatggtgtaagaatgtgctttcttgtcattaatagtttgcgttcactcattaaaaaaatgggtcattcaacttctgtaggagatgaaggagggtttgcaccaatgataagtgataatgaaagcgccttaaagctaatagtccaagcgatacataaagcaggttttgctaatggaaaagatgtatcaatatgtttagatgtagccgctaatgaattaataaaaaaagataaatactcaattcattcaaaaaaatatgtttctgtagacaaatcaattcagaaatatcttaatctaattaagaaatataaaattaaatctatcgaagatccttttggtgaaaatgactggtcagcatggacaaaatttgtaagtaaaacaaaaaataaagtccaagtagtaggagatgatctttttgttacaaatctagaaagattaaaagtaggctttttaaatttatctgcaaattctattttaattaaattaaatcaaataggaacagtaacagaaactttggaagttattaaatttgcaaaattgattggttataaaacaattatttctcatagatctggtgatagtgaagatacatttattgctgatttagctgttggaaccgactctaaccaaattaaaacaggatcattagctagatccgaaagagtatcaaaatataaccaacttattcgcatagaagagcagcttggaaaatcttccaaaatgaataaagttaattaat

SEQ ID NO: 279594 - DNA, 236 bp, Unknown
  Bacterial polypeptide expressing nucleotide sequence isolated from the Sargasso Sea
ccaaattggaacaatatcagaaacacttgaaacgatttctattgccttaaataacgactatcaaaatattatttcgcacagatctggagagaccgaggactcatcaatttctgatctcgcagttggaacaggagccggtcaaattaaaacgggagcaccatgcagatctgaaagggttgcaaaatataataggctttattggattgataagaaaaatagcttttcatatggctgat

SEQ ID NO: 279595 - DNA, 886 bp, Unknown
  Bacterial polypeptide expressing nucleotide sequence isolated from the Sargasso Sea
aatgaaagatcgcatcatttcaattgaagcaatggaaatattggattcacgtggcaaccctacaattcgaacaagggtaagcctggaaaacggagttttcggaactgcttcagtaccttccggagcatcaactggagaaaatgaggcccttgaactccgtgatgatgacaagagccgttacggtgggaagggtgtgctcaaggccgtggaaaacgtgaacagggaaattgctccggaactgctgggaatgacccctgataggcaggctgaaattgacaggatgatgcttaagcttgacggtacttctgcaaaaagcaaattgggagctaatgctatactaagtgtttccatggcaacggcagccactgcagcaaagtcgcacaatgttcctctgtacgcttatctgggaggagtttcagggtttagactgccagtgcctatgatgaatatcataaatggcggagaacatgcggacaatagtgttgatttgcaggaattcatggtaataccttccggggccccttctttccgggaagccctgcgttatggtgcggaaacatttcatgccctgaaaaagattttgcaatcaaaaggctatgctactagtgtaggtgacgaaggcggttttgccccaaatcttaaaagcaatgaagaagcctgcgaagtcattatcgaagcaattcaagcagcaggttatgaggccgggaaagacattttcctggctcttgacgcggcagcttcatcattttgtaatcaaggctcttatgtttttcagaaatccggatcagggacaaaaaactcaacagagatgctgggattttacggaagcatggttgaaaaatatccaatagtatccatagaagatcccatggatgaacatgactgg

SEQ ID NO: 279596 - DNA, 286 bp, Unknown
  Bacterial polypeptide expressing nucleotide sequence isolated from the Sargasso Sea
cttaaatgtatcagcaaattcaattttaattaaattaaatcaaattggtactgtaacagaaacacttgaagttattaaatttgcacaattaataggatataaaacaattatttcacatagatcaggtgaaagtgaagatacttttatcgccgatcttgcggttggtacaaattcaaatcaaattaaaacaggttctcttgctagatcagaaagagtagcaaaatataatcaacttattcgtatagaggagaaacttggaaaatattcaaaaatgaataaaatttaa

SEQ ID NO: 279597 - DNA, 370 bp, Unknown
  Bacterial polypeptide expressing nucleotide sequence isolated from the Sargasso Sea
gcagctggtgggtgatgacctgttcgtgaccaacaccaagcgcctgcagcagggcattgacaacagcacggcgaactcgatcctgatcaaggtgaaccagatcggatctctcaccgaaaccctgcaggcgatcgatctggctgggcgttccgggtacaccagcgtgatcagccaccgcagcggcgaaaccgaggacaccaccatcgccgacctctccgtcgccacccgcgccggtcagatcaagaccggttcgctcagccgcagcgagcgcgtcgccaagtacaaccagctgctacggatcgaggacgaactgggcagccaggcggtttatgccggagctgtgggccagggtccccggggtaacgcctga

SEQ ID NO: 279598 - DNA, 668 bp, Unknown
  Bacterial polypeptide expressing nucleotide sequence isolated from the Sargasso Sea
ttccacctctgttggagatgaaggtggttttgcacccatgataagtagcaataaccaagctcttgatttagttgtgacagcgataaaaaaatcaggatttatcaatggcagagatgtttcaatatgtttagatgtagctgcaaatgaattatttaacaaaaataaatattcaattcattctaaatattacatttcagttgaacaatctatcaaagaatatcaaaaaattattaaaaaatataaaatcaaatccatcgaagacccatttgctgaaaatgattggctcgcatggaataaattgatgagatcaattaataaagttcaaatagtgggggatgatctttatgttacaaatttagaaagactaaagaaagggtttttaaacatttcctcaaattcaattttgattaaattaaatcaaattggaacagtttcagagacattagatgtaatcaaatttgcccaaaccattggttataaaacaataatttctcaccgatctggtgatagtgaagatacttttattgcagatcttgcagttggaaccaactctaatcaaattaaaactggatctttagcaagatctgaaagagtagctaaatataatcaattaattcgtattgaagaagaacttggaaaaaaagtgagaatgaataaaatcaattaat

SEQ ID NO: 279599 - DNA, 857 bp, Unknown
  Bacterial polypeptide expressing nucleotide sequence isolated from the Sargasso Sea
aatgtcaaaaattaaaaaaattaaaggaaggcagattttcgatagtagaggtaatcctactattgaagttgatattacacttgaagatggtagtttcggtagggcatcagttccttcaggagcttctacaggagcatatgaagcttatgagcttagagatggagaaaaaactttatctggaaaaactgtattaaaagccgttgagggtatcaatactgagataagtaatgtgctttgtggaatggaagcatctgcgcaagaagaaatcgacaataaaatgattgagctagactcaacaaataataaatctcgattaggagcaaatgcgatattgggtgtttcactggcatcatcaagagctcaagctaattcagagggtaagcatttatacgaatatttaaactcatcagattcatatattttacctgttcctatgatgaatttgattaatggtggagcgcattctaataattcattatttattcaagaatttatgattatgccagtatctgcagaaacatttaatcatgcaattataactggttctgaaatttttcattcacttaaaagtttattagaaaatgatggatttagcactaatgttggagatgaaggtggtgtagcgccagatttaaaaacaagtgaagatgcattatcttatttgtgtaaagccattgaaaaagcgggttatagacttggagaggatatagtctttgctttagatattgctgcatcagagttatacaatgatggccaatattttttatctaatgataatgcatctagcagtgatgatttaattgatatgtgggaagagctaacaaaaaaatacccaattttctcaattgaagaccctt

SEQ ID NO: 279600 - DNA, 385 bp, Unknown
  Bacterial polypeptide expressing nucleotide sequence isolated from the Sargasso Sea
tactgaattagtaggtgataaagtacagttagtaggagacgatttatttgttacaaacgtagaaagattatcaaaaggaattgcaaataatacggccaattcaatcttgattaaagtaaaccaaatcgggactttatcagaaacaattgctgctgtaaacatggcacacaatgctggttacacatcagtgatgagtcaccgttctggtgaaacagaagataatactattgcagatttagcggtagcattaaactgtggacaaattaaaacgggttcggcttcacgttctgatagaatggcaaaatacaatcaattattaagaatcgaagaagaattagctgatgtagcttatttccctggaatgagagcttttaagcagaaataa

SEQ ID NO: 279601 - DNA, 820 bp, Unknown
  Bacterial polypeptide expressing nucleotide sequence isolated from the Sargasso Sea
ccaatttcatttcaagaattcatgattgtaccaattggagcaaagagttttactaatgctctacaaataggtaatgaagtttttcataatttaaaatctatacttaaatctagaggtctttcaactgctgtaggtgatgagggtggatttgctccagagttaaaaggtacggaggatgctataaatacaattattgaagctgtaaataaagcgggatatgaaatgaaaaaagatgtaatgttagcattagactgcgcttcatctgagttttataaagatgggtattatgattattcaatttttgaaaaagataatctcacaaaattaaattcaaatgaacaagttgattttttagttgatttatgtgaaaaatatccaataatttcaatcgaggatggtatggatgagaatgattgggagggatggaaacttctaacagaaaagattggagacaaggttcagcttgtaggtgatgatctttttgtaactgatataaagaggttatctaaaggaataaacgaaaatattggcaattctattttaattaaatttaatcaggttggttctctttctgaaacaatatcctcaataaatttagctgctaaaaataattttacatctgttatttctcatagatctggtgagacagaggattctacaattgcagatctctgtgtggcatttaatactgggcagattaaaactggatcaatgtctaggagtgataggatgtctaaatataaccaactattaaggattgaagaagagctcggagataatgctaaatttcttggtaaagatgcatttaatgtaaaccttt

SEQ ID NO: 279602 - DNA, 832 bp, Unknown
  Bacterial polypeptide expressing nucleotide sequence isolated from the Sargasso Sea
agaacacgcaaacaatgacttagatatacaagaatttatgattatgccagtctcagcacgcaattttcacgaagcttgccagatgggatgtgaaatctatcacgttttaaaagaaacattacagtcacgtggcttttctacagcagtgggcgatgaaggcggattcgcacctaacctatcgtctacttatcaaacttttgatttattaatgtcagcaatttcaaaaactggactaaagccaggaaacgatatttatttgtcgattgattgcgcgtccactgaatattttaatggacaacattataaattagaaggtgatgatttaagtttaacagcaccagaaaatactgattttctcacacaactaattaatagttatccaataatttccatagaggacggaatgtcagaggacgattggtatggttgggaactactgtcagaaaagattggaaacaggtgccatttagttggagacgacctatttgtaacaaataaagaaagattacaaaagggaatcgataataaagtcgcaaactcaatattgataaaacctaatcaaattggaaccttaactgaaactataaatactgttaagctggcaaaatctaacggatattcgacaatcatgtcacatcgctctggagaaaccgaagatactacaatttctgatctggcggtcggtttaaattgcggacaaattaaaacaggatcagtaagtcgttctgatagagttagtaagtataatcagttgataaggattgaagaagaattgggatcacaatcaaagtattatggtgagaaaattttaaactcattcaaatattcttaa

SEQ ID NO: 279603 - DNA, 97 bp, Unknown
  Bacterial polypeptide expressing nucleotide sequence isolated from the Sargasso Sea
tgaccgtgttgctaagtacaaccagttacttcgtattgaagaagcactaggtgacgctgctacttacaaaggccgtagcgaaatcaaaggtcaataa

SEQ ID NO: 279604 - DNA, 949 bp, Unknown
  Bacterial polypeptide expressing nucleotide sequence isolated from the Sargasso Sea
attagaattaagagatggagatttaaaaagatattttggtaaaggtgttaaaaaagctgttaaaaatattaataaattaattggtgataatgtaataaataaagaatttgataattatagagcatttgatgatcatatactatctttagatggaactgaaaataaatctacaattggagcaaatgcgactcttgccgcaagtctagcttttgctaaaagtttatccaatcaagcatcgcaagactttttttcttatatagcagaaagtaatgaatttatattaccagtacctatgatgaatattataaatggtggagtacatgctgataatgacgttgatattcaagaatttatgattgcacctgcaggagctccaaatttttcagaagcactaaggtatggagttgaagtttttcattcattaaaatctattttaaaatcaaagaacttaaatacaaacgtaggtgatgaggggggtttcgcaccaaatattaaaagttcttctgaagtaattgagataattttaagtgctgtagataaaactggtttaaaaattaatagtgatatcattttatcattagatgttgcatctactgagttttataaaaacaaaaaatatgaattgagaggtgaaggtaaaagtttatcttcagatgaaatggtcaattatttagaaaatttatcaatcaattatccaatttattctattgaggatggaatgtcagaggatgattgggatggatgggtaaaattgactgaaaaaattggtgataagatacagcttgttggtgatgatctttttgtaacaaatattaaaagattaaaaactggaatagaaaaaaaagctgcgaatgcaattttagtaaagctaaaccaaataggtactttatctgaaacaattgatactatcaaattaggaaaagatcataattattcttccattatatct

SEQ ID NO: 279605 - DNA, 763 bp, Unknown
  Bacterial polypeptide expressing nucleotide sequence isolated from the Sargasso Sea
atggaaaaaataaaaaatatacatgccagagaaatattggatagtagggggaatcctacagtagaatgtgatgttgaattgcaaagtggatcatttggtagagctgcagtgcctagtggtgcttcgacaggtattcacgaggctcttgaattacgcgatgatgatcaaaatagatatttaggcaaaggtgttaaaaaagctgttcacaatattaataagttaattaaacaggatgttgttggtaagagctttgataattataaagcttttgataaaacaatattgagtctagacggtacagaaaataagtccaatattggagccaatgcaacccttgcagcaagtttagcctttgctaaaagtttagcggatcttaattcaactactttttatgaacacattgctgaaaataataattttttattaccagtgcccatgatgaatataatcaatggtggatctcatgctgataatgatgttgatattcaagagtttatgatagctccaatcggagcaactacattttctgaatcaataagatatggatgtgaaatttttcattcattaaaatcaattttaaaatctaaaaatcttaacactaatgtgggtgatgagggaggatttgctccaaatgttaatagttcagctgaggtaatagaaattattttaactgctgtagaaaaagctggtttaaaaataaatgatgacatacttttatcacttgatgttgcttctacagaattttataaaaatgataaatatc

SEQ ID NO: 279606 - DNA, 364 bp, Unknown
  Bacterial polypeptide expressing nucleotide sequence isolated from the Sargasso Sea
atggcaaaaattaaaaagatcaaaggccgccaggtttttgatagtagaggaaatccaacagttgaagctgaagttttttcacaagatggtcattacgcatcggcaatagttccttcaggagcttcgacaggaacacacgaagcatttgagttaagagataaaaataataaagattatttaggaaaaagcgttttcaaggcagtagaaaacatcaatggtccaataacaaaagccttaaaaaatattgacattggtaatcaaaaaaaaatagataaaactttaattgatttagataatacagagcaaaagaaaaaacttggagcaaatgcaattttagctgtttccatagcatcttgtaagttag

SEQ ID NO: 279607 - DNA, 911 bp, Unknown
  Bacterial polypeptide expressing nucleotide sequence isolated from the Sargasso Sea
agaagttgatgtttttttagaagatggtaattatggacgggcagctgtaccatctggtgcctctacaggagagcatgaggctgttgaattacgagataatgacaataatagatataatggtaaaggtgtattaaaagctgtagccaatgtaaacgagaaaattagtaaagcacttataggtgctaatatcaatgaccaattaaatatcgatgagactatgattgatctagatggaacaaaaaataaatctagaataggtgcaaatgctattctcggggtctcgctagctgcaataagagctgcctctaaagcaaataatgtcccactttataaatatcttgggaataagaaagatttgaaaatgccaatgccaatgatgaatattttaaatggtgggagtcatgcaaataacactgtagatatccaagaatttatgatattcccatttggagcgtctactttttcaaatgctctccaaattggaacagaaattttccacaaattaaaatatgaactacatcaaaaaggattaaatactgctgttggcgatgaagggggttttgctccaaatttaaactcaaatgaagaagccatagaaataatattaaaatctatagaaaaggctggatataaacctggagaagaagtatttatcgcattagatgtagcggcaagcgaaatatttgataatgggaagtataatctaaagtctgaaaataaagcattctcatcgaatgaaatggtagattatttagagttattatctaataaatacccaataatttcaattgaagatggactagatgaaaatgactggagcgggtggtctaaccttaatgaatctcttggtaaaactgtacaaatagttggtgatgacttaacagtcacaaatattgaaaagctccaaaaag

SEQ ID NO: 279608 - DNA, 856 bp, Unknown
  Bacterial polypeptide expressing nucleotide sequence isolated from the Sargasso Sea
aaattaaaaggacaaagtatccataatcaagaaagaattgatgctttattaattaacttagatggtacaagacaaaaaactaacttaggagctaatgcgatgttagcagtttctatggctgttaaaaaactatctgcaaaagcaaaaaaattacctttgtataaaactttttctcaaaaaaataactttcaattaccttatccattaatgaacattattaatggtggagcgcatgcaaataatggtcttagaattcaagagtttatgatcagacctgatcgagcaaaaagtttttctgaggcgatgcggatttgtttcgttgttattaaaaacttaagtaaattaattaaagataaaggtttatcaacttcagtaggtgatgaaggtggttttgcacccatgatcagcagtaacaatcaagctttagatttaattgtgagtgcaattaaaaaatcaggatttattaatgggaaagatgtttctatttgtctggatgtagctgctaatgaattatttaaaaagaacaaatactctattcattcaaaaagttatatttcagtggataaatcaattaaagaatatcaaaaaattattaaaaaatataaaatcaagtctattgaggatccatttgctgaaaatgattggtttgcatggaataaattaatgaaatcaataaaaaaagttcagattgttggagatgatttgtatgtaacaaatcttgaaagattaaaaaaaggtttcttaaatatttcttcaaattctatcttaataaaactaaatcaaattggtactgtttcggaaacacttgatgtgattaaatttgcacaaacaattggatataaaaccaatcatatct

SEQ ID NO: 279609 - DNA, 239 bp, Unknown
  Bacterial polypeptide expressing nucleotide sequence isolated from the Sargasso Sea
agcagtacaattagcaaaaaatgttggatttggagcaataatatctcacaggtctggtgagacagaggacacgatcatctcagatttttctgttgcgatgggaatgggacaaatcaaaactggctcattatcaaggagcgatagagtcgctaaatacaaccagctaattagaatagaagagcaattgggtgataaagcaaaatacgccactatggactttttgggaatggctagatgag

SEQ ID NO: 279610 - DNA, 808 bp, Unknown
  Bacterial polypeptide expressing nucleotide sequence isolated from the Sargasso Sea
gataatgaagttgattttcaagaatttatgattttaccaataggatttaagtcattaactgaagctttatcttctacacactctgtaataacaaatattaagaaagaattaaaatctagatctcttaatactaatcttggtgatgaaggaggatttgctcctaatttaaaatctcatctagatgtattagacctaatatgtgactcaatttcaaaagcaggatataaactaaatgatcactttaaaatctcactagatgcagcctctagtgaattttattcaaatggaaaatataactttgagggtaactcttattcaactgatgaaatgatcagtgtttatgaaaatatatgtgataaatatccaatattttcaattgaagacgcacttaatgaagaagattatgagggttgggtgaaaataacaagtaaacttggtcctaaaatacgtttagttggtgatgacctttttgtaacaaatatacaaaaattaaaaacaggtattgatgataaacaagctaatagtattttaataaaattaaatcaaattggtacagtaacagaaactctagaagctattaaattagcaacagaaaataattttgcttctataatgtctcatagatcaggagaaacagaggattcttttatatcagatttagcagttgcatcacgttgtcctttaattaaaacaggctcattggctagatcggatagagttgcaaaatataatcagttacttagaatatcagaaaatgataaaattcaagggtatgctggtgaattaagtgaagtttttaaaagctaat

SEQ ID NO: 279611 - DNA, 412 bp, Unknown
  Bacterial polypeptide expressing nucleotide sequence isolated from the Sargasso Sea
atggaaaaaataaaaaacatacatgcaagagaaatattagatagtagaggaaaccctacagtggaatgtgatcttgaactacaggatgggtcatttggtagagctgctgtaccaagtggtgcttcaacaggtattcatgaagctttagaattacgtgatggagatcaaaatagatatcttggcaaaggggtaaaaaaagctgttcaaaatattaacgaaatgcttaaaaaagaggttgttggcaagaattttgataattatagagtttttgacaagacattattgaacttagatggaacagaaaataagtctaattttggagcaaacgcaacgcttgcggcaagtttagcttttgcaaaaagtttagcaaatcatttttccactcctttttatcaacatattgctgaaaatg

SEQ ID NO: 279612 - DNA, 730 bp, Unknown
  Bacterial polypeptide expressing nucleotide sequence isolated from the Sargasso Sea
gcgtttgagaagagagataagaacaacaaacgatatttaggaaaaagtgttttagttgcaattaatttagtcaatacgaaaatttcaaaaaaattaaaggggcacaatgttcataatcaagagagaatagactcactaatgattaatctagatggaacaaaacaaaaaaataaattaggagctaattcaattttagctgtctctatagctgtaaaaaaactttctgccaaattaaaaaagatacctttatataaatcatttttaatcaaaaataatttccaattaccatatccattaatgaatataattaatggtggagctcatgccaataatggtttgaggatacaagagtttatgattagacccgataaagcgaaaaatttttctgaggcaatgagaatttgttacttggtgattaaaaaccttagtaagattattaaaaataaaaatttatctacatcagtaggtgatgagggtggttttgcaccaatgattagcagtaacaatcaagctttagatttgattgtatcagctataaaaaaatcaggatttgtaaatggaaaggatgtatcaatttgtttagatgtagcagctaatgagttgtttaaaaaaaataaatattcaattcattcaaagaaatacttatcagttaataaatccattcaagaatataaaaaattaattaatagatataaaattaaatctattgaagatccttttgctgaaaacg

SEQ ID NO: 279613 - DNA, 820 bp, Unknown
  Bacterial polypeptide expressing nucleotide sequence isolated from the Sargasso Sea
tatgagtgaaattattggtatgcaggcaagacagattctcgattcccgtggaaatccgactcttgaagttgatgttatgttggaaagtggcgctatgggaagagcagccgttccctcaggagcctcaacaggttctcgtgaagcagtggagttgcgtgacggtaatgcaaaagtatttatgggtaaaggggttcaaaaagccgttaaaaatgtaaatagtaaaattgctgcagaaattattggcatagaggttaccgaacaggttttgatagatcgattgatgattgaaatggatggcagttctaataagagcaaacttggtgcgaatgcaaccttgggggtttcgctagctgtagcacaggcagcttccagcgatttagatttacccttatttcaatatattggtggcagcaacgccaaagagttgccagtgccgatgatgaatgttttaaatggtggtatgcatgccgataacaatgttgatattcaggagtttatgattgttccagttggcgccaaaagtttttcagcagcgttgcaaatgggagcagagatttttcatcatttgaaaggggttctgaagaaaggtgggtttaatacctctgtgggtgacgagggtggttttgctcctgacttgcagtccaatgaacaggcgattgaaattttaatcaaagcagtaaaaagcgcaggttatgcaattggtaaagacattcttattgctctagacgttgcagcgagtgaattatattcaaaaaataaatacacccttgctgcagaaaataacgccaagctttcatcatcgcagatgatagattatctt

SEQ ID NO: 279614 - DNA, 368 bp, Unknown
  Bacterial polypeptide expressing nucleotide sequence isolated from the Sargasso Sea
aatgaaacaaaaaacaaaaacacaaataataggtgacgatctttttgtaactaatcttgaaagattaaaaataggcttccttaacttatccgcaaacagtattttaataaaattgaaccaaattgggaccgtaaccgaaacattagaagtaataaaatttgctcaacttattggttttaaaacaatcatatcccatagatctggtgatactgaagatacatttattgcagatttagcagtaggtaccaattcaaatcaaatcaaaacggggtctcttgcaagatcagagagaattgcaaaatataaccaattaattcgtattgaagaagaccttggtagattggctaaaatgaataaaattgactaat

SEQ ID NO: 279615 - DNA, 872 bp, Unknown
  Bacterial polypeptide expressing nucleotide sequence isolated from the Sargasso Sea
tttggatttagatggaacggaaaataaatctaatataggagcaaatgcaacgcttgcagcaagtctagcttttgctaaaagtttggcagatcatacatcaactactctctatcaacacattgcagaagatgataattttttattacctgtgccgatgatgaatattattaatggtggatctcatgcagataacgatgttgacattcaggaatttatgattgcgccagttggagcatcttcattttctgaatcattaagatttggttgtgagatttttcactcattaaaatcaatattaaaatcaaagagcctcaacactaatgttggcgatgagggtggctttgctccaaatgtaaatagctctgcagaagtaatagaaattattttaagtgctgtagaaaaggctggtttaaaaattaatgatgatattctcttatccctagatgttgcctcaacagaattttatcaaaataataaatacgaactaaagggtgaaggacaaacactgagttctgatgaaatggtcagctatattgaaaatttagcaaacaattttcctatttattctattgaggatggcatgtccgaagatgattgggatggttggattgacttaacaaatagaattggaaataaagttcagttagttggtgatgatctttttgtaacaaacatcaaaagattaaaaacaggaattgaaaaaaatgctggaaatgcgattttagtaaaactaaatcaaattggtactttatctgaaacaatagatgctattaatcttggaaaaagaaataattttaattcaataatttctcatagatctggcgagactgaagatactactattgcagatctttctgtagctgtgtctgccg

SEQ ID NO: 279616 - DNA, 329 bp, Unknown
  Bacterial polypeptide expressing nucleotide sequence isolated from the Sargasso Sea
caagatcctgaagcagggcatcgagaagggtgtgggcaattccattctgatcaagttcaaccagattggcagtctgtccgagactctggacgctatcaagatggctcaggacgccggctacacggcggtgatttcccaccgttccggtgaaaccgaagataccaccattgctgacctggcggttgctacctgtgcaggccagatcaagactggttctctgtgccgttctgaccgggttgccaagtacaaccagctgctgcgcattgaagaagcgctggaaggcaaggcaccttaccgcggcctgagcgaaatcaagggtcagggctgag

SEQ ID NO: 279617 - DNA, 820 bp, Unknown
  Bacterial polypeptide expressing nucleotide sequence isolated from the Sargasso Sea
atgacattaataaaatctattcatgcaagacaagtatttgattctcgtgggaatcctaccgtagaagttgacactattttagataatggtataatggggcgtgcagccgtgcctagtggtgcctcaacaggagaacatgaagccgttgaattgcgtgataataaaaacagctatatgggcaaatcagtatttacagcagtgaataatgttaataaaattatttctcctgaatttataggcaaaaatcctaataattatcaagatttagatttagcattaattaatctagatggtaccgataataaatccaatctaggtgcaaatgcattgttaggagtttcaatgtcaattgttcaagctgcttcaaagctaaataaacttccattatatgattatttacatgatggttcagaatacatattaccagtaccaatgatgaatattattaatggaggcagtcatgctgataataatgtagatatacaagagttcatgatatatccaaatggggcagattcatttgcacaatcaatgcaaatgggtagtgaaatttttcataatttaaagaaaatattaagggataaaaatctcaatactgctgtaggtgatgaagggggatttgcaccagatttaaaatcaaatgaagaggcaattgaaattataattaatgcaattgataagtctaattataaaattggagaggatataagtattgcattggatgttgctgcaagtgaattatataatcctgaaacaaaaaaatatgaattaaaatctgaaaatttggaacttagctcttatgacatgattcaatattata

SEQ ID NO: 279618 - DNA, 381 bp, Unknown
  Bacterial polypeptide expressing nucleotide sequence isolated from the Sargasso Sea
aatgcctaaaatcaaaaaagtcaaagcaagagaaattattgatagtcgtggaaatccaacagttgaatgtgatatttatttgtcagatgaagtttttggaagagctgctgttccttcaggtgcttctacagggatgcatgaggctattgaacttagagatcaagatcaaaaaagatatggaggaaagggggttttaaaagcattgtccaatataacagaaaacatatctcctaaaatacttaataaagaatttaaaaatattgaaaattttgatgaatttttaatttccacagatggaacgaaaaataaatccaaattaggggcaaacgctactttggcactaagtttggcttttgctaaatcgcttgcagtttatgaaaa

SEQ ID NO: 279619 - DNA, 563 bp, Unknown
  Bacterial polypeptide expressing nucleotide sequence isolated from the Sargasso Sea
agatgttgcagccagcgaattatatgaaaatggtgaatatagtttaatgtcagaaaataaagctttttcatcttcagaaatgataagctacctagaggcattagctaaaaaatatccaattatttcaatcgaagatggtcttgatgaagatgattgggatggatggggaaatcttactgaaagtcttggtcaaaatgttcaaatagttggggatgacttaactgttacaaatattactagactccaaaaagcaatagataataaatcaatgaactcaattcttataaaattaaatcaaataggtaccctcactgaaacaatacaagccgtagagctagcaaaaaaagtgaattacggagcggttatttctcatagatctggtgagacggaagacacatttattgctgatttatcagtggccatgggaatgggacaaataaaaactgggtcaatatctagaagtgatagaatagcaaaatacaatcaattacttagaatcgaggagcatcttggcagcaaggcatctattgcctcaatagatattctaggtaaaaatgtatgag

SEQ ID NO: 279620 - DNA, 211 bp, Unknown
  Bacterial polypeptide expressing nucleotide sequence isolated from the Sargasso Sea
agcgtgatcagccaccgcagcggcgaaaccgaagacaccaccatcgccgatctggctgtggccaccggcgctggtcaaatcaagaccggctccctcagccgctcggagcgcatcgccaaatacaaccaactgctgcgcatcgaagacgagctcggcagccaagcggtgtatgccggcacccaaggccgcggcccacgcgggcgccgctgat

SEQ ID NO: 279621 - DNA, 637 bp, Unknown
  Bacterial polypeptide expressing nucleotide sequence isolated from the Sargasso Sea
atgagtaaaattacaaaagtaatagcaagacaagtttatgacagtagaggaaatcctacaattgaagctgaagtttttgcaaataacatgaaagctagagctatttgcccatctggcgcttccacaggttcacatgaagcatatgaaaaaagagatttatcaaataaaagatatttagggaaaagtgtcttaaaaccagttaaattaataaatcaagtaatttcaaaaaaattaaaaaaccaaaatatacataatcaagaaaaaatagattatattttaattaagattgatggaactaaacaaaaaaaaaaatttggtgctaatgctttattagctgtttcaatggctgttaaaaaattatcagcaagaattagaaaaattccactttataaaacatttttaattaaaaataattttaaattaccttatccattaatgaacgtcatcaatggaggcgttcatgcaaacaatggacttagaatacaagaatttatgattagacctgatagggctaaatcaattacagaagcaatgagaatgtgttttttggtaattaacaatttaaaaaatttaattaaaaaaaaaggtgaatctacatcagttggcgacgaaggtggttttgcacccaatgattgat

SEQ ID NO: 279622 - DNA, 255 bp, Unknown
  Bacterial polypeptide expressing nucleotide sequence isolated from the Sargasso Sea
tttcagagactattcaaacagtaaaactggcaaaaaaggtggggtttggagcaataatttctcataggtctggggaaacagaagatacaatcatttcagacttatctgttgcaatgggaatggggcagattaagactggctctttatcaaggagtgatagagttgctaaatacaaccagctaattaggatcgaagaacaattgggtgataaagcgaaatacgctactatagattttttaggaaaaagtctatgag

SEQ ID NO: 279623 - DNA, 937 bp, Unknown
  Bacterial polypeptide expressing nucleotide sequence isolated from the Sargasso Sea
cccacaattgaagctgaggtttttgctaataatatgagagcaagagctatttcaccttcaggcgcatcaacaggcacatatgaagcttatgaaaagagagatttttctaataaaagatttttagggagaagtgttttaaaacctgttaaattaataaataagataatctcaaaaaaattaaaaaatcaaaatatacatgatcaagaaaaaatagactatattttgattaaacttgatggaacaaagcaaaaaaaaaaatttggtgctaattctttattagcagtatccatggctgtaaaaaaattatctgcaagaattaaaaaaatcccactttataaaacttttttaattaaaaaaaattttaaattaccttatccattaatgaatgtgataaacggaggggcccatgcaaataatggactaagaatacaagaatttatgatcagacctgataaagcaaaatcaatttctgagtcaataagaatgtgttttttggtaattaataatttaaaaaatataattaaacaaaaaggagaatccacagctgttggtgatgaaggtggttatgctcctatgataaataataatgaagatgcattaaaattaatagttaaagcaattcaaaagtctggttttaaaaatggagtagatatctcaatttgcctagatgttgcagcaaatgaattatacaaaaataaaaaatactctattcattctaaaaaatttgtatctactgaaaaaacaataaaaacatatctaaaattaattaagaaatataaaattaaatctatagaagaccctttctctgaagatgactggttatcttggaataaatttatgaaaaaaaaaccaaaaaacattcaaatagtaggagatgatttatatgtaacaaatttagaaagattaaaaataggttttttgaataaatcttcaaact

SEQ ID NO: 279624 - DNA, 412 bp, Unknown
  Bacterial polypeptide expressing nucleotide sequence isolated from the Sargasso Sea
atgcccaaaattaaaaaaatacaagcaagagaaataattgatagcaggggcaatccaacagttgagtgtgatatatcatttgaaggtagttttggaagagcttcggtaccaagtggagcctcaactggaattcatgaagctttagagcttcgcgataatgataaatctagatataaaggaaaaggtgtaattaaagctgtagaaaatatcaataaaaaaatttccaaaaatgtattaggaaaagatttttctgatataagatcctttgacgatatacttttaaaaattgatggcactgagaacaaatctaatcttggagctaatgcaacactagctactagcttagcttttgctaaatgcatggcctcacataataaaaaagagttttataattttttaggagaatcaaata

SEQ ID NO: 279625 - DNA, 198 bp, Unknown
  Bacterial polypeptide expressing nucleotide sequence isolated from the Sargasso Sea
caattatttcacatagatctggagaaactgaagatacaacaattgctgatttgtcagtagctgtttcagctgggcaaattaaaactggatccctatctagaactgatagaactgcaaaatataatcaattgttaagaatagaagagaagttaggtaaagacgctaaatatgctggcaaatcaattctaaaacattgac

SEQ ID NO: 279626 - DNA, 814 bp, Unknown
  Bacterial polypeptide expressing nucleotide sequence isolated from the Sargasso Sea
agcaaattcaacacttgcggcaagtttagcgtttgcaaagagtatagctgatcattcttctaaaactttctattcatatatttccacaaatgacaattttttattaccagtcccaatgatgaatattgtgaacggaggatctcatgctgacaacagtgtagatattcaagaatttatgattgcccctataggtgcgtcaagtttttctgaagcattaagatttggttgtgaaatttttcattcattaagatctattttaaaatcaaaaagtcttaatactaatgttggggatgaaggtggctttgctccaaatatcaataattcagctgaggtcattgaaacagtattaagtgcagttgagaaaactggtttaaaaattaatacagatatacttttatctttagatgttgcttctactgaattttttactcaaaataattatgagttaaaaggggagaataaaaaattatcttcatatgaaatggttgattatttagaaaacttatcgaaaaattatccaatttattcaattgaagatggtatgtctgaagatgactgggacggatggatagaattaactaaaagaattggaaataaaattcaacttgtaggagatgatctttttgtaactaatattaaaagattgaagaaaggcatagagaaaaaagcaggaaatgcaatattagttaaattaaatcaaattgggacattatctgaaactattgacgcaattaatctaggaaaagaaaataatttttgttctattatttctcatagatcaggcgaaacagaagatactactattgctgattta

SEQ ID NO: 279627 - DNA, 961 bp, Unknown
  Bacterial polypeptide expressing nucleotide sequence isolated from the Sargasso Sea
gatggaggtgaagcatttcatggtaaaggtgtaaaaaaagccatagataatattaatggtcgcataaagagttctctcataggagagaatccacttgaccaagatcatattgatcaaatcttaaaagatttagatggtacaagtgataaatctagtcttggagctaacgcaattctctctgtatcaatagcttctgcaaaagcatcatctaaatcagagaatttagatttgcataattactttaatattttgcttggaaataaaatgggtaaaacaattgatcaagttattccaatacctatgttaaatattcttaacggtggtgaacatgctgacaacaatattgatatacaagaattcatgatcattccaaagggagcagttaatttttctcaagccatgcagtggtcttcggagatatattggaatcttaaatttattctcaaggaaaaaggcttatcaactgcagtaggcgatgaaggtggctttgctccaaatctcaacacaaacagagaagcacttgagttaattgcaagcgctgtagacaaaactgctcttaaattgggttcagatatttgcatatccttagactgtgctgcaagtgaattttatgaaaatggtatttatcatcttaagggtgaagacagagagcttaccagtcttgaatttgcaaaatatttagagggtttagcaaatgatttcccaataacatctattgaagatggaatggatgaaaatgatttagagggatggaagctgcttacaaaacaaattggaggtaaatgccaattagttggagatgatctttttgttacaaatcctgatgtcctcaaaaaaggaataagtaatgagattgctaattcagttttaataaaatataaccaaattggaacattatcagaaacgcttgaaacaatttctattgctttaaataatgactataaaaatattatttcgcata

SEQ ID NO: 279628 - DNA, 915 bp, Unknown
  Bacterial polypeptide expressing nucleotide sequence isolated from the Sargasso Sea
tgtaattggtagggaaattctagactccagaggcaatccgacagttgaggtcgaggttgtcacagaagaaggagctataggtcgcgccgctgtcccatccggggcctcaaccggctcgagagaagctctggaattgcgagatcatgatccaggccgctattccggaaaaggagtcactaaggcagtagcatttgttgatggagaaatcactggagctatctccgctcgtaaaatatcgagccaaaaagagctagatcaaattttattggatcttgatgggactgagaacaaagagaggctaggggcaaattctttactcgctgtttcgctggcggtggcgaaagctacagcagcgacgaaagctgtgcccttttttttgtatttgaatgaactcgctggggggccgcaaatgaagatgccggttccaatgatgaatatcataaatggcggcgctcacgcagacaataatattgatattcaagaattcatgattcagccagtatcggctcgatctttttctgaggctttgcgttgtggggcagagatattccaatcactaaagaaaattctgaccgactgtgggctttcaacggcagttggggatgagggaggatttgctccgaatatcgactctagtgaaagagctctagaaattattggacaggcagtggagagcgcgggttactcgatggccgaagatattacactcgcgctggattgtgcggcgaccgagttttacaaggagggcaagtattcgctctcaggtgaagggaagctgttagatagtttgggaatgattgattatttgagtgatctggtcagccgccatcaaattgtgtcaatagaggatgggctggatgagtctgattggaatggttggaaagagctaacggagagagtgggacagactgttca

SEQ ID NO: 279629 - DNA, 604 bp, Unknown
  Bacterial polypeptide expressing nucleotide sequence isolated from the Sargasso Sea
ggatttaattgtctctgctataaaaaaatcaggatttaggaatggtatagatgtatctatatgccttgatgttgcagcaaacgaattattaaaaaataacaaatattcaattcattcaaaaaaatatatttctgtagataaatctatcaaggagtataaaaaaattattcaaaaatataaaattaaatctatcgaagatccatttgctgaagatgattggaagtcatggagtaaattaatgaagtctgtaaataaggttcaaatagttggcgatgatttatatgtgacaaaccttgaaagacttaagaagggttttttgaatatttcatcaaattcaattttgattaaattaaatcaaattggtacagtttctgaaactttagatgttattaggtttgcgcaaacaataggttataaaacaatcatatctcatagatcaggtgacagtgaagatacttttattgctgacttagctgtaggaacaaattctaatcaaattaaaactggatctttagcgagatccgaaagagttgcaaaatataatcaattaattcgaatagaagaagagcttggaaataaagctaggatgaataaaattaattaa

SEQ ID NO: 279630 - DNA, 929 bp, Unknown
  Bacterial polypeptide expressing nucleotide sequence isolated from the Sargasso Sea
agataaaaaaaataaaaaatatttaggaaaaagtgttttatctgcagtcagtttaataaataaaaagatatctaaaaaattaaaaggtcaaaatgttcatgatcaagaacgtattgatacgttaatgattaatctagatggaacaagacaaaaatctaaattaggtgcgaatgcaatcttggctgtatctatggctataaaaaaactttctgcaattgaaaagaaaataccattatataaaaatttttttgtcaaaaataattttaaattaccatatcctctaatgaatataatcaatggtggtgctcatgcaaataatgggttaaggatacaagaatttatgattagaccagaccgcgctcgtagtttttctgaggcgatgaggatgagttttattgtgattaaaaatttaagtaaattaataaagcaaaaaaaattatcaacttcggttggagatgaaggtggttttgctcccatgataaataataataaccaagctttagatttgattgttcatgcaataaaaaaatcaggatttgttaatggaaaagatatttctatatgtttggatgttgctgctaatgaactttataaaaaaaatagatattctattcactcaaataaatatgtttcagttgataaatctatccaacaatataaaaaaatggttgaaaaatataaaataaaatctattgaagatccttttgctgaaaatgattggtcatcatggaataaattaatgaaatcattaaaaagagttcaaatcgtgggggatgatctttatgttacaaatttagaaaggttaaaaaagggatttttaaatatttcttccaatgcaattttaataaaattaaatcaaattggtacagtttcagaaacaatagaagttattaaatttgctcaaattattggatttaaaacaattatct

SEQ ID NO: 279631 - DNA, 854 bp, Unknown
  Bacterial polypeptide expressing nucleotide sequence isolated from the Sargasso Sea
tagtgcaactgcaatttgtccatcaggtgcatcaactggaacgtatgaagcatttgagaaaagagataaaaataataaacgttatttaggtaagagtgttttaaacgctgttaatttagttaacacaaaaatttcaaataaattaaaaggtcaaagtgttcataaccaagaacggatcgatactttattaataaacttagatggaacaagacaaaaaacaaatcttggtgcaaatgccatgcttgcggtttcaatggctgcaaaaaaactttctgcaaaagttaaaaaattacctttatacaaaactttttttataaagaaaaatttccaattaccttatcccttaatgaatattattaatggtggagctcatgcaaacaatggtcttagaattcaagaattcatgatcagacctgaccgtgctaaaagtttttctgaggcaatgagaatatgcttcatagtgattaaaaatttatcaaaattaataaaagacaaaggtttatctacctctgttggagacgaaggtggttttgccccaatgatcagtagtaacaaccatgctcttgatttagttgtgacagcgataaaaaaatcaggatttatcaatggcagagatgtttcaatttgtttggatgtagctgcaaatgaattatttaaaaaaaataaatattcaattcattccaagtcttacatatctgttgaaaaatctatcaaagaatatcaaaaaattatcaataaatataaaatcaaatctatcgaagacccttttgctgagaatgattggctagcttggaataaattgatgaggtcaattaataaagttcaaatagtgggggatgatctttatgtgacaa

SEQ ID NO: 279632 - DNA, 817 bp, Unknown
  Bacterial polypeptide expressing nucleotide sequence isolated from the Sargasso Sea
gatgagatgatgcttaagcttgacggtacatctgcaaaaagcaacctgggagctaatgctatactaagtgtttccatggcaatggcagccactgcagcaaagtcgcaaaatattcctctgtacgattatctgggaggagcttcagagtttcgactgccagtgcctatgatgaatatcataaatggcggagaacatgctgacaacagtgttgatttgcaggaattcatggtaattccttccggggctccttctttccgggaagccctgcgttatggtgcggaaacatttcatgccctgaaaaagattttgcaatcaaaaggctatgccactagtgtaggtgacgaaggtggttttgccccaaatcttaaaagcaatgaagaagcctgcgaaatcattatcgaggcaattcaagctgcaggatatgaggccggaaaagacattttcctagctcttgacgcggcagcttcatcattttgtaatcaaggctcttatgtttttcgaaaatccggattagggacaaaaaactcaacagagatgctgggattttacggaagcatggttgaaaaatatccaatagtttctatagaagatcctatggatgaacatgactgggatggattttctgccgtcactaaaaaacttggggataagattcaaattgtaggagacgacctgtttgttaccaatacagattttgtcaggaagggtatcagtaaaaaagcagcgaatgccgtgctgatcaagcttaatcaaatcggaaccgtttcagaaactttggccacaattcagctttgccaaaaatcaggctggaattata

SEQ ID NO: 279633 - DNA, 403 bp, Unknown
  Bacterial polypeptide expressing nucleotide sequence isolated from the Sargasso Sea
catgtctaaccagatatccggattaaacgccagaatgattctcgatagtcgaggcaaccccactgtagaggttgactgttatgttgatggtatactgaccgggcgagctgcagttccttcaggcgcctcaacaggagcttatgaagcacttgaaatgcgtgacggagattctagtaagtatctcggaaagggcgttagtcaagcagtggaaaatatcacacagcgtattgaagaagcgttggttggattgccagtagatgagcaaaagataatcgatgaggtgatgattgaattagatggtactccaaacaaatcgtctcttggtgctaatgccatgcttggtgtttctctggcttgtttacatgcaggggctgctgttcatgagttgccattgtggaaatat

SEQ ID NO: 279634 - DNA, 839 bp, Unknown
  Bacterial polypeptide expressing nucleotide sequence isolated from the Sargasso Sea
ttttcttccttatccaatgatgaatataattaatggtggagctcatgctaataataaacttagaatacaagagtttatgatacgaccagatggagctaaaaatttctctgaagctgtaagaatgtgttttttggtaatacagtgtcttaaaaaaataatttctaatagaggaatgtcgatttcagttggagatgaaggtggatttgcaccaatgatatcaagcaatgaggaggcattaaagcttatagtaaaatctatcaaaaaagcaggttttgaaaatggaaaacatatttcaatttgtctggatgttgctgccaatgaattgtacaaaaataaaaaatattcaattcattcaagtcaatacataaatgttgaacaaacaattaataaatatcaaaggttaataaaaaaatttaaaattaaatcaatagaggatcctttctctgaaaacgattggttagcatggagtaaatttaataaagtcgcaaaaaaattacaaatagttggtgatgacttatatgtaacaaatttagagagacttaaaaaaggttttttatacgaatcatcaaattcaatattaataaaactcaatcaaataggtactgtatctgagacattagatgttattagatttgcaaatagtattggatataatactgttatttctcatagatctggagatagtgaagatacttttattgcagatcttgcagtgggtactaattcaaaccaaattaaaacaggttcattgtcaagatctgaaagggttgcaaaatataaccaattaataagaatcgaagaggatctaggatataatgctaagatgagtcgtctatgac

SEQ ID NO: 279635 - DNA, 739 bp, Unknown
  Bacterial polypeptide expressing nucleotide sequence isolated from the Sargasso Sea
tagctctagcaaaagctgcagctattcaaaaaaaataccattatataggtatatcggtggtgtatctgcctgtgttcttccaacaccaatgatgaatataataaatggtggggctcatgctgataatgatcttgattttcaagaattcatgataatgccagtcttagcagatagttttgctgactccgttcggactggtgcgcaaatttttcatgctttgaaatcccttttgaagaagaaaggacacagtacaaatgttggcgatgaaggtgggtttgcgcctaacttacgaaacactaaagaggctttggaccttgtattagaagcgagtgaagctgcaggatttagcgcgggcacggagattttaattgcgctcgatgccgcctcgtctgaattttataaatctggcagttatcacttaataggcgagggtaaaaaatttaatgcttccgagatgatagagttttacaagcgactttgcgctgaatatccaattatctctattgaggacgcacttgctgaggatgactgggatggcttcgtatctttaaccaaggaattaggaggaaaaatacaaattgtaggagatgacttgtttgtgaccaacacacagcgccttaaaaaagggattgaaatggaagcggcaaactcaattctgattaaatttaatcaaattgggactcttacggagacattagacgcaatatctgtttcacaaagagctggttattctacagtc

SEQ ID NO: 279636 - DNA, 873 bp, Unknown
  Bacterial polypeptide expressing nucleotide sequence isolated from the Sargasso Sea
ttatgaagcttttgaaaaaagagattttaaaaataaatcttatttaggtaagagtgttttcaatccaattaaaaaaataaacaatcagatcgctaaaaaattgaaaaatcttaatgtacacaatcaagaaagattagatcatacattaattaaaattgatggaactaaacaaaaaaaaaatttaggtgcaaattcaattttagctatatcgatggctacaaaaaaattatcagcaaaattaaaaaaaaagcctctttacaaaacttttctacttaaaaataattataaattaccttatccattaatgaatgtaattaatggaggagctcatgctaataatggtttaaggatacaagaatttatgattaggccagataaagctaaatcatttgctgaagcattaaatatttgttttttagttataaacaatttaaaaaaattaattaaaaaaagcggacattctacttcagttggagacgagggaggatttgccccaatgataagtaataatgaggatgctcttaaattaattacaaaagctataaatacttcgggtttccaaaatggtaaagatgttacaatttgcttagatgtagcagcgaatgaattgtttaaaaaaggaaaatactcagttcattcaaaaaagtatttatcatcaacagaaaccataaacaaatatttaaaactgattaaaaaatataaaataaattctattgaagatccttttggagaaaatgattggagatcttggactaacttaatgaataaaataccaaaaaaaatgcaaatagtaggagatgatctttacgttactaatcttgaaagattaaaaataggttttttgaattcctcatctaattcaattctaataaa

SEQ ID NO: 279637 - DNA, 629 bp, Unknown
  Bacterial polypeptide expressing nucleotide sequence isolated from the Sargasso Sea
gttgaatgaggagcgtgttgtgagtgaaatcgtcgatgtgcgtgcttttgaggtattggattcccgcgggaatccgaccgtgatggccgaggtcacattggatgatgacagtgttggcagtgcttgcgcgccctcaggagcgagcacaggtacccgcgaggcgctggagctgcgagatggcgacgcgtcacgctatctcggcaagggagtgctgacggcggtagggcacgcgaatggttccattcgcgaactgttggtgggccacgacgccttcgatcaagccggcgtagaccagcgcatgattgaggcagatgggacagataacaaggcgcagttcggtgccaatgccattctggctgtttcgctggcgactgccaaagccgcggccctgtcagccagaaagccgctttatcagcacatagccgagctctcggggtgtaccgctatgtctctgcctgtgcccatgatgaatatccttaacgggggagagcacgccgataacaatgtggatattcaggagttcatgattcagcccgtgtcggcagggagcttcgccgaggcattgcgggtgggcgccgaaatttttcatcacctcaaaaaagtgctctctggcagagggctcgccacag

SEQ ID NO: 279638 - DNA, 301 bp, Unknown
  Bacterial polypeptide expressing nucleotide sequence isolated from the Sargasso Sea
ggcatcgttaactccatcctgatcaaattcaaccagatcggttctctgaccgaaactctggctgcgatcaaaatggcgaaagacgctggctacactgccgttatctctcaccgttctggcgaaactgaagacgcgaccattgctgacctggctgttggtaccgctgcaggccagatcaaaaccggttctatgagccgttctgaccgcgttgctaaatacaaccagctgattcgtatcgaagaagcgctgggcgaaaaagcaccgtacaacggtcgtaaagagatcaaaggtcaggcataag

SEQ ID NO: 279639 - DNA, 634 bp, Unknown
  Bacterial polypeptide expressing nucleotide sequence isolated from the Sargasso Sea
gaaaaaattaatatttcaacaagtgtgggtgatgaagggggttttgcaccatctcttaaatcagacgaggaagctatagaattcataataaaatcaatagagaatgcaggatttgaccctggaaaagatatttcaatttgcttagatgttgcagcaaatgagttaaaaaaacctaaacaagtgaattattttgttgatttgatagctaaatatccaatcaaatcaatcgaagatccttttggtgaagatgactggaagtctagtagtgatcttaattcaaaaactaatattcagttagtgggtgatgacctttttgctacaaatatcaaaagattaaaaaaaggtatttcagaaaaatctgcaaatgcaattttaattaaaccaaatcaaattggcacggtaaccgaaacactggacgctattaaggtagcacatgaaaacaaatttgagacagtgatttcacatagatcaggcgactcagaagacacatttatagctgatttagctgttgcgacaaaatcttctcaaattaaaactggctcgttagcaagatctgagcgggtatctaagtataatagacttataagaattgaagaggaacttggcaattccgcaaaaatagctaaaatatagt

SEQ ID NO: 279640 - DNA, 787 bp, Unknown
  Bacterial polypeptide expressing nucleotide sequence isolated from the Sargasso Sea
ccttcaggtgcatccacaggtgcttttgaagctcatgaattaagagatgaggataaaaacaaatttttaggaaaaagtgtcaatatggcggtagaaaatataaatagtaaaatttcttcaaaacttattggactagatacagatcatcaagaaataatcgataaaacattattagatcttgatggcagtgaaaataaaacaaatcttggcgctaatgctactcttgcagtgtctttagcaaacgcaaaatgttcagcggttacaaacaacaaatctttgtttaaaaatttaggaaaatcttattctttacctattcctttaatgaacattattaatggaggagcgcacgcagataatgatctaaatatccaagaattcatgatcagacctgactcagctaaaaattttatggatgctatagaaaaatgttttttagtaattcaaaatttaaaaaaattacttcagtcgaaaaaaatgcttacaaatgttggtgacgaagggggatttgctccatctattaatacaaatgaagaggcgttagaactaattgttcaggcgattgaaaaatctaaattaaaagcaggacatgacgttgtgatatgcttagatgttgccgctaatgaattaatgaacgataaaggagaatattcaatagagtcaaaaaattttacatcggtagataatgtcattaaatattatgaaaaacttacgtcaaattatccaattaagtctatagaggacccttttgcagaagaagactgggattcttggaaaaaaattacaaacg

SEQ ID NO: 279641 - DNA, 823 bp, Unknown
  Bacterial polypeptide expressing nucleotide sequence isolated from the Sargasso Sea
tgctatatcaattgcagttaaaaaactatctgcaaaaataaaaaagaaaccattatttaaaacatttttaattaagaataactacaaattaccatttccaatgatgaatattattaatggtggagcacatgctaataataaattgagaattcaagaatttatgattagacctgatagtgcatcctcgttttcagaagctatgagaatgtgttttatagtaattaataatttaaaaaatttacttaaaaaacaaggacattcaacaaatgtcggagatgaagggggttttgccccaatgattcagaagaatgaagatgctttaaaattaatcattaaagcaatcaaaatttcaggttttaaaaatggtaaaaatatatcaatttgtttagacgttgctgctaatgaattatataaaaaaaaaaagtattctattcattcaaataaatttatatctgctaataatactttatcaaaatattcatcacttttaaaaaagtataaaatcaaatcagttgaagatccatttcacgaaaatgattgggcagcgtggagtaaactaacaaatagattaggttcttccatacagatagtgggtgatgacttatatgttacaaatttagaaagattaaaaatcggttttttgcagaactcatcaaatgctatcctaattaaacttaatcaaataggtacagtcacagaaacattagaggtgataaaattcgctcaacttataggttataatacaatagtgtcacacagatctggtgatagtgaagatacgttcatttcagaccttgctgtaggaacaaattcaaatcaaatt

SEQ ID NO: 279642 - DNA, 804 bp, Unknown
  Bacterial polypeptide expressing nucleotide sequence isolated from the Sargasso Sea
gtaaaaattaaaaacatcaaaggccgacaagtttttgatagtagaggaaatcctacagttgaagcagaaattttttcagataatggatctgctttagcaatagttccatcaggagcatcaacaggtacacacgaagcatatgaattaagagacaatcaaaacaaagactatttaggaaaaagcgttttcaaagccatttcaaatataaacggtcctatttctaaagcattaaagaatattgacgttaataaacaatcggaaatagatagaattctaattgatttagactcaacagatcaaaaaaaaaaacttggtgcaaatgcaatattagctgtttcaatagcatcatgtaaattgtctgcaattgaaaataaagtatctttatttaaaaatataggtgacaccgataattatcaactaccagtccctatgctaaatattattaatggaggtgttcatgctaagaacaatttagagatacaagaattcatgatacgtccagaaaatacaggatcattttctgaagctatgcgaagaagttttttagttattcaaaatcttaaaaatatgattgataacactaacgtgggtgatgaaggaggtttttctccaaatttgaaaggaaccgaagaagcaattgaaataattaagaaagcaatagtgaaatctggttttaaacctgcacaagatatttcaatttgtttagatgttgcagcgaacgaacttagtaagcctataagtttagattactttactaagctaattaataaacattcaataaaatcaatagaggaccctttccct

SEQ ID NO: 279643 - DNA, 415 bp, Unknown
  Bacterial polypeptide expressing nucleotide sequence isolated from the Sargasso Sea
gaggatgactgggatggctggaaggtgctcagccaggccctgggacataaagtggagctggtaggtgatgatattttcgtcactaatgtgaagtacattcagagaggtattgaggaaaagctggcgaatgccgcactcataaaactcaaccagattggcactctgagtgagaccattcaggctgtacagctttgccaggatcatgactggggcgcattcatctcgcaccggagtggggaaaccgttgacagttttattgctgatatgaccgtcggactcagggccggacaccttaaaacgggggcgccaagccggggtgaacggattgagaagtataaccagctgatgcgtattgaggaagagctcggagaagccgccgtgtttgcaggaaaatcggcgttcagaaagcaataat

SEQ ID NO: 279644 - DNA, 397 bp, Unknown
  Bacterial polypeptide expressing nucleotide sequence isolated from the Sargasso Sea
gggtttgccgccctgacggcccgcatcggcgacaggtttcaggtggttggtgacgacctgtttgtcaccaacccggtgcggctgtcgcgcggcatcaaggccgggtccgccaacgccattctggtaaaggtgaaccagatcggcacgctgtccgaaacattgcaggccgtcgagatggcccagaaggccggcttcggcgtcgtcatctcgcaccgcagcggtgaaaccgaggacaacttcatcgccgacctttcggtcggaaccaatgctggccagatcaagactggatcgctgtcgcgttcggacaggcttgccaagtacaaccagctgctgcggattgacgaagagctcgatgcctcgggcctctatgctggcggaaacattctccgcgactgat

SEQ ID NO: 279645 - DNA, 529 bp, Unknown
  Bacterial polypeptide expressing nucleotide sequence isolated from the Sargasso Sea
aaatatagtttaatgtcagaagataaagctttttcctcttcagaaatgataagctacttagaagagttagttaaaaaatatccaattatttcaatcgaagacggccttgatgaaaatgattgggatggatggggaatccttacagaaaatcttggtcaaaatgttcaaatagttggggatgatctaaccgttacaaatattacaagactccaaaaagcaatagataataaatcaatgaactcaattcttataaaattaaatcaaataggaacgctttctgaaacaatacaagccgtagagctagcaaaaaaagtgaattacggagcggttatttctcatagatctggcgagacggaagacacatttattgctgatttatctgtggctatgggaatgggacaaataaaaactgggtcaatatctagaagtgatagagtagcaaaatacaatcaattacttagaattgaagaatatcttggtagccaggcttcaattgcctcaatagatgttctaggtaaaaatgtatgag

SEQ ID NO: 279646 - DNA, 901 bp, Unknown
  Bacterial polypeptide expressing nucleotide sequence isolated from the Sargasso Sea
acggtatttaggaaaaagtgttctaaacgcagttaacttagttaactcaaagatttcaaaaaaattaaaaggacaaagcattcataaccaagaaagaattgatgctttgttaattaacttagatggcacaagacaaaaaactaacttaggagctaatgcgatgttagctgtttcaatggctgtaaaaaaattgtctgcaaaagcaaaaaatttaccattgtataaaactttttctcaaaaaaataactttcaattaccttatccattaatgaatattattaatggtggagcgcatgccaataatggtcttagaattcaagaatttatgatcagacctgatcgagcaaaaagtttttcagaggcaatgcgtatttgttttgttgttattaaaaacttaagtaaattaattaaagataagggtttatcaacttcagtaggtgatgaaggtgggtttgcacccatgattagtagtaataatcaagctttagatttaattgtgagtgcaataaaaaaatcaggatttattaatgggaaagatgtttctatttgcctagatgtggcagctaatgaattatataaaaagaacaaatattctattcattcaaaaaaatatatttcagtagttaaatccattaaagaatatcaaaaaattataaaaaaatataaaattaagtctattgaagatccatttgctgaaaatgattggttggcatggaataaattaatgaaatcaataaaaaaagttcagatcgttggagatgatttgtatgtaacaaatcttgaaagattaaaaaaaggtttcttaaatatttcatcaaattctatcttaataaagcttaatcaaattggcactgtctcagaaacgttagatgtaattaaatttgcacaaaccattggatat

SEQ ID NO: 279647 - DNA, 361 bp, Unknown
  Bacterial polypeptide expressing nucleotide sequence isolated from the Sargasso Sea
aatgtctgaaattgagtcaatttttgccagagaagtaatggattctagaggtaaccccacaatcgaagctgatgtggttttgcgcgatggttctaaaggatctgcgagtgtgccttcgggagcgtctacggggtccagagaagccctggaactgcgagataaagatgagcatcgctatggtggcaaaggtgttttaaaggcagtaagaaatgtgaatacacagattcgagaagcgttagtcggcgaatcggtattgaagcaggcgtcacttgaccaactgatgctggagctagatggtacagacaacaaatcaaatttaggtgctaacgctattctatcggtatctttggcggtctgtaag

SEQ ID NO: 279648 - DNA, 751 bp, Unknown
  Bacterial polypeptide expressing nucleotide sequence isolated from the Sargasso Sea
ccatccggtgcaagcactggaacacacgaagcagttgagctacgagatggtggtggagactggatgggcaaaggagttcaggatgcagtcaacaacgtgaatggcccaattagagacagaattgtcggaatggaccctagcaaccaatctaaaatagataaggctatgattgaattggatggcactcccaataagggaaatttaggagcgaactcaatacttggggtctcactggcctgtctaagagccgcttcaggtcgacaattgtggaaacacctttctagagatggagaaattagtattcccgtacctatgatgaatatcctgaatggtggagcacatgcagatacgaacgtagacgtccaagagttcatggtaatccctcatgggttcgagagcttcccagaagcattacaagccggagtggaaacctatcactctttgaaaaaattactacaagatgagcaactccttggaggggtgggggatgagggtggttttgctccaagcttacctaggaatgaggagggacttaggctggttcttgaagcaatcaaaggtgcaggatattcaccaggagaacagatttcgatagcgctcgacgtagcagcgcaagaattttttgacggagaaaaatatcaattggacggaatggcactatctggtagcgagcttgggagattgtactctacttggatagataactatcccatagtgtcaattgaagatccattcggtgaggatgattggg

SEQ ID NO: 279649 - DNA, 280 bp, Unknown
  Bacterial polypeptide expressing nucleotide sequence isolated from the Sargasso Sea
gttaaaacccaatcagatcgggtcaatgtccgaaactttacaagctcttacattggctagaggcaatgattggaccactgtaatgagccatagatcaggagaaactgaagatagtacgatcgcagatttggcagtcggatgggccgctggtcagattaagaccggtgctccagctagatctgatagagttgcaaaatataatagattactgcaaattgagcacgagttaggagatgatgctatgtttgatggcatgaaggtgttttctgattttggatag

SEQ ID NO: 279650 - DNA, 549 bp, Unknown
  Bacterial polypeptide expressing nucleotide sequence isolated from the Sargasso Sea
aatgaaaattgtgcacatttttgctcgggaagtacttgattcaaggggtaatcccactgttgaagtagatgtaaaattacaagatggagcgcttggtcgtgcaattgttccatctggagcctcaactggagaacatgaggcagttgagctaagagatggtgatagagatagatatttaggaatgggggttaaaaatgcagttaaaaatgttaatacaataatattaaaaaatttaaaaggtcttgatgttgatgatcaacagtctcttgataataaaatgattgaacttgatggctcaataaataaaaataacttaggagctaatgctattttaggcgtttctatggcaatagccagtgcatgtgcaaaatcaaaaggggttcctttgtataaatatttaggtggggaagaagcaaatttgcttccaattccaatgatgaacatcctaaacggcggaagtcacgctgataacaatgtcgatattcaagagtttatgatattcccaataggtgcaaaatcattttctgctgcacttcagatgggtacaga

SEQ ID NO: 279651 - DNA, 254 bp, Unknown
  Bacterial polypeptide expressing nucleotide sequence isolated from the Sargasso Sea
tacggagactatccaagctatagaaatggcagaaaaagcaaatctaggggtgattatttctcaccgctctggagaaactgaagatactacaatagcggatttagctgttggaatggggatggggcagataaaaacaggctctatatcaagaactgatcgaacatgtaaatacaatcaattacttcgtattgaagaaaaattaggaaaaacagcgaaaatagccaatcttagttatttaggtatacctagatgag

SEQ ID NO: 279652 - DNA, 550 bp, Unknown
  Bacterial polypeptide expressing nucleotide sequence isolated from the Sargasso Sea
gcaaaaagtttagcaaatcatcactcaacaactttttatgagcatattgcagaaaatgagaattttttattacccgtgccgatgatgaatattattaatggcggatctcatgctgataatgatgttgatattcaggagtttatgattgctccagttggcgcctcttcattttctgaatcaataagatacggctgtgagatttttcactcactaaaatcaatattaaaatctaagaacctcaacactaacgtaggtgatgagggtggatttgctcctaatttaaaaagctctgctgaagtaatagaaattattttaagtgccgtagagaaggctggtctaaaaataaatgatgatattcttttatcacttgatgttgcttcaacagaattttataaaaataaaaaatatgaacttaagggtgaggggaaatcatttagctcagatgaaatggtaagctatattcaaaatttagcaaataattttcctatttattctattgaggatggaatgtctgaagatgattgggatgggtggattgaattaactaaaa

SEQ ID NO: 279653 - DNA, 604 bp, Unknown
  Bacterial polypeptide expressing nucleotide sequence isolated from the Sargasso Sea
atgaaggaggattttgctcccaacttaaaaaataatgaagaagcaattcaattaataataaaggcaattgaaaaatctggttttaaaccgggtgaagacatttcaatttgtttggatgtggctgcaaatgaattagataaagaaaaaacaatagaacactatttggaattagttaaaaaatatccaatcaaatctattgaagatcctttcaaagaagacgattgggaatcatggaaaaaattaacaaaaaatacaaatattcagattgtaggtgatgatttgtttgcaactaatataaaaagattggaaaaaggcataaaagataaatctgcaaacgcaatattggttaaacttaatcaaattggtacgttaagtgaaacattagatgctataaaccttgctcataaaaatggttttaagactattatttctcatagatctggcgactcagaggatacttttatagccgatttggcagttgcgacaaactcttcccaaataaaaaccggatcactagcaagatctgagagagtatctaagtataatcgtctattaagaattgaagaggagcttggaaattcttcaaaaatggctaaaatctaga

SEQ ID NO: 279654 - DNA, 523 bp, Unknown
  Bacterial polypeptide expressing nucleotide sequence isolated from the Sargasso Sea
gagttctacaaagacggtaaatatgacctgtctggcgaaggcaaagtattcgattcaaacggtttctctgacttcctgaaatcactgactgagcaatatccaatcgtctctattgaagacggtctggacgagtcagattgggatggttgggcataccaaactaagatcatgggcgacaagatccaattagtgggcgacgatttattcgtaaccaacactaagatcttaacccgtggtatcgagaacggcatcgctaactcaatcctgatcaagttcaaccaaatcggttcattaactgaaaccttagcggctatccgtatggcaaaagcggcgggttacactgcggtgatttctcaccgtagcggtgaaactgaagacgctactatcgctgatttagcggtaggtactgcggctggccaaatcaagaccggttcactgtgccgttctgaccgtgttgctaaatacaaccaattgctgcgtatcgaagagcaattaggtgaaaaagcgccataccgcggttgaa

SEQ ID NO: 279655 - DNA, 733 bp, Unknown
  Bacterial polypeptide expressing nucleotide sequence isolated from the Sargasso Sea
gcagaaattttccacgcgctcaaatcgcaattatctacagcttgggctatccaccgctgttggtgatgagggtggttttgcaccagctattaattctagtgatgaagcgcttgaccatatcgccaaatcgattgaggcggcaggctataaacctggcgaggatgtggtgattgcgcttgatgccgccgcaagcgagttttgccatgatggggtgtatcaacttgccggcgagagacgtgccctgtccagcgatgaaatgaactccatgtggcaagaccttgttgggcgttatccaatcatttctattgaagacccgctgcatgaagatgattgggacggatttaccagattgaccaacatgatcggtgatcgggtgcagattgtcggagatgatttatttgtgaccaacccggaacgtcttcgtcgcggcattgaagatgccgctggcaacgccattttgattaaagtgaatcagattggcaccttatcagaaacgttgcaagcaattgatatagcaaaaaacaatgggtttggggtgattatttctcaccgatccggcgaaactgaagatcactttatcgctgatctggcagtggcaactaatgccgggcagatcaagacgggttcattgtcacggtctgaccggctggcaaaatacaaccagctattgcgtatcgaggaagagcttgaccgcaacggccgttatgctggtacatctatcctcagacgctaa

SEQ ID NO: 279656 - DNA, 841 bp, Unknown
  Bacterial polypeptide expressing nucleotide sequence isolated from the Sargasso Sea
tacaattaccgtatcctttgatgacatcattaatggaggagctcatgcaactaatggcttgagaattcaagaatttatgatcagacctgatggtgctaaatctttttcagaatctctaagaatgtgctttttagttataaacaatttaagaaaaattattaaaaaaaaaggtttatcaacatcagtaggtgacgaaggtggctttgctccaatgataaatagcaatgaagaagctttgaaattaatattaaaatctataagtgtttcaggatttataaatggaaaagatatatctatctgtcttgatgttgccgccaatgaattatataaaaataaaaaatattctattcattcaaaaaaattattatctaccgaacaaacaattaaaaagtatgttcaattaattaaaaaatttaagataaagtcaatcgaggatcctttttctgaaaacgattggtcctcatggtcagatttcatgaacaaaatcgactcaaaaattcaaattgtcggggatgatctttatgttactaatttagaaagactaaacaaaggctttcttaacaactcatctaattcaatattgataaagctaaatcaaataggaactgtcactgaaactcttgaagttataaaatttgcacatttagcaggttttaagactataatttctcatagatcaggagacacagaagatacatttatatctgatatggcagttggaacaaattcaaatcaaatcaaaagtggctctttatcaagatccgaaagagttgctaaatataaccaattattacgtatagaagaagaactaggaaataaatcaaaaatgaataaactttaa

SEQ ID NO: 279657 - DNA, 800 bp, Unknown
  Bacterial polypeptide expressing nucleotide sequence isolated from the Sargasso Sea
cttaatggtggaatgcacgcagaccaaggttccgatctgcaggaaattatgctatgcccacatggtgcaaaaaattttaagcactctcttcaaatgggctctgaagtatttcactgtttaaaaagggaattaaaaaagcaaggactaggaacgactgtaggggatgaaggtggatttgctccggcattaaaatcaaatgaccacgcaattgagcttcttcttaattctatcgaaaaagctgggtttaatatcggaaatgatatttctttagctttagatgtagcagcatctagtttttataaagatcataaataccatttaaaggttgatggaagcgttttagatactgatggaatgattggtttttatgacgaccttattcaaaaatacccgattgtttcgattgaagatggtttagatgaaaatgattgggagggctggaataaaatgaatcaggcgcttggttcaaaaattcaaatcgtaggtgatgatttaactgtaaccaatccaaaaaaactacaaagagcaattgagcaaaactcaatgaattcaatattaattaaattgaatcaaattggtactgtttcagaaactatagaggccatagatttagctaaatcaaacaatatgaactatatcatttcacacagatctggggaaactgaagatacttttatatcagatctgtcggttgcgatgggtggtggacaaattaaaacgggctcagtatgtcgatctgacagaacagcagaatacaatcgccttctaagaattgaagaacaaatcgaaaattcaaaact

SEQ ID NO: 279658 - DNA, 552 bp, Unknown
  Bacterial polypeptide expressing nucleotide sequence isolated from the Sargasso Sea
tatgtctagaataaaaaaaatattagcaagagaagttattgattccaggggaaatccgacgatcgaagctgaggttcatcttgagtcaggaataaaaggcagagctatttcgccttctggcgcttctaccgggaccagagaggctctcgaactaagagacgaaagagccgatagatataatggtaaaggtgttcagcaggcagtcgatttcgcgtgtgaagaaattaacgatcttctaactgggaaagacgttcacgaccaactcgaaatagatacggccatgatcgagttagatgggactccggataaatctagaatgggtgctaattctatattggctgtgtccttggctagttgtaaagcgagtgccgaggcagatggaataccgttgttccaaaagattaataatctcagtgggagccccggtatgattatgcctactcctatgatgaatattattaatggcggagaacatgcggataacaatcttgatatccaagaattcatgattcagccggttagtatgaacagttttaaagaagctttgcgatg

SEQ ID NO: 279659 - DNA, 561 bp, Unknown
  Bacterial polypeptide expressing nucleotide sequence isolated from the Sargasso Sea
aatgtcaaaaattaaaaaaattaaaggaaggcagattttcgatagtagaggtaatcccactattgaagttgatattacacttgaagatggtagtttcggtagggcatcagttccttcaggagcttctacaggagcatatgaagcttatgagcttagggatggagaacaaactttatctggaaaaactgtattaaaagccgttgagggtatcaatactgagatatgtaatgtgctttgtggcatggaagcatctgcgcaagaagaaatcgacaataaaatgattgagctagactcaacaaataataaatctcgattaggagcaaatgcgatattgggtgtttcactggcatcatcaagagctcaagctaattcagagggtaagcatttatacgaatatttaaactcatcagattcatatattttacctgttcctatgatgaatttgattaatggtggggcgcattctaataattcattatttattcaagaatttatgattatgccagtatctgcagaaacatttaatcatgcaattataactggttctgaaatttttcattc

SEQ ID NO: 279660 - DNA, 416 bp, Unknown
  Bacterial polypeptide expressing nucleotide sequence isolated from the Sargasso Sea
aatgggtgccgctatcagcgacatcttcgctcgagaaattcttgactccagaggaaatcccactgttgaagttgagtgctacgtagatggcatcctacgaggccgagctgccgtaccgtcaggtgcaagcacaggaacccacgaagcagtagagctcagagacggggggtcaaattggatgggaatgggcgtacaaaatgctattcaaaacgtgaatggcgaaattagatccgccctggtagggaaggacccatcgaaacaagaaaccattgacctggctctgatccagttagacgggactacaaacaaagctagactaggagccaatgccactctaggtgcgtctttggcatgtctaagatctgctacagatggggcattgtggtcgtatatttcttcaggaggaaaagtggctc

SEQ ID NO: 279661 - DNA, 367 bp, Unknown
  Bacterial polypeptide expressing nucleotide sequence isolated from the Sargasso Sea
atgaggtcaattaataaagttcaaatagtgggggatgatctttatgtgacaaatttagaaagacttaagaaagggtttttaaacatttcctcaaattcaattttgattaaattaaaccaaattggaacagtttctgaaacgttagatgtaatcaaatttgcccaaaccattggttataaaacaataatttctcaccgatctggtgatagtgaagatacttttattgcagatcttgcagttggaactaattcaaatcaaattaaaacaggatcattagcaagatctgaaagagtagctaaatataatcaattaattcgaattgaagaagaacttggaaaaaaagtgagaatgaataaaatcaactaat

SEQ ID NO: 279662 - DNA, 736 bp, Unknown
  Bacterial polypeptide expressing nucleotide sequence isolated from the Sargasso Sea
ttgtttaaaaatttaggaaaatcttactctttacctattcctttaatgaacattattaatggaggcgctcatgcagacaatgatttaaatatccaagaatttatgatcaggcctgactcagcaaaaaattttatggatgctatagaaaaatgttttctagtaattcaaaatttaaaaagattacttcagtcgaaaaaaatgcttactaatgttggtgatgaagggggatttgctccatctatcaatacaaatgaagaggcattagaactaattgttcaagcaattgaaaaatctaaattaaaagcagggcaagatgttgcgatatgtttagatgttgctgctaatgagctaatgaacgataaaggagaatattcaatagagtcaaaaaattttacatcagtagacaatgttattaaatattatgaaaaacttacgtcaaaatatcctattaagtctatagaagatccttttgcagaagaagattggaattcttggaataaaattacaaacgctattggcaaaaatgttcaacttgttggagatgatctatttgttacaaatacaaaacgtcttgataaaggtataaaagaaaaatcagctaacagtatattagttaaacctaatcagattgggactttaacagagacacttgaagtaatatcaatggcaaaaaaagcaaattttaatacaattatttctcataggtctggtgataccgaagatacttttattgctg

SEQ ID NO: 279663 - DNA, 559 bp, Unknown
  Bacterial polypeptide expressing nucleotide sequence isolated from the Sargasso Sea
tttgaattctattattgaaaaaatatatgctagagaaatcttagattcacgaggaaatccaactattgaggtcgacgtcataaccaagtctggagttatggggagagcagctgtaccatcaggggcatctactggcggccacgaggcgttagaattaagagacggtgataatagtagatacctagggaagggagtaagaaatgcaatcaataatgtaaatacaattatttccgttacattgaagggctgtgatgtaacacaacagtctgaaaacgacaatttaatgatagccttagatgggacagaaaacaaatcaaggcttggtgccaatgcaattcttggggtttcaatggcaattgcacatactggtgcaaaagtgaaaaatcaaccattatatagctatttaggtaaggataataaccatgtattgcctgtacctatgatgaatattttaaatggaggaagccatgcagataatctagtagatattcaagaatttatgattatgccttttggggctgattctttctcagaggctttacaaatggggactgaaata

SEQ ID NO: 279664 - DNA, 334 bp, Unknown
  Bacterial polypeptide expressing nucleotide sequence isolated from the Sargasso Sea
atgaagtctcagataaaaaatatccattcaagagaaattctagactcaaggggaaacccaacagttgaagtagacctggttcttgaaagtgatatagtgggacgtgcagcagtcccatcaggagcctcgactggtgattttgaggcgatggagcttagggacaatgacaaaaatcgatatgtaggtaagggagtacttaatgcagtaaataatgtgaataatgaaataaaggacgctcttattggaattgatataaacaatcaagagaacattgataatatattaattgaactcgatggaactgaaaataaatctagactaggtgcaaatgcaa

SEQ ID NO: 279665 - DNA, 547 bp, Unknown
  Bacterial polypeptide expressing nucleotide sequence isolated from the Sargasso Sea
tgtcttgatgttgcagccaatgaattaattaatgaaaaaggggagtattcaattcaatctaaaaattactcgtcagttgaagacaatattagttattataaaagactaacatctagctatccaataaaatcaatagaagacccttttgctgaagaggactgggaatcgtggaaaaaaattacaaacgaaataggtaaaagtgttcaaattgtaggagacgatttattcgtcacaaatgtaaaacgtttaagtaaaggaataaaagaaaagtcagcaaattgtattttagtaaaaccaaatcaaataggcactttgaccgaaactttagaagtaatttcaatggcaaaagccgcaaactttaatactatcatttctcacagatcaggggataccgaagatacattcattgctgatttggcttccgcgactatgtcttctcaaattaaaactggatctttggcgagatctgaaagagtggctaaatataataggttattacgtatagaagaagaacttggaaatcaggccaaaatggctagaatctaac

SEQ ID NO: 279666 - DNA, 667 bp, Unknown
  Bacterial polypeptide expressing nucleotide sequence isolated from the Sargasso Sea
tacttctgtaggagatgagggtgggtttgctccaatgataaatgataatgaaagtgcgcttaaactcatagtaaaagctataaatttatcaggttttaaaaatggaaaagacatagttatatgtctggacgttgcagcaaatgagttgctgagaaataaaaaatattcaattcactctaaaaattacattagtgtagatgaatctatagataattatcttagacttgttcaaaaatataaaattatgtctattgaagacccatttggtgaaaatgattggtcagcctggacaaaactcttaaataaaactaaaaataaattacaaattgttggagacgatctgtttgttacaaatttagaacgattaaaaattggttttttaaatatttcagctaattcaatattaattaaattaaatcaaattggcactgtcacagaaacacttgaagttataaaatttgcaaaattaattggttataaaactataatttcacatagatctggtgatagcgaagatacatttattgcagattttgctgtaggaactgattctaatcaaattaaaactgggtcattagctagatcagaaagagtatcaaaatataaccaattgttaagaattgaacaagaacttggaaaaaaatcaaaaatgcatagtgttaattaa

SEQ ID NO: 279667 - DNA, 529 bp, Unknown
  Bacterial polypeptide expressing nucleotide sequence isolated from the Sargasso Sea
atgagcaaaatatcaaaagtcattgctagacaagtatatgacagcagaggcaatcctacaattgaagctgaagtgtttgctaataatatgaaagcaagagctatctgtccatctggagcttcaacaggatcttacgaagcatatgaaagaagagatgtttcaaataaaaaatatttgggaaaaagtgttttaaaagctgttaaattaataaacacaataatttcaaaaaaattaaaaaaccaaaatatacataatcaagaaaaaattgattatatattaattaaacttgacggcacaaaacagaaaaaaaaatttggagcaaattcgttattagcagtttcaatggcaattaagaaattatctgcaagaattaaaaaaattcctctttataaaactttcttagttaaaaaaaattttaaattaccttatccattaatgaatgtaattaatggaggagtacatgcaaataatggccttaggatacaagaatttatgattagaccagataaaagcaaaatcaattactgag

SEQ ID NO: 279668 - DNA, 796 bp, Unknown
  Bacterial polypeptide expressing nucleotide sequence isolated from the Sargasso Sea
atgtcaaaaataaaaagtgtaaaaggcagacaagtctttgatagtagaggcaaccctacggttgaggccgagatcattttacaagacgagactataggtacttcaatagtgccatctggagcttccacaggtcgctacgaagctcatgaacttagagataaaaataataattatttgaataaaagcgtttttgatgctgtaaaaaacataaataataaaatttctaaagtattagaaaacaaagactcaataaatcaaagtgaaattgataaaattttaataaatttagatggcacagaaaacaaatcaaatctaggtgcaaattctattttagcagtttcaattgcaaatttaaaagctgccgcaaaatattcaaaaaaagaaatatatgagtatattaaaactgaaagcaaacctttatgcataccctatcctttaatgaatatcattaatggaggtgcccatgctaataactcattagaaattcaagagttcatgattagaccagatggggcaaaaaattttaaagaatgtatgcagatgtccttcatggttatacaaaatttgaaaaaaagtctagaaagtaaaaaaatttctacaagcgtaggtgatgagggtggatttgcaccatctttaggatctgatgaagaggctattgaaattattttaaattcaataacttcatcaggatttaaaccaggcgaggatgtatcaatttgtttagatgtggccgcaaatgagctaaaggttccaaaaaatgttcaatatttcttagatcttgtgaaaaaatatccaa

SEQ ID NO: 279669 - DNA, 361 bp, Unknown
  Bacterial polypeptide expressing nucleotide sequence isolated from the Sargasso Sea
atggaaaaaataaaaaatatacatgcaagagaaatattagatagtagaggaaaccctactgttgaatgtgatcttgaacttcaagacggatcatttggaagggctgcagtaccaagtggtgcttcaacaggtatgcatgaagctttagaattacgtgatggagatcaaaatagatatctgggaaaaggtgtaaaacaagctgttcaaaatattaacaatcagataaaaaaagaagttgttggaaaaaattttgataactataaactttttgataaggcagtattgagtttagatggaacagaaaacaagtctaattttggtgcaaacgcaacgcttgcggtaagtttagcttttgcaaaaa

SEQ ID NO: 279670 - DNA, 637 bp, Unknown
  Bacterial polypeptide expressing nucleotide sequence isolated from the Sargasso Sea
atgcattttataaaaaatattaattcgaggcaaatatttgatagtaggggtaatcccactgttgaaactgacgtacatttaccaaatggaataattggaagagccgctgtaccatctggagcatcaacaggtaaaaatgaagcttttgagcttagagataaaaaaaaatcttatcatggcaagtctgttttaaaggcagttgaaaatgttaatacgttaatatttgatacactttcaggatatgacgttttagatcaagagattattgataatactctgatagagttagatggtacaccaaataaaaaaaagcttggtgcaaatgcgatattaagtgtttctttagcctgtgctgatgcagcatctaaatatctaaatatgccactttttaaatatttaggaggcattaaaacatttaaaatgccgacacccatgttaaatataattaatgggggggctcatgcaaacaataatttatctttccaggaattcatgattgtacctattaaatgtagaacttttactgagtctataaaaaaagcttctgaagtatttcattcattaaaaaatattttagagaaaaataatatttctactgctgttggtgatgaaggtggctttgcaccaaatttaaaaa

SEQ ID NO: 279671 - DNA, 353 bp, Unknown
  Bacterial polypeptide expressing nucleotide sequence isolated from the Sargasso Sea
gctggtggcgcgcgagatccttgacagccgcggcaacccgacggtcgaggtcgacctgacgaccgagggcggtctcaacgtccgcgccgccgtgccctctggtgcgtcgacgggcatccacgaggcctgcgagcttcgggacggcgacaaggcgcgctaccttggcaagggcgtgaccaaggcggtcgaggcggtgaacacgacgctgaaccaggagctcaagggcatgtcggtcctcgagcaggccgccctcgacaagaagatgtgcgagatcgacggcacgccccacaagtcgaagctcggcgccaacgctatccttggagtgagcatggccgcgtgccaggcggcggccg

SEQ ID NO: 279672 - DNA, 625 bp, Unknown
  Bacterial polypeptide expressing nucleotide sequence isolated from the Sargasso Sea
atggcaaaaattaaaaaaatcaaaggccgtcaggtttttgatagcaggggaaatccaacagtagaagctgaagtattttctgataatggatccgctaccgcaatagttccttcaggagcatctaccggtacacatgaggcttttgagttaagagataaagaaaacaaaaattatttaggaaaaagtgtatttaaagctgtagaaaatattaatggtaaaatagcaaaagctttaaataatattgacagcaacgaccaggttaagattgataaaactttaattgatttagatggttcggatcaaaagaaaaaacttggtgctaatgcaattttagctgtttcaatcgcatcatgcaaattgacagctagcgaaaataagatatcgctgtacaaatatcttggaaaatcaaataactttcaattacctattccattattaaatgtaattaatggaggggtacatgcaaataataatttagatatacaagagtttatgatacgtcctgaaaaaaataattccttttctgaggctattagaaaaagttttttagtaatacagaatttaaaaaaaattatagataacacaaacgtaggtgatgagggtggttttgccccaaaatattgaa

SEQ ID NO: 279673 - DNA, 490 bp, Unknown
  Bacterial polypeptide expressing nucleotide sequence isolated from the Sargasso Sea
tatgagcaaaataacaaaaattgtcgctagacaagtttttgatagtaggggtaacccaactatagaagcagaagtatttacaaaaaaagttagttccaaagcaatatgtccatccggagcatcgacaggatcttacgaagcttatgaaaaaagagatacaaataataaaagctatcttggaaaaagtgtttttaaagcaatcaacttaatcaataataaaatatcaaaaaaactagttaatataaacattcatgaccaagaacgaattgactatattttaattaaactagatggaacaaaacaaaaaagaaaattaggcgctaatgcaattttatctatttcaatggcagcgaaaaaattatctgctaaagttaaaaaaaaacctttattcacaacatttttactaaataaaaactataaattaccctatccattaatgaacattataaatggaggagctcatgcaaataataaacttcgaatccaagag

SEQ ID NO: 279674 - DNA, 944 bp, Unknown
  Bacterial polypeptide expressing nucleotide sequence isolated from the Sargasso Sea
aaaattattaaagtaaaagcacgtcaagtttttgacagtaggggaaatccaactattgaggcagaagtttatataaaaaataatagcgcttctgctatttgtccttctggtgcatccacaggtacttttgaggcctttgaaaaaagagataaaaataataagaggtatttaggaaaaagtgttttaaatgctgttaatttggtcaatacaaagatttcaaaaaaattaaaaggacaaaatattcataaccaagaaagaattgatgccttattaattaacttggatggtacaagacaaaaaactaatttaggagctaatgcaatgttagctgtatcaatggctgttaaaaaaatgtcagcaaaagttaaaaaattacctctgtataaaactttttttcttaaaaataattttcaattaccttatccattaatgaacattattaacggtggagcacatgcaaacaatggtcttagaattcaagaatttatgatcagaccagaccgtgctaaaagtttttctgaagctatgagaatttgttttttagtgattaaaaatctaagtaaattgattaaaaataaaggtttatcaacatctgtaggagatgaaggtgggtttgcaccgatgattagtagcaataatcaagctttagatttaattgtgagtgcaattaaaaaatcaggatttattaatggtaaagatgtttctatttgtctagatgtggctgctaatgaattatataaaaaaaataaatattccattcattcaaaaagttatatttcagttgataaatctattaaagaatatcaaaaaattattaaaaaatataaaatcaaatccattgaagacccatttgctgaaaatgactggatatcttggaacaaattaatgaaatcaattaagaaagttcagatcgtaggagatgatttgtatgtaactaaccttga

SEQ ID NO: 279675 - DNA, 784 bp, Unknown
  Bacterial polypeptide expressing nucleotide sequence isolated from the Sargasso Sea
caggtctttgatagcagaggaaaccctacggtagaagctgaagtattttcagagaatggaaattcagcatcagcaatcgtaccttctggtgcatctacaggaacacacgaagcttttgaattaagagacaaagataataaagaataccttggaaaaagtgttcttaaagctgtcgaaaatataaatgtacaaataaataaagcgttagaaaaaacgaatatcaatgaacaaaaaaaaatagatcaaacattgataaatttagatggatcagagcaaaaaaaaattctcggagccaacgctattttagctgtatcaattgcatcatgtaaattagcctcaactgaaaataaagtttctctgtacgaacatattggccagtctaaaaattatcaattacctgtgccactattaaatattataaatggtggtatgcatgcaaaaaacgaccttgatattcaggaatttatgatacgcccagaaaatacagataccttcgctgaagctatgagaagaagctttttagtgattcagaatttaaaaactatggtggatagcacaaatgttggtgatgaaggtggttttgcacccaatcttaaaaaaaatgaagaagcaattaatttgataattaaagcgattgaaaaatcggggtttaaaccgggtgacgatatttctatttgtttagatgtagcagcaaacgaattaaacactccaaaaacggtagaatattattctgaattaatcaaaaaatatccaataaaatctatcgaagaccctttggagaaga

SEQ ID NO: 279676 - DNA, 370 bp, Unknown
  Bacterial polypeptide expressing nucleotide sequence isolated from the Sargasso Sea
actcaaaaactttggagataaaatggtcctcgtaggagatgacctttttgttaccaacaagaaaattttaaaagagggaattgaaaagaaacaggccaatgccattttagttaaagttaaccaaataggaactttgacggagacttttcaaacgatggatttggcttataaaaataacttcaaggccattattagtcatagatctggcgaaacaggggattcatttattgcggatcttgctgtagcaacgggagctggccatattaagacaggttccgcgagccgctcagataggatggaaaagtataaccagttacttaggatagaagaaattttgggggaaaaagctatttataggccagtcaaataa

SEQ ID NO: 279677 - DNA, 849 bp, Unknown
  Bacterial polypeptide expressing nucleotide sequence isolated from the Sargasso Sea
ataacaaaagttatagctagacaagtctatgatagtagggggaaccctacaattgaagcagaagtttttgcaaataacatgaaagcaagagcaatttgcccatcaggtgcttcaactggatctcatgaagcttatgaaaaaagggatacttctaacaagaaatatttaggaaaaagcgttttaaaacctgtttcattaattaataaaataatttcaaaaaaattaaaaaatcaaaatatacatgatcaagaaaaaattgattatctattaatcaatcttgatggaaccaaacaaaagaaaaaatttggggcaaatgcactattagcagtttcaatggcagttaaaaaattgtctgcacgaattaaaaaaactccactttataaaactttcttaattaaaaatcagttcatgttaccttaccctttaatgaatgttattaacggtggagctcacgcaaacaatggtcttagaattcaagaatttatgatcagaccagataaggccaattcaataaaagaagcaataagaatgtgttttttggtaattaataatttaaaaatattactaaaacaaaaaggagagtccacatcagtaggtgacgaaggtggttttgccccaatgataaatgacaatgagaaagcgttaaaattaattgttaatgctatacgaaaagcagggtttaaaaatggaaaagatatatctatttgccttgatgttgcagcgaacgaattatttaaaaaaaaaaaatactcaattcactccaaaaaatttattaatgttgataaaacaataaatggatatttaaaattaataaaaaaatataaaattaaatctatcgaagatcctttt

SEQ ID NO: 279678 - DNA, 613 bp, Unknown
  Bacterial polypeptide expressing nucleotide sequence isolated from the Sargasso Sea
agagcttatcatccaagctattcaaaataatggtctcacagagggcaaggatattggaattgctttggattgcgctgcttcagaattttataatgagggtatttacaacctagcaagcgaatcgaaccagttaaactccaatgaattcactaattatcttaaagagcttacccagaagtatcctatcttttcaatagaagatgggatggatgaaaatgattttgaagggtggaaaaaccttactaaggccttgggagataaatgccaactagtgggagacgatctattcgtaacaaattcaatagaacttcaaagagggattgatgattctttggcaaattcaattttgataaaatttaatcaaattggaactatcactgaaactatgaaaactattcatctaggcaatatgaatggatttaaatcaattatttctcatagatcaggagaaacagaagatagcacaattgcagatctttgtgttggtttagggactgggcaaattaaaactggtgctccttgcagatctgacagggtggcaaaatacaatagattgctctggattgaagtggagcaatctgatctaccttttgccaaaaatgtcattagttaa

SEQ ID NO: 279679 - DNA, 961 bp, Unknown
  Bacterial polypeptide expressing nucleotide sequence isolated from the Sargasso Sea
ttgagatttaaaggaaaaggtgttttatcaaatgtaaaatttattgaaactataataaatgatgctcttataggagttaattcaaataatcaagaagaaatagataaaattttaatagatcttgacagtacagaaaataaatcaaaacttggagccaatactttattagcagtttctttagctaatgcaaaatcgtcagcaaataataatagtaattcattatataaaaatataaatttattagatcaatatattatgcctgttccaatgatgaatataataaatggtggttctcacgcaaacaatagtgttgatattcaagaatttatgataatgccagttggcgcaaactctttaaaggaagcagtaaggtatggtgttgagatttttcatactctcggaaaaattctggagagtaaaaaatatatcacaacagtaggtgatgagggagggtatgctcctaatctatcctccaataaagaagcgttagatgtaattatgatagctattgaaaaagctggttataaacctggagaggatataatgctagccttggatgttgcaagtagcgaattttataaagaagaaaagtattttttaacatctgaaaacaaacagtatagtagtcaggaatttatagagcttatagattcatggacacaaatatatccgataatatctatagaagacgctttagatgagaatgattggcatggctggaaagaattaacaaatttgttaggaaagaaagttcaattagttggagatgatttatttgtgacaaacccaaagatatttaaagaaggaatagataaaaatatagcgaacgctattttaataaaattgaatcagattggcacactaacagagactgtcgaggctataaaattagcaaaaagaaataattataatgcagtcgtttctcatagatctggagaaactgaggatacttttatagcag

SEQ ID NO: 279680 - DNA, 664 bp, Unknown
  Bacterial polypeptide expressing nucleotide sequence isolated from the Sargasso Sea
ttttgcaccagaccttaggtcgaatgaagaggcgatagatgttattcttgaatctatatctaaagcagggctaagcacagggaaagatataatgttggcgctagatgttgctgcgagtgaattatttgaaaataatatttatcatctgtattctgaaagtaaaaagctagaatcaacagagatggtaaactacctaaatgatcttgtaaaaaaatatcctattatttctatagaggatgggctccatgaagacgattgggaagggtggaaacaacttacaaaatcgctaggacaacaagttcaaattgttggggacgacctaacagttacaaatatctcacgattggaacatgctattgatgagcatagtataaatgctatcttaattaaactaaaccagattggtactgttacagagactatccaagctatagaaatggcgagaaaagcaaatctaggggtaattatttctcaccgttctggagaaactgaagatactacaatagctgatttatctgtcggaatgggaatgggccagataaagacaggctctatttcaagaactgatcgaacatgtaaatacaatcaattacttcgtattgaagaagaattaggaaaagcagcgaaaatagctaaccttagttatttaggtatacctagatga

SEQ ID NO: 279681 - DNA, 877 bp, Unknown
  Bacterial polypeptide expressing nucleotide sequence isolated from the Sargasso Sea
agtggtagcaaattattacctattccattaatgaacattttaaatggtggtagccatgcagataattctatagacatacaagaatttatgatttgtcctttagatgctggttcattctctaacgcattaaagataggagctgaaatttttcatatgttaaaatcactcttgaaaaaaaagagtttcatcacatcagttggagatgaaggtgggtttgcccctaatctcagatccaatgaggaagcaatagaaattatattagaatccattatcaaatcaggtttaaaaccgggtcaagaggtatctttagcactagatattgcagcaagtgaattatatgaaaaagaatattataatttatactctgaaaagaaaaaactaagcaccaatgaaatgatagaatatttaactaatcttgtaaaagattaccctattatatcaattgaagatgggttagatgaaaatgattggaatggctgggctcagttaacaaaaaaattaggcaataaagtacaaatcgttggtgatgatttaactgtaacaaacattgaaaagttgaaaaaagcgatagataaaaattgtataaatgcaattttaataaagttaaaccaaattggtactttgacagaaacaatgaacacagtttctatggctaaaaacgcaggctttggtgtaatcatctcacatcggtcaggggaaacagaagacacaacgattgcagatttggcagttgcagtgggtatgggacaaatcaaaacaggctctctttcaagaacagaccgaatatgtaaatacaatcaattattgcgaattgaagaagagctaggagtgggtgcaaagctagcggaggtaaatgtatttggtaattatcaatgaa

SEQ ID NO: 279682 - DNA, 649 bp, Unknown
  Bacterial polypeptide expressing nucleotide sequence isolated from the Sargasso Sea
atgcctaaaataacaaatgtaaaagcaagacaaataatagatagtagaggaaatccaactgttgaatgcgatatagagtttgaaaattctatctttggaagagctgcggttccaagtggagcatctactggagtgcatgaggctctggaattacgagataatgataaattcaaatacaaaggtaagggggttctgagagcagtaggaaatattaatgatacaatttttaatgaactagttggaaaatcatttgaagatatttcttcttttgatgattacttattagaacttgatggtacagaaaataaatctaacctaggcgcgaatgcaaccctagccgcaagcttagcttttgcaaaatgtttagcttcttctgaaggtcatgaattgtattcttttctaggtaaagagcataaaatgagtcttccagttccaatgatgaacattattaatggaggttcacatgcagataacgatgttgatattcaagaatttatggttgcccctattggtgcaaataatttttcagaagcacttcaatatggttgcgaaatatttcattcattaaagtctttattaaaatcaaaaggattaaatacaaatgttggtgatgaaggtggatttgctcctaatataaatagctctagtg

SEQ ID NO: 279683 - DNA, 707 bp, Unknown
  Bacterial polypeptide expressing nucleotide sequence isolated from the Sargasso Sea
tatgcatttcataaaaaatatagaggctagacaaatatttgacagcaggggtaatccaacaatcgaaacggatgtgtatatttcaaatggattatttggaagatcttcggttccttcgggcgcttctacaggtaagagtgaagcattcgagttaagagataataagaaatcttatcatggaaaatctgtgttaagggcagttgagaatgtcaatactattatacttgatacaatttctggttatgatgttctagagcaagaatatattgataatactttaatagaattagacggtacaacaaataaaaaaaggctaggcgcaaatgcaatattaagcgtttctctcgcctgtgctgatgcagcctcaaaatacttaaatttacctctttataaatatctgggtggatctaaagcatttagaatgccaacccctatgctaaatattataaatgggggtgcgcatgctaataataatctttcatttcaagaatttatgattatacctattaattgtatttcatttactgaggctataaaaaaagcatcagaagtatttcacactttaaaaaatatacttgagaaaaaaaatatttctactgctgttggtgatgaaggaggttttgctccaaacttaaaaaatgaagatcatgcatgttcattaataaaggaagctatttctaaatctggttataaattaggtaaagatt

SEQ ID NO: 279684 - DNA, 883 bp, Unknown
  Bacterial polypeptide expressing nucleotide sequence isolated from the Sargasso Sea
cttgggggatccattatccaatctccttccagtcccattaatgaatgtaataaatggtggtgcacatgcaccaaatagtcttgattttcaggaatttatgcttgtcccacatggagtaaataatttcagtgaatcattaagaatgggtactgaaatttttcactcattaaaatcattacttgatcaaaaaggtctatctactgctgtaggcgatgagggtggatttgcacctaatttgtcatcaagcgaagaagcaggggacctattattagaagcaattcaaaaagccggatttaaacctggtgaacaggtttctttagctttagatgctgctagtactgaattttacagtgatggtatttataaatatgaaggtaaaagtttaaatagttctgaaatgatttcatatctttcaagattagtttctaattatccaatagtttcaatagaggatggtttagctgaggatgattgggaggggtggtcagaattaaacaaagaattaggaaataaagttcagcttgtaggtgatgacttattcgttactaactcagaaagattaaggaaagggattatggagaagtctgctaattcaatcctaataaaggtaaatcaaattggaacattaactgaaactttggaagctattgagttagctaaaatgtctggtttaacaagtgttattagtcatagaagtggtgagactgaagatacaacaattgcagatttatctgtcgccacaagatcaggtcagatcaagacaggctctttgagcagaagtgaaaggatcgcaaaatacaataggcttttaaaaattgaggaggaattgggaaatcaagcaagattcgctggagctttaggtttaggtcccaaaaatatatag

SEQ ID NO: 279685 - DNA, 469 bp, Unknown
  Bacterial polypeptide expressing nucleotide sequence isolated from the Sargasso Sea
atggcaaagattaccaatgttaaaggtcgtcaagtttttgacagtagaggaaatccaactgttgaagcagaggttttcttagataatgatatttccgctagtgctatatctccttctggggcatccaccggggcatttgaagctcatgaattgagagatcaagataaaaataattttttgggaaaaagtgttaacaaagcaattgataatattaataacaagatcagatcaagtttaaaaggattagacccagccgaccagtctaaaatagataaagtcttattagatttagacggaactgaaaataaaaaaaatcttggcgcaaatgcgactttagcagtttctttagctaactttaaatcatcagctttatcggctaaaaaaccactttataaaaagttaggtaaatctttttcattaccaaatcctttaatgaatattataaatggaggagctcacgcagataacg

SEQ ID NO: 279686 - DNA, 343 bp, Unknown
  Bacterial polypeptide expressing nucleotide sequence isolated from the Sargasso Sea
atgtccgctataataaatattcaggcacgtgaaattcttgactcgcgtggtaatccgactgttgaagtcgatgtttatctggaggacggttcatttggccgagctgcggtgccctcaggtgcgtccactggtaatcacgaagctgctgaaatgcgggatggtgttgcaaatcgatacggtggcaaaggtgtattgaaggctgtgcaaacagttaatacagtaatttttgagagtttaaatggtagcgactcatttgatcaagtagggcttgatcagcgattgattcaattggatggcactcccaataagtcgagattgggtgcaaatgcgatactaggcgtat

SEQ ID NO: 279687 - DNA, 481 bp, Unknown
  Bacterial polypeptide expressing nucleotide sequence isolated from the Sargasso Sea
atgcctaaaattaaaaaagttaaagccagagaaattattgatagtcgcggcaatccaactgttgaatgtgatatttatttatcagatgaagtttttggaagagcatcagttccttctggggcttctactggtatgcatgaagccattgaacttagagatcaggataaaaatagatatggaggaaaaggggttttaaaagcattatccaatattacagaaataatatctccaaaaatattaaacaaagaatttaaaaatattaaagattttgatgaatttttaattgctacagatggaactaaaaataaatctaatttaggtgcaaatgcaacattagctttaagtttagcctttgctaaatcacttgcctcttatgagaaaaaaaatctttttcattatttaagtaattcagataaatatattatgccagtacctatgatgaacattattaatggcggttctcatgcagataataaagttg

SEQ ID NO: 279688 - DNA, 736 bp, Unknown
  Bacterial polypeptide expressing nucleotide sequence isolated from the Sargasso Sea
aatgggctctgaagtatttcattgtttaaaaaaggagttagaaaagcaaggactaggaacaactgtgggggatgaaggcggatttgctccggcattaaaatcaaatgaccacgcaattgagctccttcttaattctatcgaaaaggctgggtttaatagtggaaatgatatttctttagctttagacgtggcagcatcaagtttttataaaaatcataaataccatttaaaggttgatggaagcattttagatactgatggaatgattggtttttatgaagatttaattaaaaaatacccaattgtttcgattgaagacggtctagatgaaaacgattgggagggttgggctaacatgaacaaagcacttggttcaaagattcaaattgtaggtgatgatttaactgtaaccaacccaaaaaagctagaaaaagcaattgagcaaagctcaatgaactctatattaattaaattgaatcaaattggtactgtttcagagactatcgaggccatagagatggctaagaaaaataatatgaattatatcatttcacacagatcaggtgaaacggaagatacttttatctctgatctatcagttgcgatgaatggcggacaaattaaaacaggttcagtgtgtcgatctgatagaactgcaaaatataatcgacttctaagaattgaagaagaactccaaaactcaagattgtgtaattctttaaactttattaaatga

SEQ ID NO: 279689 - DNA, 928 bp, Unknown
  Bacterial polypeptide expressing nucleotide sequence isolated from the Sargasso Sea
attttctaaaacaaaaagcgcctcagccatatgtccatcatgtgcttcgacgggatcttatgaagcttttgaaaaaagggacactaaaaatgttcgctatttgggaaagggagtttttggatctgttaaaatagtaaatacacttttatcaaaaaagctaaaaaatcttaatgtacacgaccaggaatatatagatagcattttgctaagattagatggcacaaaacaaaagacgaaattaggagccaatacaattttagcaacatctatggcaataaaaaaattatcagcgaaattaaaaaaaattgcgctctacaagacttttttagtcaagaaaaactttaaattaccatatccattgatgaatgtaatcaatggtggcgctcatgctaacaatggtctacaaatccaggagtttatgattagacctgataaagcaaattcatttacagaagctattagaatttgttttatagtgattaataatctaagaaaattaattcaaaaaaaaaatctttcaacatccgtgggcgatgagggtggttttgcaccaatgattggaagtaatgaaatggctttaaatcttattcttaaatcaattagaatgtctggttttaaaaatggttcagatgtctcaatatgcttggatgttgcagccaatgaactatataaaaaaaaaaaatattcagtccactcaaaaaaatttatatctgttgaaaaaacaattcacaaatacttaaaaatgataaaaaaatacaagataaaatctatcgaagatccctttgctgaaaacgattggaaatcatggtcaaaattagtttataaagataaaaataaaactcaaattgttggtgatgatttgtatgtcacaaatcttgaaaggttaaaaattggatttttaaaacatcatctaattcaattcttataa

SEQ ID NO: 279690 - DNA, 412 bp, Unknown
  Bacterial polypeptide expressing nucleotide sequence isolated from the Sargasso Sea
tgtagatccattttctgaaaatgattggtcctcatggaataaactaacaaaatcatcaaaaaaaacccaaatagttggtgatgatttatatgtaaccaatctagaaagattaaaaatgggatttttaaacaattcttcaaattcgatacttgttaaactaaatcaaatcggaacagtaactgaaactttagaagttataaaatttgcaaaaataataggatttagcacaattatttcgcatagatccggcgatagtgaagacacatttattgcagatctagcagttggtaccgactcaaatcagattaaaacagggtctttgtccaggtcagaaagagttgctaaatataatcaattaattcgaatagaagaaaatctaggaaagaaggcaaaaatgaataaaattcattaa

SEQ ID NO: 279691 - DNA, 514 bp, Unknown
  Bacterial polypeptide expressing nucleotide sequence isolated from the Sargasso Sea
atgagtgaaattatttcagtgaaagctattcaggttcttgattcaagaggcaatccaacagtcgaggctgaagtcactttaaaagatggcaccaccggacttgcatctgtgccctcaggcgcttcaacaggaagcagggaagcggttgagttaagagacggagacaaagatatttatttaggaaagggcgtttcagcggccgttaagaatatcaattcagaaatacaatccgcactcaaaaatcaggatatttatgatcaaaaaaagattgatcaaatcatgattgatttagacggtacagaaaataaatccagacttggtgccaatgcaattctcgccgtctcacttgcttgcattaaggctgccgcagcatcgaagggcatgcgattatttaagcatttatcgccaggtccttatagttttcctgttccaatgatgaacatcattaacggaggtgagcatgcgaataacaatattgatattcaagaagtttatgattctgcctgtaaatttg

SEQ ID NO: 279692 - DNA, 810 bp, Unknown
  Bacterial polypeptide expressing nucleotide sequence isolated from the Sargasso Sea
ttcttaatggaggtgctcatgctgataacccaattgattttcaggagttcatgattcaacccattggatttgattcttttcaggagactttgagggctggagttgaaatctttcatacactaaaaaatatactcaaatctaaagggttaagtacatcggtaggtgatgaaggaggatttgcccctaatctagaatcacctgaagaggcattggatttaataatggtagcagtagaaaaagcaggctataaacctggtgaccaagtctcgctgtgtctagatattgccgcaacagaattttactctaattcaatttataaccttgaaggaatgggtcaaactctcaattcttctgaaatgacagagtatataaaagaactatgcaaaaattatcctattagctcagttgaagatggtcttgatgaggatgattggacaggttggtctgatatgactaaatctttaggttctaagattcaattagtaggcgatgatctatttgtcacaaatacaaaaagaattaaacagggtatagaagagggttcagcaaattcagttctagtaaaagtaaatcagattggaactttaatggaaacctttgaggctatagaaaccgctgtccaaaataattacactacagttatttcgcataggtcaggagaaactgaggatacatttattgctgacttagctgtcggagttgcttctggacaaataaaaactggagcaccatcaagatcagatcgggtagctaaatacaatagattactaatgatagaagctgagtcaggtatatgtatagctcaataac

SEQ ID NO: 279693 - DNA, 531 bp, Unknown
  Bacterial polypeptide expressing nucleotide sequence isolated from the Sargasso Sea
aatgtcaaaaattaaaaaaattaaaggaaggcagattttcgatagtagaggtaatcccactattgaagttgatattacacttgaagatggtagtttcggtagggcatcagttccttcaggagcttctacaggagcatatgaagcttatgagcttagagatggagaaaaaactttatctggaaaaactgtattaaaagccgttgagggtatcaatactgagataagtaatgtgctttgtggaatggaagcatctgcgcaagaaaaaatcgacaataaaatgattgagctagactcaacaaataataaatctcgattaggagcaaatgcgatattgggtgtttcactggcatcatcaagagctcaagctaattcagagggtaagcatttatacgaatatttaaactcatcagattcatatattttacctgttcctatgatgaatttgattaatggtggggcgcattctaataattcattatttattcaagaatttatgattatgccagtatctgcagaaacatttaatcatgc

SEQ ID NO: 279694 - DNA, 216 bp, Unknown
  Bacterial polypeptide expressing nucleotide sequence isolated from the Sargasso Sea
tggcccattcaaataatattgagactataatttctcataggtctggtgaaacagaagacacctttatagcagacttggctgtagcaactaattctggtcaaattaaaactggatctatatctaggagtgatagagtttcaaaatacaaccagttgattagaattgaagaaatgttaaactcaaaaaaaactataaaaaacaataggttctattgat

SEQ ID NO: 279695 - DNA, 747 bp, Unknown
  Bacterial polypeptide expressing nucleotide sequence isolated from the Sargasso Sea
aagtttttcaatgcctaaaatcacttctatcgaagagaaacatgtcaacaactgtaggtgatgaaggagggttcgcgcctaaccttgaagggaataaagcagcactggatttaatcttacattcaatagaacatgcaggttttaaaccaggtcggcaagttgggctagcacttgactgcgcgagtacagagttttacaaaaataagaagtatgtgttagcggcggagaaaaaggaattttcgccagttgctttttctgcctatttaaaggaactggtcaaccaatatccgattatttcaatcgaggatgggatggctgaagatgactttgttgggtggaagcttttgacagatgaattgggttctcaaatacaattggtgggagacgacttatttgttaccaacacaaaaatgttagataaaggaatacaaatgggtattgccaatgcaattttaatcaaaatcaatcaaattggcactcttaccgagacttatgcagccatagaaatggctaaaagagctggatatggcactgttatttcccatagatcaggcgaaacagaggataattttatcgctgatctggcggtagcaagtaacgctttgcaaatcaaggcaggctctttgtctcgtacagatcggcttgctaaatacaatcaactcattcgtattgaggaagaattaggtgattgtagttccttcgctggtgggcaagcgtttaacctgaatggatataatgaagaatagt

SEQ ID NO: 279696 - DNA, 818 bp, Unknown
  Bacterial polypeptide expressing nucleotide sequence isolated from the Sargasso Sea
atttaaaaaaaggagtttccaagtggctgttaaaaatattaatactgaattacaaaaattaattggttcggatgtgaatgatcaaaatgaactagataatcagatgattgatattgatggaacaaataataaatctaatattggagccaattctatattagctgtttcaattgcaagctgtaaagcaggagcattaaataataaattaaatttgtttgaatatattgacaaaaaaaataacgaatattctttaccatacccaatgttaaacataattaatggaggagctcatgctaacaacacacttaaaatacaagaatttatgatacgtccagacggagcaaaaaattttactgaatgtttgcaaatttcttttttaataattcaaaaattaaaagaattattagttaaaaaaaatttaagtagtagtgtaggcgatgaaggaggttttgcaccttcgcttgataccgatgaaagcgccattgaactaattttatctgctatacataacgcaggttttaaagcaggagaagatgtcattatatgtttagatgttgcttcaaatgaattatatgaaaaaaataaatataaaatattagatgataaattattatcatgtgatgaaatgattgatttttattacgacataacaaaaaaatatcctattttatcaatcgaagatccaatttttgaggacgattgggatacgtggtctaaattgaataaaaagttaggtaataaaatacagattgttggagacgatctatttgttacaaacataaatagattaaaaaaaggtgttgaaaaaaaatcggcaa

SEQ ID NO: 279697 - DNA, 605 bp, Unknown
  Bacterial polypeptide expressing nucleotide sequence isolated from the Sargasso Sea
aatgacaaagattaccaacgttaaaggtcgtcaagtttttgacagtaggggaaatccaactgttgaagcagaagttatcttgcaagatggatcatttggaagttcgatagtaccgtcgggtgcatctactggtcgttatgaggctcatgaacttagagataaaaataaagattatctaaataagagtgtatttaatgctgtaaaaaatataaataataaaatttcaaaagcattaataaatcaaaactcaataaatcaaagggaaattgataagatattaataaatttggatggtacagaaaataaatccaatattggcgcaaatgctattctagcagtatcaattgcaaatttaaaagctgctgcaaaattttcaaaaaaagaaatatacaaatatataagttttggtacaaataaatctgtttttttcaccccttatcctctaatgaatattattaacggaggagcccacgctaataattcattagaaatccaagaatttatgattagaccagatggagcaaaaagttttaaagaatgtatgcagatgtcttttttggtaattcaaaatttaaaaaaaaaattagaagataaaaaaatttcta

SEQ ID NO: 279698 - DNA, 622 bp, Unknown
  Bacterial polypeptide expressing nucleotide sequence isolated from the Sargasso Sea
gataatactaatgttggtgacgagggtggttttgctccaaatttaaaaagtacggaagaggcaattaaattaatatgtaaagcaatagaaaaatctggttttaagcctggagatgatatttctatctgtttggatgttgctgcgaatgaactcaaaaaaccgatcactctaaatgattactccgaattgataaaaaaatatccaatcaaatcaattgaagatccttttaaggaagacgaatgggattcttggaaaaaattaacaaatgatacaaatatacagatagttggtgatgatttatttgccacaaatcacaaaagacttaaaaaaggaattgaagaaaaatcagctaatgctgttctagttaaacttaatcaaattggtacagtgactgaaacattagatgttatagaattagctcataaaaatggtttaaaaacaattatctcgcacagatctggcgactcagaggatacatttattgctgatttggcagttgcgacaaaatcttcccagattaagagtggttctttggcaaggtctgaaagggtggctaaatataatcgtttattaagaatagaagaggagcttggaaattcttcaaaaatggctaaaatctaat

SEQ ID NO: 279699 - DNA, 757 bp, Unknown
  Bacterial polypeptide expressing nucleotide sequence isolated from the Sargasso Sea
aaaactattcttggtgcaaattctatgcttgcagtttcaatggctgttaaaaagctatcagctaaagttaaaaaattacctttgtataaaactttttttataaaaaaaaatttccaattaccctatcctttaatgaatattatcaatggtggagctcatgcaaacaatggtcttagaatacaagaatttatgatcagacctgatcgagctaagagtttttctgaagcaatgagaatatgctttatagttataaaaaatttatcaaaattaataaaaaataaaggattatcaacttctgtgggagatgaaggtggttttgcacccatgataagtagtaacaaccaagctcttgatttaattgttagtgctataaagaaatcagggtttataaatggtagagatgtttcaatttgtttggatgtagctgcaaatgaattatttaaaaaaaataaatattcgattcattctaaaacttacatatctgttgaaaaatctattaaagaatatcaaaaaattattaaaaaatataaaatcaaatcaatcgaggatccttttgctgagaatgattggctcgcatggaataaattgatgagatcaattaataaagttcaaatagtgggggatgatctttatgtgacaaacttagaacgacttaagaaaggttttttaaatatttcctcaaattcaattttgattaaattaaatcaaattggaacagtttctgaaacgttagatgtaattaaatttgcccaaacca

SEQ ID NO: 279700 - DNA, 518 bp, Unknown
  Bacterial polypeptide expressing nucleotide sequence isolated from the Sargasso Sea
aatggcaaaaataaaaagtataaaaggcagacaagtctttgatagcagaggaaatcctacagttgaagctgaagttttattagaaaatgatatttctgcaaccgcaatttcaccttcaggagcttcaacaggtgcatttgaggctcatgaattaagagatcaaatacaagataaatttttaggtaagagtgtaaatattgctgtagaaaatattaataaaaaaatttcaagtaaattaaaaggattagatgcggatgatcaaaaaaatattgataaagttctgttagaaatagacggaagtgaaaataaaaaaaacttaggagccaatgctattcttgcagtttctcttgcaaattcaaagtgttcggctatatcaaacaagaaatcattattcaaaaatttaggaagtagtttttcaatacccatcccattaatgaatattataaatggtggtgctcatgctgacaatgatttaaatattcaagaatttatgattagacctgactctgcaaaaaatt

SEQ ID NO: 279701 - DNA, 258 bp, Unknown
  Bacterial polypeptide expressing nucleotide sequence isolated from the Sargasso Sea
aactaaatcaaattgggacagtatcagaaacaattgatgtaattaaatttgcacaaacaataggttttaaaacaattatttcacatagatcaggggacagtgaagatacatttattgctgatttagctgttggtactaattcaaatcagatcaaaactggttctttatcaagatcagagagagtagcaaaatataatcaactaatacgtatagaagaagaacttggaaaaaaagcaagaatgaataaaattcgttaat

SEQ ID NO: 279702 - DNA, 630 bp, Unknown
  Bacterial polypeptide expressing nucleotide sequence isolated from the Sargasso Sea
tttgaattcttctattgaaaaaatatttgctagagaaattttagattctcgaggtaaccccactgttgaagttgatgtaatgacaagcgatggattaatgggacgtgctgcggtaccctctggcgcctcaacggggattcatgaagcccttgaattaagagatggagataaaaacagatacctagggaaaggggtaaggactgccgttaataatataaataacattattgcaccctccttaaaaggctgtaaagctactgagcaatcagaaaacgatagccagcttttagcgctagatgggacagaaaataaatcaaatctaggtgcaaatgcaattctaggagtctcaatggcgattgcacacgcaggtgccaaaattgaaaagaaatctctttatcgatacctaggaaagaataacgcacatatactgccaatgccaatgatgaatattttaaatggcgggagtcatgccgataacctagttgatattcaagaatttatgataatgccttttggtgcaaaaagattctcagaagcattacaaatggggacggaagtatttcaccatttaaaatcagtattaaaatccaagtcattatcaacggcagtaggcgatgaaggtgggttcgc

SEQ ID NO: 279703 - DNA, 852 bp, Unknown
  Bacterial polypeptide expressing nucleotide sequence isolated from the Sargasso Sea
tgcccgtgcccatgatgaacatcatcaacggtggtgagcacgccgataatcccatcgacttccaggaattcatgatcatgcccgtagacagctccagttgcgcggacggtatccgcatgggctcggagattttccaaacgctgaaaaagggtcttcaagatgcgggccacaataccaacgtcggcgacgaaggcggcttcgctccaaatattggctcgacgatcgaggcactggacttcatcatgaacgccatcgagagggctgggtataaaccgggctccgaagtcatgctagccttggatgccgcatccacggagttctataaagacggccaatacgtcctaaccggtgaagacaagatcttggatgccgcaggcatggtcgactattacgcagatctgatatcgagataccctattttatctattgaggatggcctggccgaagacgactgggatggttggaaagcgctcacagatgcgattggcgatcgggtgcagttagtcggcgatgacctgttcgtcaccaaccccaaacgtctagcagacgggatcaagaagggggcagggaactcgatcctagtcaaagttaaccagatcggtaccctatccgagaccctggaggctatagaaatggcgcacaaggctaactatacggcggtcatctcgcatcgttccggagaaaccgaggacacaacgatttccgacattgcagtagccaccaacgccggacagattaaaacaggttctctaagccgttcggaccgcttagccaagtacaaccagctaattcgcattgaggaattgctgggcccggcggcagcctacgccggtcagacagtcgtaccttagt

SEQ ID NO: 279704 - DNA, 328 bp, Unknown
  Bacterial polypeptide expressing nucleotide sequence isolated from the Sargasso Sea
atgggaaagattacctcaattcattctatccaaatattagactctaggggaaacccaacagttgaagctactgttgagcttgagaatggagcaataggtagagcctcagttccatctggagcatctacaggctcaagggaggcaatggagctaagagatggagatcaagataagtacctaggaaaaggggttcagaaagcggttaaaaatattaacacggagatacaaagtactcttttaggacaatctattgaagatcaaaaaaggattgaccagttaatgattgagctcgatggaactgagaataagtcgagacttggggctaatg

SEQ ID NO: 279705 - DNA, 774 bp, Unknown
  Bacterial polypeptide expressing nucleotide sequence isolated from the Sargasso Sea
gctaattcttataaggttcccttattcaaatatcttggaggcgcaaaacaatttaaaatgcccacgccaatgttaaacgttattaatggtggagctcatgcgaataacagtctaaggtttcaagaatttatgataatcccaattggtattgctacctttaatgaggcaattctaagatcatcagaagtgttccattcattaaaatcaatattagatataaataaattttctactgctgtaggggatgaaggtggatttgcacctaatctaaagtcagaagatgaggctcttaaattaatttgcgatgctgtcattaaaagtggttataaattggaaaaagattttctattagcaatagatgttggggcatcagaattttataaaaatagaaagtacgatatgccgacttcaaaaaagaagttaacttctaaagaattctccaagcttctaaataaactttgtaacaaatatcctattatttcattagaagatccatttgatgaaaatgattgggactcatggactaattacacaaaaaataaaggtgataagctgcagatagttggagatgatctctatacaacaaatgtatctagattaaaaactggaatagaaaaatctgcttcaaatgcaatattaattaaactaaatcaaataggaaccttaacagaaacattggaagcaatcgaaatggctcaatcaaataatattgaaacaataatttcacacagatctggtgaaactgaggacacttttatttctgatttggccgta

SEQ ID NO: 279706 - DNA, 472 bp, Unknown
  Bacterial polypeptide expressing nucleotide sequence isolated from the Sargasso Sea
tgaaaaatctattaaaaaatatttacaactaattaaaaaatataaaataaaatcaatagaagatccatttggtgagaatgattggaaagcttggtctaaatttgtaaaagcgacaaatggcaatattcaaatcgtaggcgatgatctatttgttaccaatctcgaaagattaaaaataggttttttaaatttatctggaaatagcattcttgtaaaactaaaccaaataggaacagtaactgaaactttagaagtaattaaatttgcacaacttattggttttaagacaataatatctcacagatctggagatactgaagataccttcattgcagatctagctgtaggcactaattcaaatcaaattaaaacaggatctcttgcaagatctgaaagaatagccaaatataaccaattaatcagaatcgaggaagggctaggcaaatctgcaaaaatgaataaaattgattaa

SEQ ID NO: 279707 - DNA, 181 bp, Unknown
  Bacterial polypeptide expressing nucleotide sequence isolated from the Sargasso Sea
atcatttctcatagatcaggggatagtgaagatacatttattgctgatttggcatccgcgacaatgtcctctcaaattaaaactgggtctttggcgagatctgaaagagtagctaaatataacaggttattacgtatagatgaagaacttggaaatcaggccaaaatggctagtatttaac

SEQ ID NO: 279708 - DNA, 108 bp, Unknown
  Bacterial polypeptide expressing nucleotide sequence isolated from the Sargasso Sea
ttaaaacaggatctttggctagatctgaaagagtggctaaatataatcaattattacgtattgaagaagaacttggaaaaaaagccagaatgaataagattcattaat

SEQ ID NO: 279709 - DNA, 205 bp, Unknown
  Bacterial polypeptide expressing nucleotide sequence isolated from the Sargasso Sea
gcaattatatctcaccggtctggtgaaacagaagacacaattatttcagatttttctattgccatgggaatggggcaaattaaaactggctcattatcaaggagcgatagagtcgctaaatacaaccagctaattagaatagaagagcaattgggtgaaaaagcaaaatacgccacaatagattttttaggaacagctagatgag

SEQ ID NO: 279710 - DNA, 849 bp, Unknown
  Bacterial polypeptide expressing nucleotide sequence isolated from the Sargasso Sea
gtggtcggccgtgcggcggtaccgtctggcgcatcgacaggagtccatgaggccgttgagcttcgggacggcgatccgaaacgatatctaggtaaaggtgttagcaaggctgttgtgaacacgaattcgcgattggcaaaggcagtcgtcggtttggatccctcggaccagattgcaattgacgatcggatgcgcgaagcggacgggacgaagaacaaagggaagctgggagcgaacgggatgcttggtgtgtcgcttgctgtcgccaaagcggcagcaaacgccttcggtttgccgctctacaggtatatcggtggagcgtccgcctgtcagcttccggtgccgatgatgaacatcctgaatggcggcgcacacgcggatagcagcgttgatctgcaggaatttatggtaatgcccgtgcacgcgaagactttcaaacaggcgcttcaggcgggtgccgaaatctttcacgcgcttcgaagcgtactccagaaggctggatatagtacaggggtcggtgacgagggtgggttcgccccgagtctgggttcgaatgagcaggctctcgaggtaattgctgaagcaatcaagaagtcaggctacactctcggacgggacatcctgctcgccctggatccggcgacgagtgagttttactcaggtgggaagtatgtgttcaaaaagtcggacgggtctaaacgttcgtccgcgcagatggtagacttctggaaggactgggcgacgcggtatccgatcgtctcgatcgaagacggtctggacgaagacgactggaagggctgggagaagctgacggcagagatcggcgatcgtgttcagttggtgggtgac

SEQ ID NO: 279711 - DNA, 628 bp, Unknown
  Bacterial polypeptide expressing nucleotide sequence isolated from the Sargasso Sea
atgggaaaaatcaaatcaatagtagctagagaaattttagattcaagagggaatcctacagttggagtaaacattacactcgacaataatataagtgcattttcatctgttccatcaggtgcaagtacgggatcaagagaagctttagaacttcgtgacaatgatccaaaaagatataaaggtaaaggagttctcaaggctgttgaaaatataaattcaattattgcaaaagccttaatttctaaagatgtaagtggtcaaaatgaaattgatgcaatcatgattgaaattgacggaactgaaaaaaaagaaaatttaggtgcaaatgctatattaggtgtttcattagcagcactaattgcgtctagtaaatctgaaaaaattaatctttatgaaagaatttcaaatattacagaaagcaaaaaaaagtttaccttaccagttcctatgctcaatattatgaatggtggtgcgcatgctgttaattcaactgattttcaagaatttatgataattcctgcaggattcgatagtttcaatcaagctattagagcaggatcagaaatttattcaacattaggaaaaattttagaaaaaagatggtcattcaacaaatgttggttatgaa

SEQ ID NO: 279712 - DNA, 871 bp, Unknown
  Bacterial polypeptide expressing nucleotide sequence isolated from the Sargasso Sea
atattagcttgttcgttaagttttataaaatgtttagcaaacaatagtaataagagtttatatgaatttcttttaaccgatcaagaatacattttaccgtgtcctcttatgaatataatcaatggaggtgcacatgctaataacggtttagatatacaagaatttatgattataccagctggttttaaatctttctctgattctctccaggcaggagttgaaacatttttaaaactaaaagaattgctaaacaaaaaatcttattctacagctgtcggcgatgagggaggatttgcgcctgatctgaaaactaatgaagaagcattaaatttaatattagactcaattactttagcagggtatgagcctggaaaaaatatttttctagctttagatgtagcgtcttcagaattatataaccaaggcaagtactcctacgataatgaacttttaagttcttccgaattaataggtgtttataaagatttaacctctaaatttccaatcatttcaattgaagacccgttagacgaggatgattgggaatcatggaaatcaataactaaaagccttgggaatagtatacagcttgtaggcgatgatctttttgtgaccaataaatcaaagctacaaatgggaatagatacaaatgcagcaaacagtattttagtaaaaatcaatcaaattggttcaatatctgagacactagacacgattaatatggcaaaaaataataattattcatatataatttctcataggtctggtgaaactgaagattcatctattgcagatattgcagtaggtacaaaatctggacaaataaagactggttcgtgttccagatcagatagaacggcaaaatacaatc

SEQ ID NO: 279713 - DNA, 898 bp, Unknown
  Bacterial polypeptide expressing nucleotide sequence isolated from the Sargasso Sea
gcaaatgcaattttagcagtatcaatggcagcaaagaaactttcagctaaaataaaaaagattcctttatataaaagttttctagttaaaaaaaattttcaattaccatatccgttgatgaatatcataaatggaggagctcatgccaataatggactcagaatacaagaatttatgatcagaccagataaagcaaaaagtttttctgaggcaatgagaatttgttatatagttataaaaaatttaagcaaactaattaaaaataaaggactttcaacttctgttggtgacgagggaggatttgctccaatgattagtagcaacaaacaggcattagaattaataactagtgcaatcaaaaaatctggctttgtaaatggcaaagatgtttctatttgtttagatgtagcagctaatgaattattaaaaaaaaataaatattcaattcattcaaagagctacatctcagtaaaaaaatcaattattgaatataataatattattaaaagatataaaattaaatcaatagaagatccttttgctgaaaatgattggtctgcatggaatatgatgatgagatcaattaagaatgttcaaatagttggagatgatttgtatgtaacaaatttagagcgtttaaaaaagggattcttaaatgtttcttcaaatgctattttgattaaattaaatcaaattggaacagtatcagaaactatcgatgttattaaatttgctcaaacaataggtttcaaaactatcatttctcatagatcaggagatagtgaggatacatttattgctgatttagctgtaggcactaattctaatcaaattaaaactggatctttagctagatcagagagagtagctaaatataatcaactaatacgtatagaag

SEQ ID NO: 279714 - DNA, 823 bp, Unknown
  Bacterial polypeptide expressing nucleotide sequence isolated from the Sargasso Sea
taatagtgcatctgcaatttgcccttctggtgcatctacaggaacttttgaagcttttgaaaaaagagataaaaataataaacggtatttaggaaaaagtgttttaaatgcagttaacttagtcaactcaaagatttcaaaaaaattaaaaggacaaagcattcacaaccaagaaagaattgatgctattttaattaacttagatggcacaagacaaaaaactaacttaggagccaatgcgatgttagctgtttcaatggctgttaaaaaattgtctgcaaaggtaaaaaaattacctttgtataaaactttttctcaaaaaaataactttcaattaccttatccattaatgaacattatcaatggtggagcgcatgcaaataatggccttagaattcaagaatttatgatcagacctgatcgagcaaaaagtttttctgaggcgatgcggatttgttttgttgtcattaaaaacttaagtaaattaattaaagataaaggattatcaacttcagtaggtgatgaaggtggatttgcacccatgattagtagtaataatcaagctttagatttaattgtgagcgcaattaaaaaatcaggatttattaatggtaaagatgtttctatttgtttagatgtggccgctaatgaattatataaaaagaataaatactctattcattcaaaaagttatatttcagtagataaatccattaaagaatatcaaaaaattattaaaaaatataaaatcaagtctattgaggatccatttgctgaaaatgattggttggcatggaataaattaatgaaatcaataaaaaaa

SEQ ID NO: 279715 - DNA, 238 bp, Unknown
  Bacterial polypeptide expressing nucleotide sequence isolated from the Sargasso Sea
gaagctatcaagcttggcgacagaaaatagttttgcatctattatgtcccataggtcaggtgaaactgaggattcttttatttcagatttagctgtagcttcacgatgtcctttgattaaaactggctctttagctagatctgatagagttgcaaaatataaccagttacttagaatatcagaaaatgacaagattaaagggtatgctggtgaattaagtgaagtctttaaaagctag

SEQ ID NO: 279716 - DNA, 448 bp, Unknown
  Bacterial polypeptide expressing nucleotide sequence isolated from the Sargasso Sea
aacaatagaacactatttaaaactaattaaaaaatacaaaattaaatctattgaagatccttttgctgaagatgattggttatcttggagtagatttatgaaaaaaattagtaaaagcacacaaatagttggtgacgatttgtacgttacaaacctagaaagattaaagattggctttttaaataaatcttccaattcaattttaataaaactgaatcaaattggcactgtttccgaaacattagaagtaattaaatttgctcaattaattggatttaatactataatatctcatagatcaggtgaaagtgaagatacttttatttcagatctagctgttggtacaaattcaaaccaaataaaaactggttcattagctcgttccgaaagagttgcaaaatacaatcaacttataagaatagaagagaaacttggaaaatcatcataa

SEQ ID NO: 279717 - DNA, 270 bp, Unknown
  Bacterial polypeptide expressing nucleotide sequence isolated from the Sargasso Sea
agatcggtacgctgactgaaacattctcggctataaatatggcgcgagaagcaggttatacttctgtaatctcgcatagatctggagaaaccgaggacacaacaattgccgatcttgcggtcggaacctcagcaggacagattaaaacaggctcgctttgtcgttcagatcgggtggcaaagtacaatagacttttaaagattgaagagatgcttggcgatgcttctatttttaacggaatttctgaattcccagtggtaaatgattagc

SEQ ID NO: 279718 - DNA, 313 bp, Unknown
  Bacterial polypeptide expressing nucleotide sequence isolated from the Sargasso Sea
atgacaaaaattaaagacataaaagccagacaaattttcgattctagaggaaacccaacagttgaggttgatgttataacatatgataatataattgggagagcagcagttccatccggagcatctaccggagaacatgaggcagttgagttgagagatggaggaaatgattacatgggaaagggagttagtatggctgttagcaacgtcaattcaataataagagaaaatttattaggcaaatctgtttttgaacaaaaagaactagatagtttgatgattgatttagatggtactgaaaataagtgtattc

SEQ ID NO: 279719 - DNA, 646 bp, Unknown
  Bacterial polypeptide expressing nucleotide sequence isolated from the Sargasso Sea
aataattcaagtgaagttattgaaacaatattaaaagcaatagaggtttctggttttaaacctggcaaagatatttacttatcactagatgtagcttcaacagaattttataaaaataatatttattatttaagtggtgaaaatctagaattgggatcagatgaaatgatagtatacttagaaaaattagttaattcgtttccaatttattcaatagaggatggtatgtctgaagatgattggactggatggtctaatttaacaaatactttaggtaataaagtacaactagttggtgatgatttatttgttaccaataaaaaaagattacaaagagggattgatgaaaatgcagctaattccattcttgtaaaactgaatcagattggaacactaaatgaaactttagaatctattgttttggcaaaaaataataattttacaactgttatttctcatcgatcaggagaaacagaagatactacaatagcagatcttgctgtaggtgttgctgcaggtcagattaaaactggatcactatctcgtacagatcgtactgctaaatacaaccaacttcttagaattgaagaaaaactaggagatgatgcttcgtatgctggtaaatccatcttaaaaaatatttgac

SEQ ID NO: 279720 - DNA, 536 bp, Unknown
  Bacterial polypeptide expressing nucleotide sequence isolated from the Sargasso Sea
aaataatatttataatctgtattccgaaaataaaaagctagaatcaacagagatggtaaactacctaaatgatcttgtaaaaaaatatcccattatttctatagaggatggactccatgaggatgattggggaggatggaaagaacttacaaaggcgctaggacagcaagttcaaattgttggggacgacttaaccgttacaaatatctcaagattaaaatatgctattgaagaggatagcataaatgctattttaattaaactaaaccaaatcgggactgttacggagactatccaagctatagaaatggcaaaaaaagcaaatctaggggtgattatttctcaccgttctggagaaactgaagatacgacaatagcggatttagctgttggaatggggatggggcagataaagacaggctctatatcaagaactgatcgaacatgtaaatacaatcaattacttcgtattgaagaagaattaggaaaaaccgcaaaaatagccaatcttagttatttaggtatacctagatgag

SEQ ID NO: 279721 - DNA, 671 bp, Unknown
  Bacterial polypeptide expressing nucleotide sequence isolated from the Sargasso Sea
tgcgactagtgtaggcgacgaaggcggttttgccccaaatcttaaaagcaatgaagaagcatgcgaagtcattatcgaagcaattcaagtagcaggttatgagcccgggaaagacattttcttggctcttgacgcggcagcttcatcattttgtaatcaaggttcttatgtttttcagaaatccgggtcagggacaaaaaacttaacagagatgctgggattttacgtaagcatggttgaaaaatatccaatagtttccatagaagatccaatggatgaaaatgactgggacggattttccgccatcactaaaaaacttggtgataagattcaaattgtaggagacgacctgtttgttaccaatacagattttgtcaggaagggtataaggaaaaaagcagccaatgccgtgctgatcaagcttaatcaaatcggaaccttatcagaaactttggccacaattcagctttgccaaaaatcaggctggaattacattatttcacatcgcagcggtgaaactgaagacacatttattgcggactttgcagttgcaatggcaggcgggcagatcaaaacgggctctgcttcacgtagcgaacgtattgcgaaatataatcgcttgctggaaattgaagccgaactgggtgagtctgcaatatttgggagttgat

SEQ ID NO: 279722 - DNA, 222 bp, Unknown
  Bacterial polypeptide expressing nucleotide sequence isolated from the Sargasso Sea
tatgcctgaaataaaatctataaaagctagagagataattgatagtagaggtaatccaaccgttgagtgtgatgtattttttgagaatagttttggaagagccgcagtacctagtggtgcatcaactggagtgcatgaggcattagaacttcgtgataaagataaatcaaggtacaaaggaaaaggcgtatctaaagcagtagataatataaataaaatagt

SEQ ID NO: 279723 - DNA, 805 bp, Unknown
  Bacterial polypeptide expressing nucleotide sequence isolated from the Sargasso Sea
ggtaatccaacaattgaggtggatgtgattctggagaatggttctgttggaagagctgcagtgccatctggtgcgtctacaggagcctatgaggctgtagagttaagagataatgataaaagctcttataacggaaaaggcgtattaaaggcagtccatgcggtaaatcacgagatttttgactcgttatcaggtactgacgcgcttgaccaacgcagcatcgatacagatttgattgagcttgatgggactgaaaacaaatcacgcttgggcgcgaatgcaattttaggggtaagccttgcggtttctcgtgctgcggctgatagcgtagaattgccactttggcagtatttgggtggggtaaatgcgcatcttctgccaacgcctatgatgaatattttaaatggcggcgcccatgctgataataaattagatgttcaggaatttatgatcatgcctattggtgcaaatcgcttttccgatggtcttcagatgggggctgagatttttcaagctcttaaatcaggattgatgcaaaaagggcttgcaacatcagtgggtgatgagggtggttttgcacctgctttaaatagcactgatgaggctttggaattcgtaagcaaggccattgagactgcaggctattcaattggagaagatattgtaattgcgctagatgcggctgcatctgaaatttatttagatggcaaatatcatcttgcgggagaaggaaaatcactaaccaccaaagagatgaataaaatgtgggctgatttgacagctagccatcccataatatccatga

SEQ ID NO: 279724 - DNA, 304 bp, Unknown
  Bacterial polypeptide expressing nucleotide sequence isolated from the Sargasso Sea
aggaagggtatcaggaaaaaagcagccaatgccgttctgatcaagcttaatcaaatcggaaccgtgtcagaaactttggccacaattcagctttgccaaaaatcaggctggaattacattatttcacatcgcagcggggaaactgaagacacgtttatggcggactttgcagttgcaatggcaggcgggcagatcaaaacaggctcggcttcacgtagcgaacgtattgcgaaatataatcgcttgctggaaattgaagccgaactgggtgagtcagcaatatttgggagttggtggtcttaac

SEQ ID NO: 279725 - DNA, 395 bp, Unknown
  Bacterial polypeptide expressing nucleotide sequence isolated from the Sargasso Sea
gaaactaacagaccagcttggagatcgtcttcaaatagttggcgatgacctctttgtcaccaataaaaatcgattgcaaagaggaataaaacaggggattggcaactcgcttttagtaaaattaaatcaaataggaacgctaactgagaccttgggggctatatcgatcgctcaaagagctggttattcgactgtagtatcacaccgttctggggaaacggaagacacaacaatagcagatttagctgttgctgttaatgcagggcaaatcaagacaggatctttatccagatctgaccgtatagcaaaatataaccagttaattagaatagaagaagaactgggttcaacggcaaaatacgctggatgggcagatctccccaagataacgtgag

SEQ ID NO: 279726 - DNA, 752 bp, Unknown
  Bacterial polypeptide expressing nucleotide sequence isolated from the Sargasso Sea
aatgagtaaaataaaaaaagttgttgctagacaagtttttgatagcagaggaaatccaactatagaagcagaggtttttgcaagtaatactagttgttctgcaatatgtccttctggagcctcaacaggcacatatgaagcattcgaaaagagagattttaaaaataagaaatatttaggaaaaagtgttttaggcccaattaacactattaataaaattgtttcaaaaaaacttaaaaatttaaatattcataatcaagagagaattgattataccttaattaatttagacggaacaaaacaaaagaaaaaattaggagctaattcgattttagctatatcaatggcagccaaaaaactttcgtcaaaaattacaaaaaaaccactctattcaacatttttattgaaaaaaaattttaaaatgccttatcctttgatgaatattattaacggaggtgctcatgcaaacaatggcttaagaattcaagaattcatgattagaccggataaagcaaaatcttttaaggaagctattagaatttgttttttaataataaataatcttaaaaaattaataaaaaaatatggtcattcaacatcggttggagatgaaggtggctttgcccccatgatacaaaaaaatgaagaagctttagatatgatagttaaagctattaaattatctggctttgaaaatggcaaagatgtttgtatatgtttagacgttgcggcaaatgaacttttgaataaaa

SEQ ID NO: 279727 - DNA, 436 bp, Unknown
  Bacterial polypeptide expressing nucleotide sequence isolated from the Sargasso Sea
tttggtagctaaatatcctattaaatcaattgaagaccctttcaacgaagaagattggaaatctcatagagaactttcttcaaaaaccaatattcagattgttggtgatgatctttttgcaacaaatataaaaagattaaaaaaaggaatttcagaaaagtctgcaaatgctattttaattaaaccaaatcaaattggtacagttagtgaaactctgaatgctattaagctagcacatgaaaataattttgagacagtaatttcacatagatcaggcgactcagaagatacatttatagctgatttagctgttgcgacaaaatcttctcaaattaaaaccggctctttagcaagatctgagcgggtatctaagtataatcgacttataagaatcgaagaggaacttggaaattcagcaaaaatagctaaaatatga

SEQ ID NO: 279728 - DNA, 649 bp, Unknown
  Bacterial polypeptide expressing nucleotide sequence isolated from the Sargasso Sea
atggcaaaaattaaaataatcaaaggccgtcaggtttttgatagtagaggaaatcctactgtagaagctgaagttttttctgaaaaaggaaattccacaactgcaattgtcccttccggagcatcaacaggaacacatgaggcttttgaattaagagataaagaaaacaaaaattatctaggaaaaagtgtattaaaagctgttgaaaatataaatgggccaataactaaggctttaaaaaatattaattttaacgatcaaaaaaatatagataaaattttaatagatttagatggaactgaacaaaagaaaaaacttggagctaatgcaattttagcagtttcaatagcttcttgtaaacttgctgctaaggaaaagaatacttctttatttaaatatttaggtaaaactaaaaattacaaattaccagttcctcttttaaatattataaatggaggagttcatgcaaaaaacaatttagatattcaagagtttatgatacgtccagataaagcaagctctttttctgaagctatgagaaaaagttttttagtaattcaaaatctaaagggaatggttgatagtactaatgttggtgacgaaggaggttttgctcccaaacttacaaaaaacagaagaagcaattgaa

SEQ ID NO: 279729 - DNA, 751 bp, Unknown
  Bacterial polypeptide expressing nucleotide sequence isolated from the Sargasso Sea
atggaaaaaataaaaaacatacatgcaagagaaatattagatagtagagggaaccctacagtggaatgtgatcttgagttacaggatggatcatttggtagagctgctgtgccaagtggtgcttcaacaggtattcatgaggctttagaattacgtgatggagatcaagataggtatcttggaaaaggggtaaaaaaagctgttcaaaatattaacgaactgattaaaaaagaggttcttggcaagaattatgataattatagagtttttgacaagacattattgaccttagatggaacagaaaataagtctaattttggagcaaacgcaacgcttgcggcaagtttagcttttgcaaaaagtttagcaagtcattcttccactcctttttatcaacatattgctgaaaatgaaaattttatactacctgtcccgatgatgaatattatcaatggtggatctcacgctgataatgatgttgatattcaagagtttatgatcgcgccagttggggcaacttcattttctgaggcattaagatatggatgtgaaatttttcattcattaaaatcaattttaaaatctaaaaatcttaatactaatgttggtgatgagggagggtttgctcctaatgtaaatagctctgatgaggtaatagaaataataattacttctgtagagaaggctggttttaaaataaatgatgatattttattatcacttgatgttgcttcaacagtaattttataaa

SEQ ID NO: 279730 - DNA, 904 bp, Unknown
  Bacterial polypeptide expressing nucleotide sequence isolated from the Sargasso Sea
gatggaacaaaaaataaaaacaatttggggtgcaaatgcaatcttaggagtgtcaatggctgcttttaaagcaaatgcacacttacaaaaaaaacaaccatttgaactttttccaaatatttacaactcaccatccttaccagtaccgtttatgaatattcttaatggcggcgctcatgctgataattctgttgatatacaagaatttatgattgttccgtttggatttgatacttttgataggtcacttagggcaggtgttgaaatttatcatgttctaaaaaaaaggcttaaagaaaataaattagcaacaaatgttggtgatgagggaggatttgcccccaatttcaaatcttcaacagaaattttagatgaaataatgctttccatttcagaagcaggctatgcaccaggtaaaaatgtttcacttgcactggatgttgcatcctcagaattttatcaaagtaattattacaacattgaaggtgaaaaactgaccaatattgagatgtctgattatttaattaacctaactcagaattatccaattctttccatcgaagatggattaggcgaagatgattgggaaggttggaagtatcttactgagaaacttggagaaaaaattcaacttgtcggtgatgatttatttgtgactcaggaaaaaattctccaaaaaggaattgataatggatgtgcaaattcaattcttgtaaaggttaaccaagtaggaagtgttactgaaactctagaaaccatgaaacttgcagaaaaaaataactatagctctttagtatcacatcgatcaggagaaacagaagatacttttataagtcatctgtgtgtaggtacatcaagtggtcaaattaagacaggtgcccctgcacgatctgaaagaactgca

SEQ ID NO: 279731 - DNA, 190 bp, Unknown
  Bacterial polypeptide expressing nucleotide sequence isolated from the Sargasso Sea
ctcgcatcgatctggtgaaaccgaggacagttttatcgccgatttagcagtcgcaaccaatgctggtcagatcaaaactggatcactatctcgttctgaccgtatggccaagtataaccaattgctccgtatcgaagaagaattggatcgtgctggactttttgcaggccgaaccattcttcgtggttag

SEQ ID NO: 279732 - DNA, 508 bp, Unknown
  Bacterial polypeptide expressing nucleotide sequence isolated from the Sargasso Sea
aataaatattctattcattcaaaaagttatatttctgtagaaagatctattcaagaatataaaaaaataattaataaatataagattaaatcgatagaggatccatttgcagaaaatgattggatatcatggaataaattaatgaaatcacttaaaaaagttcagattgtaggtgatgatctttatgttactaatcttgagcgactcaaaaaaggttttttaaatttatcatcaaatgctattttaattaaattaaatcaaattggcacagtttcagaaactttagatgtaattcgatttgctcaaactattggatttcaaacaatcatttctcatagatctggagatagtgaggatacatttattgcagaccttgcagtgggtactaattctaatcaaataaaaactggatctttagcaagatcagaaagagttgctaaatacaatcaattattacgggtagaagaagaacttggaaaaaaagccaaaatgaataagattcattaat

SEQ ID NO: 279733 - DNA, 538 bp, Unknown
  Bacterial polypeptide expressing nucleotide sequence isolated from the Sargasso Sea
atgccttatcctttaatgaatatcattaatggtggcgctcatgctaataattcattagaaattcaagagtttatgattagaccggatggagcaaaaaattttaaagaatgtatgcaaatgtcctttctagttatacaaaatttaaaaaaatatttagaaagtaaaaagatttctacaagcgtaggtgacgagggtggatttgcgccatctctaggatccgatgaggaggctatagaaattattataaattcaatatcaacatcaggatttaagccaggtaaggacgtatcaatttgtttagatgtagcagcaaatgaacttaaagttccgaaaaatgttcaatactttctagatctagaaaaaaaatatccgataaaatcgattgaagatccgttcccagaagatgattggcataattggaaaaatttaactcaaaaaacaaaaactcaaattgttggggatgatttatttgttacaaataaaaaaagattagaaaaaggaattaaagaaaaatgtgctaacactattctaatcaaac

SEQ ID NO: 279734 - DNA, 547 bp, Unknown
  Bacterial polypeptide expressing nucleotide sequence isolated from the Sargasso Sea
atgaaaacaaaaattacaaaaattattggtaggcaaattattgattcaaggggtaatccaacagtagaagcagatgtatatcttaatgaaaaattttttggaagagcagcagttccctctggtgcttcaactggtagtagagaagcattagaacttagggataaagatcaatccatttttaatggaaaaagtgtatataaagctgttcaatatattaataatgatataaataatttcttggttgggaaagatgcagctaatcagaaagatatagattcattacttatagatttagatggcacaagcaataagaataaattaggtgcaaatacaacactagctgtttcccttgcagtatccaaagcagtaagtaaagctcaagggttaaatttatatcaacatttaaatactaaaaagaatgaattctctatgcctgtgccaatgatgaatataattaatggtggttcgcatgcaaataataatgtagatatacaagaatttatgataatgcctgttggtgcttctaacatctttgacgcaataagat

SEQ ID NO: 279735 - DNA, 679 bp, Unknown
  Bacterial polypeptide expressing nucleotide sequence isolated from the Sargasso Sea
aattcaatccttgcagtaagtcttgcaactgccagagcatcagcaaatgctttagacatccccttatataggtatcttggagatccattatccaatcttcttcccgtccctttgatgaatgtaataaatggtggtgctcatgctccaaatagtcttgattttcaggaatttatgcttgtcccgcatggagttcaaaatttcagtgaatcactaagaatgagtactgaaatttttcactcattaaaatcattacttgataaaaaaggtctatctactgctgtaggggatgagggtggattcgcccctgatttgtcatcaagcgaagaagcaggagacttactcttagaagctattcaaaaagcaggatttattcctggtgaacaagtttctttagctttagacgctgctagtactgaattttataacaatggtatttatcaatatgaaggaaaaaatttaaatagttctgaaatgatttcatatctttcaagattagtttctaattatccaatagtttcaatagaagacggtttagctgaggatgattgggagggttggtcagaattaaacaaagaattaggaaataaagttcagcttgtaggtgatgatttattcgttactaatacagaaaggttaaggaaagggattatggaaaaatctgctaattcaatcctaataa

SEQ ID NO: 279736 - DNA, 244 bp, Unknown
  Bacterial polypeptide expressing nucleotide sequence isolated from the Sargasso Sea
atgaaaacaaacataaaaaatattattgctagagaaatactagactccagggggaaccctacagtagaggtagatgtttttttagaagatggccattatggaagagctgctgtgccatctggtgcttctacaggtgagtttgaagctgttgaattaagagataatgataaaaatagatataatggtaagggagtgttaaaagctgtttccaatgtaaacgaaaaaattagtaaagtacttatag

SEQ ID NO: 279737 - DNA, 846 bp, Unknown
  Bacterial polypeptide expressing nucleotide sequence isolated from the Sargasso Sea
ttgcctgttccaatgatgaatattgtaaatggcggtgagcatgcatctaataatcttgatatacaagaatttatgattattccggttggagtgcgcagttttcgtgaagcaattaggtgcgggtccgagatttttcacagtctaaagcagttgttgcagtcgcgctctttaattactgcagttggcgatgagggcggttttgcgcctagtttagataacaatgaagctgccttagaattaattatgaaggcaataaaaaaagcaggctataagcctggtgaagatgtttatcttggtttggatgcagccagcacagaattttataaaaataaacgttatgtgtttaaagctgaaaacaaaaaatattcgtatgaagaattcgttgcaaagtttgagcagtgggttaataaatatcctattttatcaattgaagatggttgctctgaggacgatcataaaggttggcaacatatgactgagcagcttggtgattcagtgcagttggtgggcgatgatttatttgtaacaaacccagctttgttgcgtgaaggcattgccgagcacgaggcaaatgctattttaattaaaccaaatcaaatcggcactttaactgaaaccctgcaaacggtttgtgtggcgcaaaactcagattatggtgtagttatctcgcatcgctcgggcgaaacagaagatactacaattgctgatttggcagttgcaacttcagctggacagattaaaaccggttctttatcgcgctcagatagaattgccaaatataatcgtttgcttcaaatagagcatgagcttggtcgttcagcacgttatgccggcaaaaaggcattt

SEQ ID NO: 279738 - DNA, 697 bp, Unknown
  Bacterial polypeptide expressing nucleotide sequence isolated from the Sargasso Sea
gaaaaaaattttacaatcaaaaggctatgccattagtgtaggcgacgaaggcggtttcgctccaaatcttaaaagcaatgaagaagcctgcgaagtcattatcgaagcaattcaagtagcaggttatcagcctgggaaagacattttcctggctcttgacgcggcagcttcatcattttgtaatcaaggatcttatgtttttcagaaatccgaatcaggggaaaaaaactcaacagagatgctggaattttacggaagcatggttgaaaactatccaatagtttccatagaagatcccatggatgaaaatgactgggagggattttctgctatcactaaaaaacttggggataaaattcaaattgtaggagacgacctgtttgttaccaatacagattttgttaggaagggtatcaggaaaaaagcagccaatgccgtgctgatcaagcttaatcaaatcggaaccgtctcagaaactttggccacaattcagctttgccaaaaatcaggctggaattatattatttctcatcgcagcggggaaactgaagacacgtttatggcagacttcgcggttgcaatgggaggcgggcagatcaaaacaggctcggcttcacgcagcgaacgtattgcgaaatataatcgcttgctggaaattgaagccgaactgggtgaattagcaatatttgggagttga

SEQ ID NO: 279739 - DNA, 841 bp, Unknown
  Bacterial polypeptide expressing nucleotide sequence isolated from the Sargasso Sea
aatgagcaaaattacaaaagttgtagctagacaagtttttgatagcagaggaaatcctacaatagaagctgaagtttattctaaaaatttaagtgcctcttcaatttgtccttctggagcatcaactggaacttatgaagcttatgaaaaaagagataaatcaaatagaaaatacttaggtaaaagtgttttaaaaccagtctcttttataaacaacaaattatctaaaaaattaaaaaatcaaaatgttcataatcaagagagaatagatcatattttaataaaactcgatggaactaagcaaaaaagtaaaataggagctaatgctatacttgctatatcaatggcggttaaaaaattatcagcaaaaataagaaaaatacctctttataaaagttttactgttaagaataattttaaacttccttatccattgatgaatataattaatggtggtgcacacgctaataatggccttcgcatacaagagtttatgattagacccgataaagcaaaaactttttctgatggtgtaagaatatgttttcttgtaataaatagtttacgtacactcattaaaaaaatgggtcattccacatctgttggtgatgaaggtggatttgctccaatgataagtgataatgaaaatgccttaaaattgatagtaaaagctataaaaaaagcaggttttacaaatggtaaagatgtatcgatttgtcttgatgtagctgcaaatgaattaattaaaaaaaataaatattcaattcattctaaacaatatatttctgttgaacaatcaattcaaaaatatctaaaattaattaaaaaatacaaaataaaa

SEQ ID NO: 279740 - DNA, 850 bp, Unknown
  Bacterial polypeptide expressing nucleotide sequence isolated from the Sargasso Sea
tagtattcttataaaattagatggcacaaaacaaaaaactaagttaggtgcaaatacaatattggcagtatcaatggctacaaaaaaactttctgcaaaagtgaaaaaaatacctttatataaaaattttattgttaaaaaaaattttaaactcccttttcctttaatgaatattattaatgggggtgcacatgctgataatggccttagaatacaagagtttatgattagacctgacaaagcaaaatcatttaatgatgctgtcagaatgtgttttttagtaataaacaatttaaaagtattattaaaaaaagcaggtcactctattaatgtaggtgatgaaggtggctttgcaccaatgataagcgataatgagagtgctttaaagcttatagttcaagcgatcaaaaaatcaggttttaaaaatggcaaagatatatctatttgtttagatgttgcagcaaatgaattaattaaaaaaggtaaatattcaattcattctaaaaattacataagtgttgatcaatcaattaaaaaatacttacaacttattaaaaaatatcaaattaaatcaattgaggatccatttggtgaggatgattggaaggcatggtctaaatttgtaaatgaaacaaaaaacaaaacacaaataataggcgatgatctttttgtaactaatcttgaaagattaaaaataggctttctaaacttatctgcaaacagtattttaataaaattgaaccaaataggaacggttaccgaaacactagaggtaataaaatttgcgcaacttattggtttcaaaacaataatatcacatagatccggtgatactgaagatacatttatg

SEQ ID NO: 279741 - DNA, 652 bp, Unknown
  Bacterial polypeptide expressing nucleotide sequence isolated from the Sargasso Sea
gatttctaataatagagagtgtctggatatgattataaaatctgttgatgaatctaattataagataggaaaagatatattcctaggattggatgttgcttctactgaattttatgaaaataataagtatatcctaaaaggagaaaatctctctttatcatccgaagaattaataagatattatgaggatttgttaaaaaattacccaattttatcaattgaagatggtctgtcagagaatgattggaatggatggtcaaatttgacagatcatttaggaaacaaatgtcaattagttggtgatgatttatttgtgactaatcccgaaaggtttagaaatggaataaaaaaaaattgtggaaattctatcttaattaaattaaaccaaattggtacattaactgaaactcttgaaactatttctattgctaaacaaaataactttaatactataatttctcatagatctggtgaaactgaggacacttttatagctgatttatctatagggtgttgtgctggtcaaataaaaactggttctttatcgcgtagtgaaaggattgcaaaatataatcaattaataagaatagaagaggaaaatgaacctaaaataaattattctagttttgaaccttttaaaaggtttttgtga

SEQ ID NO: 279742 - DNA, 544 bp, Unknown
  Bacterial polypeptide expressing nucleotide sequence isolated from the Sargasso Sea
aacgggaatactttttgcgatgggaaatatcatttgtcgggagaaggtaaagtcctcggctcgaaagataatgccgcctacctagccgacttggttgcagactatccgataatttcaatagaagacggtatggctgaggatgactgggaaggttgggaaatcttaactaacgaactaggggacaagatacaacttgtgggcgatgatttatttgtaaccaatcctacgaggttgaagaaaggaattgaaaggtcctgtgcaaactcaatgttggtgaaagttaatcaaataggaacacttacagagacacttgaagccgtagatttggcacatagagctaattatacaaatgtaatgagccacagatctggtgagacggaagatacgactattgctgatttagctgttgcaacgaactgcggtcaaattaaaacgggatctcttgctcgatccgacagattggcgaaatacaatcagttaattaggatcgaagaagagttgggaggttttgcaaaatacgccggcagatcaatattaaagtaat

SEQ ID NO: 279743 - DNA, 851 bp, Unknown
  Bacterial polypeptide expressing nucleotide sequence isolated from the Sargasso Sea
ggtaactttagataatggtatttgtgcaacttcaatggttcctagtggagcgtctactgggtctagagaggctttagagctaagagatggtgattcaacttatatgggcaaaggggtcagtaaagctttagcaaatattcatgaaatcatagcccctgcattagttggtatggatgtaacgaatcagcaagatattgatgaaaaaatgcttgctttagatggaacttcatccaaatcaaaacttggtgctaatgcgattttaggtgtctcattggcagtcttaaatgctgggtcaaaaacattgaatttatctttgtatcaatacataaatcaagtttttgctaatatcaacggtgaaaaaccaaggatgcaaatgccgactccaatgttaaatattatcaatggcggtgagcatgctgataataatattgatattcaggagtttatgatcatgcctgttggagctaataatttctctcaagcaatgcaatgggctacagaaatatactctgatctaaagaatattttgaatgcaaaaggtttaagcacgagtgttggagatgaaggagggtttgctccgaaccttcagtccaatcaagaagcgattgagcttattattcaagctattagaaataataacctgactgagggtaaggatgttggaattgctttagattgtgccgcttcagaattttatagcaatggtatttataaccttcaaggagaatctagaaagttaaactcatgtgaatttaccaactatcttgaaaagctaacacgtcaataccctatattttctatagaggatggaatggatgagagtgattttgagggatggaagaacctcacaa

SEQ ID NO: 279744 - DNA, 210 bp, Unknown
  Bacterial polypeptide expressing nucleotide sequence isolated from the Sargasso Sea
ccattgaaatgtgccgcaaggcaggatggaattacgtcatttctcatcgcagtggagaaaccgaggatactttcatggcggactttgcggttgccatgggtggaggacagatcaaaactgggtccgcttgtcgaagtgaaaggatcgcaaaatacaaccgcctccttgaaatcgaagctgaactgggtggccttgcgatttatggttgat

SEQ ID NO: 279745 - DNA, 862 bp, Unknown
  Bacterial polypeptide expressing nucleotide sequence isolated from the Sargasso Sea
attaacaaattattatcaaaaaagttgaaaaacctgaatgtacataatcaagaaagactagatcatactttaataaaatttgatgggacaaaacaaaaaaaaaaccttggagcaaattcaattctagcaatatcaatggcagttaaaaaattatctgcaaaattaaaaaaaaaaaaactttatgaaacttttattataaaaaaaaactataaattaccttaccctctgatgaacattattaacggaggagctcatgctaacaatggacttagaatacaagaatttatgataagaccagataaagccaagtcatttactgaagccttaagaatatgctatctagtaattaataatctaaaaaaactaattaaaaggatggggcattcaacatctgttggtgatgaaggaggttttgctccgatgataagcaataacgaaaaagcattacagctgatagtaaaagcaataaaaatttcagggtttcaaaatggaaaagatatttcaatctgcctggatgtagcagctaatgaattattaaaaaaaggaaaatattcggtacattcaaaaaaacatatatctcctgcaaaaacaattaatgaatatttaaaattaataaaaaaatacaaaattagttcaatagaggacccatttggagaaaatgactggaaatcttggagtaatttaatgaccaaaataccaaaaaaattacaaattgttggagacgatctttatgttacaaatttagaaagattaaaaataggttttttaaattcatcgtcgaattcaattttaataaaattaaatcaaattggaactgttacagaaactcttgaagttataaaattcgcccatcttataggat

SEQ ID NO: 279746 - DNA, 185 bp, Unknown
  Bacterial polypeptide expressing nucleotide sequence isolated from the Sargasso Sea
catggcaataattacaaacattcacgcaagacaagttttagattctagaggtaacccgactgttgaggcagaggtaagtttagataatggtgtaatggcgagtgcctgtgttccaagtggggccagcacagggtcaaaagaggctttagagttaagagacggtgataaatctaattaccttggga

SEQ ID NO: 279747 - DNA, 847 bp, Unknown
  Bacterial polypeptide expressing nucleotide sequence isolated from the Sargasso Sea
tctagcagtatccatagcagcaattaaaaatgcagcattagaaagaaaagtttcactatttaaacatattggcggaaattctgtgaataaacttccaataccaatgatgaatataatcaatggaggtgctcatgcaaataattctttagaaattcaagaatttatgatcagaccagatggagctaatagttttaaagagtgcatgagaatgtcatatttagttattcaaaaattaaaaaaaaatttagaaaaaattaatattttaacaagtgtgggtgatgaagggggttttgcaccatctcttaaatcagacgaggaagctatagaattcataataaaatcaatagagaacgcaggatttgaccctggaaaagatatttcaatttgcttagatgttgcagcaaatgaattaaaaaaaccgaaacaagtgaattattttgttgatttgatagctaaatatccaatcaaatcaatcgaagatccttttggcgaagatgactggaagtctagtagtgatcttaattcaaaaacaaatattcagatagtgggtgatgatctttttgctacaaatatcaaaagattaaaaaaaggtatttcacaaaaatctgcaaacgcaattttaattaaaccaaatcaaattggtacagtaaccgaaacactggacgctattaagttagcacatgaaaacaaatttgagacagtgatttcacatagatcaggcgactcagaagacacatttatagctgatttagctgttgcgacaaaatcttctcaaattaaaactggctcgttagcaagatctgagcgggtatctaagtataatagacttataagaatgaagaggaac

SEQ ID NO: 279748 - DNA, 823 bp, Unknown
  Bacterial polypeptide expressing nucleotide sequence isolated from the Sargasso Sea
ctagggaaaggtgtaaaaaatgttgttaataatattaatactacaattgcttcggcactgaaaggattcgatgtcacaaagcaagaagaggcagatagcctattgattgcacttgatggaactgaaaacaaatctaacctgggagcaaacgctattctaggcacctctatggctattgcatatgccggagcacaagcatcagaagaaaaattatttcagtatttaagtagtaaaaaatcacctgttttaccagtcccgatgatgaatatcttaaatggtggaagtcatgcggacaactctgttgatattcaagagtttatggtcatgccatttggagcaaataacttttctgaagctctaagaatgggaaccgaaatatttcaccaccttaaagaagtattaacgtcacaaaatatgacaactgctgttggagatgaaggcggttttgcaccggacctaagatcaaatgaagaagctatagaattaatattagaagccacagaaaaggcagggttaaaaccagaatcagatgtatatattgctcttgatgttgcagctagcgaattatttcaggatgataaatataatttattttcagaaaacaaaagattagactcagagggaatggtagagtatttaggtgatttaattaataaatatcctattgtatctattgaagatggactggatgaaaatgattggtctggatggactcactttaccaaaaactttggtgaaaaagttcaaattgttggagatgacttaacggtaacaaatataaagagattggatcgttcaataaatgaaaaaagccatgaatgcc

SEQ ID NO: 279749 - DNA, 617 bp, Unknown
  Bacterial polypeptide expressing nucleotide sequence isolated from the Sargasso Sea
tatgagctttatactggaaaaagttactgcccgtgaaattctcgactctcgcggtaatcccactgttgaagtggacgcttttacttctgacggaatgatggcccgggcatcggtaccgtctggcgccagcaccggctcacgcgaggcgaccgaacgccgtgatggcgatgccactcgttttggcgggaaaggggtccgtgatgccgttaaggccgtggatacagaaatctgcgacaccgtcaggggaacagatgtgcgggagcagcggcgactggataatctgatgcgggagctggacggcactgagaacaaaagtcggctcggcgccaatgccattctgggtgtttctctggcggtggccagactggctgctcaggtcacccgtcagccgctttaccgctatcttggagggcttaatgccagccttctgcccgttccgtgcatgaatattattaacggtggcgttcatgcccgtggtcagggcgccgattttcaggaattcatgatagcgccgcacggtgcgccaacgctggcagaggccgttcgtcagggcagcgaggtctatcaggctctgcgccagatccttctgtcccgtaacctctccgccgcggtgggtg

SEQ ID NO: 279750 - DNA, 712 bp, Unknown
  Bacterial polypeptide expressing nucleotide sequence isolated from the Sargasso Sea
tttggtaattcaaaatctcaaaaaattaattaaagataaaaatttttctacagctgtaggtgacgaaggtggatttgcaccaatgattagtaaaaatgaagatgctttaaatttaataataaagtcaattaaaaagtcgggttatgttaatgggagggatgtttctatatgtttagatgttgctgctaacgaactgtataaaaaaggcaattactcaatacactctaaaaaacatatctctgtaaaaaaatctttagagggttatatgaaaattattaggaaatttaaaataaaatcaattgaggatccttttgctgagaatgattggaaagcatggtctaaattaaaaaaaagagaaaaaggtattcagattgttggtgatgacctttatgttacaaacttacaaagattgaaaaaaggttttataagtcaatcttctaattcaattttaataaaacttaatcaaataggcactgtaacagaaacactagaagtaattaaatttgcaaaaaaaattggataccaaacaattatttcccatagatcaggtgattctgaagacacatttatatctgatttagcagtaggaacaaattcgtcacaaattaaaacgggctctttatgcagatcagaaagagttgcaaaatacaatcaattgttaagaatagaacaagagataaatagtaaaaataatatggtgagattaaaatga

SEQ ID NO: 279751 - DNA, 842 bp, Unknown
  Bacterial polypeptide expressing nucleotide sequence isolated from the Sargasso Sea
acccaactgttcagcagaagttattttacaagacggttctattggaactgcaatagtcccatcaggagcttctacaggtcgccacgaagctcatgaacttagagataaaaataaagattatttaaataaaagtgtttttgacgctgtgaacaatataaataataaaatttctaaagtattaataaataaagtttcaaccaatcaaaatgaaattgataaaatactaataaatttagatggaacagaaaacaagtcaattattggcgcaaatgcaatcttagcagtctctatagcaaatcttaaagctgctgcaaaattttcaaaaagagaaatatataaatacataaacaatggtgtaaagaacaatatgccttatcctctaatgaacattataaatggaggcgcacatgctaataattcattagaaatccaagaatttatgattagacctgatggagcaaaaaattttaaagaatgtatgcaaatgtcttttttagttattcaaaatttaaaaaaaaagttcgaagacaaaaaaatttcaacaagtgtaggtgatgaaggtggatttgcaccctcactaggttcagacgaagaagcgatagaggttattatgaaatcaatatcttctgcaggatttcaaccagggaaggatatatcgatttgtttagatgtagctgcaaatgagctagaaaaaccaaaagatgttgaatattttttaaaactaacaaaagaatatcctatcaaatctattgaggatcctttttcagaagatgattgggataattggaaaaaattgacacaaaaagtaaacacacaaattgttggcgatgacttgtttgtga

SEQ ID NO: 279752 - DNA, 760 bp, Unknown
  Bacterial polypeptide expressing nucleotide sequence isolated from the Sargasso Sea
ttcggtgaggcgcttcgttgcggagttgagatcttccaccagttgcgtgcagagttgactgcccaggggcttcagaccgcagtaggggacgagggtggattcgccccagactttccgtcaaacgaagccgcgctgcaggcggtgctgcaggcggtcgaacggtctggatatatggcgtccgaggacgtttttttggggctcgatttagcgagttcagagttcttctcaggaggccaatactgcctgcagtctgaagaacatagttacaccaccggtgagtttattaatctgatttctgagctcacagatcggatcccgattctttctctggaagaccctcttgatgaggatgactgggagggttgggtaacactgacgaaaaagctggggcagactgtgcaattgaccggggatgatctttttgtcacaaatccaggcattctggaaaaagggattgacctgcaggcggcgaactctatcctgattaaggtgaatcagattggcaccttgagcgagacgctcgatgccgtccgacttgcacagtcgaacggctacacggtcacggtctcgcaccgatcaggagagacagaagacacgactattgccgaccttgcggtgggtgtcggtgccgatcagataaaaaccggctcactgtgcagatcagagagaacagccaagtacaatcggctgctccggatcgaggaggcgctgggtgaccgggcggtctacgccggcagacaagcgtttgcacaactgtaag

SEQ ID NO: 279753 - DNA, 935 bp, Unknown
  Bacterial polypeptide expressing nucleotide sequence isolated from the Sargasso Sea
tatgaataataaaataaaaactataaaagctcgacatatattagattccagagcaaatccaacgattgaagttgaaatatacttaaatgacgaaattttcggtcgcgcagcagttccatcaggtgcatctacaggcgcacttgaagcccatgaactaagagataacgatgatgcttacagtggaaaaggggtaaatcaagcaattaaaaacatagaaacaattattgcaaaagagttaataggtttagatattactgaccaagaagctattgataagaagttgattcaattagacggaacagaaaataaaaacaatttgggtgcaaatgcaatcttaggagtgtcaatggctgcttttaaagcaaatgcaaacttacaaaaaaaacaaccatttgagctttttccaaatatttacaactcgccatctttaccagtaccgtatatgaatattcttaatggtggggctcatgctgacaattctgttgatatacaagaatttatgattgttccgtttggatttgatacttttgataggtcactcagggcaggtgttgaaatttatcatgttctaaaaaaaaggcttaaagaaaataaattagcaacaaatgttggtgatgagggaggatttgctcccaattttaaatcttcaagagaaattttagatgaaataatgttttccatttcagaagcaggctatgcaccaggtaagaatgtttcacttgcactagatgttgcttcctcagaattttatgaaaataatgtttacaacattgaaggtgaaaagtttaataatattgagatgtctgattatttaattaatctaactcagaattatccaattctttccatcgaagatggattaggcgaagatgattggggaaggttggaaatatctaaccgagaaacttggagaaaaaattcacttgtcggagacg

SEQ ID NO: 279754 - DNA, 565 bp, Unknown
  Bacterial polypeptide expressing nucleotide sequence isolated from the Sargasso Sea
ttgaattcttctattgaaaaaatatttgctagagaaattttagattctcgaggtaaccccactgttgaagttgatgtaatgacaagcgatggattaatgggacgtgctgcagtgccctctggggcatcaacggggattcatgaagcccttgaattaagagatggggacaaaaacagatacctagggaaaggggtaaggactgccgttaataatataaataacattattgcaccctccttaaaaggctgtgaagctactgagcaatcagagaacgatagtcagcttttagcgctagatggaacagaaaataaatcaaatctaggtgcaaatgcaattctaggagtttcaatggcgattgcacacgcaggtgcaaaaattgaaaagaaatctctttatcaatacctaggaaagaacaacgcacatatacttccaatgccaatgatgaatattttaaatggcgggagccatgccgataacctagttgatattcaagagtttatgataatgccttttggtgcaaaaagattctcagaagcattgcaaatggggacggaagtatttcacc

SEQ ID NO: 279755 - DNA, 325 bp, Unknown
  Bacterial polypeptide expressing nucleotide sequence isolated from the Sargasso Sea
tatagaaagattacaaaaaggaattgaccaaaaatctgctaattcaattttaattaaactaaatcaaataggtacaatttctgaaacacttgcagctattgacttagcaaaaaaaaataactattcatctataatctcacatcgttctggtgaaacagaagacaccacaattgccgatctgagtgtaagttctttatcaaaacaaataaaaactggatctgtttctagaactgacagaacatgtaaatacaatcaattattaagaatagaggaaatattaggcaaaaaagctaaatatgctggcaaaactattcttatttcttga

SEQ ID NO: 279756 - DNA, 556 bp, Unknown
  Bacterial polypeptide expressing nucleotide sequence isolated from the Sargasso Sea
ttatctggaaaaactgtattaaaagccgttgagggtatcaatactgagatatgtaatgtgctttgtggcatggaagcatctgcgcaagaagaaatcgacaataaaatgattgagctagactcaacaaataataaatctcgattaggagcaaatgcgatattgggtgtttcactggcatcatcaagagctcaagctaattcagagggtaagcatttatacgaatatttaaactcatcagattcatatattttacctgttcctatgatgaatttgattaatggtggggcgcattctaataattcattatttattcaagaatttatgattatgccagtatctgcagaaacatttaatcatgcaattataactggttctgaaatttttcattcacttaaaaatttattagaaaatgatggatttagcactaatgttggagatgaaggtggtgtagcaccagatttaaaaacaagtgaagatgcattatcttatttgtgtaaagccattgaaaaagcgggttatagacttgaagaagatatagtctttgctttagatattg

SEQ ID NO: 279757 - DNA, 757 bp, Unknown
  Bacterial polypeptide expressing nucleotide sequence isolated from the Sargasso Sea
tttcaagaatttatgcttgtcccacatggagttgataatttcagtgaatcattaagaatgggtactgaaatttttcactcattaaaatcattacttgatcaaaaaggtctatctactgctgtaggcgacgagggtggatttgcacctaatttatcatcgagtgaagaagcaggggacttattattagaagcaatccaaaaagcaggatttaaggctggtgaacaggtctctttagctttagatgccgctagtactgaattttataatgatggtatttatcaatatgaagggaaaagtttaaacagctctgaaatgatttcatatctttcaagattagtttctaattatccaatagtttcaatagaagatggtctggcagaggatgattgggagggttggtcagaattaaacaaagaattaggaaataaggttcaacttgttggtgatgatttattcgttacaaatacagaaaggctaaggaaaggaattatggaaaaatctgccaattcaatcctaataaaggtaaatcaaattggaacattaactgaaactttggaagctattgagttagctaaaatgtctggtttcacaagtgttattagtcatagaagtggtgagactgaagatacaacaattgctgatttatctgtcgccacaagatcaggtcaaatcaagaccggctctttgagtagaagtgagaggattgcaaaatataataggattttaaaaattgaggaggaattgggaaatcaggcaa

SEQ ID NO: 279758 - DNA, 167 bp, Unknown
  Bacterial polypeptide expressing nucleotide sequence isolated from the Sargasso Sea
gttgaattcttcaattaaaaaaatatatgctagagaaattttagattctagaggaaatccaaccgttgaggtggatgtgtatacaaaatctggacatttaggtagagctgctgttccttctggtgcctcaaccggagagtatgaagccatagagttaagggacatgg

SEQ ID NO: 279759 - DNA, 880 bp, Unknown
  Bacterial polypeptide expressing nucleotide sequence isolated from the Sargasso Sea
gaaaatattaataaaaagattggatcaagtttaaaaggattagatccagccgatcaatctaaaattgataaagttttattagatttagacggtagtgaaaataaaaaaaatcttggagcgaactcaactttagctgtatctttagctaattcaaaatcggcagccttatcagttaataaaccactttataaaaatttaggaaaatctttttctttacccaatcctttaatgaatattattaatggaggagctcacgctgataacgatttaaagattcaagagtttatgattagaccagattcagcaaaaaattttatggatgcagtagagaaatgttttcttgttattcaaaatttaaaaagtctattaaaatcaaaaaaaatgcttactaatgttggtgatgaaggaggttttgctccatcaattaatactaatgaagaagccctcgaattaattgtaaattctatagaaaaatcaaagttaacacctggtaaagacgtcgtaatttgtctagatgtagctgccaatgaattaatcaataaagaaggtcaatatacaattcaatcaagtaatttttctttagttgatgatgttgttagttattataagaaattaacttcgaactatcccattaaatcaatcgaagatccttttgctgaagaagattgggaatcttggaaaaaaattacagcggagattggaaaaaatgttcaaattgtaggcgatgatctatttgtaacaaattctaaaagattaaaaaaaggaatagataataaatctgctaatagtattttagttaaacctaatcaaattggaactttatctgaaacattggaagttgttacaatggcaaaaaaggctaattttaacacaattattt

SEQ ID NO: 279760 - DNA, 577 bp, Unknown
  Bacterial polypeptide expressing nucleotide sequence isolated from the Sargasso Sea
atgaataaaaaaattaaaagcattagtgctcgtcatatattagattcaagagcaaatccaacaattgaagttgaagttactacaagtgataatatcaaaggtcgtgccgcagttccatctggagcctcaactggagcctttgaagcccatgaacttagagataatgatccatcctttaacgggatgggagtaaacaaagcgatagaaaacgttaaaacaataatttcagacactttaataggtgtggatgtaactgatcaaagcaatattgacaacaagttaatcgaattagatggaactgataacaaaaataatcttggagcaaatgcaatcttagcagtgtctatggcctcaatgagagcaagtgcaaatcaacaaaacaaacaactttttgaactcttcccaaatatttacggaccaccttctctacctgttccttttatgaatattctgaatggaggtgcacacgctgataactctgttgatattcaagaatttatgattgtaccatttggtttcgaaacttttgatacctctttaagagcaggtgttgagatttatcatgtactaaagaaaa

SEQ ID NO: 279761 - DNA, 788 bp, Unknown
  Bacterial polypeptide expressing nucleotide sequence isolated from the Sargasso Sea
gagtaaaatttcaaaggtaatagctcgtcaagtttacgatagcagaggaaatccaaccgttgaagctgaagttttttcaaagaatattagcgctagtgcaatctgtccatcaggtgcatctacaggaacttatgaggcttatgaaaaaagagacactaataataaaaaatttttaggaaaaagtgtattcaaaccagtgaatttaattaattcaaaaatttcaaataaattaaaaaataaaaatattcataaacaagaattaattgattcaatcttaataaaacttgatggcaccaagcaaaaaaattatttaggagctaatgcaatactagctgtttctatggcggtaaaaaaactttctgcaaaattaaaaaaaattccactatataaaacttttttagtgaaaaaaaactttaagataccttatcctttgatgaatattattaatggaggagcacatgcagataatggtttaagaattcaagagtttatgattagacctgataaagctaaaacattttccgaagcaatgagaatatcttttcttgtaattcaaaatttaaaatctttaattaaacaaaaaaaactatcaacttctgtaggtgacgagggtggatttgccccaatgataagtagtaatgagcaagcattaaatttaattgtatcagctataaaaaaatctggttttaaaaatggaaaggatgtatccatttgtcttgatgttgcagcaaatgagctttttaaaaagaataaatattctatccactcaaaaaaatttatatcagtag

SEQ ID NO: 279762 - DNA, 812 bp, Unknown
  Bacterial polypeptide expressing nucleotide sequence isolated from the Sargasso Sea
taatgagggtgcgcatgccaataatgggttaaaaattcaagaatttatgattagaccggataaagcaaaaacttttagcgaggcaatgaatatttgttttttagtaatacaaagcttgaaaaaaatacttatcagaaagaatttatctacatctgttggagatgaaggtggttttgctccaatgatttcaaaaaatgaggaggcattaaaattaatctcaaatgctattaaaaaagcaggttttgttaatggaaaagatgtatcaatatgtctagacgttgctgcaaatgaactttttaaaaataataaatatgcaatagattcaaaaaaatatatctcaaacaaagatacaatatctttctactcaaaaataataaaaagattcaaaataaaatctattgaggatcctttcgcagaaaacgattggaaatcatggtctgatttacataaaaaagaaaaaaaaatacaaatcgtaggtgacgatctttatgtaacaaatcttcaaagattgaaaaagggttttttatatcaatcatcgaattctattttaattaagttgaatcaaatagggacagtttctgaaactttagaggttataagatttgcccaaaatataggttatacaactatcatttctcatagatcaggtgactcagaggatacgtttatatctgatttagcagttggaactaattcaaatcaaataaaaactggctcattatgtagatcagaaagggttgcaaaatttaatcaattattgagaatagaagctgaccttataaaaagcaaaaatatggctaatttgaaatgat

SEQ ID NO: 279763 - DNA, 340 bp, Unknown
  Bacterial polypeptide expressing nucleotide sequence isolated from the Sargasso Sea
gatgccaaaaataaaaaaaattatagcaagagaaataatagatagcagaggaaatccaacaatagaatgcgatgtttctcttgaagacaattcatttggcagagcttctgtaccaagcggagcatcaacgggaaagcacgaagctctagaattaagagatggtgatataaatagatacctaggcaaaggagttaaaaaagctattaagaatattaatcaattaattaaggaaaatattaaaaataaagagtttggtagttatagggaatttgataagtttatattaaaccttgatggttcagaaaataaatctaatttaggagcaaatgccacccttgct

SEQ ID NO: 279764 - DNA, 778 bp, Unknown
  Bacterial polypeptide expressing nucleotide sequence isolated from the Sargasso Sea
atttcaaaaaaattaaaaggacaaagtatccataatcaagaaagaattgatgctttgttaattaacttagatggtacaagacaaaaaactaacctaggagctaatgcaatgttagcagtttctatggctgttaaaaaactgtctgccaaagcaaaaaaattacctttgtataaaactttttttcaaaaaaattattttcaattaccttatccattaatgaacattattaatggtggagcgcatgcaaataatggtcttagaattcaagagtttatgattagacctgatcgagcaaaaagtttttctgaagcgatgcggatttgttttgttgttattaaaaacttgagtaaattaattaaagaaaaaggtttgtcaacttcagtaggagatgaaggcggttttgcacccatgatcagtagtaataatcaagctttagatttaattgtgagtgcaattaaaaaatcaggatttattaatggaagagatgtatctatttgtctagatgtggctgctaatgaattatataaaaaaaacaaatactctattcattcaaaaagttatatttcagtaaataaatctattaaagaatatcaaaaaataattaaaaaatataaaattaagtctattgaggatccatttgctgaaaatgattggttagcatggaataaattaatgaaatcaataaaaaaagttcagattgttggagatgatttgtatgtaacaaatcttgaaagattgaagaaaggtttcttaaatatttcctcaaattctatcttaa

SEQ ID NO: 279765 - DNA, 767 bp, Unknown
  Bacterial polypeptide expressing nucleotide sequence isolated from the Sargasso Sea
aatgagtaaaataaccaaagtcgtagcaagacaagtttttgatagtagaggaaatcctacaattgaagctgaagtttttgcaaacaatatgaaagcaagagctatttgcccgtcaggagcctccacaggctcatatgaagcttatgaaaaaagagattatttaaataaaagatacttaggcaaaagtgttttaaaaccagttaaattaatcaatgagattatttcaaaaaaattaattaatcaaaatatacatgaccaagaaaaaattgattatattttaattaaacttgatggaaccaaacaaaaaaaaaaatttggtgcgaattcattattagcggtttcaatggccgtgaaaaaactctcagcaagaattaaaaaaattccactttacaaaacttttttagtcaaaaataattttaaattaccttatcccttaatgaatgtaattaatggaggcgcacatgccaataatggtttaagaattcaagagtttatgattagacctgataaagctaaatcaatgactgaggcattgagaatatgtttcctggttgttaataaattaaaaaaaattattaaaaacagaggttattctacatcagtaggtgatgagggtggttttgctcctatgataaataataatgaagatgctctaaaattaatagttagcgcaatacaaaaatctggatttaaaaacggtagagatgtatcaatctgtctcgatgtagctgcaaatgaattatttataaacaataaatattcaattc

SEQ ID NO: 279766 - DNA, 185 bp, Unknown
  Bacterial polypeptide expressing nucleotide sequence isolated from the Sargasso Sea
taattttgagtcaattatttctcaccgatctggtgagactgaagatactactattgctgaccttgcagtcggtttaggaataggacaaatcaaaactggagctccttgcaggtctgatagagtagcaaaatataataggttgctttggattgaagaagaaagcaataatattttgcttaaatgaa

SEQ ID NO: 279767 - DNA, 910 bp, Unknown
  Bacterial polypeptide expressing nucleotide sequence isolated from the Sargasso Sea
ttttgaaaaaagagatattaataataaaaaatatttaggtaaaagtgttttaagtgcaattaaattagtaaattctaaaatttttaaaaaattaaaaggtgaaaatattcataatcaagaaagaattgactcgttgatgattaacttagatggcacaagacaaaaagcgaaattaggtgccaactctattcttgctgtttcaatggcagttaaaaaactttctgctaaagttaagaaattacctttatataaaactttttctgttaaaaacaattttcagctaccttatccgttaatgaatataattaatggtggtgcgcatgcaaataacgatttgagaattcaagaatttatgattagacccgataaagcaaaaagtttttctgaagcaatgagaatgtgttttttagtaataaataatttaaaaaaattatttaagaataatggattatctacatctgtaggtgatgaaggtggatttgcaccaatgatttcaagtaataacaaagcgttagacctcatagtatctgcaattaaaaaatctggttttaaaaatggtaaagatatttcgatttgtttagatgtagctgcaaatgaactatataaaaaaaataaatattctattcattcaaaaaaatatgtatctgtagataaatcaattaaagagtataaaaaaataataaaaaaatataaaattaaatctatagaagatccgtttgctgaaaatgattggatttcatggaataagttgatgaaatcaactccaaaagttcaaatagttggtgacgatctttatgtaacaaatttagaaagacttaaaaaaggatttttaaatatttcatctaatgcaatattgataaaagttaaccaaattggcactgtctctgaaacacttgaagttataaaattg

SEQ ID NO: 279768 - DNA, 796 bp, Unknown
  Bacterial polypeptide expressing nucleotide sequence isolated from the Sargasso Sea
tcagctaaagttaaaaaaatacctttatataaaaattttattgttaaaaaaaattttaagctcccctttcctttaatgaatattattaatgggggtgcacatgctgataatggccttagaatacaagagtttatgattagacctgataaagctaaatcatttaatgatgctgtcagaatgtgttttttagtaataaacaatctaaaagtattattaaaaaaagcaggtcactctattaatgtaggtgatgaaggtggctttgcaccaatgataagcgataatgagagtgctttaaagcttatagttcaagcgatcaaaaaatcaggttttaaaaatggcaaagatatatctatttgtttagatgttgcagcaaatgaattaattaaaaaaggcaaatattcaattcattctaaaaattacataagtgttgatcaatcaattaaaaaatacttacaacttattaaaaaatatcaaattaaatcaattgaggatccatttggtgaagatgattggaaggcatggtctaaatttgtaaatgaaacaaaaaacaaaacacaaattataggcgatgatctttttgtaactaatcttgaaagattaaaaataggctttctaaacttatctgcaaatagtattttaataaaattgaaccaaataggaactgttactgaaaccttggaggtaataaagttttctcaacttatcggttttaaaacaatcatctcacatagatctggtgataccgaagatacatttattgctgatttagctgtaggtaccgattcaaatcaaatca

SEQ ID NO: 279769 - DNA, 590 bp, Unknown
  Bacterial polypeptide expressing nucleotide sequence isolated from the Sargasso Sea
taagccaggtgagcaggtatctttagctttagatgctgctagtactgaattttatagtgatggtatttataaatatgaagggaaaagtttaaatagttctgaaatgatttcatatctttcaagattagtttctaattatccaattgtttcaatagaagacggtttagctgaggatgattgggagggttggtcagaattaaacaaagaattaggaaataaagttcagcttgtaggtgatgatttatttgttactaatacagaaaggttaagaaaagggattatggaaaaatctgccaattcaatccttataaaggtaaatcaaattgggacattaactgaaactttggaagctattgagttagctaaattgtcaggtttcacaagtgttattagtcatagaagtggtgagaccgaagatacaacaattgcagatttatctgtcgctacaagatcgggtcaaatcaagaccggctctttgagtagaagtgaaaggattgcaaaatataataggcttttaaaaattgaggaggaattgggaagtcaagcaagattcgctggggctttaggtttaggtcccaaaaatatatagt

SEQ ID NO: 279770 - DNA, 553 bp, Unknown
  Bacterial polypeptide expressing nucleotide sequence isolated from the Sargasso Sea
atgtcaaaaatcagtaatatcaaagctctacaagtttttgatagcagaggaaatccaacaatagaatgtgaaatttctttagaagatggaaacaaagctttagctgttgttccatctggagcatcaacaggcacacatgaagctttcgaattaagagatattgaggataaaaaatatttaggaaaaagtgttctaaaggcaatagaaaaaataaatggagaaatatccaaagaattaatagggtttgatgcaaaagatcaaaaaaagattgatcaaactctaattaaattagatggaactaaacagaaaaagagattaggagctaatgccattttatcagtttcgttagccgcatgtaaagttgcggcaaattcaaaaaaaatacccttatttaaaaatttaggtaatgaaaaaacattacctttacctctaatgaatattattaatggtggagctcatgccaataatttattaagaattcaagaatttatgataaggcccgacaaggcaaaaagttttaaagaagctcttaatatatgttttttggtaatac

SEQ ID NO: 279771 - DNA, 493 bp, Unknown
  Bacterial polypeptide expressing nucleotide sequence isolated from the Sargasso Sea
tgaagcatttgaattaagagatattgataacaaagaatatttaggaaaaagtgttttaaaggctattgaaaaagtaaatgttgaaatatccaaagcacttttaggtcaatcatctgaagatcaaagtaaagttgatgaaatgatgattgatttagacggaactgaaaaaaaaaagaggttaggagctaatgctattttatctgtatctttagctataaataaagctaatgcagtttctaaaaatattcctctttataaaaatattggtaatgggaaaacgcttcctatgcctttaatgaacattattaacggaggtgttcacgcaaacaattctttaagaattcaagaatttatgatacgccccgacaaagctgaaaattttaaagaagctttaaatatatgttttttagtaatacaaaaactaaaaatttttattaacagtaaaaatctttcaaccacagttggagatgaaggtggttttgctcctacttta

SEQ ID NO: 279772 - DNA, 748 bp, Unknown
  Bacterial polypeptide expressing nucleotide sequence isolated from the Sargasso Sea
aatgcataaaattacaaaagttgttggaagacaagtttttgatagtagaggcaacccaacagttgaagcagaagtattttcaaataatataagttctattgcaatttctccctctggtgcatcaactggaacatttgaagcttttgaaaaaagagacatttacaataaaaaatatttaggaaaaagtgtatttaaatctgtagaaataattaataaaaaaatatcaaaaaaaataaaaaatcaatttgttcataatcaagaaaaaatagaccatatattaattaaattagatgggacaaaacaaaaaagtaaaattggagccaataccacattagctgtatcaatggctgttaaaaaactttcagcaaaattaagaaagattccattatataagtcatttttacttagaaataattacaaattaccgtatcctttgatgaacatcattaatggaggagctcatgcaaataatggcttgagaattcaagaatttatgatcagacctgatggtgctaaatctttttcagaatctctaagaatgtgctttttagttataaacaatttaagaaaaattattaaaaaaaaaggtttatcaacatcagtaggcgacgaaggtggctttgctccaatgataaatagcaatgaagaagctttgaaattaatattaaaatctataagtgtttcaggatttataaatggaaaagatatatctatctgccttgatgttgccgccaatgaattatataaa

SEQ ID NO: 279773 - DNA, 235 bp, Unknown
  Bacterial polypeptide expressing nucleotide sequence isolated from the Sargasso Sea
cggaacggtttcggaaacggtggcaaccattgaaatgtgccgcaacgcaggatggaattacgtcatttctcatcgcagtggagaaaccgaggataccttcatggcggactttgccgttgccatgggtggtgggcagatcaaaaccggttccgcttgtcgaagtgaaaggatagctaaatacaaccgcctccttgaaatcgaagctgaactggacggactagcgatatatggttga

SEQ ID NO: 279774 - DNA, 502 bp, Unknown
  Bacterial polypeptide expressing nucleotide sequence isolated from the Sargasso Sea
tattgaaggaaatgccttatccaatactgaaatgtcagattatttaatagagttgtctaatttatatccgattgtatctatagaagacggtttagctgaagatgactgggaaggttggaagtatttgacgtccaaaattggtgaaaatgtacaacttgttggcgatgatctttttgtcacacaggagaaaattttacaaaaaggaattaatgaaggatgtgcaaattcaatcttgataaaggttaatcaagttgggagtgttacagagactattgaagcaatgaaactagcaaataagaacaattacacaagcatggtttcccaccgatctggagaaacagaggattcctttattagtcacctagttgttggaacctcaagtgggcaaatcaaaacaggggcacctgctagaggagaaagaactgcaaaatataatgaacttttaagaatcgcagaacatgtaggatttgagaattttaataataaaaaatgggaactttaa

SEQ ID NO: 279775 - DNA, 916 bp, Unknown
  Bacterial polypeptide expressing nucleotide sequence isolated from the Sargasso Sea
aatgaagattaaagatgtaaaaggtaggcagatactcgattcaaggggaaatcctacagtagaggtagatattaagctagatgatgatagtgaaggaagaggcatttctccatcaggagcttcaacaggaagtctggaagcattagagctaagagatgataacaaggaaatgtataacggtaaatctgttttaaaagcagtagcaaacgttaatgagaacattaagaatgccataaaaggtaaatcatttaattctcaagaggattttgataactttctcatagatcttgatggatcagagaataagagtgtattaggcgctaatgcaattctttcgtcttctcttgcttatgctcatgcttctagcttatctaaaaatattcctttatataaatcatttattaataataactatactttaccagttccaatgatgaatatactcaatggtggagctcatgctaacaatgagcttaattttcaagagtttatgatattaccaattaaattcacttcattctctgaatcactcagagcaggagcagaaatctttcatgaattaaaaaaattattaatctcaaaaaacttaagttcagcagttggtgacgagggtggctttgctcctaacttatcatctaacgaggatgcgctagatattatattggacgcaataagcagcgccggatatactcccggtgaagatatctttcttggattagatgcagctagcactgagttttataaacaagataaatatatattaaatgataaaaataccttggattcatcatcattttgtgattatttagttaaactatgtgataactatcctatcataagcattgaagacggcatgtcagaggatgattggaatggctggcatgaaatcactgaaagactcggaacaagattcagc

SEQ ID NO: 279776 - DNA, 517 bp, Unknown
  Bacterial polypeptide expressing nucleotide sequence isolated from the Sargasso Sea
aatgagcagaattttaaaagtaatagctcgtcaagtgtacgatagcagaggcaatccaacagttgaagctgaagttttttcaaaaaatactagtgcttgcgcaatctgcccatcgggtgcatcaactggaacttatgaggcttatgaaaaaagagacactaataataaaaaatatttaggcaaaagtgtatttaagccagttaatttaattaattcaaagatttcaaaaaaattaaaaaataaaaatattcataaccaagaacttattgattcaattttaataagattagatggcaccaaacaaaaaaattatttaggagcgaatgcaatactggctgtttctatagcagtaaaaaaactttctgctaaattaaaaaaaaaaccattatataaaacttttttagtgaaaaaaaactttaagcttccttatcctttaatgaatattataaatgggggagcgcatgcgaataacggtttaagaattcaagagttcatgattagacctgataaagcaaaa

SEQ ID NO: 279777 - DNA, 201 bp, Unknown
  Bacterial polypeptide expressing nucleotide sequence isolated from the Sargasso Sea
ccattggatataaaacaatcatatctcacagatcgggagatagtgaagatacgttcattgctgatttagcagtagggactaattcaaatcaaattaaaacaggatctttagcaagatctgaaagagttgcaaaatataatcaattgatacgtattgaagaagaacttggaaaaaaagtgaggatgaataaaatcaattaat

SEQ ID NO: 279778 - DNA, 820 bp, Unknown
  Bacterial polypeptide expressing nucleotide sequence isolated from the Sargasso Sea
aatgcccaaaattgaaaatctaacctccattcaagttctggattcaagaggacttcccacaatttctactgaaatattgttaaatgatgggactagatcagttgcaatggtacctagcggcgcttcaacaggcgaaaaagaagctcttgaacttcgagatggaggtcaagcattcctcggaaaaggagtaacaaaagccatagataatattaatgacggcataaagaattctcttgtaggagagaatccacttgaccaagatcatatcgatcaaatcttaaataacttagatggtacaagtgacaaatctaatcttggagctaatgcaattctttctgtatcaatagcttctgcaaaagcatcatccaaatcagagaatttagatttacataattattttaacattttgctcagtaataaaatgggcaaaacaattgatcaagttattccaatacccatgttaaatattcttaacggtggtgagcatgccgataacaatatagatattcaagaattcatgattattccaaaaggagctgttaatttttcgcaagccatgcagtggtcttctgagatatattggaatcttaaatctattcttaaagaaaaaggcctatcaactgcagtaggcgatgaaggtgggtttgctccaaacctcaacacaaatagagaagctcttgagttaatagcaagagcggtagataaaactgatcttaagctaggttcagatatctgtatatccttggattgtgcagcaagtgaattttatgaaaatggcacttatcatcttaagggtgaagatagagaacttactagttca

SEQ ID NO: 279779 - DNA, 288 bp, Unknown
  Bacterial polypeptide expressing nucleotide sequence isolated from the Sargasso Sea
aatgacagcgattgtcgccattcacgctagagaaattttagattcccgtggaaaccctacggtcgaagtggatagttttttagaaactggtgcatctggacgggcggctgttccttcaggggcctctacgggcatccatgaagctgttgaattacgagatggtgatcagggtcgttataatggcaaaggtgtcctaaaagcagttaatgccgttaacaatgaaatttcagatgcgctggttggtatggatgcggaggatcaggttgaaattgataacttaatgaaaga

SEQ ID NO: 279780 - DNA, 764 bp, Unknown
  Bacterial polypeptide expressing nucleotide sequence isolated from the Sargasso Sea
attgaacccacgtatcatcaacattcaggctttggaaattttagactcgcgggggaatccgacggttagaacacgggtcagactcgaaaacgggatcagcggggttgcttccgtgccttcaggagcctcaaccgggatcaacgaagcccttgagttaagggatggagataaaaaacgttttggcggaaaaggtgtgctgaaggcggttgaaaatgtaaataagcaaatcgctcccgaactggtggggatgtacgccgaagaccaatcgaaaattgaccaggtgatgctcgaactggatggaaccaaatccaaggaaaaacttggtgccaacgccattctcggagtttccatggctgctgcggatgccgctgccaaaaacgcgggtttgtcgctctattcgtatcttggaggtgttgggagtacacgcttgccggtgccgatgatgaacattctcaacggcggtgaacatgcggacaacagcgtcgatattcaggaattcatgatcatgcccattggcttgccgaatttcagagaagccctgcgatgcggatcagaaatttttcaggcgctgaagaagattcttctggccaagaattacagcacgggtgttggggatgaagggggctttgctccgaatctcgaaagcaaccaggaagcctgcgagttgattctggaagcggttgaaaaagccggatacaaagctggaaaagaaatcttcctcgcgcttgattccgcggccagttccttctttaaagacgggaaat

SEQ ID NO: 279781 - DNA, 955 bp, Unknown
  Bacterial polypeptide expressing nucleotide sequence isolated from the Sargasso Sea
catcgcccgtgagatcatggattcgcgcggtaacccaacagtagaagccgatgtatttctggccagcggtgccatgggtcgtggctgtgcgccatcaggtgcttctaccggtacccgtgaagctttagaactgcgcgatggtgacaagagccgttatttaggtaaaggcgtgcgcactgcggttgccaatatcgatggtccaatcaaagcggctttaataggtaaaaacgcgtacaaacaagcagaaattgaccagatcatgatcgatcttgatggtactgagtctaaatctaagttaggtgctaacgctattctggctgtgtctttagctgtagcccgcgcagctgctgctgacaaaaaaatcccattgtatcagcacattgccgacttaaacggcacacctggtgtgtattccatgccagtgcctatgatgaacatcatcaacggtggtgagcatgctgataacaacgtcgatattcaggaatttatggtgcagcctgttggcgctaagaccttcgctgaagcgctgcgtatgggcgccgaaattttccaccaactgaaaaaagaactgcacagtcagggcttaaatacagctgtgggtgatgaaggtggttttgcaccggatctgaagtctaacgaagaagctttaactgtgatttctaaagctgtggccgctgctggttacgagctgaacaaagacatcactttagctttagactgcgcagcctctgagttttatgtcgatggtaagtacaaattatctggcgaaggcaaagaattcacctcgtatgaattcaatgacttcctggctggtttagccacccgtttccctatagtttcaatcgaagacggtttagacgagtcggattgggatggctggaaagatatgaccaataaaatgggcaataaaatccagctggtaggcgacgatttattcgtcaccaacacgaaaatt

SEQ ID NO: 279782 - DNA, 895 bp, Unknown
  Bacterial polypeptide expressing nucleotide sequence isolated from the Sargasso Sea
gttataaatttaatttcaaaaaaattaaaaaatcaaaacatccatgaccaagagagaatagatagtattcttataaaattagatggcacaaaacaaaaaacaaagttaggtgcgaatacaatattagctgtatccatggctgtaaaaaaattatcagcaaaagttaaaaaaatacctttatataaaaattttattgttaaaaaaaattttaaactcccttttcctttaatgaatattattaatgggggcgcacatgctgataacggccttagaatacaagagtttatgattagacctgataaagccaaatcatttaatgatgctgtcagaatgtgttttttagtaataaacaatttaaaagtattattaaaaaaagctggtcactctattaatgtaggcgatgaaggtggttttgcaccaatgataagtgataatgagagtgctttaaagcttatagttcaagcgattaaaaaatcaggttttaaaaatggtaaagatatttctatttgtttagatgttgcagcaaatgaattaattaaaaaaagtaaatattcaattcattctaaaaattacataagtgttgatcaatcaattaaaaaatacttacaacttattaaaaaatatcaaattaaatcaatcgaggatccattcggtgaagatgattggaaggcatggtctaaatttgttaatgaaacaaaaaacaaaacacaaataataggtgatgatctttttgtgactaatcttgaaagattaaaaaaaggctttctaaacctatctgcaaatagtattttaataaaattgaaccaaattggaactgtaaccgaaactttagaagtaataaaattcgcacaaattattggttttaaaacaatcattctcccaatagatctggtga

SEQ ID NO: 279783 - DNA, 220 bp, Unknown
  Bacterial polypeptide expressing nucleotide sequence isolated from the Sargasso Sea
ttgtctacaattcagctttgccaaaaatcaggttggaactacattatttcgcataggagtggggaaacggaggacacttttatggcggactttgcagttgcaatggcaggtggacagatcaaaacaggctcagcatctcgtagtgaacgtattgccaaatataaccgcttgctggaaattgaaaccgaactgggtgggtcagccatatttggaagttgat

SEQ ID NO: 279784 - DNA, 553 bp, Unknown
  Bacterial polypeptide expressing nucleotide sequence isolated from the Sargasso Sea
atgtcaaaaattaaaaaaattaaaggaaggcagattttcgatagtagaggtaatcccactattgaagttgatattacacttgaagatggtagtttcggtagggcatcagttccttcaggagcttctacaggagcatatgaagcttatgagcttagagatggagaaaaaactttatctggaaagactgtattaaaagccgttgagggtatcaatactgagataagcaatgtgctttgtggaatggaagcatctgcgcaagaagaaatcgacaataaaatgattgagctagactcaacaaataataaatctcgattaggagcaaatgcgatattgggggtttcactggcatcatcaagagctcaagctaattcagagggtaagcatttattcgaatatttaaactcatcagattcatatattttacctgttcctatgatgaatttgattaatggtggggcgcattctaataattcattatttattcaagaatttatgattatgccagtatctgcagaaacatttaatcatgcaattataactggttctgaaattt

SEQ ID NO: 279785 - DNA, 559 bp, Unknown
  Bacterial polypeptide expressing nucleotide sequence isolated from the Sargasso Sea
gatgtagctagttctgagttctataaaaatgaaagatacataatgtcagatggtaatacatataacagtgacgatttttgcgaatatttaaaaaacctttgtgataattatcctatcatatctattgaagatggaatggccgaaaatgattggaatggatggagtgtcttaacagataatctaagtaataagatacaattggttggagatgatgtatttgttaccaataagaagatctttgaaaaaggaattaataaagaagtagctaatgcaattttaatcaagttcaaccaaataggcactataactgaaactttggagactatagatttagcaagaaaaaataattataactatataatctcccatcgtagcggtgaaactgaagacgttactatcgcagatatgagcgtaggaacatcctctggtcagattaaaacaggatcattatctagatccgatagggttgccaaatataatcaattactaagaattgaagagcaacttggcaaaaaattcttcaataaagataatgtttttggtagatggttaaaatgaa

SEQ ID NO: 279786 - DNA, 628 bp, Unknown
  Bacterial polypeptide expressing nucleotide sequence isolated from the Sargasso Sea
aatgatagatagcactaatgtaagtgatgaaggaggatttgcccccaatttacagaaaactgaagaagcagttgaaataataattaatgcaattgaaaaatctggttttatacctggaaaagatatatcaatttgtttagatgttgccgcaaacgaattgaataagggaaaaacgattgattattattctgaattaataaaaaaatatcctatcagatccatagaagacccatttgctgaagatgactgggagtcatggaaaaaattgacaaatgttgctaatattcaaattgttggagatgatttgtttgcaactaatatcaagagactaaaaaaaggcataaaagaaaaatcagccaacgcaatattggtaaaattaaatcaaatcggtactgtgacagaaactttagatgcaattaatttagctcaaaaaaataattttgaaacaataatctcgcatcgatcaggtgatactgaggatactttcatagctgatttggcagtagcaacaaattcatcacaaattaaaactggatcattggcaaggtccgagagagtggctaaatataatcgtttattaaggattgaagaggagcttggaaattctgcaaaaatggctaaagtttaa

SEQ ID NO: 279787 - DNA, 826 bp, Unknown
  Bacterial polypeptide expressing nucleotide sequence isolated from the Sargasso Sea
atgcctatgccaatgtttaatattttaaatggtggagaacactcaaacaacaatatagatatccaagaatttatgattattccaagtggagccaaaacttttgaagaggttatgcaatggtcagtagagatatatcaaaatttaaagaaaatactttcatctaagaatcattcaatagcagttggagacgagggaggatttgcaccaaaccttaaatctaatgaagaagcaataaagttaataattgaagctatcaagaattcaaatttagatctcaaaaaagatataaatattgcacttgattgtgctgcaagcgagttttttgatggcagtaattattttatgaaaggtgaaaatcaaaagcttacatcagtagaacttgtaaattatcttgaaagtcttgttgaaaaatatcctataacttcaatagaagatggaatggatgaaaacgatgacgatggatggaaattattaacatctcagctagctaacaaatgtcaacttgtaggcgatgatttatttgttactaataaacaattattaaaagaaggagttcaagaaaatatcgcgaattcaattctaattaaattaaaccaaattggatcgttaacagagactatagaaacaatacaccttgcaaaagaaagtaactatgaaccaataatctcccatagatctggagagacagaagatacaacaattgctgatttagcagtaggcctaggggttaagcaaataaaggctggtgcaccttgcaggtcagatagaattgcaaaatataatagattactttggatagagaaagaaagtagtgatattttgctta

SEQ ID NO: 279788 - DNA, 701 bp, Unknown
  Bacterial polypeptide expressing nucleotide sequence isolated from the Sargasso Sea
taaagctatattgaattttaattgtgaagatcaaattaaaattgacgaaactttgataagtttagatggaactgaacaaaagaaaaaaattggagctaatgcaatattagctgtttcaatggcttcttgtaaattagcagcaattgaaaaaaagatatctttgtttaggcatattggaaactcaaaaaaatatcaattacccgtacctttattaaatataataaatggtggagtacatgctaataacaaccttgacatccaagagtttatgataagacctgaaaaaactatttctttctcagaggctatgagaaaaagctacctagtaattcaaaatctaaagaaaatggttgataatacgaatgttggtgatgaaggaggttttgctccaaatttaaaaagtgctgaagaagcgatcaaattgataattagagcaattgaaaaatccgggttaaaacccgaaagtgatatttctatttgtttagatgtggccgcaaatgaattaaaaaaacctatgagcattgatagctttttagaattagcaaaaaaatatcctatcaaatcaattgaggatccgtttaaggaagatgaatgggaatcttggaaaaagttaacgagtaatactaatattcagatagtaggggatgatttgtttgctactaattctaaaagattaaaaaaagggataaaagaaaaatctg

SEQ ID NO: 279789 - DNA, 793 bp, Unknown
  Bacterial polypeptide expressing nucleotide sequence isolated from the Sargasso Sea
aatggcaaaaattaaaaatgtaaaaggcagacaggtctttgacagtagaggaaatcctactgtagaagcagaagtttttttagataatggcatttcagctgttgcaatatctccgtcaggtgcatctacaggtgcatttgaggctcacgaattaagagatcaagataataatttttttttaggaaagagtgtaaaaaaagctatagaaaatatcaatttaaaaatcgccccatctttaaaggggctcgatcctgttgaccaatctaaaattgataaagctttaataaatttagataatagtgataataaaaaaaatctaggagctaatgcaactttagccgtatccttagctaactcgaaatcggcagctttatcacttaaaaaaccactttataaaagcttgggaaaatcattttctttaccaaatcctttaatgaatattattaacggaggagcccatgctgataatgacttgcgtattcaagagtttatgattaggccagactctgctaaaaactttatgagtgctatcgaaaaatgtttccttgttattcaaaatttaaaaagtttgttgaaatcaaaaaaaatgcttactaacgtaggtgacgaagggggctttgctccatctattgatacaaatgagcaagcgcttgaactaattgtagatgctgttcaaaaatcaagattaatcccgggaaaagatattgtgatttgccttgatgttgctgctaatgaattaattaataaagaaggcaaatattctattcaatcaaataatcatattttatctaac

SEQ ID NO: 279790 - DNA, 601 bp, Unknown
  Bacterial polypeptide expressing nucleotide sequence isolated from the Sargasso Sea
aatgtcaaaaattaaaaaaattaaaggaagacagattttcgatagtagaggtaatcccactattgaagttgatattacacttgaagatggtagtttcggcagggcatcagttccttcaggagcttctacaggagcatatgaagcttatgagcttagagatggagaaccaactttatctggaaaaactgtattaaaagccgttgagggtatcaatactgagataagtaatgtgctttgcggtatggaagcatctgcgcaagaagaaatcgacaataaaatgattgagctagactcaacaaataataaatctcgattaggagcaaatgcgatattaggtgtttcactggcatcatcaagagctcaagctaattcagaaggtaagcatttattcgaatatttaaactcatcagattcttatattttacccgttcctatgatgaatttgattaatggtggggcgcattctaataattcattatttattcaagaatttatgattatgccagtatctgcagaaacatttaatcatgcaattataactggttctgaaatttttcattcccttaaaagtttattagaaaatgatggatttagcactaat

SEQ ID NO: 279791 - DNA, 388 bp, Unknown
  Bacterial polypeptide expressing nucleotide sequence isolated from the Sargasso Sea
ttgaattatattattgaaaaaatatatgctagagaaatcttagattcacgaggaaatccaactattgaggtcgacgtcataactaagtctggagttatggggcgagcagctgtaccatcaggggcatctactggtggccatgaggcattagaattaagagatggtgataatagtagatacctagggaagggagtaagaaatgcaataaataatgtaaatacaattatttccgttacattggagggctgtgatgtaacacaacagtctgaaaacgacaatttaatgatagccttagatggtacagaaaacaaatcaaggcttggtgccaatgcaattcttggagtttcaatggcaattgcgcatgctggtgcaaaagtaaaaaatcaac

SEQ ID NO: 279792 - DNA, 469 bp, Unknown
  Bacterial polypeptide expressing nucleotide sequence isolated from the Sargasso Sea
aatgcctaaaattaaaaaaatcagaggaagacaagtttttgatagcagaggaaatcctacagtagaagcagaagttatactagatgatggaagccatgcatcagcaatagttccttcaggtgcatctaccggaactcacgaggcttttgagttaagagatatagaaaataaaaaatatttgggaaaaagtgttttcaaggctatagaaaaaataaacggagagatatttaatgctctaactggaattaactcatcagatcaaaaaaaaatagacaatgttttaatagaattagacggaacaaaacaaaaaaaaagactgggggcaaatgccactttacctgtatcattagcttacaataaagcatgtgctaattttaaaaaaatacctttgtttgaaaatttaggaaaaagtaaaactttgcctttaccattgatgaatataataaatggcggagcacatgctaataat

SEQ ID NO: 279793 - DNA, 367 bp, Unknown
  Bacterial polypeptide expressing nucleotide sequence isolated from the Sargasso Sea
aatgaaatcacttaaaaaagttcagattgtaggtgacgatctttatgttactaatcttgagcgactcaaaaaaggttttttaaatttatcatctaacgcaattttaattaaattaaatcaaattggcacagtttcagaaaccttagatgtaattcgatttgctcaagctattggatttcaaacaatcatttctcatagatctggagatagtgaggatacatttattgcagatcttgcagtgggtactaattctaatcaaataaaaaccggatctttagcaagatcagaaagagttgctaaatataatcaattattacgaatagaagaagaacttggaaaaaaagccagaatgaataagattcattaa

SEQ ID NO: 279794 - DNA, 337 bp, Unknown
  Bacterial polypeptide expressing nucleotide sequence isolated from the Sargasso Sea
aatgaaatcccatataaaaaatatttattcaagagagatactagactcaagaggaaatccgacagttgaggtcgatctagttcttgaaaatgatataatagcgcgcgcagcagtcccatcaggagcttcaactggtgattttgaagcaatggagctcagagacaatgacaaaaaacgatatatggggaaaggggtccttaatgcagtaaacaatgtcaatagtgaaataagaaacgctcttattgggattgatattaacaatcaaaagaatattgataatatattaattgagcttgatgggacagaaaataaatctagactaggagcaaatgcaatt

SEQ ID NO: 279795 - DNA, 132 bp, Unknown
  Bacterial polypeptide expressing nucleotide sequence isolated from the Sargasso Sea
ctacggctgcgggacagatcaagacaggttctttatgccgttcagatagggttgcaaagtacaatcggttgctgagaatagaggaccacagctcggcaatatataagggattagcagaatttaatcgatgac

SEQ ID NO: 279796 - DNA, 793 bp, Unknown
  Bacterial polypeptide expressing nucleotide sequence isolated from the Sargasso Sea
aatgggattaagaattcaagaatttatgattagacctgataaagcaaagtcattttcagaggctgttagaatgtgttttttagttataaataatttaagaaatattattaaaaaaagaggatattcaacatctgttggtgacgaaggaggttttgcacctatgattaacaataatgaaaatgctttaaaacttatagtagaatctataaataaatctggttttaaaaatggtaaagatatttctatttgtctagatgtagctgcaaacgaactacacaataaaagtaaatattctattcattcaattaaattaatatcagctaataaatcaattgataaatatcttcaactaatcaaaaaatataaattaaagtccatagaagatccatttgctgaaaatgactggtcatcttgggctaatattataaaaaaaactaaaaataaaattcaaatagtaggagacgatttgtttgtaactaatttagaaagattaaaagttggttttttaaacaattctgcaaattcgatattaattaaattgaatcaaataggaactgttactgagacattagaagtaataaaatttgcaaatttaattggttttaaaactataatatcacataggtcaggcgatagtgaagatacatttatttcagatttagcagttggaactaattctaatcaaattaaaacaggctctttatcaagatctgaaagagtttcaaaatataatcagctattaaggattgaagaaaaactaggaaaattatcaaaaatgaatagtattaaataa

SEQ ID NO: 279797 - DNA, 204 bp, Unknown
  Bacterial polypeptide expressing nucleotide sequence isolated from the Sargasso Sea
cgaaaaaagcaaattttaatactattatttctcatagatctggggatacagaggacacatttattgcagatcttgctgttggtacagaatcatctcagattaaaacaggatctctagcaagatctgagagagtggctaaatataataggttgttacgtatcgaagaagaacttggaaatcatgttaaaatggctaaaatctgaa

SEQ ID NO: 279798 - DNA, 830 bp, Unknown
  Bacterial polypeptide expressing nucleotide sequence isolated from the Sargasso Sea
aaaaagagatgggggtgagcgttttcagggtaaaggagttttggatgcaattgataacattaataatgaaatatttaatgttttatcaggaatagattccacagaccaaagattaattgatgaaactttaattgatttagatggaactgaaaacaaatccagattaggtgcaaatgcaattctaggtgtttcattagcaaatgcaaaagcttcttcagaatatcttgacgttccattatatagatatattggcggtatttcttctaatagattgcccataccaatgatgaatattttaaacggtggtatgcatgcggataataaacttgatattcaagagtttatgatagtacctattggttcaaaaaacttttcagatagtttaagagctgtatcagatataactaaatctttaaaatctagactaatttcaaaagggcttaatacaaatgtaggtgatgaaggtggttttgctcccgctttgaatagtactcgtgaaactttagatcatttaatcgagtcaatcattaaagcaggctataaacctgatcaggatgtatcgatagctttggacgttgctgctaatgaaatctataaggataattcatacaacttttatggagaaggtataaaaaaaaatagtgatgaaatgatagattttttagtttcattagtcgataattatcctatttcttctattgaagatggtatggctgaagatgactgggatgggtggataaatttaacaaaagctctaggaaataaaattaatttagtaggagatgacctatttgttactaacgtaaataggttaaagaagaggtattgag

SEQ ID NO: 279799 - DNA, 523 bp, Unknown
  Bacterial polypeptide expressing nucleotide sequence isolated from the Sargasso Sea
gaaatatataaaaaaaacaaatactctattcattcaaaaagttatatttcagtagataaatccattaaagaatatcaaaaaattattaaaaaatataaaatcaagtctattgaggatccatttgccgaaaatgattggttggcatggaataaattaatgaaatcaataaaaaaagttcagattgttggagatgatttgtatgtaacaaatcttgaaagattaaagaaaggtttccttaatatttcctctaattctatcctaataaagctaaatcaaattggtactgtctctgaaacactggatgtaattaaatttgctcaaacaataggatataaaactataatatctcatcgatcaggagatagtgaagatacgtttattgccgatttggcagtagggactaattcaaatcaaattaaaactggatcattagctagatctgaaagggttgcaaaatataatcaattaatacgtatagaagaagaacttggaaaaaaagcgaggatgaataagatcaattaat

SEQ ID NO: 279800 - DNA, 891 bp, Unknown
  Bacterial polypeptide expressing nucleotide sequence isolated from the Sargasso Sea
ttagatggtactgaaaataagtgtattcttggtgctaatgcaattctaggtgtttctcttgctatatctcaagctgctgcaaaaagtaaaaatttgccattgtatcaatatattggtggtaattcagcaattacacttccagttccaatgatgaatataattaatggtggctcacactctgatgctcctattgcatttcaagagtttatgattgttccagtaaatgcagaaagtttctctcatgccatgaaaattggtacagaaatttttcataatctaaaaggtatcttatctgtaagaggtttatcaacttcagttggtgatgagggaggatttgctccaaaattagaaggaactgaggatgcgcttgaaactattattaaatctatatcatctgcaggatttaagcctggtgaagatgttatgattgctcttgattgtgcttcatctgaattttttgaagataatcattatgactatcgaatatttgaaggtaataatggaaaagtctttgattctgaacaacaggctgattatttatctgatcttgttagtaaatatccaattatctcgattgaagatggtatggatgaaaatgattggagtggttgggttcattcaacacaaattcttggtaataaagttcaattagttggtgatgatctttttgttactaatacaaatattttacaaaaaggtatcgatcaaaaagctgcaaattctattttaattaaggtaaatcaaataggtaccctgactgaaaccatcaatgcaataaacttggcaaaagaaaatggattttcgactgttatttcccatagatcgggtgaaactgaagataatattatagctgatttagcagttgcattgaatgctggtcaaataaaaaca

SEQ ID NO: 279801 - DNA, 889 bp, Unknown
  Bacterial polypeptide expressing nucleotide sequence isolated from the Sargasso Sea
tgatcaaagcttgatagatcgagatggaacaaacgataaatcgaaattaggtgctaattcaattttagcaatatcaatagcagtttgtcgggttgcggcatctttaaaaggtataagccttcatgagcatttctcagatttatacaaagatatgactggtgaaaaaccacaacaaactttgccaatgccaatgttaaatatattaaatggaggagaacacgcagataacaacatagatatccaagaatttatgatcattccaagtggagcagaatcttttacacaagcgatgcaatggtcttctgaggtatatattaatttaaaagaaatcttgcaatctatgaagctatccacttcagttggagatgaaggaggatttgctcctaatctgaactcgaatgaagatgccataaaactaatcgaagaatctataattaaatctgatctaaaaccaggaatagatattaatattgcattggattgtgcagcaagtgaattctttaagaatggtaaatatattttaggtcgtgagggcaaggaattatcatctgatgagttttcggattatttaaaaaatttgattagtaaatacccaattatttcaattgaagacggcatggatgaaaatgatattgatggctggaaacttttaacaaaaaaaattggaaataaatgtcaattagttggagatgacttattcgtaacaaataaagaaattttaagtaaaggtattaaagaagaaatagcgaacgctatattgataaaatttaatcaagttggaagcttgactgaaactattagagctatagagtgtgcaacttctgctgcatataaatcaattatttcgcacagatcaggagaaactgaagataccacgattgctgacctt

SEQ ID NO: 279802 - DNA, 607 bp, Unknown
  Bacterial polypeptide expressing nucleotide sequence isolated from the Sargasso Sea
tatggcagtaaaaaaactttctgcaaaattaaaaaaaattccattatataaaacttttttagtgaaaaaaaactttaagctaccttatcctttgatgaatattattaatggaggagcacatgcagataatggtttaagaattcaagaatttatgattagacctgataaagctaagacattttccgaagcaatgagaatatcttttctcgtaattcaaaatttaaaatctttaattaaacaaaaaaaactatcaacttctgtaggtgatgaaggtggatttgccccaatgataagtagtaatgagcaagcattaaatttaattgtatctgctataaaaaaatctggttataaaaatggaaaagatgtatctatttgtcttgatgttgctgcaaatgagctttttaagaagaataaatattctatccactcaaaaaaatttatatcagtagatcaatcaatcaaggcatatcttaaaattataaaaaaatatcatattaaatctatagaagacccttttgcagaaaatgattggatttcttggaataaaatgatgagatctgttaacaacgttcaaattgttggtgatgatttatatgtaacaaacctt

SEQ ID NO: 279803 - DNA, 520 bp, Unknown
  Bacterial polypeptide expressing nucleotide sequence isolated from the Sargasso Sea
cttagagtctgaagaaaaaacatattcatccgaagaaatgattaactatttaaataatctcacaaaaaaatatccaattatttcaattgaagatggcttggatcaaagtgattggaatggatggaaaaaactgaaccaagaattaggcaacaatattcagatagtcggagatgatttaaccgttacaaatataaagcgtttaaatagagcaatagatgaaaaatcaatgaattcaattctaatcaaattaaatcaaataggaacgattacagaaactgttcaagcagtaaagttagcaaaaaaggttggatttggagcaatcatatctcacagatctggtgagacagaagacacaattatttcagatttttctgttgcaatgggaatggggcaaattaaaaccggctcgttatcaaggagcgatagagtcgctaaatacaaccaactaattagaatagaagaacaattgggtcataaagctaaatacgccactatggactttttaggaatggctagatga

SEQ ID NO: 279804 - DNA, 643 bp, Unknown
  Bacterial polypeptide expressing nucleotide sequence isolated from the Sargasso Sea
tggctttgcaccagaccttaagagtaatgaagaggcttttactgtgattttagctgccattgagtcggcaggatatcgagctggaaaggatattgtttttgccttagatgtcgctgcaacagagttttatgaggatggaatttatcatcttaagggtgagggtgttaaaaaaactagggaagagatgattgctatgtatgttgatttagccgataagtatcccttgttttcgattgaagatggtttggctgagtcggactgggagggatggaagctcttaactgatcgattaggttccaagttacagttagtaggggatgatttatttgtgacgaatacaaaaattttgggtgagggtatcgaaaaagctgtcggtaactctattttgattaaggtgaaccaaattggtacggtcactgagaccttggctgctattgatatggcgcatcgtgcaaattattctgctgttatttcccatcgttctggtgaaagcgaagatacctttattgcggaccttgcggtggcgacgaatagtggtcaaattaaaacgggctcggcgtctcgaacggataggattgcaaaatacaatcaactgcttcgtatagaagaagacttaacgccaaatgcccaatactatttttaa

SEQ ID NO: 279805 - DNA, 721 bp, Unknown
  Bacterial polypeptide expressing nucleotide sequence isolated from the Sargasso Sea
ggatattcaggagtttatgatacgaccagataaagcaaaatcattttccgaagccatgagagtaagttttttggtgattcaaaagctaaagtcattactagacgtgacaaatgtaggagatgagggtggatttgcacctaatttacaaagcgatgaagaagcaatacaaataattataaaagcaatagaaaaatcaggttttaaaccaggcgaagacgtttcaatttgcttagacgttgctgcaaacgaattaaaaacacctaaaacaattgattactattctgaattaattaacaaatatcctataaaatcaatagaagatccctttacagaagacgattgggattcgtggaaacaattgacaaaaaaaaccaaaatccaaattgtaggtgatgatttatttgctacgaatgtaaagagattaaaaaaaggtatcgatgaaaaatcagctaatgctatattaattaaactaaatcaaattggcactgtaagcgaaactttagatgccatacgtttagctcaaaaaagcgattttaaaacaataatctcacatcggtctggtgatacggaagatacttttatagctgatttggcagtagcaactaattcttctcaaataaaaacaggttcactcgctaggtcagaaagagtggctaaatacaatcgtttattaaggatagaggatgagcttggcaattctgcaaaaattgctaaagtctaa

SEQ ID NO: 279806 - DNA, 346 bp, Unknown
  Bacterial polypeptide expressing nucleotide sequence isolated from the Sargasso Sea
atgagccaaatcgttgacattcgtgcacgcgaaattttggattctcgtggtaacccaaccatcgaagcagacgtaattttagaatctggtgttgttggtcgtgcatgtgcaccatctggtgcttcaactggttctcgtgaagctttagaacttcgtgatggtgataaatctcgttacctaggtaaaggcgttcgtactgctgttcaaaatgtaaatagttcaattcatgaattacttgttggtcaaaatgtttttgagcaaaaattgcttgatgacaaaatgattgcattggatggtactgaaaacaaagagaaattaggtgcaaatgcaactttagcagtatctt

SEQ ID NO: 279807 - DNA, 721 bp, Unknown
  Bacterial polypeptide expressing nucleotide sequence isolated from the Sargasso Sea
aatgagcaaaatcacaaaagttttagctagacaagtatttgatagcagaggaaatccaacaatagaagctgaagtttattctaaaaatttaagtgcaacttctatttgcccttcaggagcatccacaggtacttatgaagcctatgaaaaaagagataaatcaaataaaaaatatttaggaaaaagtgttttaaaacctgtggcatatgtaaacaaaataatatctaaaaaattaagaaatcaaaatgtacataaccaagaaagaatagatcatattttaataaaacttgatgggaccaaacaaaaaaacaaaataggagctaatgctatacttgctatatcaatggcagttaaaaaattatcagccaagataagaaaaatacctctttataaaaattttattgttaagaaaaattttcaactcccgtaccctttgatgaatataattaatggtggtgctcatgctaataatggcctgcgtatccaagaatttatgataagacctgataaagcaaaatcttttgcagatggcgtaagaatatgttttttagtgattaatagtttacgttcacttataaaaaaaatgggacattctacttcagttggtgacgaaggaggctttgctccaatgataagtgataatgaaggagccttaaaactaatagtacaagctattaaaaatgcaggttttacaaacggaaaagatgtttctatatgccta

SEQ ID NO: 279808 - DNA, 460 bp, Unknown
  Bacterial polypeptide expressing nucleotide sequence isolated from the Sargasso Sea
atcaaagaatatcaaaaaattattaaaaaatataaaatcaaatccatcgaagacccttttgctgagaatgattggctagcttggaataaattgatgaggtcaattaataaagttcaaatagtgggggatgatctttatgtgacaaatttagaaagacttaagaaaggttttttaaacatttcctcaaattcaattttgattaaattaaaccaaattggaacagtttctgaaacgttagatgtaatcaaatttgcccaaaccattggttataaaacaataatttctcaccgatctggtgatagtgaagatacttttattgcagatcttgcagttggaaccaactctaatcaaattaaaaccggatctttagcaagatctgaaagagtagctaaatataatcaattaattcgtattgaagaagaacttggaaaaaaagtgagaatgaataaaataaattaat

SEQ ID NO: 279809 - DNA, 463 bp, Unknown
  Bacterial polypeptide expressing nucleotide sequence isolated from the Sargasso Sea
aatgatagtaattaataatatttttggaagagaaattttagatagtaggggtaatcctaccattgaagttgatgtcattttatctgatggaaccttgggaagatcttgtgttccctcaggtgcatcaaaaggtaagtatgaagcgttagaattaagagataatgatactgacagatataacggattaggtgtaaaagatgctgtaaataatataaatactgaaattttagatgttttgtctggaagatctccttttgaccaaaatgaaattgatagaagtattattgaacttgatggaacgcctaacaaagaaagactcggggcaaatgcaattttaggtgtttcattggcagtatgtaatgctgccgctaaatcagcaaaaactccattgtggaaatatattggaggaattaattcaacttcacttccagttccaatgatgaatatagtaaatggtggatcc

SEQ ID NO: 279810 - DNA, 821 bp, Unknown
  Bacterial polypeptide expressing nucleotide sequence isolated from the Sargasso Sea
taccaaaaataatagtgctacagcaatatgtccctctggagcatcaacaggtacttacgaagcatttgaaaaaagagatgtaaaaagtaaaagatatttaggtaaaagtgttttaagtgctgttaatctagttaattctaaaatctcaaaaaaattaaaaggactaaatgtccataatcaagaaaaagttgatgcattaatgattaatttagatggaacaagacaaaaaaccaaattaggtgcaaattctattttagcagtatctatggctgtaaaaaaagtttctgctaaagaaaaaaaaatacctctttataaaaattttttaatcaagaataatttcaaactaccttatccattaatgaatataattaatggaggagttcatgcaaacaatggtcttagaatacaagaatttatgataagacctgatcgtgctaaaaatttctctgatgcaataagaatttgttttctagttattaaaaatttgagcaaattaataaaagataagggattatcaacttcagttggtgacgaaggaggctttgcaccaatgattagaaataataatcaagcattagatttgattgttacagctatcaataaatcaggttttattaatggaaaagatgtatctatttgtctcgatgttgcagcgaatgaattatttaaaaaaaataaatattctattcattcaaacaaatatgtttcagttgaaaaatcaattaaagagtatgagaaaattatcaaaaaatataaaattaaatccattgaagatccgtttgcggaaaatgattggaattcttggaataatcttatgaaaa

SEQ ID NO: 279811 - DNA, 258 bp, Unknown
  Bacterial polypeptide expressing nucleotide sequence isolated from the Sargasso Sea
gtacagtcacagaaactttagaagctataaatttagcaacagaaaataattttgcatctataatgtctcatagatcgggtgaaacagaagattcttttatatctgatttagccgttgcatcaaattgtcctttaataaaaacaggttctttggccagatcggatagagttgcaaaatataatcagttacttagaatatcagaaaatgaaaatattaaaggttatgctggtgaattaagtgaagtttttaagagctagt

SEQ ID NO: 279812 - DNA, 910 bp, Unknown
  Bacterial polypeptide expressing nucleotide sequence isolated from the Sargasso Sea
aagtgtatttaaaccaattgaaattataaacaaaattatttcaaaaaggttgtcaaatattaatatccataatcaagaggaaatcgataatactttaataagactagacggtacaaaacaaaaaaaaaaactaggagctaacactatacttgctgtatcaatggcggcaaaaaaactttcagctaaaatacaaaaaaaaccactatataaaactttctttattaaaaaaaattttaaattaccatatccattaatgaatattttaaatggaggtgctcacgctaataacaatctccaaattcaagaatttatgataaggccagatagagctaaaactttcagtgaggctgttagaatgtgttttttagtaattaataatttaaaaaatttaattaaaaaaaaaggtctttctacatctgtcggggacgaaggaggctttgctccaatgataaataaaaatgagttagctttggatttaattttaaaagctataaatttatcaggctttaaaaacggcctagatatatcaatatgtttagatgtagccgccaatgagttatataaaaacaataagtattgtatacattcaaaaaattatatttctacaaatgagtcaattaaaagatatttaaaattaataaaaaaatataaaattaaatctatcgaagatccttttgctgaaaatgactggttagcatggagtaaatttatgagtttaaataaaaataatattcaagtaataggcgatgatttgtatgtgactaatcttgaaagactgaaaattggttttttaaggcaatcttcaaatgctatacttataaaaccaaatcaaatagggactgtttcggaaacgctagaggtcatcaaatttgctcatttaattggtttcaaaacttattatttcccatag

SEQ ID NO: 279813 - DNA, 194 bp, Unknown
  Bacterial polypeptide expressing nucleotide sequence isolated from the Sargasso Sea
tgctttaaataatgactataagaatattatttcgcatagatctggagagactgaggactcatcaatttctgatctggctgttgggacaggagcaggtcaaattaaaacgggagcaccatgcaggtctgaaagggttgcaaaatataacagactttattggattgataagaaaaatagcttttcatttggctgat

SEQ ID NO: 279814 - DNA, 571 bp, Unknown
  Bacterial polypeptide expressing nucleotide sequence isolated from the Sargasso Sea
caaaccaggaaaagatatagttatttgtttagatgtagctgcaaatgaattggttaatggaaaaggtgaatattctattcaatctaaaagcttctcatcagcagacgctaacattgattattacaaaaaattgatctctaattatcctattcaatcaatcgaagatccttttgcggaagaggactgggagtcttggaaaaaaataacaaatgaaataggtaaaaatgttcaaattgtaggtgacgatttatttgtaactaatgttaagagattaaacaaaggtataaaagaaaaatcagctaactctattttagttaaaccaaatcaaattggtactttaactgaaactttagaggttatctctatggcgaaagctgctggtttcaataccattatatcacacagatcaggcgatacagaagatacatttattgccgatttggcatcagcgacaatgtcatctcaaattaaaactggatcattagctagatctgaaagagtggcgaaatacaataggttattacgcatcgaagaagaacttggaaatgatgcaaaaatggctagtatctag

SEQ ID NO: 279815 - DNA, 799 bp, Unknown
  Bacterial polypeptide expressing nucleotide sequence isolated from the Sargasso Sea
aattgtattttccaaaaattataattcttcatccatttgtccgtctggcgcttcaacgggaacttatgaggcttttgaaaaaagagacaaatcaaacaaaaaatatttaggaaaaagtgttttaaaagcagtttatataattaataataaaatttcaaaaaaattaaaaaaccaaaacgttcacaaccaagaaaaaattgatagtattttaattaatcttgatgggacaaaacaaaaaacaaaaataggagcaaatgcaatattggctgtatctatggccgttaaaaaactatcggcaaagataaaaaaaatacctttgtataaaaactttattataaaaaaagattttaagttaccttatccaatgatgaatgtaattaatggaggagcccatgctaataatggtttgagaattcaagaatttatgattagaccagatagtgcaaaatctttttctgaagcaattagaatgtgttttttagtgattcaaaatttaaaaaaaataattagcaacaagggaatgtcgatatctgttggagatgaaggaggattcgcaccaaatatttataagaatgaagatgctcttaaattgattattcaagccataaaaaaagcaggttttgttaatggcaaacatatatctatttgtctcgatgtcgccgctaacgagttatttaaaaaaaacaaatattctgttcattcaaaaaaattagttactgcaaaagatacaaataaaaagtatttaaaattaataaaaaaatataaaattaagtctatagaagatccatacgaagaaaat

SEQ ID NO: 279816 - DNA, 686 bp, Unknown
  Bacterial polypeptide expressing nucleotide sequence isolated from the Sargasso Sea
aaattctttttccgaagcgattaggcgaagctttctagttattcaaaatttaaaaaaaatgctagacaatactaatgttggagacgaaggaggttttgcgccaaattttaagagcaacgatgaagcaatcgaaataataattaaatcaattgaaaaatcagggtttaggccagataaggatgtatctatttgtctagatgttgcagcaaatgaattaaaacaaccaaaaaatatagagtattatctaaatttaattgataaatatcctattaaatccatagaagaccctttcgcagaggatgaatgggactcttggaataatttaactaaaaatactaatattcaaatcgttggagatgatttatttgctacaaataaaaaaaggctaaacagaggtattaatgaaaaatctgctaatgctattttagtaaaattaaatcaaatcggaactgttagtgaaacattagatgtaatagatcatgctcaaaaaaatgattttaaaactattatttcacatagatctggcgactcagaggatacttttattgctgatctgtgtgttgcgacaaaatcatcacaaattaaatcaggctcattagctcgatctgagagggtatcgaagtataataggctcttacgaatagaggacgcacttggaaattctataaaaatggctaaaatctaaa

SEQ ID NO: 279817 - DNA, 805 bp, Unknown
  Bacterial polypeptide expressing nucleotide sequence isolated from the Sargasso Sea
ggagctcatgcaaacaatgttcttagaatacaagaatttatgattagacctgatcgagctaataatttttctgaagcaatgagaatttgttttatagtgattaaaaatttatcaaaattaataaaaaataaaggattatccacttctgttggagacgaaggtggttttgcacccatgataagtagcaacaaacaagctcttgatttaattgttactgctataaaaaaatcaggatttgtgaatggtagagatgtttcaatttgtttagatgtagctgcgaatgaattattaaaaaaaaataaatattcaattcattctaaaaattacatatctgttgaaaaatctatcaaagaatatcaaaaaattatcaaaaaatataaaatcaaatctatcgaggatccttttgctgaaaacgattggcttgcctggaataaattaatgagatcaattaataaagttcaaatagtgggggacgatctttatgtgacaaacttagaaagacttaagagagggtttttaaatatttcctcaaattcaattttgattaaattaaatcaaattggaacagtttcagagacattagatgtgatcaaatttgctcaaaccattggttataaaacaataatctcccaccgatctggtgatagtgaagatacttttattgcagatcttgcagttgggaccaactcaagtcaaattaaaaccggatcattagcaagatcagaaagagtagctaaatataatcaattaattcgtatcgaagaagaacttggaaaaaaagtgagaatgaataaaatcaactgat

SEQ ID NO: 279818 - DNA, 703 bp, Unknown
  Bacterial polypeptide expressing nucleotide sequence isolated from the Sargasso Sea
atgtcaaaaataaaaagtgtaaaaggcagacaagtctttgatagcagaggcaaccctacagttgaggccgaggtcattttacatgacgaaactattggtacttcaatagtaccatctggagcttccactggtcgctatgaagctcatgaactaagagataaaaataatgattatttgaataaaagtgtttttgacgctgtaaaaaacataaatgataaaatttttaaagcattacaaaataaagattcaacaaatcaaagtgaaattgataaaattttaataagcttagatggtacagaaaataagtcaaaccttggagcaaattctattttagcagtttcaattgcaaatttaaaagctgccgcaaaattttctagaaaagaaatatacgaatatattaataatgaaaataaaactttatgtatgccatatcctttaatgaatattatcaatggaggtgctcatgctaacaactctcttgaaattcaagagtttatgattagaccagatggagcaaaaaattttaaagaatgtatgcaaatgtccttcttggttattcaaaatttgaaaaaaaatctagaaagaaaaaaaatttctacaagtgtaggtgatgagggtggatttgctccgtcccttggatctgatgaagaagctatagaagttatcatgagctcaatatccgcgtcaggatcaaaccaggcaa

SEQ ID NO: 279819 - DNA, 553 bp, Unknown
  Bacterial polypeptide expressing nucleotide sequence isolated from the Sargasso Sea
atgagtaaaatcactagagtaaaagcaagacaagtatttgatagtagaggaaatccaaccattgaagcagaagtttttagtaatgaaaaaagttcaagtgctatttgtccttctggtgcatcaactggttcttatgaggcgcacgagaaaagagaccaaaaaaataaaaaatatcttggaaagagtgtttttggtcctattaaatatattaattcaaaaatatcgaaaaaattatttaataaaaatgttcataatcaagagcttatcgactcaattttaattaatttagacggcactaaacataaaactaaaattggagcaaatgcaatattagctgtatctatggctgtaaaaaaactctcttcaaaattaaaaaaaattcctctatacaaaaattttataataaaaaaaaattttaaactaccttatccaatgatgaatataattaatggtggtgcacatgcaaataataaattaagaatacaagaatttatgatccgtccagatggagcaaaaaatttctcagaagctgtgagaatgtgctttttagtta

SEQ ID NO: 279820 - DNA, 634 bp, Unknown
  Bacterial polypeptide expressing nucleotide sequence isolated from the Sargasso Sea
aatgaagatcaaagacataaaagcttacgaaatattagattcaaggggcaatccaactgtgggggctgaggtaattttatctgatggaagtataggggtttcctgcgtaccgtcaggagcttcaactggaaaatatgaagcaatggaaaaaagggatagtgatagtgatcgttatctaggtaaaggagtcttaaacgccgtaaatagcattcataatgaaattttacctatattaagaaaaaaggacgcgtcagatttatttggcaatgattttttgatgttagaagctgatggttcggattcaaaagaaaattttggtgctaatgctatattggcagtttctatggcatgtgcaaaagcggcctctatttcaatgaaaattaacttacatgaatatttagcgaataaagcttctgaacttaatgacaagaatattgaacaaaaacttcctattcctatgttaaatattttaaatggcggagctcacgctgataatccaattgatttccaagaatttatgatccgtccatttaaatttaattcattttctgagtctttaagatgcggagttgaaatatttcacacgctcaaaaaaactttagaagagaagaatttaaatacttctgtaggagat

SEQ ID NO: 279821 - DNA, 134 bp, Unknown
  Bacterial polypeptide expressing nucleotide sequence isolated from the Sargasso Sea
tgcaggacaaataaaaactggctctttatctcgcactgatcgaacagcaaaatacaatcaacttttaagaattgaagaggaattaggggataatgcagtttatgctgggagttcaattttaaaaaatatttgac

SEQ ID NO: 279822 - DNA, 685 bp, Unknown
  Bacterial polypeptide expressing nucleotide sequence isolated from the Sargasso Sea
gacgagggtggctttgcaccacagatcgggagttgtactgaagcgctcgaagtcatactcacggcgattggtaatgctggataccaacctgggtcacagattgccatcgcgttggatgttgcagcgacagagttatacgacgaagacgccggcacctactcaattgaagggaaatctctggattcagcaggaatggcagcattcctaactgacttggccgggaaatatccaatcatgtctattgaggatggattctctgaagatgactgggaaggttggaagattatcagtgataagattggtgacaaagttcagcttgtcggtgatgatctttttgtcacgaattcagagagacttggccgtggtattgctgaaggtatcgccaacagcatccttgttaaagtcaaccagatcggcacacttactgagacaactgctgcagtcatgcttgcccaccgctcaggctatacatcaattgccagccatcgtagtggtgagacagaagatgccacgattgcagacttggcggtcggtttatcgacaggacagataaaaaccgggtcagcgtcgcgtagtgatcgggtagcaaagtacaaccaactgttaaggattcaagaatcgcttggcgacggagcattgtatgccggtcgagatgtacgacttcgttggccgggtatgtgttagt

SEQ ID NO: 279823 - DNA, 590 bp, Unknown
  Bacterial polypeptide expressing nucleotide sequence isolated from the Sargasso Sea
aatgagcaaaataacaaaagttatagcaaggcaggtttatgatagtagaggaaatccaacaattgaagcagaagtttttgcaaacaacatgaaggcaagagctatatgtccatcaggagcttctactggatcacatgaagcctatgaaaaaagagatgtttcaaacaagaaatatttaggaaaaagcgttttaaaaccagttcaattaattaataaaataatttcaaaaaagttgaaaaatcaaaacatacacaatcaagagaagattgatcatattctaattaagcttgatggaacaaaacaaaaaaaaaaatatggagccaattctttattagcagtttctatggctactaaaaaactatctgcaaggattaaaaaaattccactttataaaacttttttggtaaaaaataattataaattacctttcccattaatgaatgtaattaatggtggtgcgcatgctaataatggtcttagaattcaagaatttatgataaggccggacagagcaaaatctattaatgaagctattagaatgtgttttctagtaataaataatttaaaaatatacttaaagaaagaaggga

SEQ ID NO: 279824 - DNA, 542 bp, Unknown
  Bacterial polypeptide expressing nucleotide sequence isolated from the Sargasso Sea
catggcgaaaattagtcgcattatcggacgcgaaatcttagattcacgcggaaaccctaccgtagaagcagatgtatacctagaatcaggcgtaatgggccgagctgcagcaccatctggtgcctctactggtagccgcgaagcactagagctacgcgacggcgacaagtctcgttacctaggtaaaggtgtaacaaaggcagttgcagcagttaacgataccatcgcgcctgcacttatcggcaaagacgcactagcgcaagctgatatcgacggcatcatgattgaccttgatggcacagaaaacaaagaaacccttggtgcgaacgcaatcctagcggtttcacttgcagtagcgaaagcagcggcagcagagaaaggcgtagcactttacgagcacattgcagacctaaacggtacatctggtcaattctctatgccagtaccaatgatgaacatcatcaacggtggtgagcacgctgataacaacgtagacatttcagagttcatggtacagccagttggcgcgaagagctttaaag

SEQ ID NO: 279825 - DNA, 254 bp, Unknown
  Bacterial polypeptide expressing nucleotide sequence isolated from the Sargasso Sea
catgaagaagcgcacgagctcggccatcaccaaggtcgtgggtcgtcaaattttcgactcgcgcgggaacccgaccgtcgaggcggacgtgtacacccacaagggtatgttccgcgccatggtgccgagcggtgcgtccaccggtatctatgaggccgtcgaacttcgcgacggtggtaaggaatacatgggtaagggtgtcgcgcaagccgtcaagaacctcaacgagatcatcgccccggcgctcgtgggta

SEQ ID NO: 279826 - DNA, 949 bp, Unknown
  Bacterial polypeptide expressing nucleotide sequence isolated from the Sargasso Sea
accgttgaagcagaagtttactccgatagtggtctacaagcttcggcaatagtaccttcaggagcatcaacaggaactcacgaagctttcgaattaagagataaagaaaataaaaaatatcttggtaaaagtgtttttaaagcaattgagaatgtaaatggtccaatagcaaaatctttaataaacattgatattggtgaccagataaaaattgacgaaaccttaatagatcttgatggaacagaacaaaagaaaaaacttggttcaaatgcaattttagctgtctcaatagcagcttgcaaaatagcagcgattgaaaaaaatgtttctctatttaaatatttaggaaactctaagaaatcccaattacctattcctcttttaaatattataaatggtggagttcacgcaaagaacaacttagacattcaggaatttatgatacgccctgataaagccaaatcatttaccgaagcaatgagaataagctttttagttattcaaaacttaaaatctatgcttgacgttactaatgttggagacgagggtggttttgctcccaacttacaaagcgatgaagaagcaattaaaattataattaattcaatagaaaaatcaggctttaagccaggcgaggatatatcaatttgtttggatgttgctgcaaatgagttaaaggaaccaaaaacaattgattactatactcagttaattagcaaatatcctattaaatcaatagaagatcctttcgcagaagatgactgggattcatggaaaaaattgacaaaaaatacaaaaattcagattgtgggtgatgatttattcgctaccaatgtaaaaagattgaaaaaaggtatagaggaaaaatcagctaatgcgatattaattaaattgaatcaaattggcacggtgagcgaaactttaaatactattaatttagctcaaaaaa

SEQ ID NO: 279827 - DNA, 871 bp, Unknown
  Bacterial polypeptide expressing nucleotide sequence isolated from the Sargasso Sea
aaagatccttgtcatcagtatgaaattgataacattcttatatcgtgcgatggaacagctgacaaatcaaagatgggagctaatgcaattctagttgtttcgcttgcagtggctttggctgcatcaaaattaaaacagattccactttatgaacattttgcacaaatatataaagatatttctggaaatgtaccaaaaaaaactattccaatgccaatgttcaatatactgaacggcggtgaacatgcagataacaatgttgatattcaagaattcatgattattccatctaaagctaaaaatttttcacaagtcatgcaatggtcatctgaaatttatcaaagtcttaaaagtattctcatagctaagaaatattcatcagcagttggagatgagggtggctttgctccatctttaaactcaaatgaggaagctttgaagttaataatagaagccattaaaaaatctaatcttaaaccaggtattgatataaatttggctttagattgtgcttctagcgaattctataatgggaatgattacgttttaaaaggggaaaataaaattttttcttctctagagtttgcaaattacttagagtatcttgtttcaagatatcccataatctcaattgaagatggtatggatgaaaatgatatagaaggatggcagatactttctgaacttattggagacaggtgccagcttgttggagatgatttatttgtcaccaataaaaaaattcttgaaggaggtattgaaaaaggtatagctaattcaattttgattaagtttaaccaggtaggaactttatctgaaacaattgagaccattttgtgcgctaataaacataattataaaactataattt

SEQ ID NO: 279828 - DNA, 714 bp, Unknown
  Bacterial polypeptide expressing nucleotide sequence isolated from the Sargasso Sea
ttaaaacaatacttaaatcaaagggattaaatactaatgttggtgatgaaggaggttttgctccaaatattaataattcaaaagaggtgatagaaataattataaaagcaattgatgaaactggcttaaaaatcaaagaagatattgtattgtctttagatgtagcttccacagaattttattctaatcaagtttataatttgaaaggcgaaaaaaagaaattctcatccgatcaaatgataaattatttaaaagatttatgttcatcatatcccatttattcaattgaggatggaatggctgaagatgattgggaagggtggattaatttaacagctgaattaggacactcaacacaacttgttggtgatgatttgtttgttacaaattacaatagattaaaattaggtattgaaaaaaaagctggtaattcaatattaataaaattaaatcaaataggaactttaagcgaaactttaaaagctgttaatctagcaaagcaaaataatttttctactataatttcacatagatcaggagaaactgaagatactagtattgctgatttatcagtagctgtttcatctggtcaaattaaaaccggatctttatctagaactgatagaacagcaaaatataatcagcttattagaattgaagaaatacttggctctaaagcaaagtttgcttcaaaggatttaataaaatattgac

SEQ ID NO: 279829 - DNA, 826 bp, Unknown
  Bacterial polypeptide expressing nucleotide sequence isolated from the Sargasso Sea
attttagctgtatcaatggcagtaaaaaaactttcagccaaacaaaaaaaattacctctatataaaacttttttagttaaaaataattttaaattaccatatccattgatgaatataattaatggtggggtacatgcagataataatcttagaatacaagaatttatgattagacctgatcgagcaaaaactttttcagatgcaatgagaatttgttttcttgtaataaaaaatttaagtaaaataattaaaaacaagggattatcaatctctgttggagacgaaggtggttttgctccaatgataagtagtaataatcaagctttagatttgattgtatcagctatcaaaaaatctggttttgttaatggtaaagacgtatctatttgtctcgatgtagcggctaatgaattatttaaaaaaaataaatattctattcattcaaaaaaatatgtctctgtagaaaaatctattagagaatataaaaaaataattagaaaatacaatatcaaatcaattgaagatccatttgctgaaaatgactggacatcttggagcaaattaatgaaatcaataaataaagttcaagtagtaggtgatgatctttatgttactaatctagagaggctgaaaaaaggttttttaaatgagtcttctaacgcaatcttaattaaacttaatcaaataggcactgtttcagaaacacttgacgtaattaaatttgctcaaattattggatttgaaactattatttcccatagatctggagattcagaagatacatttatagctgatttagctgtaggaactaactcgaatcaaatca

SEQ ID NO: 279830 - DNA, 653 bp, Unknown
  Bacterial polypeptide expressing nucleotide sequence isolated from the Sargasso Sea
aatgcaaaaaatatcttcaataaatgccattcaagtatttgattcaagaggcgtgccaacgatatcatgtaaggtaacactggaagatggaacatcagcttcagctatggttccaagtggagcatctactggttcaaaagaggcgcttgagttgcgtgacaatgatatttcttatcatggcaaaagcgtaataaaggctgttactaacattaataatatattgtcatcttttgttattggcaaagacccaaataaccagaaagaaattgatgaatcattaatttcatttgatgatactaaagataaatctaaagttggagcaaatgcaattttagcgatatctcttgcagttgcacatgtagcagcaaaggcaaacaaaacaacactatatgagcatttctcaagagtttataaggatattactggcgaaaatgtaatacattgcatgcctctgcctatgtttaatattcttaatggtggcgagcatgctgataataatatagatatacaggaatttatgattattcccagcggcgcaaaaagtttcgttgaagttatgcaatgggctacagaaatttatcataatttgaagaaaatactcttaaaaaataaacacactacagctgttggtgatgagggtggttttgctccaa

SEQ ID NO: 279831 - DNA, 894 bp, Unknown
  Bacterial polypeptide expressing nucleotide sequence isolated from the Sargasso Sea
atcttctaaaattaaaaaaattccaatttataaaaatttactagtaaataaaaattttaaattaccttatcccttaatgaatataattaatggaggtgcacatgcaaataatggtctaagaatccaagagtttatgataagaccagataaagcaaaaactttttctgaaggtcttagaatgtgttttattgttattaataaattaagagctttaattaagaagatgggttattctacttccgtaggagatgagggtgggttcgctccaatgataaatgataatgaaagcgcgcttaaacttatagtaaaagctataaatttatcaggttttaaaaatggaaaagatatagtcatatgcttggacgtagcagcaaatgagttgcataaaaataaacattattctattcattctaaaaagtacactagtgtagatgaatctatcaaaaattatctcagacttgtcaaaaagtataaaataatgtctatcgaagatccatttggtgaaaatgattggtcagcatggacaaaacttttgaataaaacaaaaaataaaatacaaatagttggagatgatctgtttgttacaaatttagaaagattgaaaattggttttttaaatatctcagcaaattcaatattaattaaactaaatcaaattggtactgttacagaaactcttgaggttatcaaatttgcaaaattaattggttataaaactataatttcacatagatctggtgatagtgaagatacatttatcgcagattttgctgtaggaactgattctaatcaaattaaaactgggtcattagcgagatcggagagagtttcaaaatataaccaattgttaagaattgagcaagcacttggaaaaaaatcaaaaatgcatagtct

SEQ ID NO: 279832 - DNA, 622 bp, Unknown
  Bacterial polypeptide expressing nucleotide sequence isolated from the Sargasso Sea
aatggaagaagcaatcgaactaattttgacatcaatagaaaaagcaggttttaaaccaggaactgaagtttctatttgcttggatgttgcggcaaatgaattatataaagaaaaaaaatacgcagtaagctcatcaaaatttatatcatctaataaaaccattgaatattatctagatttaataaaaaaatacccaataaaatctattgaagacccattctcagaagatgattgggacgcttgggtaaatttaacaaaacacgtaaatggaaaaaatattcagatggttggagatgacttatttgtgactaacaaagaacgcttatttaaaggaatcgaactaaaagctggaaatagcatacttattaaacctaaccaaattggaactttgactgaaactttagaagtaattaaattggctcataaaaataattatcaaacaattatatctcataggtctggagactccgaggatacatatatagctgatttggcagtagcgacaaattcaactcaaataaaaactggttctttagcaagatctgagagagtggccaaatataaccgtttattatggatagaagatgatcttggaaaaacttcaaaaatagctaaagtttaa

SEQ ID NO: 279833 - DNA, 487 bp, Unknown
  Bacterial polypeptide expressing nucleotide sequence isolated from the Sargasso Sea
atggcaaagattaccaatgttaaaggtcgtcaagtttttgacagcagaggaaatccaactgttgaagcagaagttttcttggacaatgatatttccgctagcgctatatctccctctggggcatccaccggggcatttgaagctcatgaattgagagaccaagataaaaatttttttttaggaaaaagtgttaacaaagcaattgaaaatattaataataagattagatcaagtttaaaaggattagacccagccgatcagtctaaaatagataaagttttattagatttagacggaagtgaaaataaaaaaaatcttggtgcaaatgcgactttagcagtttctttagctaactcaaaaacatcagctttatcggctaaaaaaccactctacaaaaatttaggtaaatctttttcattaccaaatcctttaatgaatattataaatggaggagctcatgcggataacgatttaaatattcaagagt

SEQ ID NO: 279834 - DNA, 610 bp, Unknown
  Bacterial polypeptide expressing nucleotide sequence isolated from the Sargasso Sea
atgaccaaaattaagaatatcgtagcaaggcaaatatttgactcaagaggtaatccaacagttgagaccgatgtaattacatcaaatggagttttaggtagagcttctgttccctccggggcttcaacaggtcagcatgaggctgttgagttaagagacgaaactaaagactttatgggtaagtctgtttttcgtgcagttaaaaacgtaaatgaatcaatttttaaggaattaaagaatttatcggtattcgatcaagaattaattgattcaaagatgattgagcttgataacactgctaacaagtcaaaacttggtgctaatgctattctatctgtttcattagctgttgcaaaggctgctgcaatcgaaaaaaaaatatctctttttagatatttaggaaacgataaatcaaatgttttacctgttcctttaatgaatatcataaatggtgggagtcattctgattcacctatttctttccaagagttcatgatcgtccctattggcgcttcaaattttagtcatgctcttcaaataggtaatgaagtttttcataatctaaaattaattctaaaatctagaggtctttcaactgcagtggagatga

SEQ ID NO: 279835 - DNA, 796 bp, Unknown
  Bacterial polypeptide expressing nucleotide sequence isolated from the Sargasso Sea
atgaaagatcacatcatttcaattgaagcaatggaaatactggattcacgcggaaatcctacaattcgaacaagggtaagattggaaaacggagtttgtgggtctgcttcagttccttccggagcatcaaccggagaaaatgaggcacttgaactacgtgacggtgataaaagccgttacggcggaaagggtgtgcttaaggccgtagaaaatgtgaacaagaaaattgctccggaattgcttggaatagcacctgataagcaggctgaaattgacagtataatgcttaagcttgatggtacttctacaaaaagcaacctgggagcaaatgctatactaagtgtttctatggcggctgcagccactgcagcaaagttaaacaacatccctctttatgcttatttgggaggagtttcagattttcgactaccagttcctatgatgaatatcataaatggtggagaacatgctgacaacagtgtggatttacaggaattcatggtaataccttcaggggccccttctttcagtgaggcactccgttatggtgcggaaacatttcatgccctgaaagaaattttgcaatcaaaaggctatgtcactaatgtaggcgacgagggtggttttgcaccgaatcttaaaagcaatgaagaagcctgcgaagtaatcatagaggcaattttagtagcaggttatgagcccgggaaagacattttcatggctcttgacgcggcagcttcttcattttgtgatcaaggatcttatgcttttaataaatctggattggggataaaaa

SEQ ID NO: 279836 - DNA, 772 bp, Unknown
  Bacterial polypeptide expressing nucleotide sequence isolated from the Sargasso Sea
gatgcctgtgccaatgtttaatgttctaaatggaggctctcatgcatttaattcaactgattttcaagagtacatgatagttccaattggtattcacgatgatattgaaaactcaatgcattgtggctttaaaatttataacgaacttaaaaaaatattagaaagtaaaaatttaccgacaactgtaggtgacgaaggcgggttctcaataacatttggagaaaaaaaccctagtaatatttatcctcttgaaatattaatggaagctattgaaaaatcaaattatgttcctggtaaggatgtaatgatagccctagatgtagcagcatcagaaatgtttgaaggcaaagacacaaatggaaactatttatataaatttgaaggtggaaaattttcttcaaaccaaatgatattgtactacgaggagctaactaaaaaatttcccatttatagtattgaagatggtcttgatgagaatgactgggatggctggaaaaaacttaccactttaattggggacagagtccagcttgtaggagatgatttatttgtaacacaaagaaaattattgaaatcaggcattaaggacaaagtggcaaattctatattgattaaacttaatcagattggaacagttactgaaacactggatacaataactgaagctcagataaataactttagtactattattagtcataggtcaggtgaaaccgaagatacatttattgctgatcttgctgttgcagctcattctactcaaataaaatct

SEQ ID NO: 279837 - DNA, 717 bp, Unknown
  Bacterial polypeptide expressing nucleotide sequence isolated from the Sargasso Sea
atgcgttaaaatcaaatttaaaatccaaaaatttaaatactaatgtaggagatgaaggtggttttgcaccaaatctcaaatcaactaaagaagccttagattatattttagaggctattaattcagtaggtttaaaaactaacgatgatatattaatatctttagatgttgcttcaactgagttttttgcaaatggtaaatataatcttaaaggtgaaaataaattattttcatctgaagaaatgattcagtatcttaaaaatttagtttctttatatcctatatactcgattgaagatggattatcagaagatgattgggatggctggaaaaatttaactagacaacttggtaataagattcaattagttggagatgatttatttgtaacaaattttgaaagattaaataatggaattaacaacaatatagctaattctatcttaataaaattaaatcaaataggcactttgtcagaaacattagaagtaatgaaattagctaaaaaaaataattataattgtgttgtttcacacagatctggtgaaacagaagatacaactatagcagatttatcagtgggaatgtgctccggtcaaataaaaacaggatctatttcaagaacggacagaacttcaaaatacaaccaacttttaagaatagaggaagaattaggtagtcaagtaagttatgctggaaaatcaattcttagataaa

SEQ ID NO: 279838 - DNA, 796 bp, Unknown
  Bacterial polypeptide expressing nucleotide sequence isolated from the Sargasso Sea
tctggtgcgtccaactggagaacatgaagctgtagaattaagagatggtggcaataactatatgggtaaatcagtcaataaggcagttcaaaatgttaataagcttattgctaatgaaataaatggaaaatctgtttttaatcaaaatgaaattgataatttaatgattgatttagatggaactgaaaataagtcaagattaggtgctaatgcaattcttggagtttcattagcttgtattcgagcagcttcaattgaatctaaaaaacctttatataaacacataggtggtgaacaagcaacaacgcttcccgttccgatgattaatattgtaaatgggggatctcattcaagtgctccaattgcttttcaagaatttatgattgttcctgttggagcccatagtttttcaaatgcaatgaaaatgggaactgaaatttttcataatctaaaacaaattttagtttcaaaggggctaaatactacggttggagatgagggaggatttgctccaagtttcaaaggcactgaagatgctttagaaacaattattaagtctgtttctgcagctggatatattttagaaaaagatattaaaattgctcttgattgtgcggcttctgagttttataaaaatggaaattatgactatactatttttgaaaaaaaacaaggcaaattgatttcctcatcagaacaaattgattatttatctagcctagcaagtaaatatcccataatttcaattgaagatggaatggatgaaaatgattgggatggatggaaatttttaaca

SEQ ID NO: 279839 - DNA, 924 bp, Unknown
  Bacterial polypeptide expressing nucleotide sequence isolated from the Sargasso Sea
cattttaggagtttcgatggcagttgcgcatgccagtgcaaatgtgtctaatcaccctttatataaagctttttcagatgatgatagttttttactaccaataccaatgatgaacattctaaatggtggtagtcacgcgaataattctgttgatattcaagaatttatggttttaccaattagcgggaatacgttctcagaaactttgcaaatgggaacagaagttttccatgagttaaaatcagtcttaaattcaaaaggaatgaataccgcagttggagatgagggtggttttgcgccaaatttgagttctaatgaagaagctatagaaataattcttgaatcaattttaaatagaggattaaatccaggaaaagatattttattagcattagatgttgctgctagtgagttatatgaaaacggtctttataatcttgcttctgaaaacaaaaaacttgaaacaaatgaaatggttacttacttaggtaaattggtaaaagattatccaatcatatcaattgaggatggattacatgaagatgattgggaaggttggaggcaactaaattcagagataggcacagatgtacaaatagttggggatgatttaaccgtaactagtataaaaagattacaacgttcaattgatgaaaaaagtatgaatgctattttgattaaattaaaccaaattggaacagttagtgaaacaattcaagcagttaaagtggcaaaaaaggcaggatttggggtagtcatttcacatcgttcaggtgagaccgaagatactactattgctgatcttgctgtcgggttggaaactgggcaaattaaaactggatccgcttctcgcactgatcgagtttgtaaatacaaccagttattgaggatagaggaagagttaggttcggatgcaaaattggc

SEQ ID NO: 279840 - DNA, 710 bp, Unknown
  Bacterial polypeptide expressing nucleotide sequence isolated from the Sargasso Sea
ggctgtgctcaaggcccgtggcctgaacaccgccgtgggtgacgagggtggcttcgcgccgaacctggcgtccaacgaagacgcgctggccgccatcgccgaagccgtggccaacgccggctacaagctgggtgacgacgtgaccctggccctggactgcgcctccagcgaattcttcaaggacggcaagtacgacctggaaggcgaaggcaaggtgttcgacgccgcaggcttcgccgactacctggccggtctgacccagcgctacccgatcatctccatcgaagacggcatggacgagtccgactgggccggctggaaagtgctgaccgacaagatcggcgccaaggtgcagctggtcggtgacgacctgttcgtcaccaataccaagattctcaagcgtggtatcgacgagaagatcggtaactcgatcctgatcaagttcaaccagatcggctcgctgaccgagaccctggaagccatccagatggccaaggccgccggcttcaccgccgtgatctcgcaccgcagcggcgaaaccgaagacagcaccatcgccgacctggccgtgggcactgccgcaggccagatcaagaccggttcgctgtgccgctccgaccgcgtgtccaagtacaaccagctgctgcgcatcgaagagcagctgggtggcaaggccgcgtacaacggccgcgccgagttccgcggctgac

SEQ ID NO: 279841 - DNA, 518 bp, Unknown
  Bacterial polypeptide expressing nucleotide sequence isolated from the Sargasso Sea
tttgaattcttctattgaaaaaatatttgctagagaaattttagattctcgaggtaaccccactgttgaagttgatgtaatgacatgcgatggattaatgggacgtgctgcagtaccctctggcgcatcaacagggattcatgaagcccttgaattaagagatggggacaaaaacagatacctagggaaaggggtaaggactgccgttaataatataaataacattattgcaccctccttaaaaggctctgaaactactgagcaatcagagaacgatagtcagcttttagcgctagatggaacagaaaataaatcaaatctaggtgcaaatgcaattctaggagtttcaatggcgattgcacacgcaggtgcaaaaattgaaaagaaatctctttatcaatacctaggaaagaacaacgcacatatacttccaatgccaatgatgaatattttaaatggcgggagccatgctgataacctagttgatattcaagaatttatgataatgccttttggtg

SEQ ID NO: 279842 - DNA, 795 bp, Unknown
  Bacterial polypeptide expressing nucleotide sequence isolated from the Sargasso Sea
gatgcctgtcccaatgtttaatgttctaaatggaggctctcatgcatttaattcaactgattatcaagagtacatgatagttccaattggtattcacgatgatattgaaaactcaatgcattgtggctttaaaatttataatgaacttaaaaaaatattagaaagtaaaaatttaccgactactgtaggtgacgaaggcgggttctcaataacatttggagaaaaaaaccctagtaatatttatcctcttgaaatattaatggaagctattgaaaaatcaaattatgaacctggcaaagatgtaatgatagccctagatgtagcggcatcagaaatgtttgaaggcaaagacacaaatggaaactatttatataaatttgaagatggaaaaatttcttcagaccaaatgatattgtactacgaggagctaactaaaaaatttcctatttatagtattgaagatggtcttgacgagaatgactgggatggctggaaaaaacttaccactttaattggggatagagtccagcttgtaggagatgatttatttgtaacacaaagaaaattattaaaagcaggcattaaggacaaagtggcaaattctatattgattaaacttaatcagattggaacagttactgaaacactggatacaataactgaagctcagataaataactttagtactattattagtcacaggtcaggtgaaaccgaagatacatttattgctgatcttgctgttgcagctcattctactcaaataaaatctggagctccagccagaggagaaag

SEQ ID NO: 279843 - DNA, 820 bp, Unknown
  Bacterial polypeptide expressing nucleotide sequence isolated from the Sargasso Sea
atgattgagaaaatttcaaatatatattctaggcaagttttagactcgagaggtaacccaactatctattctctagtagagacttcaaatggaaatacgggttttagtttcgttccttctggggcaagcacaggctccaaagaagctttagaactaagagataataatccaaaatttttcaatggaaaaggtgttttaaaggctatagacaatatcaccaacgaaattggaccaaatttaattggcattgatattaacaatttaaatgaaattgactcaaaaatgttagaaatggatggcactgaatttaagagcaggttgggtgcaaattcaatattatctgtctcgatggcatgcacaagagcttcagctgcatcaaaaaatgttgagttatttgaattaattagaagtttatataattcaaataaagataattataaaattccaaatccgatgtttaatgtactaaatggtggttctcacgcttttaattctactgattttcaggaatacatgattgtcccagttggaatagaagattttgaaatctccatttctgctggttttcagatatatgacaagttgaaaaagttgcttgaaagcaaaaattatccaacaacacttggtgacgaaggggggtttgcacctccagggcttactaatgaagagcccttaaatttgcttagcgacgctgtatctcggacagaatttgaattaggcaaagacataaagtttgcattagatgttgctgctagtgaaatttataatagtacaaacaatatttacgatcttaaatctgagaataagaaacttctcagaa

SEQ ID NO: 279844 - DNA, 161 bp, Unknown
  Bacterial polypeptide expressing nucleotide sequence isolated from the Sargasso Sea
ctttattgccgatctggcggtggcgacgaatgccggacagatcaagacaggatcattgtcgcggtcagatcgtttggcgaaatataaccagcttttgcggattgaagaggagctggatcgcaccggtctttattctggcaaggccatactgaaacgctaaa

SEQ ID NO: 279845 - DNA, 784 bp, Unknown
  Bacterial polypeptide expressing nucleotide sequence isolated from the Sargasso Sea
aaaataataaaaaatattataggaaaaagtgttttttctgcagtaagtttaataacttttaaaatatttaagaaattaaaaggtcaaaatgttcatgatcaagaacgtattgatacgttaatgattaatttagacggtacaagacaaaaatctaaattaggtgcgaatacaattttagcagtatcgatggctgtaaaaaaactttccgcgatcgaaaaaaaaataccattgtataaaaattttttagttaaaaataattttaaattaccatatcctttaatgaatataatcaatggaggtgttcatgcaaataatggtttgaggatacaagagtttatgattagaccggacctcgctcgtagtttttctgaggcgatgaggatgagttttattgtgataaaaaatttaagtaaattaattaagcaaaaaaaactatcaacttctgttggagatgaaggtggttttgctcccatgattaataataataaccatgctttagatttgattgttaatgcaataaaaaaatcaggatttgttaacggaaaagatatttctatatgtttggatgttgcagctaacgaactttataaaaaaaataaatattctattcattcaaataaatatatttcagttgataaatctatccaacaatacaaacaaatgattaaaaaatataagataaaatccattgaggatccttttgctgaaaatgattggttatcatggaataaattaatgaaatcattaaaaaaggttcaaattgtgggggatgatctttatgtta

SEQ ID NO: 279846 - DNA, 647 bp, Unknown
  Bacterial polypeptide expressing nucleotide sequence isolated from the Sargasso Sea
gggctttgctccaatgattaatgacaatgaagatgctttaaaattaatagtaaaagcaatagaaaaatcaggttttaaaaatggaagagatatatctatttgtttagatgtagctgctaatgaattatttaaaaataaaaaatattcgattcattcaaaaaagcttttaagctctgagaaaacaatagaaaaatatttaaaattaattaaaaaattcaaaattaaatctattgaagatccatttgctgaagatgattggctttcttggaataaatttatgaagaaaattaataaaaatactcaagttgttggtgatgatttatatgtaacaaatttagaaagattaaaaataggttttttaaataagtcttctaattctatactaataaaattaaaccaaatcggaacagtttcggaaactttagaagtaattaaatttgcacaattaattggtttcagcaccattatatctcatagatcaggcgagagcgaagatacctttatttcagatcttgcggtaggtacaaattcaaatcaaataaaaactggttcattagcgcgctctgaaagagttgctaaatataatcaacttattagaattgaagagaaacttggaaaatcatcaaaaatgaatagaatcaattaat

SEQ ID NO: 279847 - DNA, 631 bp, Unknown
  Bacterial polypeptide expressing nucleotide sequence isolated from the Sargasso Sea
atggcaaaaattaaaaatatcaaaggcaggcaagtttttgatagcagaggaaatccgacagtagaggctgaaattattttaaaagatggccatcatgcatcagctattgttccctcaggcgcatctacaggaactcacgaagctttcgagttaagagataataaaaacaaagattacttgggcaaaagtgtttttagtgcagtaaaaaatatcgattcagttattgctaaatccttaaagaatgttgatatcaataatcaagctaaaatagataaaattttaatagatttggacggcactgaaaataaaaaaaaacttggtgcaaatgcaattttagctgtttcaattgcttcatgtaagttagcagctgttgaaaaaaatattccattatataagcatttatctaattcaaaaagttttcaaataccagttccattattaaatattataaatggaggtgctcacgcaaaaaacaatctagatattcaagaatttatgatacgtcctgaaaaagcaaaatcttttacggagtccatgaggcaaagttttttggtaatacaaaacttaagaggaatggtcgataatacaaatgttggagatgaaggtggttttgcccctaaatttagatagc

SEQ ID NO: 279848 - DNA, 616 bp, Unknown
  Bacterial polypeptide expressing nucleotide sequence isolated from the Sargasso Sea
gatgtccgaaattgagtcaattttcgcaagagaagtaatcgattcacgaggtaatcctacaattgaagccgatgttattttgcatgacggctctcgagggtctgcctgtgctccgtcaggggcttcgacaggttcaagagaagcgttagagctaagggataaagacccaggtcgctacggtggaaaaggggttttgactgcggttaataatgtgaatttaaatatacgagatgctttggttggcggctctgttattgagcaagctgtgttagatcaacgaatgttagatcttgacggaacagataataaatcaaatttaggtgcgaacgctattcttgctgtatcgctcgcaattagtaaggcagccgcgaaccatcttgggatacccttatattctcacatatctaatttgagtggtaataagagaactcccactctcccagtgccaatgatgaacattattaatgggggtgagcatgcagacaataatattgatattcaagagtttatgattcaaccgacaggagcttcctcgtttacggaagctttgcgctgcggggtggaagtatttcatgcattaaaaagcgtattaaagaaaggtgggtttaatactgca

SEQ ID NO: 279849 - DNA, 929 bp, Unknown
  Bacterial polypeptide expressing nucleotide sequence isolated from the Sargasso Sea
ggtgtcctcaaggcagtgaaaaacgtgaacagtaaaattgctccggagcttctgggaatgagccctgataggcagactgaaattgatagcatgatgcttaaacttgatggtacttctacaaaaagtaatctgggtgccaacgctattcttagtgtttccatggcaacggcagcgacagcggcaaattcttataatgtccccctttatgcttacctaggaggtgattcagattttagaatgccagtgcctatgatgaatattattaatggtggagaacatgcggataatagtgttgatttacaggaattcatggtaattccttccggagctagttcttttagagaagctctgcgttatggcacggaaacatttcatgctttaaaaaaaattttgcaatcaaaaggatatgctactagtgtaggcgacgaaggtggttttgctccaaatcttaaaagcaatgaacaagcctgcgaagttattattgaagcaattcaatcagcgggttatgagcctgggaaagacatttttcttgctattgacgcagcagcttcatcattttgtaatcaaggctcttatgtttttcagaaatctggatcaggtacaaaaaactcaaatgagatgttagaattttatgaaagtatggccgaaaattttccaatagtttccatagaagaccctatggatgaaaatgactggagtggtttttctgcaataacaaaaaaactaggtgaaaagattcaaatagtaggagatgacctgttcgttactaataaagaatttgtcagaaagggtataactgaaaaagcagcaaatgcagtgctaataaagcttaatcagattgggaccgtctcagaaactttggcgacaattcagctatgccaaaaagtaggctggaattatattatttcgcatcgtagcggggaaacgga

SEQ ID NO: 279850 - DNA, 351 bp, Unknown
  Bacterial polypeptide expressing nucleotide sequence isolated from the Sargasso Sea
aatggataattcaactatatataagataattgctagggaaatcttggattctcgaggtaatccaacaatagaagtggatgtaacactatcggatggatctttagggcgagcagcagttccttctggcgcctctacaggggagcatgaagctgttgaattgcgtgacaatgatgctttacgatacttaggaaaaggagtaaaaaaagcagttaaaatagttaacacaactattgcaaatgaaataattggcttagatgcgttaaatcaaaaaaatatagatgaagctatgatttcattagatggaacttcaaataaatcaaagctaggcgctaattcaatacttggcatttc

SEQ ID NO: 279851 - DNA, 745 bp, Unknown
  Bacterial polypeptide expressing nucleotide sequence isolated from the Sargasso Sea
tgcatttcaagaatttatgatcatagcctggttgaagctaaaagctttagtcatgactgttaaaatgggttcagaaatatttcatcacttaaagaaaattctttcagaaagaaaattaagtactgcagttggtgatgaaggtggttttgcacctaaattagatggcacagaagatgctttagaaactattataaggtctatttcaagcgctggttatagagctggtgatgatgttatgattgccttagattgtgcatcatctgaattttatgaaaatggaaagtatgattacagaatttttgaaggagaagatgcaaaggttctaaattctgaggaacaagctgattatctttctgaattggttgataaatatcctattatttcaattgaagatggaatggatgaaaatgattgggatggttggaaatacttaacaaaaatttctggagataaagttcaactcgttggtgatgatctttttgtaactaatgaaaaaatattacaaaaaggtatttctgaaaatgctggaaattcaatattaataaaagttaatcaaataggtacattaactgaaactattaatgctgtaaggctagctcaaaaaaatggatatacaacagtgatgtctcacagatctggagaaacagaagattatactatatcagatctctcagttgctcttggaacaggtcaaattaaaacaggctcaatgtcaagatctgatagaatttcaaaatataaccaa

SEQ ID NO: 279852 - DNA, 478 bp, Unknown
  Bacterial polypeptide expressing nucleotide sequence isolated from the Sargasso Sea
tttgatagattttttagactctctttctagtgaatatcctattatttcaatcgaagatggtttagctgaagacgattgggaaggatggaaaagcatgacagatcaaattggaaataatgttcaattggttggagatgacttatttgtaacgaatacagatagacttagaagaggagttgaagaaaaaatagcaaattcaattttgataaaatttaatcagataggaactttaaccgaaacattaaacgcaattagtatggcaaaaaaagcatcttatacttccatgatttctcataggtcaggagaaacagaggatcattttattgctgatctagctgtagctactaatgctggtcaaattaaaacaggttcattatctaggtctgatagattatctaagtataatcaattattaaggatagaagagtttttaggaaaaaatgctctgtataacaaggaacaaaatttttataaataa

SEQ ID NO: 279853 - DNA, 679 bp, Unknown
  Bacterial polypeptide expressing nucleotide sequence isolated from the Sargasso Sea
atgagtatcattaaacaagtaaaagcaagagaaataattgatagcagagggaatcctacattagaggtagatgtctatttaaatagtggtgattttggtagagcatctgttccttctggggcatcgactggaaaacatgaagctttagaattaagggattgtaattccaaaatattccatggtaaaggtgtcactaatgctgttaattcagttaataatgaaataaattcactattagttggaaaaaatgtacatgaacaagaactaatagaccaatcaatgattgaaattgatggaacttcaaataaatctaacttgggagcaaatgctattttaggaacttctatcgcggttgctcaagctagtgcatcatttaataaaaatccattatatcgtaatttcttttctgttagtcaaactaaatacaaattgccaatgccaatgatgaatatattaaatggtggaatgcacgcaaataatgatcttgatatacaagaatttatgataattccaacttctgcaaattcattcttcaacgcagtaagaatggggtgtgaagttttccatacgcttaaaaagattttgcataaaaaaaacttctcaactgcagttggagatgaaggtggttttgcaccacaattatcaaatactaatgtagcaattgaaatgattttaatgg

SEQ ID NO: 279854 - DNA, 907 bp, Unknown
  Bacterial polypeptide expressing nucleotide sequence isolated from the Sargasso Sea
agcaatgtttcccagcggagctagcactggcgctcatgaggcacatgaattaagagatggtggttcaaaatatatggggaagggtgttttaaacgctgttaataaaattcatgaaacaatatccccggctttatgtgggttgtcagctttagatcaaactgtagtagataaattaatgattgaaattgatggaactcttaataagtccaaccttggagccaattcaatccttgcagtaagtcttgcaactgctagagcatcagcaaatgctttagaaattcccttatatagatatcttggagatccattatctaatcttcttccagtcccattgatgaatgtaatcaatggtggtgctcatgcaccaaatagtcttgattttcaggaatttatgcttgttccacatggagtcaataatttcagtgattcattaagaatgggtactgaaatttttcattcattaaaatcattacttaatcaaaaaggtctatctacggctgtaggcgatgagggtggattcgcccctaatttgtcatcaagcgaagaagcaggggacttattgttagaagcaattcaaaaagctggatttaagcctggtgagcaggtatctttggctttagatgctgctagtactgaattttatagtgatggtatttataaatatgaagggaaaagtttaaatagttctgaaatgatttcatatctttcaaaattagtttctaattatccaatagtttcaatagaggacggcttagcagaggatgattgggatggttggtcagaattgaacaaagaattaggaaataaagttcagcttgtaggtgatgatttattcgttacaaatacagaaaggttaaagaaagggattatggagaaatcggccaattcaatcctaataaaggtaaat

SEQ ID NO: 279855 - DNA, 364 bp, Unknown
  Bacterial polypeptide expressing nucleotide sequence isolated from the Sargasso Sea
tctgtattaggaaacaatgttcaaatagttggagatgatttgtttgtaacgaattctaaaaggcttgaaaaaggaattaatgaaaattctgcaaacagtattttagtcaaacctaatcaaataggaactttaactgaaactttagatgttatttcaatggcaaaaaaagcaaatttcagtactattatttcacatcgatctggtgatactgaagatacttttatagctgatttggcggtggctactatgtcctcacaaattaaaacaggttcattagcgagatctgaaagagtagctaaatacaatagattattacgcgtcgaagaagaacttggcaatcatgccaaaatggctaaaatctaat

SEQ ID NO: 279856 - DNA, 561 bp, Unknown
  Bacterial polypeptide expressing nucleotide sequence isolated from the Sargasso Sea
aaatctcttttgctcttgatgcggcatctacagagttttttaacgatggaaaatatattattgaaggaaatgccttatccaatactgaaatgtcagattatttaattggcttgtctaatttatatccgattgtatctatagaagatggtttagctgaagatgactgggaaggctggaagtatttgacgtcaaaaatcggtgaaaatgtacaactagttggtgatgatctttttgtcacacaggagaaaattttacaaaaaggaattaatgaagaatgtgcaaattcaattttgataaaggtcaatcaagttgggagcgttacagagactattgaaaccatgaaattagcaaataagaacaattacacaagtatggtatcccaccgatctggagaaacagaggattcctttattagtcacttagtagttggaacctcaagtgggcaaatcaaaacaggggcacctgctagaggagaaagaactgcaaaatataatgaacttttaagaatcgcagaacaagtaggatttgagaattttaataataaaaaatgggaactttaaa

SEQ ID NO: 279857 - DNA, 776 bp, Unknown
  Bacterial polypeptide expressing nucleotide sequence isolated from the Sargasso Sea
aacttggttcaatgcaattttagctgtttccatggcagcctgtaaaattgcagctattaaaaaaaatgtttctttgtttaaatatttaggaaattctaaaagctctcaattacctgttcctctcttaaatattataaatggaggtgttcacgctaaaaacaacctcgatatacaagaatttatgatccgtcccgagaaagcaaaatctttttctgaagccatgagattaagttttttagtaattcaaaatctaaaattaatgctcgataacactaacgtcggagatgagggtggttttgcacctaatcttaaaagcaacgaggaagctattgaaataataattaaggccattgaaaaatcaggttttaaaccaggtgaagatttatccatttgtttagatgtagcagcaaacgaattaaaagaatcaaaaacaatagactattattctgaactaattagtaaataccctattaaatcgatcgaagatccattcacagaagatgactgggaatcttggaaaaaattaacaaagaatacgaaaattcaaatcgtaggagatgatttgtttgttactaatgtcaaaagattaaaaaaaggtatagaagaaaaatcagctaatgcgatattgattaaattgaatcaaatcggcactgtgagcgaaactttggacgccatcgatttagctcagaaaaataattttaaaacaataatctcacatcgatctggtgacacagaagatacttttatagctgatttggcagtggcgacaaattcat

SEQ ID NO: 279858 - DNA, 427 bp, Unknown
  Bacterial polypeptide expressing nucleotide sequence isolated from the Sargasso Sea
aaataaaatctattcgaggaatccatttgctgaaaacgattggaaagcctggaataatttaatgagattaactaaaaaagttcaaatagttggggatgacctgtatgttacaaaccttgaaagacttaaaaagggttttttaaatatttcatctaacgcgatattaattaagcctaatcaaatcggtacagtatctgaaacagtcgatgttattaagtttgcccaaatgattgggtttaatactataatttctcatagatcaggagatagtgaagatacatttattgctgatttagctgtaggaactaactcaaatcaaattaaaactggttctttagctagatctgagagagtagctaaatataatcaattaatacgtatagaagaaaaccttggaaaaaaagctagaatgaataagattcattaa

SEQ ID NO: 279859 - DNA, 192 bp, Unknown
  Bacterial polypeptide expressing nucleotide sequence isolated from the Sargasso Sea
ctgaagaaaataattttaagaacattatttctcataggtccggagaaacagaagatgcatttatagctgatttatctgttggaatgggagttgggcaaattaaaactggggctccttcaagatctgatagggtagccaagtacaacagacttctgatgatagagaaaaattcgaatatatgttttgggtaat

SEQ ID NO: 279860 - DNA, 659 bp, Unknown
  Bacterial polypeptide expressing nucleotide sequence isolated from the Sargasso Sea
aatgagtaaaatcaaaagagtagtcgcaagacaggtatatgacagtagaggaaatcctactatagaggctgaagttttttctaatagtctaagtgcatctgcaatatgtccatcaggtgcctcaaccggtacgttcgaagcttatgaaaaaagggataaaactaataaaaaatatttaggaaaaagtgttttaataccagtagcaactgtaaacaaattaatttcaaaaaaattaaaaaatcaaaatattcatgatcaagaaagaatagatagcattcttatcaaattagatggcactaaacaaaaaactaaattaggtgcaaacacaatattagctgtttcaatggccgtaaaaaaactatcagcaaaagtaaaaaaaataccattatataaaaattttatagtcaaaaaaaactttaagcttccttttccattaatgaatattataaatggtggagcccatgcagataatggtcttagaattcaagaatttatgattagaccagataaagcaagatcttttaacgatgctgtaagaatgtgttttctggtgattaataatttaaaattattgcttaaaaaagctggccattctattaatgttggtgacgagggaggttttgcgccaaatgatagtgaccatgagagtgcacttagac

SEQ ID NO: 279861 - DNA, 745 bp, Unknown
  Bacterial polypeptide expressing nucleotide sequence isolated from the Sargasso Sea
ccccacggcgctcctagcttccgtgaggccctgcgcatgggtactgaggtcttccacacgctgaaaggtctgctcaaggccaagggcatgagcacctctgtgggggatgagggtggtttcgcccccgacctgggcaatgtggaagccggtgagatcctggtggaggcgatcaccaaggccggctatcagcccggcgagcagatctccctggccctagacgtggccagcaccgaattcttcgaaaacggccgctacgcctttgatggcggcagctacgacagtgccgaaatggttggccagctggagcagctggtggagaagttcccgattgtgtcgatcgaggacggcctggcagaagatgactgggagggctggaagctgctcaccgaacgcctcggcggcaaggtacagctggtgggtgatgacctgttcgtgaccaacaccaagcgcctgcaacagggcatcgacagcgccacagccaactcgattctgatcaaggtgaaccagatcggttccctcaccgagaccctgcaggccatcgacctggccggccgctccggctacaccagcgtgatcagccaccgcagcggcgaaaccgaagacaccaccatcgctgatctatccgtcgccacccgcgccgggcagatcaaaaccggttccctcagccgcagcgagcgcgtggccaagtacaaccagctgcttcgcatcgaagacgaactggcagccaggctgtctatgccggagc

SEQ ID NO: 279862 - DNA, 439 bp, Unknown
  Bacterial polypeptide expressing nucleotide sequence isolated from the Sargasso Sea
gatgatttaattcaaaattatcctatagtctctatagaagacggcatgaacgagaatgataaagatggttggaaattacttacagagagacttggatcaaaatgtcagctcgttggagatgatttatttgttaccaataaaaaaatacttaaagatggtattaatgaagaaatggccaattcaatactcataaaatttaaccaagttggatcaataactgaaacaatagaaactattcatttcgcaaatcaaaataattttgagtcaattatttctcatcgatctggtgagactgaagatactacaatagctgaccttgctgtaggtttgggtattgggcaaatcaaaaccggagctccatgcagatcagatagagtggcaaaatacaacagattgctttggatcgaagaagaaagcagtaatattttgcttaaatgaa

SEQ ID NO: 279863 - DNA, 558 bp, Unknown
  Bacterial polypeptide expressing nucleotide sequence isolated from the Sargasso Sea
aatgcataaaattacaaaagttgttggaagacaagtttttgatagcagaggtaacccaacagttgaagcagaagtattttcaaataatataagttctatcgcaatttctccctctggcgcatcaactggaacatttgaagcttttgaaaaaagagatatttacaataaaaaatatttagggaaaagtgtatttaaatctgtagaaataattaacaaaaaaatatcaaaaaaaataaaaaatcaatttgttcataatcaagaaaaaatagaccatatattaattaagttagatgggacaaaacaaaaaagtaaaattggagccaatacaacattagctgtatcaatggctgttaaaaaactttcagcaaaattaagaaagattccattatataagtcatttttacttagaaataattacaaattaccgtatcctttgatgaatatcattaatggaggagctcatgcaaataatggcttgagaattcaagaatttatgatcagacctgatggtgctaaatctttttcagaatctctaagaatgtgctttttagttataaa

SEQ ID NO: 279864 - DNA, 247 bp, Unknown
  Bacterial polypeptide expressing nucleotide sequence isolated from the Sargasso Sea
tgcaattctcattaaacttaatcaaattggaacacttacagaaactctttcgtgcattgagctagcaaaacaacataattttggaactattatttcacatcgatctggcgaaacagaagatacctttatctctgatcttgcagtagctacagatacaaagcagataaaaactggcgcaccagcaagatcagataggactgcgaaatataatagattacttgtgattaacgatgaactttatccatga

SEQ ID NO: 279865 - DNA, 523 bp, Unknown
  Bacterial polypeptide expressing nucleotide sequence isolated from the Sargasso Sea
aatgacagcaataattgatataacggctagagagatactcgatagtcgaggaaacccaactgtggaagttgacgttatgttagaagatggcagtatcggccgggcagcagtgccttcgggtgcttcgacaggcgtatatgaagcgcttgaattacgtgacgaagaccaaaatcgctatctgggaaagggagtgttaaaggccgtagaggcggtaaacggagagattttcgatgctgtttccggtagagatgcgactgatcaaaacgggttagaccacacgcttataagtctagacggaaccccggataaatctcgcttaggagcaaatgctattcttggggttagtttggctcttgcaaaagcgtcggccgtttcaaaaaaaatgcctttatacagatatataggcggcgtatctgcctgtatcctcccaacgccaatgatgaatattattaatggtggagctcatgccgataacggccttgattttcaggagtttatgatcatgcctgttctggcaggcaat

SEQ ID NO: 279866 - DNA, 802 bp, Unknown
  Bacterial polypeptide expressing nucleotide sequence isolated from the Sargasso Sea
tatgaaagaccgtatcatttcaattgaagctatggaaatacttgattcacgaggaaatcctacaattagaacaagggtaatcctggaaaacggagtttgtggaacggcttcggtaccatcgggggcatcaaccggagaaaatgaggcccttgaacttcgtgatggtgacgagaaccgttacggtgggaagggggtgctcaatgctgtggaaaacgtgaacaggaaaattgctccggaattgttaggaatgaatcctgatatgcaggttgaaattgataagactatgcttaaacttgacggcacttcttcaaaaagaaaattgggtgcaaacgctatattaagtgtatccatggcaacagcaaagactgcagcaaagtcgcagaatgtccctctgtacgcttatctgggaggagtttcagggtttcgactgcctgtgcctatgatgaatatcataaatggcggagaacatgcggacaatagtgttgatttgcaggaattcatggtaattccttcgggggctccttctttccgggaagcgctgcgttatggagcggaaacatttcatgccctgaaaaagattttgcaatcaaaaggctatgccactagtgtaggtgacgaaggcggttttgccccaaatcttaaaagcaatgaagaagcctgcgaagtcattatcgaagcaattcaagcagcaggttatgaggccgggaaagacattttcctggctcttgacgcggcagcttcatcattttgtaatcaaggctcttatgtttttcaaaaatccggatcagggacaaaaaactca

SEQ ID NO: 279867 - DNA, 715 bp, Unknown
  Bacterial polypeptide expressing nucleotide sequence isolated from the Sargasso Sea
gatggcactagacaaaaaaccaatcttaggagctaatgcaatgctagctgtttctatggcagtaaaaaaactatcggcaaaagttaaaaaattaccattatataagactttttttgtcaaaaataactttcaattaccttatcctttaatgaatattattaatggtggagctcatgcaaataatggtcttagaattcaagaatttatgattagacctgataaagctaaaagcttttctgaagctatgagagtttgctttgttgttattaaaaatcttagtaaattaataaaaaacaaaggactttctacatcagtcggggacgaaggaggttttgcaccaatgattagtagcaataatcaagccttagatatgattgtatctgcaataaaaaaatcaggatttaaaaatggtaaagatgtttcaatttgtcttgatgttgctgcaaatgagttattcaaaaaaaataaatattcaatacattctaaaaattacatatctgttgaaaaatcaataaatgaatatcaaaaaataattaaaaaatttaaaattaaatctattgaagatccttttgcagaaaatgattggcaagcttggaataaattaatgcgatcggttaataaagttcaaatagttggagatgatttgtatgttacaaatcttgaaagacttaaaaaaggttttttaaatatttcatcaaattcaattttagttaag

SEQ ID NO: 279868 - DNA, 928 bp, Unknown
  Bacterial polypeptide expressing nucleotide sequence isolated from the Sargasso Sea
atggcaaagattaccaatgttaaaggtcgtcaagtttttgacagtagaggaaatccaactgttgaagcagaggttttcttagataatgatatttccgctagtgctatatctccttctggggcatccaccggggcatttgaagctcatgaattgagagatcaagataaaaataattttttgggaaaaagtgttaacaaagcaattgataatattaataacaagatcagatcaagtttaaaaggattagacccagccgaccagtctaaaatagataaagtcttattagatttagacggaactgaaaataaaaaaaatcttggcgcaaatgcgactttagcagtttctttagctaactttaaatcatcagctttatcggctaaaaaaccactttataaaaagttaggtaaatctttttcattaccaaatcctttaatgaatattataaatggaggagctcacgcagataacgatttaaatattcaagagtttatgattaggcctgactcagcaaaaacttttatggacgcattagagaaatcttttcttgttattcaaaatttgaaaatcttattgaaatcgaaaaagatgcttactaacgtaggtgacgagggaggttttgctccttcaattgacactaatgaagaagctcttgagctaatagtaaacgctatagaaaaatcaaagttaattcctggtaaagatattgtgatttgtcttgatgtagccgccaatgaattaaaaaataaagatggtaaatactcaatacaatcaaaaaattttacttctgctgataatgtaattaattattataaaaaattaacgtctatatatcctattgcgtcaattgaagacccttttgctgaggaagactggaactcctggaaaaagataacaacagaaatggaaaaaattacaaattgttggtgat

SEQ ID NO: 279869 - DNA, 817 bp, Unknown
  Bacterial polypeptide expressing nucleotide sequence isolated from the Sargasso Sea
ggattagactttcaagaatgtatgattatgccaataggcttttcaagttttactgaagctttaagagcaggtgttgagattttttataatttgaaaaaaatattatctgaaaaaggcctttcagtagctgtgggtgatgaaggaggttttgctcctaacattgataatcttgaagaagcgctttcttatatatctgaggcagtagaattaagtaaatataaattaggagaagaaatttttatttctattgatgctgctgcaactgaattgtacaaaaataacttttatgtattaaaaggtgaaaacaaaaaattaaattctgatcaatttattaaatattgggaagatatttgccaaaagtttccgattgtttctattgaagatccttttgatgaaaatgattgggaaagttttaaagaacttacaaaattgcttggtcataaagttcaaattgtaggagatgatttatttgtaactaataaacaacgattattagatggaattaaaaataatactgctaacgcaattttaattaaattgaatcaaattggcactctttctgaaacattagaaacaatagaattagccaaaaactcaaattttggagtaataatttctcatagatcaggtgaaacagaagatacattcataagtgacctttctgtgggcttaaatgctgggcaaattaaaactggttctttgtctagaagtgataggactgcaaaatataatcaacttttgcggattgaagaaacattagggactaatgcacattattatggtaaacaattttttaatattatatccttttcctaag

SEQ ID NO: 279870 - DNA, 172 bp, Unknown
  Bacterial polypeptide expressing nucleotide sequence isolated from the Sargasso Sea
ggatgtttttatcagtgatctctcagttgctcttaatactggtcaaattaaaactggttcattatctagaagtgatagaacggctaagtataatcagcttcttagaattgaagagtcattgggagataatgctcattactatggaaaagatttctttaatttacaaatttaa

SEQ ID NO: 279871 - DNA, 213 bp, Unknown
  Bacterial polypeptide expressing nucleotide sequence isolated from the Sargasso Sea
aatttgcacaaaaaattggataccaaacaattatttctcatagatcaggtgattctgaagacacatttatatccgatttagcagttggaacaaattcctctcaaataaaaacgggctctttatgcagatcagaaagagttgcaaaatacaatcaattgttaagaatagaacaagaaataactagcaaaaataatatggctagattaaaatgat

SEQ ID NO: 279872 - DNA, 127 bp, Unknown
  Bacterial polypeptide expressing nucleotide sequence isolated from the Sargasso Sea
gataaaaactggctccctgtcgcgatctgaccgcactgcgaagtataatcaattattaagaattgaagaagaacttggtgacagatgttactatccaggtaggagcgaattcaataaatatatttaa

SEQ ID NO: 279873 - DNA, 553 bp, Unknown
  Bacterial polypeptide expressing nucleotide sequence isolated from the Sargasso Sea
atgagtgaaattatttcagtgaaagctattcaggttcttgattcaagaggcaatccaacagtcgaggctgaagtcactttagaagacggcacgaccggacttgcatcggtgccctcaggcgcttcaacaggaagcagggaagcggttgagttaagagacggggacaaagatatttatttaggaaagggcgtttcagcggccgttaaaaatatcaattcagaaatacaatctgcactcaaaaatcaggatatttatgaccaaagtaagattgatcaaatcatgattgatttagacggtacagaaaataaatccagacttggcgccaatgcaattctcgccgtctcacttgcttgcattaaggctgccgcagcatcgaaggacatacgattgtttaagcatttatcaccgggtccgtatacttttcctgttccaatgatgaatatcattaatggaggcgagcatgcgaataacaatattgatattcaggagtttatgattctgcctgtaaattttgatcgcttttccgatgcactcagggctggcgttgagattt

SEQ ID NO: 279874 - DNA, 270 bp, Unknown
  Bacterial polypeptide expressing nucleotide sequence isolated from the Sargasso Sea
aatgacacaaatcactgatattcatgcaagagaggttttagattccagaggaaatccaaccattgaagcagaagtaacaacagaaagtggtttttttggtagagcaattgttccatcaggagcatcaactggatctcgtgaagcggtagagttaagagattctcgcaaaaagagatatcagggaaaaggggtccaaaaagcagttgaaaatgtaaataatattattgccaatgagttaattggattagatgttcaagaccaaattgccat

SEQ ID NO: 279875 - DNA, 709 bp, Unknown
  Bacterial polypeptide expressing nucleotide sequence isolated from the Sargasso Sea
ttgaattcttcaattgaaaaagtatatgctagagaaattttagactctagaggaaatccaaccattgaggtagatatttatacaaagtctggacatttaggcagggctgctgttccttctggtgcctcgactggagaatacgaagccattgagttaagagacatggatagtgagcgatactttggcaaaggagttaaaaaggcagtgaataatattaactctataattttcgaatcaatcatcggtttagatgtaactaaacaggaagaaattgataatatgatgataaaattagatggaacagaaaataagtctaggttaggagcaaatgcaattttaggagtttcactcgcaattgctcatgccaatgcaaaagtatccaatcatcctttatataaaactttttctagtgacaataaatttttactcccaataccaatgatgaatattttaaatggaggtagtcacgcaaataattctgttgatattcaagaatttatggttatgccaattaccgggaatacgttctcagaaaccctgcagatgggaacggaggttttccatgaattaaagtcagttttaaattcaaaaggaatgaatactgccgttggagatgaaggaggctttgcgccaaacttaagttctaatgaggaagctatagaggtaattcttgagtcaattataaatagaggattaaaaccggggtaaa

SEQ ID NO: 279876 - DNA, 893 bp, Unknown
  Bacterial polypeptide expressing nucleotide sequence isolated from the Sargasso Sea
gctgttatttggtaaaacaaaaatttcaaaaaaattaaagggtcagagtattcataatcaagaacggattgatactctattaataaacttagatggtacaagacaaaaaactaatctaggtgcaaatgcaatgcttgcagtttcaatggctgttaaaaaactttcagctaaagtgaaaaaattacctttgtataaaactttttttataaagaaaaattttcagttaccttatcctttaatgaatattattaatggtggagctcatgcaaacaatggtcttagaatacaagaatttatgatcagacctgatcgagctaaaaatttttctgaagcaatgagaatatgctttatagttattaaaagtttatcaaaattaataaaaaataaaggattatctacttctgttggagatgaaggtggttttgcacccatgatcagtagtaacaaccaagctcttgatttaattgttagtgctataaagaaatcgggatttgtgaatggtagagatgtttcaatttgcttggatgtagctgcgaatgaattatttaaaaaaagtaaatattcaattcattctaaaacttacatatctgttgaaaaatctatcaaagaatatcaaaaaattattaaaaaatataaaatcaaatctatcgaagatccttttgctgaaaacgattggcttgcctggaataaattaatgagatcaataaataaagttcaaatagtgggggatgatctttatgtgacaaacttagaaagacttaagaaagggtttttaaatatttcctcaaattcaattttgattaaattaaatcaaattggaacagtttctgagacgctagatgtaattaagtttgcccaaaccatcggttataaaacaataatttctcaccgat

SEQ ID NO: 279877 - DNA, 716 bp, Unknown
  Bacterial polypeptide expressing nucleotide sequence isolated from the Sargasso Sea
atgccggtgccagcgttcaacatcatcaacggcggcagccacgctggcaacaagctcgcgatgcaagagttcatgatcctgccggttggcgccacaacattttccgaggtgcgccgatcctcgaagcaagggaaggcgccgcgcctcagaccaacccgagcgctgagaggagcaccgaacaccgcaggcgatgaaaatgggctcggaggtgtaccacaacctcaaaggcgtgatcaagaagaagtatggccaggatgcgtgcaacgttggcgacgagggcggcttcgcgccgaacatcctggacaacacggaaggtctcgatctcgtggtcgaggcgatcgagaaggcgggctacaccggtgccgcgccgccatcccgcgtcactgcgtgcccgtccacgacctgcctttcgcgcggccttttgcgggcttgccccgggggacgatgttttgccccacgcgtcacgcaggcaaggtgaagatcggcatggatgtggcggcgtccgagttctggaaggatgagaagaaggtgtacgacctggacttcaagacggagatgaacgacgggacccagtgcaagacgggcgagcagctgggagagctgtacgcgagcttttgcagagattatccgatggtgtccatcgaggacccgttcgaccaggacgactttgaatcgtgcgcgcgctcgccgatgcacgcccgcccgccgcagctcag

SEQ ID NO: 279878 - DNA, 379 bp, Unknown
  Bacterial polypeptide expressing nucleotide sequence isolated from the Sargasso Sea
tggagcaagttaatgaaatcccttcaaaaagtgcagattgtaggtgatgatctttatgttaccaatcttgagcgacttaagaaaggatttttaaatttatcatcaaatgcaattttaattaaacttaatcaaatcggcactgtttcagagactttagatgtaattagatttgctcaaactataggatttaaaacaatcatttcgcatagatctggcgatagtgaagatacatttattgctgacctagcagtgggtactaattctaatcaaattaaaacaggatctttagctagatcagaaagagttgctaaatataaccaattattacgtatagaagaagaacttggaaaaaaagctagaatgaataagattcattaat

SEQ ID NO: 279879 - DNA, 887 bp, Unknown
  Bacterial polypeptide expressing nucleotide sequence isolated from the Sargasso Sea
aatgcccaaaattgaaaatctaacctccattcaagttctggattcaagaggacttcccacaatttctactgaaatattgttagatgatgggactagatcagttgcaatggtacctagcggagcttcaactggcaaaaaagaagctcttgaacttcgagatggaggtcaagcattccttggaaaaggcgtaacaaaagccatagataatgttaatgatcgcataaagaattctcttataggagagaatccacttgaccaagatcatatcgatcaaatcttaaataacttagatggaacaactgacaaatctaatcttggagcaaatgcaattctttctgtatcaatagcttctgcaaaagcatcatctaaatcagagaatttagatttacataattattttaacattttgcttggtaataaaatgggcaaaacaattgatcaagttattccaatacccatgttaaatattcttaatggtggtgagcatgccgacaacaatatcgatatacaagaattcatgattattccaaaaggagctgttaatttttcgcaagccatgcagtggtcttctgagatatattggaatcttaaatctattcttaaagaaaaaggcctatcaactgcagtaggtgatgaaggtgggtttgctccaaatctcaaaacaaatagagaagctcttgagttaatggcaagggcggtagataaaactgatcttaagttaggttcagatatctgcatatccttggattgtgctgcaagtgaattttatgaaaatggcacttatcatcttaagggtgaagatagagagcttactagttcagaatttgctgaatatttagagggtttggcaaatgattttcccataatatctattgaagatggggatg

SEQ ID NO: 279880 - DNA, 715 bp, Unknown
  Bacterial polypeptide expressing nucleotide sequence isolated from the Sargasso Sea
atttgcccgtctggagcttctactggaacttatgaggcttatgaaaaaagagataaatcaaacagaaaatatttaggaaaaagtgttctaaaacctgtttcaattataaacaaaattatatctaaaaaattaaaaaaccaaaatgttcataatcaagaaagaatagatcatatattaatcaaattagatggcactaaacaaaaaagcaaaataggagctaatgcaatacttgctatatcaatggcagttaaaaaattatcagcaaaaataagaaaaatacctctttataaaaattttactattaaaaaaaattttaaacttccttatccaatgatgaatataattaatggcggagcacatgctaataatggccttcgtatacaagaatttatgattagacctgataaagcaaaaacttttgctgaaggtgtaagaatatgctttctcgtaataaatagtttgaggatacttataaaaaaaatgggtcattcaacctctgtaggagatgaaggaggatttgctccaatgataagtgataatgaaaatgctttaaaattaatagtacaggcaattaaaaatgcaggttttacaaatggaaaagaggtatctatttgtctggatgttgcggcgaatgaattaataaaaaaaggaaaatattcaattcattcaaaaaaatatatatctgtagatcaatcaattcaaaaatacttaaaat

SEQ ID NO: 279881 - DNA, 816 bp, Unknown
  Bacterial polypeptide expressing nucleotide sequence isolated from the Sargasso Sea
attgaagcagaggtttatgttaaaaacaaaagtgccaaagcaatatgtccctcgggagcttctacaggtacttatgaagcttatgaaaaaagagataccaataataaaagatatttaggtaaaagtgtattctcagcaattaatttaatcaattacaaaatatcaaaagctttaagaaataaaaatatacatgatcaagaaagaatagatgaaatacttattaatttagatgggactaaacaaaaaacaaaattaggagctaatgcaatattatcggtatctatggctgcaaaaaaattatcagcaaaagtaaaaagaattcctctttataaatctttttatgtaacaaaaaattttcaattaccttatccattaatgaacattattaatggtggagcacatgctaataatggtcttagaattcaagaatttatgattagaccagataaagcaaaatctttttctgaggccatgagaatttgttatttagtaataaaaaacttaagtaaactaataaaaacaaaaggtttatccacatctatcggtgatgaaggtggatttgcaccaatgatcaataacaactatcaggccttagatttaattgtttcatcaattaaaaaatcaggatttagaaatggtaaagatgtttcaatttgtttggatgttgcggcaaatgaattatttaaaaaaggcaaatactccattcactcaaaaaaatacgtttctgttgataaaacaattatagaatacaaaaaaatgattaataaatacaaaattaaatctattgaagatccattctctgaaaatgatggacat

SEQ ID NO: 279882 - DNA, 859 bp, Unknown
  Bacterial polypeptide expressing nucleotide sequence isolated from the Sargasso Sea
cagtcaaaaattgacaaagttttattagatttagacggcagcgaaaataaaaaaaatcttggagcaaacgcaactttagcagtatctttagctaattctaaatcttcagctctatcatttaaacgccccctttataaaagtttaggaaaatctttctctttgcccaatcctttaatgaatataattaatggaggagctcatgcagataatgatttaaaaattcaagagtttatgattaggccagactctgcaaaaaattttatcgatgctgtagaaaaatgttttctagtcattcaaaatttgaaaattttattaaaatcaaaaaaaatgcttattaatgttggtgacgaaggaggttttgcgccatcaattaatactaatgaagaagctcttgaattaattgtacacgccattgaaaatgcaaacttaaaaccaggtatagatattgtaatttgcttagatgtagctgccaacgaattaatgaataaagaaggcaaatattcaattcaatcaagtaattttaatgcagttgatgatgttattgtttactataaaaaattgatttcgagttaccccattaaatcaatcgaagacccttttgctgaagaagattggaatgcgtggaaaaaaattacatctgagattggaaaaaaagttcaaattgtaggtgatgatttatttgtaacaaattctaaaagattaaaaaaaggaatagataacaaatctgctaatagtattttaattaaaccaaatcaaattgggactttaactgaaacattagaagttgttacaatggcaaaaaaagctaattttaatacaattatttctcatagatcaggtgacacagaggatacgttta

SEQ ID NO: 279883 - DNA, 856 bp, Unknown
  Bacterial polypeptide expressing nucleotide sequence isolated from the Sargasso Sea
atttgataaaagtgtttttgacgctgtaaaaaatataaataataaaatttctaaagcgttacaaaataaagattcaacaaatcaaagtgaaattgataaaattttaataagtttagatggcacagaaaacaagtcaaacctaggagcaaattccattttagcagtatcaattgcaaatttaaaagctgccgcaaaattttcaagaaaagaaatatatgaatatattaataataaaaataaacatttttgtataccttatcctttaatgaatataattaatggaggtgctcatgctaacaactcacttgaaattcaagagtttatgattagaccggatggggcaaaaaattttaaagaatgtatgcaaatgtccttcttagttattcaaaatttaaaaaaagatctagaaggtaaaaaaatttcaacaagtgtaggtgatgaaggtggatttgctccatcccttggatctgatgaggaggctatagaagttattataaattcaatatccgcatcaggatttaaaccaggtaaggatatatcaatctgtttagatgtagctgcaaatgaacttaaggttcccaaaaacgttcaatattttttagatcttgtaaaaaaatacccaattaaatctattgaagatcctttttcagaggatgactgggataattggaaaaatttaactgagaaaataaaagctcaaattgttggagatgatttatttgttacgaataaaaaaagactagaaaaaggaattaaagaaaaatctgctaactctattctaatcaaaccaaatcaaataggaaccgtaagtgaaacacttgaaacaataaaacttgccaaagataacaattttaaa

SEQ ID NO: 279884 - DNA, 922 bp, Unknown
  Bacterial polypeptide expressing nucleotide sequence isolated from the Sargasso Sea
acttatgaagctttcgagaaaagagacaaaaaaaataaaaagtatttaggtaaaagtgtattaagtgctgttaatgtgattaacaataaaatttcaaataaattaaaaggtttaaacattcataatcaagaaagaatcgacgctataatgattaatttagatggcacaagacaaaaaacaaaaataggagcaaatgcaatattagctgtttcaatggcagtaaaaaaattatcagctaaattaaaaaaaatacctttatataaaagttttttaattaaaaaaaattttcaattaccctatcctttaatgaacataatcaatggaggcgttcacgccaataacggattaagaattcaagaatttatgatcagacctgataaagcaaaaagtttttctgaggcaatgagaatatgttttgtagttattaaaaatttagataaattgataaaaaataaaggtctttcaacttcagtaggcgatgaaggaggttttgcaccaatgataagtagtaacaatcaagcattagatttaattgttaccgcaattaaaaaatcagggcttgtaaatggaaaagatatttcaatttgtttagatgttgcagctaatgaattatttaaaaaaaacaagtattcaattcattcaaaaaaatatatttcagtagataaatcaatttttaaatataaacaaatggttaataaatataagattaaatcaatagaagatccttttgcagagaatgattggacagcttggaataaacttatgagatcaactaaaaaaattcaaattgtaggagacgatctttacgtcacaaatttagaaagattaaaaaagggttttttaaatatttcctcgaatgcgattttgattaaattgaatcaaattggaacagtttcagaaacattagatgttattagctttg

SEQ ID NO: 279885 - DNA, 565 bp, Unknown
  Bacterial polypeptide expressing nucleotide sequence isolated from the Sargasso Sea
tttattcaaaacttttttagtaaaaaataattttaaattaccatatccattaatgaatataattaatggtggcgcgcatgcaaataatggtttgcgaatacaagagttcatgatcagacctgaccgagctaaaaatttttcagatgcaatgaggatttgttatgttgtaattaaaaatctgagtaaaattatcaaaaatagaggactgtcaacatcagtaggtgatgaaggtggatttgcaccaatgattagtagcaataatcaagcacttgatttaattgtttcagctattaaaaaatcaggttttgttaatggtagagatgtatcaatttgtttagatgttgctgccaatgagttatataaaaaagggaaatattctattcattcaaaaagttttatttcagttgaaaaatcaataaaagagttcaacaaaataattacaaaatacaaaataaaatcaattgaggatccttttgctgaaaatgattggatttcttggaataaattaatgaaaaacacatctaaagttcaaattgttggtgatgatttatatgttactaactta

SEQ ID NO: 279886 - DNA, 696 bp, Unknown
  Bacterial polypeptide expressing nucleotide sequence isolated from the Sargasso Sea
attgaatactactattgaaaaattgatcgctagggaaattttagattccagagggaaccctaccattgaagttgatataattacaaacttaggttcttttgcacgtgcctctgtaccctcaggagcttcaacgggagaatatgaggcaattgaattaagggataaagacaatactagatacctaggcaaaggtgtgaaaaatgttgttaatgatattaacactaaaattgcttcggcattgaaaggattcgatgttacaaagcaagaagaagcggatagcctattgattgcacttgatgggactgaaaataaatctaacctaggagcaaatgctattctaggcacctctatggctattgcatatgctggagctcaagcatcagaagaaaaattatttcagtatttaagtagtaataaatcaactgttttaccagtcccaatgatgaacattttaaatggtggaagtcatgcagataattctgttgatatccaagagtttatggtcatgccatttggagcaaacaccttttctgaagctctaagaatggggactgaaatatttcaccaccttaaagaagtactaaaatcacaaaacatgacaacttctgttggagatgaaggcggttttgccccggacctaaggtcgaatgaggaagctatagaaataatattagaagccacagaaaaagcagggct

SEQ ID NO: 279887 - DNA, 418 bp, Unknown
  Bacterial polypeptide expressing nucleotide sequence isolated from the Sargasso Sea
catgaaaatacaaaatatagaaggctttgaagttatagactcaagaggcaatccaacagtagcggcgagagttaaccttgaaacctcaatatctgctttagcgatggtgccctccggagcttcgactggtcagcatgaagcaaatgagaaacgcgataaagatgcaaacagatatctaggcaagggtgtctcaggtgcggttaatgcaattaatacagagttatcctctctactaaaaggtaaggatatatttgacctgctagctaatgacagactgatgatagatacagacggaacttgcaataaaagtaatcttggagcaaatgcaatcttggctgtttcaatggcatctgcaaaagccgcttcgatggctagtaaaattcctcttcacactttcttaaataataaatactcagaa

SEQ ID NO: 279888 - DNA, 853 bp, Unknown
  Bacterial polypeptide expressing nucleotide sequence isolated from the Sargasso Sea
cctatgatgaatattttaaatggaggagcccatgcagataatcctattaacatacaagaatttatgataattcctgctaattttaactcattccgggagtctctgagggcaggtgctgaagtgttcaaatatctgaaagaaaacctcagttcaaaatcactcagtacatctattggtgatgaaggtggcttcgctccaaatctcgcgagtacaaaagatgcaatagaaattattatcaagtcaatttctgatgctggctataccagcggtaaagatattttccttgcattagatgctgcctcgagtgaattctttaacgataataaatatcaagtcgagcctcaaggagaagcagaaaccgtagaaggcatgatcaatttttatgaacaattaataaaagattatccaataatatcaattgaagatgcgatggctgaagatgattgggacggttggaaaaaattaacaagttcaatcggcgataagtgtcagttagttggtgatgacttgtttgttactaacgaacagagatttttaaaaggaataaattcagatattgcaaattcaatactcattaaggttaaccaaataggaacacttacagaaacactaaatgcaattgctatagcaaagaaccacgattactcgtgtgttatatcacatagatccggcgaaactgaagacactacaatcgctgatttatcagttgcgactaatgcaggtcagataaaaactggttccctgtcgcgatccgatcgcactgcgaaatataatcaattattaagaattgaagaagagcttggtgatagatgttactatccaggtctgagtgaatttagtaaatatatttaat

SEQ ID NO: 279889 - DNA, 604 bp, Unknown
  Bacterial polypeptide expressing nucleotide sequence isolated from the Sargasso Sea
gatgccattaaaaagtccgggctacaaattaaaaaaggacttttgtattgctttagatgttgccgctagtgaattttataaaaatggtaaatataagcttatatcggagaataaacctttttcgacagatcaatttattaaatatttatgtaatctaattaataaatatccaattgtttctattgaagatccttttgatgaagatgattgggactcctggtctaagcttgtcgaattaattggtgataaagtgcaaatagtcggcgatgatttgtttacaactaatttagaaagattgaagaaaggcgttaaaaataattcagctaacgcaattctaataaagttaaatcagattggaacgcttacagaaacaatagaatgcattaattacgccgttgctagtaattttgaagtaattatttcgcatcgatcaggtgaaactgaagatacatttattgccgatttagctgtaggcactaatgctggccagattaaaactggctctatgtctcgatctgaccgtacctcaaagtacaatcagctattaagaattgaagaattaattagttctaaaaatactatgaaaacaaacaaattcttctaa

SEQ ID NO: 279890 - DNA, 124 bp, Unknown
  Bacterial polypeptide expressing nucleotide sequence isolated from the Sargasso Sea
ggacaaataaaaactggttcgctttgtcgatctgatagaaccgcaaagtataatcaactcattagaatcgaagaagaacttggagaacaggccgaatacagtaaagattttcttaaacattaaa

SEQ ID NO: 279891 - DNA, 406 bp, Unknown
  Bacterial polypeptide expressing nucleotide sequence isolated from the Sargasso Sea
tggaagctgttgaccgagcggctcggcggcaaggtgcagctggtgggcgacgacctgttcgtgaccaacaccaagaggctgcagcagggcatcgacaatgccaccgccaattcgatcctgatcaaggtgaatcagatcgggtcactcaccgaaacgctgcaggccatcgatctggcaggtcgctccggctacacgagcgtgatcagccaccgcagcggtgaaaccgaagacaccaccatcgccgacctgtccgtggcaacccgcgccggccagatcaaaaccggttccctgagccgcagcgaacgggtggcgaagtacaaccagctgcttcgcattgaggatgagcttggcaaccaggcggtttacgccggggccgtcggccagggaccacggggcaagggctgaa

SEQ ID NO: 279892 - DNA, 444 bp, Unknown
  Bacterial polypeptide expressing nucleotide sequence isolated from the Sargasso Sea
tatggctaagattattaacgtgattggtcgcgagattatggattctcgtggtaacccaacagttgaagccgaagtgcatttagaaggtggttttatcggtatggcggctgcgccatctggtgcttctaccggtagccgcgaagcgctggaactacgtgatggcgacaagagccgttacttaggtaaaggtgtattaacggctgtggctaacgtaaacggccttatccgtgcagcgttaatcggtaaagatgcgactgcacaggctgaactcgatcaaatcatgatcgacttagacggcactgaaaacaaagacaagttaggcgctaacgcgattctggctgtgtctttagcggcggctaaagcggcagcagcattcaaaggcatgcctttatacgctcacattggcggattaaacggcactcctgggcaatacgctatgccagt

SEQ ID NO: 279893 - DNA, 397 bp, Unknown
  Bacterial polypeptide expressing nucleotide sequence isolated from the Sargasso Sea
aatgattgttcagctgggacaaaacttttgaataaacaaaaaaataaaatccaaattgttggagatgacctttttgtacaaaatttagaacgattgaaaattggctttttaaatatttcagctaattcaatattaattaaattaaaccaaatcggtactttaacagaaacgcttgaagttataaaatttgcaaaattaattggttataaaactataatatcacatagatctggagatagcgaagatacatttattgcagattttgccataggaactgattctaatcagattaaaactgggtcattagctagatcagagagagtttcgaaatacaatcaattattgagaattgagcatgagcttggaaaaaaatctaaaatgcatattatagattaat

SEQ ID NO: 279894 - DNA, 739 bp, Unknown
  Bacterial polypeptide expressing nucleotide sequence isolated from the Sargasso Sea
ttaattaataaaaattataaattaccttttcctcttatgaatgtcattaatggaggagttcatgccaataatggactaagaattcaggaatttatgattagacctgatagagcaaaatcattttctgaagccataagaatgtgttttttagtaataaataatttgaaaaaaatcataattaaagaaggtctttccacttctgttggtgacgaaggaggttttgcaccaatgataaacaataatgaaaaagctttaaaactaattgttaaagccataaaaacatctgattatataaatggaaaagatatttcgatttgtttggatgttgctgctaatgaattgtttaaaagcaacaaatattctatacattccaaaaaatatatcaattcaaatttaacaatcaaaaaatataaatcccttattaaaaaatttaaaatttcatcaatagaagacccttttgcagaaaacgattggccatcttggaataagttaatgaaaaacaaaaactctaatcttcaaatagtaggtgatgatttatatgttacaaaccttgagagattaaaaattggttttttaaataattcttcaaactctatattaattaagcttaatcaaataggaacagtaacagaaacattggaggtaattaaattctctcatttaataggatttaaaacaattatttctcatagatcaggagaaagtgaagatactttcatagctgacttagcagtaggca

SEQ ID NO: 279895 - DNA, 952 bp, Unknown
  Bacterial polypeptide expressing nucleotide sequence isolated from the Sargasso Sea
aatatcttggaaaaaggtgtttctaaagttgttcatagtataaattctgaaattaatgaatacttgaagggtttttcgcctttgaaccaaaaaaaactcgatcagaaattgatagaattagatggtacagaaaataagtctaggcttggcgcaaatgcaattttgggagtaagtcttgctgctgctagggtttcatcacaaattaaaagtgaaagtttgtataaatatttaagcgaatacaatgagtatatacttcctactcctttaatgaacgttataaatggaggagctcatgccaataatgcattagattttcaagagatcatgataatgccagtaggagctaaaacattttctgaagctttaagatggggggctgaaattttccatcacttaaaattagttctttctgaaaactctttttctacatcagttggagacgagggagggttttctcccgaaatcaataatgtagaggaggctttggaattacttagcaaagccattaaaaatgctggaagaaatttagatagtgatattaattttgctttagatgctgcctcttctgaattttataaaaataatttttatgaaatgaataatggtcaaacaaaaatagatacaaatgatatgattaaaatttgggaaaagcttgtaagggaatacccaataatttctctagaggatccattagaagaaaatgactttgaaggatataaagagcttactaatctgattggaaataaaatacaaatagttggggatgatttatttgcaactaatatgaatagattaacaaaaggcattaattcaggcgctgcaaattcaatattaattaaacttaatcaaattggcactctttctgaaacaatagaaactgtaaatttagctaaaaaagataactttggaacaattatatcacatcgctcagggaaactgaggatacatttat

SEQ ID NO: 279896 - DNA, 503 bp, Unknown
  Bacterial polypeptide expressing nucleotide sequence isolated from the Sargasso Sea
atattctattcattctaaaagcttcatctcagtaaaaaaatctattgatgaatatataaatttgattaagaaatataaaatcaaatctatcgaagatccttttgcagaagatgattgggtagcttggcatagattaatgaaatcaataaaaaaagttcaaattgttggagatgatctttatgttacgaatcttgagagacttaaaaagggttttttaaatatctcctcaaatgcaattttaattaaattaaaccaaataggtactgttactgaaacattggatgtaatcaagtttgcccaaattataggttttaaaacaataatttcacacagatctggtgatagtgaagatacatttattgctgatttagctgtaggtaccaattctaatcaaattaaaacaggttctttggcaagatcagaaagagttgctaaatataaccaattaatacgtatagaagaagaacttggaaaaaaagctagaatgaataaaatttattaat

SEQ ID NO: 279897 - DNA, 298 bp, Unknown
  Bacterial polypeptide expressing nucleotide sequence isolated from the Sargasso Sea
aaaaaaggtatttcagaaaaatctgcaaacgcaattttaattaaaccaaatcaaattggcacagtaaccgaaacactggatgctattaaggtagcacatgaaaacaaatttgagacagtgatttcacataggtcgggcgactcagaagacacatttatagctgatttagctgttgcgacaaaatcttctcaaattaaaactggctgcttagcaagatctgagcgggtatctaagtataatagacttttaagaatcgaagaggaacttggcaattccgcaaaaatagctaaaatatagt

SEQ ID NO: 279898 - DNA, 754 bp, Unknown
  Bacterial polypeptide expressing nucleotide sequence isolated from the Sargasso Sea
gttgaattcttcaattgaaaaagtatatgctagagaaattttagactctagagggaatccaaccgttgaggtagatatttatacaaaatctggacatttaggtagggctgctgtcccttctggtgcgtcaaccggagaatacgaagccatagagttaagagatatggatagtgagcgataccttggcaaaggagttagaaaggcactgaacaatattaactctataatttctgaagcaatcatcggtttagatgtaactaaacaagaagaagttgataatatgatgattaaattagatggaacagaaaacaagtctaggttaggagcgaatgcaattttaggagtttcactcgcaattgctcatgctagcgcaggagtgtccaatcatcctttatataaaattttttctgatgatgataaatttttactcccaatgccaatgatgaacattttaaatggcggtagtcatgcaaataattctgttgatattcaagaatttatgattatgccgattagcggaaatacattctcagaaactctgcagatgggaacggaagttttccatgaattgaaatcagttttaaattcaaaaggaatgaatactgccgttggagatgaaggaggttttgcgcccaacttgagttctaatgaagaggctatagaaataattcttgagtcaattataaagagaggattaaaaccaggtaaagatatcctattagcattagatgttgctgctagtgaattatatgaa

SEQ ID NO: 279899 - DNA, 703 bp, Unknown
  Bacterial polypeptide expressing nucleotide sequence isolated from the Sargasso Sea
aagggtttttctacgaatgttggagacgaaggaggttttgctcctaatttatcatctaatgaagaggcaattgaatatgtgattttagcaatagaaaaagctggttttgtcccaggtgatgatgtgtatattgctttagatgcagctgcatctgagttttataattctgaaaccaatacctatttctttgaatcaacatcacaggaattaacatcagaacaattggttgacttttggaaagaatggagtgaaaagtatcctattatttcaattgaagatggattagcagaagatgattggagtgcttggaaatctttaactgataaaattggcgataaagttcaattggttggtgatgatttatttgtaaccaatactaaaagattacaaagggggattactgaggggattgccaattcaattttgattaaagtcaatcaaatagggtcattaagtgaaacaattgatgcagttaatttagcaactgaaaatggatatacttctgtaatgagtcatagaagtggtgaaacggaagattacacaattgcagatcttgctgtagcgcttaatacagggcaaataaaaaccggttctgcctctagaagtgatcgtatgtcaaaatacaatcaacttttaagaatagaagaagaacttggttcaaaagccgtttacccaggcaagacattgcgttttttaaaataat

SEQ ID NO: 279900 - DNA, 483 bp, Unknown
  Bacterial polypeptide expressing nucleotide sequence isolated from the Sargasso Sea
cctacatatctgttgaaaaatctgtcaaagaatatcaaaaaattattaaaaaatataaaatcaaatccatcgaagacccttttgctgagaatgattggctcgcatggaataaattgatgagatcaattaataaagttcaaatagtgggggatgatctttatgtgacaaacttagaacgacttaagaaagggtttttaaatatctcctcaaattcaattttgattaaattaaatcaaattggaacagtttctgaaacgctagacgtaataaaatttgcgcaaactattggttataaaacaataatttctcaccgatctggagatagtgaggatacatttattgcagatcttgcagttgggaccaactcaaatcaaattaaaactggatcattagcaagatcagaaagagtagctaaatataatcaattaattcgtattgaagaagaacttggaaaaaaagtgagaatgaataaaatcaattaat

SEQ ID NO: 279901 - DNA, 880 bp, Unknown
  Bacterial polypeptide expressing nucleotide sequence isolated from the Sargasso Sea
aatgatagttataaataatattataggcagacaaattttagatagtagaggtaatcctactgtagaagttgacgtggtgttgtctgatggaacgttgggaaaatcctgtgtgccctcgggggcttccaaaggaaagtatgaagctctagaattaagagataaagatacaaagcaattccatgggctaggtgtaaaaaaagcaataaatcatattaatactgaaattttagatgttttatctggcagatcaccttttgaacaaaatgaaatcgataaaagtatgattgatcttgatgggactcctaataaaaaaagacttggtgctaatgctatattgggagtatcattagcagtttgcgacgctgcggcaaagtcaatgaatgtccctttgtggaagtatattggaggtattaattcaacttatcttccagtgcctatgatgaatattatcaacggtggatcacattcaaacaataacttagatattcaagaatttatgataatgcctgttggttttgataacttcaaagatgcattaagatctggagttgaaatttttcaatcactacgaacacttttaagtgagaaggggctctcaacaaatgttggtgatgaaggaggatttgctcctgaattaaatagtgctaatgaagctttagagttgatatccatagccatagaaaagactggatataaagtaggagaagaaatttattttgctcttgatgcagcatcaactgagttttataaaaatggaaaatattatctttctcaaggaaaagatatcctgtcttcatctgaattgatgaattattggctcaacttaacaagtaaatttcctattttatctatagaggacccatttagtgaagatgatatt

SEQ ID NO: 279902 - DNA, 771 bp, Unknown
  Bacterial polypeptide expressing nucleotide sequence isolated from the Sargasso Sea
ttttgcattaccatacctttaatgaacataattaacggaggcgcgcatgctgataatgatttaaatatacaagaatttatgattagaccagactcagctacaaattttatgaatgcaattgaaaaatgttttttagtaattcaaaacttaaaggaattgttaaaatcaaaaaaaatgcttactaatgttggagacgagggtggttttgctccatcgataaattcaaacgaggaggctttagaattgattgtaaattcgatagaaaagtcaaatttaaaacctggtaaagatatagttatttgtttagatgtcgctgctaacgaattaattaatgaaaaaggtgaatattgtattcaatctcaaaattttataacggttgatgaggttattaaatattacaaaaaaattacgtcaaaatatccaataaaatcaatcgaggaccctttcgcagaagaagattgggagtcttggaaaaaaataacaaatgaaattggtaatgtagttcaaattgttggagatgatttattcgttactaactccaaacgactcaatagaggcattaaagaaaaatctgccaattgtattttagtaaagccgaatcaaatcgggactttgaccgaaactttagatgttatttccatggctaagaagggaaattttaggacaataatttcacatagatcaggagataccgaagatacttttattgctgatttggctgttgcatcaatgtcttcacaaataaaaactgggtctttagccagatcagaa

SEQ ID NO: 279903 - DNA, 685 bp, Unknown
  Bacterial polypeptide expressing nucleotide sequence isolated from the Sargasso Sea
aatatttctcagagaggaatgtcaatttctgtcggagatgaaggtggatttgctcctatgatatctaataatgaggaagcgttaaaacttattgtaaaatctattgaaaaagcaggttttaaaaatggcaaacatatttctatttgtttagatgtagccgcaaatgaactttataaaaaaaaaaaatattccgttcactctaataaatatcttaatgtagatcaaactattagtaaatatctaaagctagttaaaaaattcaaaataaaatcgattgaagatccttttgctgaaaatgactggatggcatggagtaaatttaataaattttcaaaaaaattacagattgttggtgatgatttatatgtaacaaatttagagagacttaagaaaggctttttatttgagtcttcaaattcaattctaattaagttaaatcaaattggcactgtatcagagactttagatgttataagatttgcaaaaaatataggatacagtacaatcatttcacacagatctggtgatagtgaagatacttttattgctgatctagcagttggtactaactcaaatcaaataaagacaggctcattatctagatccgaaagagtatcaaaatataatcaattaattcgtatagaggaagaattaggctcaagagcaagaatgaatagaatatgaa

SEQ ID NO: 279904 - DNA, 409 bp, Unknown
  Bacterial polypeptide expressing nucleotide sequence isolated from the Sargasso Sea
catggatgaaaatgatttgaaaggatggaaatttttaacaaaagaactaggtcaaaaatgtcaattagttggagatgatttgtttgttaccaatgttaatgaattgaaagaaggtattcaaaataatgcagcaaactccatacttatcaaatttaaccaagtaggaacaatcaaagaaacttttgaaacatttctattggcaaaaaataataatattaaaacaatcatttctcatcgttcaggtgaaaccgaagatacaaccatatctgatatttcagttggtttatgtgctgaacagattaaaacaggtgcacctgcacgatcagatagaacatcaaagtataatcgcctattatttattgaatcagaaaatctatctttagattatgcaaacaaaatttttaattag

SEQ ID NO: 279905 - DNA, 888 bp, Unknown
  Bacterial polypeptide expressing nucleotide sequence isolated from the Sargasso Sea
gcaaagcaaaaaaactaccttttgtataaaacttttttctcaaaaaaataattttcaattaccttatccattaatgaatattattaatggtggagcacatgcaaataacggtcttagaattcaagagtttatgatcagacccgatcgagcaaaaagtttttctgaggctatgcggatttgttttgttgttattaaaaacttaaataaattaattaaagctagaggtttatcaacttctgtgggtgatgaaggtgggttcgcaccgatgattagtagtaataaccaagctttagatttaattgtgaatgcaattaaaaaatcaggatttattaatggtaaagatgtttcaatttgcctagatgtggctgctaatgaattatttaaaaagaacaaatactctattcattcaaaaaattatatttcagcagagaaatccattaaagaatatcaaaaaattattcaaaaatataaaattaagtctattgaagacccatttgctgaaaatgattggttggcatggaataaattaatgaaatcaataaaaaaagttcagattgtcggagatgatttatatgtaacaaaccttgaaagattaaagaaaggttttttaaatatttcttcaaattctattttaataaagttaaatcaaattggcactgtttcagaaactctagatgtaatcaaatttgctcaaaccattggatataaaacaattatatctcaccgatcaggtgacagtgaagatacgtttattgctgatttagcagtgggtactaattcaaatcagattaaaaccggatctctagctagatctgaaagggttgcaaaatataatcaattaatccgtattgaggaagaacttggaaaaaaagcgaggatgaataagat

SEQ ID NO: 279906 - DNA, 383 bp, Unknown
  Bacterial polypeptide expressing nucleotide sequence isolated from the Sargasso Sea
tgcatggaataaattgatgagatcaattaataaagttcaaatagtgggggatgatctttatgttacaaatttagaaagacttaagaaagggtttttaaacatttcctcaaattcaattttgattaaattaaatcaaattggaacagtttcagagacattagatgtaatcaaatttgcccaaaacattggttataaaacaataatttctcaccgatctggtgatagtgaagatacttttattgcagatcttgcagttggaaccaactctaatcaaattaaaactggatctttagcaagatctgaaagagtagcaaaatataatcaattaattcgtattgaagaagaacttggaaaaaaagtgagaatgaataaaatcaattaat

SEQ ID NO: 279907 - DNA, 613 bp, Unknown
  Bacterial polypeptide expressing nucleotide sequence isolated from the Sargasso Sea
aatggcaaaaattaaaagtataaaaggcagacaagtctttgacagtagaggaaatccaactgtagaggcagaggttctgttagaaaacaatatatctgccacagcaatttctccatcaggtgcatcaacaggtgcctttgaggctcacgagttaagggataaagacgaaaataaatttttaggtaaaagtgtaaatattgctgttgaaaacataaataaaaagatttcaaatgaattaaaaggacttgattcagatgatcaaaaaaatgttgataaaattttgttagatttagatggaagtgaaaataaaacaaatttgggagctaatgctactcttgcggtttctcttgccaattgtaaatgctcagcgttatcaaataagaaatctttatttaaaaatttaggaaatagtttttctttaccaattccattaatgaacatcattaatggtggagcacatgctgataatgaccttaatatacaagagtttatgataagacctgactcagccaaaaattttatggatgctattgagaagtgttatttagtaattcaaaatttaaaaaaaatattaaaatcaaataaaatgttaacaaatgtggcgacgaaggcg

SEQ ID NO: 279908 - DNA, 245 bp, Unknown
  Bacterial polypeptide expressing nucleotide sequence isolated from the Sargasso Sea
tatgaaagatcacatcatttcaattgaagctatggaaatactggattcacgcggtaatcctacaattcgaacaagggtaatcttggataacggcgtttgtgggactgcttcagtaccttccggagcatcaaccggcgaaaatgaggcccttgaactacgtgacggtgacaagagccgatacggcggaaagggcgtgcttaaggctgtagaaaacgtgaacaaaaaaattgctcctgaacttactt

SEQ ID NO: 279909 - DNA, 541 bp, Unknown
  Bacterial polypeptide expressing nucleotide sequence isolated from the Sargasso Sea
gttgaatgaggagcgtgttgtgagtgaaatcgtcgatgtgcgtgcttttgaggtattggattcccgcgggaatccgaccgtgatggccgaggtcacattggatgatgacagtgtcggcagtgcttgcgcgccctcaggagccagcacaggtacccgcgaggcgctggagctgcgagatggcgacgcgtcgcgctatctcggcaagggagtgctgacggcggtagggcacgcgaatggttccattcgcgaactgttggtgggccacgacgccctcgatcaagccggcgtagaccagcgcatgattgaggcagacgggacagacaataaggcgcagttcggtgccaatgccattctggctgtttcgctggcgactgccaaagccgcggccctgtcagtcagaaagccgctttatcagcacatagccgagctctcggggtgtaccgctatgtctctgcctgtgcccatgatgaatatccttaacgggggagagcacgccgataacaatgtggatattcaggagttcatgattcagcccgtgtcg

SEQ ID NO: 279910 - DNA, 730 bp, Unknown
  Bacterial polypeptide expressing nucleotide sequence isolated from the Sargasso Sea
atgagcataattattaagatcctagcaagacaaattttagattcaagaggaaatcctacagttgaagtagatgtttatactgaaagtggaatatttggaagagcagctgttccttcaggagcatctactggagaacatgaagcagtagaattaagagatggaggtaattcttttatgggtaaaggagtaatgactgctgtgaataatattaacgatgttttgtctgaggaaataattgggctttcagtttttgatcaaaataaaatagataaattgatgatagatttagatggcactaaaaataagtcaaaatatggagccaatgcattattaggaatttctctagctatttcaaaagctgctgcgaatgagttaggaattcctctttatagatacattggaggtataagtgcaaatactcttccagttccaatgatgaatattattaatggtggatctcattctgatgctccaattgcttttcaagaatttatgataatacctttaatggcaaaatctttttcacattccatgcaaatgggaaccgaaatttttcataatctaaaaaaagttttaaataaaaaagctttaagtacagcagttggtgatgaaggaggctttgctcctaaactcaaagggactgaagatgctcttgaaacaattttagaatcaataaaaaatgcaggatataaacctggagaagaagtaatgatagccttagactgtgcat

SEQ ID NO: 279911 - DNA, 770 bp, Unknown
  Bacterial polypeptide expressing nucleotide sequence isolated from the Sargasso Sea
tacaggagaatttgaagccctagaattgagagatggagatagtaaaagatttaatggaaaaggtgtgttaaaagctgtagacaatgtaattaacagttttggtcctgcgttggttggtaaagatgcaagcaaccaaaaagaaattgatgatttgcttattaatattgatggtactacaaacaagagtgcgcttggagcaaacgcaagcctgggaatatcaatggcttgctctgtcgttagtgctgctttctataacaaaccattatataactatttaaaccccaatagcatagtaatgcctgtacctatgatcaatgtgcttaatggtggaatgcatgcagatcaaggttctgacatgcaagaaattatgctatttccgcatggtgcaaaaaactttaaacactctcttcaaatggggtctgaaatatttcactgtttgaaaaaagagctaaagaaacaggggatggaaacaactgtcggagatgaaggtggatttgctccagctttacattccaacgatcatgcaattgaactacttcttaactctattgaaaaggctggttttaatataggaagagatgtctctttagctttagatgtggccgcatcgagtttttataaagatcataaatatcatctaaaggttgatggaagcgttttagacaatgatggaatgattaacttttatgaagatttaattaaaaaatatcctattgtttcaattgaagatggtctagatgaaaatgattgggaagggtggaataaactga

SEQ ID NO: 279912 - DNA, 630 bp, Unknown
  Bacterial polypeptide expressing nucleotide sequence isolated from the Sargasso Sea
aatggtaaaaataaccaacgttaaaggtcgtcaagtttttgacagtagaggaaacccaactgttgaagctgaagtttttttagacaatgatatttccgctactgctatatcaccatcaggcgcatcaacaggagcttttgaagcttacgaactaagagatcaagataaaaataattttttaggcaaaggcgtaaaaaaagctattgaaaatattaataaagatatcgcatcaggtttaaaaggagaggatccagccaatcaaactaaagttgataaaatcttattagatttagatggaagtgaaaataaaagaaatcttggtgcaaacgcaaccttggctgtatctttagctaactcaaaatcagcagctttatcagctaaaaaaccactatataaaaatttaggaaaaactttctccttacccaatccattgatgaatattattaacgggggcgctcatgcagataatgatttaaatattcaagagtttatgattagaccagactcagcgataaattttattgatgccatagaaaaatgttttctttgtattcaaaaattaaaaagtttgttaaaatcaaagaaaatgcttactaatgttggcgatgaaggaggttttgctccatctat

SEQ ID NO: 279913 - DNA, 706 bp, Unknown
  Bacterial polypeptide expressing nucleotide sequence isolated from the Sargasso Sea
tttcaccgccgtgggtgatgagggtggctttgcccccaacttggccaaagccgaagacgccttggaactgatcgccaaagccaccgaaagcgctgggtacagtttgggcgagcaagtgttcattgccttggaccccgccaccagcgaaatggtgggcgaagccaagaagcaaggcaaagagggctactgcttcttcaagagtgacccgtcacgggtggcgtccaccgacgaaatgatcgatctttgggcgggctggtgtgagcgttggcccatccgatccatcgaagatggtctcgatgaaaacgactgggacggctggagaaagctcaccgaacgtctcggagaccaagttcagttggttggtgatgatctttttgtgaccaatcccaacttcctcggtcgcggcatcgaagaaggctgtgccaatgccatcttggtgaaggtcaaccaaattggaacgctgaccgaaaccttgcaagcggttgccatgggcgctcgccatggctacgccgcggtcttgtctcaccgttctggtgaaaccgaagattcagtgatcgcagatttggcggtcgccacgaattgcgggcaaatcaagactggagcgccgtgtcgttccgaccgaaccgcaaaatacaaccagctgcttcgcattgctgagcaacttggtgacgatgcggaatacggcaacgtcacttggacccgttga

SEQ ID NO: 279914 - DNA, 736 bp, Unknown
  Bacterial polypeptide expressing nucleotide sequence isolated from the Sargasso Sea
agccagacaggtttatgatagtagaggaaatcctaccattgaagctgaggtatttgtcaataatttaagtgcttcagcaatttgtccttcaggtgcttcaacaggaacttttgaggcctatgaaaaaagagataagggtaataaaaaatatttaggaaaaagtgttttaataccagttaagactgtcaataaattaatttcaaaaaaattaaaaaatcaaaacatccatgaccaagagagaatagatagcattcttataaaattagatggcacaaaacaaaaaacaaagttaggtgcgaacacaatcttagctgtatcaatggctataaaaaaattatcggcaaaagttaaaaaaatacctttatataaaaattttattgttaaaaaaaattttaaactcccttttcctttaatgaatattattaatggaggtgcacatgctgacaatggccttagaatccaagagtttatgattagacccgatagggcaaaatcatttaatgatgctgtcagaatgtgttttttagtaataaacaatttaaaaggattattaaaaaaagcaggtcactctattaatgtaggtgatgaaggtggttttgcaccaatgataagtgataatgagaatgctttaaagcttatagttcaagcgattaaaaaatcaggttttaaaaatggtaaagatatatctatttgtttggatgttgctgcaaatgaattaattaaaaaaggtaaatat

SEQ ID NO: 279915 - DNA, 913 bp, Unknown
  Bacterial polypeptide expressing nucleotide sequence isolated from the Sargasso Sea
gaatcctactattgaagctgaagtatttacaaaaaataaaagtgcttcagctatttgtccatcaggtgcatcaactggaacctacgaagcatttgaaaaaagagataaaaacaataaacgatatttaggtaaaagtgttttaaatgcagtaaatttaattaatacaaaaatttcaaaaaagttaaaagggcaaattgttcataatcaagagaggattgacactctcttgattaatttagatggaacaagacaaaaaactaaattaggagcaaatgcaattttagctgtatcaatggcagcaaaaaaactttcagcaaaggtgaaaaatttacctttgtataaaacttttttagtgaaaaataactttaaattaccatatcctttaatgaatataattaatggtggtgctcatgcaaataatggtttgcgtatacaagaatttatgattagacctgatcgggctaaaagtttttcagatgcaatgagaattagttttttagtaattaagaatttaagtaagcttttaaaaaaaaagaaattatcaacctctgtaggagatgaaggtggttttgcaccaatgattagtaaaaactatcaagcgcttgatttgattgtttcagctattaaaaaatcaggttttactaatggaaaagatatatcaatttgtttagatgtagctgcaaatgaattatataaaaaaaaaaaatactctatccattctaaaagttatatttcagtagataaatctataaatgagtacaaaaaaatagtgaaaaaatacaaaattaaatctatagaggatccttttgccgagaatgattggatttcttggaataagttaatgaagaattttaataaagttcaaattgttggtgatgatctatatgtcactaatttggaaagacttaaaaaa

SEQ ID NO: 279916 - DNA, 804 bp, Unknown
  Bacterial polypeptide expressing nucleotide sequence isolated from the Sargasso Sea
tattcacaatcaagaaagaatagatgctttgatgattaacttagatggaactaaacaaaaaaaaaagttaggggctaattcaatattagcagtatctatggcagttaaaaaactatcagcaaagataagaaaaataccattatataaaacttttttgataaaaaataattttaagttaccttatcctcttatgaatataattaatggtggggttcatgctaacaatggtttaagagttcaagagtttatgatcagaccagatggtgctagaagtttttctgatgcaatgagaatctgttttttggtaataaaaagtttaagtaaaataataaaaattaaagggttatctacttcggttggtgatgaaggtggatttgcaccaatgattaataataataatcaagcactagatttaatcgtatcagcaattcgaaaagcaggctttgttaatggtaaagatgtttcaatttgtttggatgtagctgcaaatgaattatacaaaaaaaacaaatattccattcattcaaaaacttatgtttctgttgaaaaatgtattgatgaatataaaaaaatgatcaatagatataaaattaaatcaatcgaagatccttttgcagaaaatgactggatctcatggaataaattaatgaaatctatcaaaaaagttcaaatagtgggtgatgatctttatgtgactaatcttgagagattaaagaaaggttttttaaatttatcgtcaaatgcaattttaataaaattgaaccaaataggtaccgtgtcagaaactttagatgtgattaggtt

SEQ ID NO: 279917 - DNA, 679 bp, Unknown
  Bacterial polypeptide expressing nucleotide sequence isolated from the Sargasso Sea
aagcatttatccacagccgttggtgatgaaggtggtttcgctcctatgataaataataacgaagatgctttaagacttataataagcgctattaataaatctggatttataaatggtaaagacatttctatttgtttagatgttgcagctaatgaactttataaaaataaaaaatattctattaattcaaaaaaatctatttcagttaaaaaaacaataatttattacaacaaattaattaaaagatataaaattaaatctattgaagatcctttttctgaaaatgattggtactcgtggaagcaatttaaaatagccacagatagaagtatacaagttattggagacgatctttttgttactaatttagaaagacttaaaataggatttttaaataattctgcgaattcgatccttattaaattaaatcaaattggcactgttactgagacactcgaagttatcaaatttgctcatttaattgggtttagcactgtaatttctcacagatctggggatagtgaagatacttttatatctgacttagcagtaggaacaaattcaaatcaaatcaaaacaggctctttggcacgatcagaaagagtggctaaatataaccaattattaaggatagaagagcagctaggaaaatcatcaaaaatgaataaaatacaatagt

SEQ ID NO: 279918 - DNA, 948 bp, Unknown
  Bacterial polypeptide expressing nucleotide sequence isolated from the Sargasso Sea
agagataataaaaacaaagattacttgggtaaaagtgtttttagtgcagtaaaaaatatcgattcaattattactaaatccttaaagaatgttgaaatcaatgatcaggctaaaatagataatattttaatagatttggacggcactgaaaataaaaaaaaacttggtgcaaatgcaattttagctgtttcaattgcttcatgtaagttagcagctgttgaaaaaaatattccactatataaacatttatctaattcaaaaagctttcaaataccagttccattattaaatattataaatggaggtgctcacgcaaaaaacaatctagacatacaagaatttatgatacgtcctgaaaaagcaaaatcttttacagaatcaatgaggcaaagttttttggtaatacaaaacttaaagggaatggtagacagtacgaatgttggagacgaaggtggttttgctccaaacttagacaacaatgaagaagcgatagaaataattgtgaaagctatagaaaaatctggattgaaacctggagaagaaatttcaatttgtttagacgtagcagcaaatgaattaaaaaaagctaaaaccatagaatattacgaagatcttgttaaaaaatttcctattaaatcaattgaggaccctttttctgaagatgactggagttcatggaaaatgataaataaaaatattgatattcaaatagtaggcgatgatctatttgccactaatattaaaagattaaagaaaggcatagaagaaaaatcagctaatgcaatactaattaaattaaaccaaataggaacagttagtgagactttaaaagttatagaattagctaaaaaaagtggacttaaaactattgtttcacatagatctggcgactcagaagatacttttattgctgattttgctgtggcaaccaaattcgtcgcaaattaa

SEQ ID NO: 279919 - DNA, 835 bp, Unknown
  Bacterial polypeptide expressing nucleotide sequence isolated from the Sargasso Sea
ttgccaatgccaatgatgaatatattaaatggtggggtgcacgcaaataacaatcttgatatacaagaatttatgataattccaacctctgcaaattcattctttaacgcagtaagaatggggtgtgaagtttttcatacacttaaaaatattttgcacaaaaaaaacttttcaactgcagttggtgatgaaggtggttttgctccacaattatctaatacggatttagcaattgaaatgattttaatggctattgagaaatctggatatatgccagggaaagattttcttttagcattagattgtgcctcaagtgagtattttaaagatggatactattatatggatggagaaaaacttaaattaacctctaaagaaaaagtaaattttttaaaaaatttagtagagaaatatcctataatttctattgaagatggtatgtcagaagatgattgggaaggttggcaagaaatatcccttcaactaggtaataaatgccaattggtaggtgacgatttatttgccactaacccaagaagattagaaaaaggaataaaagaaaaagctggaaatgctatactcataaaatataatcaaattggaactatatcagaaactctgaaagtaattcttatggcgaaatcaaacaattttcttaatattttttctcatagatcaggagagactgaagatgtttcgatatcagatttatctgttgccactggtgttggacaaattaaaactggttctctgagtagaactgatagaatagccaaatacaatcagttgataagaatagaacaagaacttggggcaaaattgttatatttctgaa

SEQ ID NO: 279920 - DNA, 679 bp, Unknown
  Bacterial polypeptide expressing nucleotide sequence isolated from the Sargasso Sea
tttgatagtagaggcatgccgacaatcgaaacagaaatattttgtggaaaagtttcttcaaaagctatttgtccttcaggcgcatcaactggttcatatgaagcatttgaaaaaagagatgtcacaaataaaaaatatttaggaaaaagtgttttttctgctgtatcaaatgtaaataaaataatttcaaaaaaaattctaaataaaaatgttcataatcaagaattgatcgactcaattcttattaaattagacggaacaaagcaaaaaaataaattaggtgcaaatgcaattttatctgtatctattgctgttaaaaaattatcagcaaagttgaaaaaaataccattgtataaaaactttttaattaaagaaaattttaaattaccttttcctcttatgaacatcatcaatgggggcgcacatgccaataatgggttaaaaattcaagaatttatgattagacctgataaagcaaagacttttagcgaggcaatgaatatttgttttttagtaatacaaagtttgaaaaaattacttatcagtaaaaatttatctacatctgttggagatgaaggtggttttgctccaatgatctcaaaaaatgaggaagcattaaagttaatctcgaacgctattaaaaaggcaggttttgttaacggaaaagatgtatcaattt

SEQ ID NO: 279921 - DNA, 592 bp, Unknown
  Bacterial polypeptide expressing nucleotide sequence isolated from the Sargasso Sea
gctatagaaaaatcaaagttaactcctggtaaagacgttgtaatttttctagatgtagctgccaacgaattaattgataaagaaggtcaatactcaattcaatcaagtaattttacttcggtcaatgatgttgttggttattataagaagttaacttcgagctaccctattaaatcaatcgaagatccttttgctgaagaagattgggaatcttggaaaaaaattacagctgagattggaaaaaatgttcaaattgtaggtgatgatttatttgtaacaaattctaaaagattaaaaaaaggaatagatgataaatctgctaatagtattttagttaaacctaatcaaattggaactttatctgaaacattggaagttgttacaatggcaaagaaggccaattttaacacaattatttctcatagatcaggagatacagaggatacatttatcgctgatttggcagtagccacagaatcatctcaaataaaaacaggatcactagcaagatctgaaagagtagccaaatataataggctgttacgcatagaagaagaacttggaaatcaagttaaaatggctaaaatctaag

SEQ ID NO: 279922 - DNA, 757 bp, Unknown
  Bacterial polypeptide expressing nucleotide sequence isolated from the Sargasso Sea
aatggcatttataaaagatataaaggcaagacaaatttttgattcaagaggaaacccgactgttgaggttgatgttattacatctacaaatcatataggaaatgcagctgtaccctcaggtgcatccacaggtgaaaaagaagcagttgagttaagagatggaggagttgattatatgggaaaaggagtattaaaggcagtttccaatgtaaatgatataatcggaaaaaacttaattggaatggatgttgaggatcaaattggtattgattctttaatgattgagcttgatggaacaaaaaacaaatccaatctaggtgccaattctattttaggagtttccttagcttgtgctaaggcttcaagtaatgtacaaaaaaaatacttatatgagtatttaagtaaggataatgtacataatctacctgtgccaatgattaatattattaatggcggttctcattctgacgctcctattgctttccaagagtttatgattatgcctgttggtgcaaatacttttagtcattctttaaagattgcctcagaaatttttcacaatctaaagaaagtgttgtcatctagaaaacttagtactgctgttggtgatgaaggtggatttgctccaaaactttccggtactgaagatgctattgaaactatattacattctattgaattatccggctataagccaggaatcgatgtttttttggcattagattgtgcatcttcagaattttataaaaatggtatt

SEQ ID NO: 279923 - DNA, 472 bp, Unknown
  Bacterial polypeptide expressing nucleotide sequence isolated from the Sargasso Sea
gtgggatgaaacaatatcaaaatatttaaaattaattgatagatataaaattttatctatagaggatccttttggagaaaatgattggtcctcatggagcaagttaactagcaagttaaagaaaaaagttcaaattgtaggtgacgatctttatgttacaaatttagagagattaaaagttggttttttaaaacaatcttccaatgcaatattaattaaactaaaccaaattggtacagtgacagaaactctagaggttataaaatttgcacaaataataggttttagcactattatttcacatagatctggagaaagtgaagatacatttattgcagatttatgtgttggaacgaattcaaatcaaattaaaacaggatctcttgcaagatccgaaagagtatccaaatataaccagcttttaagaattgaggaaagtttaaaaaataattcaaaaatgaatagtttatag

SEQ ID NO: 279924 - DNA, 601 bp, Unknown
  Bacterial polypeptide expressing nucleotide sequence isolated from the Sargasso Sea
gctcttgacctaatcatgatagcaatagaaaaggcaggatattccccaggtgagcaagttgggttgtgtctggatatagctgcaactgaattttattcggattcagtttatagcctcgcaggtatgaataaagattttagctctgctgacatggtaggttacattcaagacttgtgtaaaaaatatcctattagctcagttgaagatgggcttgatgaagatgattgggacggatggacaaaactcacagaattattaggttcccaaattcaactagtcggtgatgacttgtttgttactaatccagaaagaattaagaaaggcattaaaaacaattctgccaattcagttttagttaaggtaaatcagattggaacacttcttgagacttttgaatccgtaaaaacttctatagataataattttactactgttatttctcatagatctggcgaaaccgaagatacatttattgcagatttagctgtagcagtggcttcaggtcagataaagacaggagcaccctcaagatcagatagggtagctaaatataatagactattgatgatagagtcggattctaaaatatatattcgatgat

SEQ ID NO: 279925 - DNA, 700 bp, Unknown
  Bacterial polypeptide expressing nucleotide sequence isolated from the Sargasso Sea
ttaaaaaaattattaaaaaatgctggtcactctatcaatgttggtgatgaagggggatttgctccaatgataagtgataatgaaagtgccttaaaacttatagttcaagcaattaaaaaatctggttttaaaaatggtcaagatataactatttgcttagatgtggcagcaaatgaattaattaaaaaaggtaaatattcgatacattctaagagtcatataagtgtagatcaatcaatcaaaaaatatttacaacttataaataaatatcaaataaaatcaattgaggatccattcggtgaagatgactggaaggcatggtcgaaatttgttaatgaaaccaaaaataaaacacaaattataggtgatgatctttttgtgactaatcttgaaagattaaaagtaggttttttaaatctttctgcaaatagtattttaattaaattaaaccaaattggaactgtaactgaaacgctagaggtaataaaatttgctcaactcattggatttaaaacaattatctcacatagatctggcgataccgaagatacgtttattgctgatttggcagttggcactaattcaaatcaaatcaaaactggatctcttgcaaggtctgagagaatagcaaaatataatcaattaattcgtatagaagaaaatcttggcgcatctgccaaaatgaataaaattaattaat

SEQ ID NO: 279926 - DNA, 445 bp, Unknown
  Bacterial polypeptide expressing nucleotide sequence isolated from the Sargasso Sea
tttgatagattactatgtcaaacttatcaaaaaatttgatattaaatctatcgaagatcccttgcatgaggatgattgggatggatggataaaattaacaaaggaattaaatggagtacaaatagtcggggatgatatatttgtaactcagagagagttattaaaaaagggaatagactcacacgctgggaatgcaatacttataaagcccaatcaagtaggaacacttactgaaagtttggaaagtattcagcttgcaaaagaaaatgaatttaacactattatttcacataggtctggagaaacagaagatccttttatagctgaccttgctgttggagtgaacgcaaagcaaataaagacgggtgcaccatcaagatcagatagaaactcaaaatacaatagactactaattattgaaaatgagctctacccaaaaaaatag

SEQ ID NO: 279927 - DNA, 691 bp, Unknown
  Bacterial polypeptide expressing nucleotide sequence isolated from the Sargasso Sea
ttgcaggaaaataatttttcaacttctgtgggggatgaggggggctttgctccagatatctctgatactaaaaaggctttagattttatctgttcagcagttgaaaagtcaggctataaaatgggagaagaaatttttattgccatggactgtgctgcgtctgagatatttattaatggagaatatctttttgaaggcaaaaatcatgataattcaggcttaattcaaatttatgaagaacttatcaaaaggtatcctattaaatcaatagaagatcctttagatgaagatgattgggatggatggaaagctattactaagcaaataggagatgaagtgtctattgtgggtgatgatttattcgttaccaataaaaaaatattagaaaagggaataaacaatggctcagctaattcaattctaattaaagtgaatcagatcggaacagtgagcgaaaccttagagacaattagcttggcaaatcaaaataatattaatactgttatatctcacaggtccggagaaacagaagatacatttatttcagatttagcggttggaataggggcagggcaaataaaaacaggggcaccttctagatctgatagaactgcaaaatacaacagacttttaatgattagcagcgataataatttttcttttgaaggaatgaatgggatcaaacaatgat

SEQ ID NO: 279928 - DNA, 499 bp, Unknown
  Bacterial polypeptide expressing nucleotide sequence isolated from the Sargasso Sea
atgcccaaaattgaaaatctaacttccattcaagttctggattcaagaggacttcccacaatttctacggaaatactgttagatgatggaactagatcagttgcaatggtccctagtggcgcttcaactggagaaaaagaagctcttgagttaagagatggaggtcaagcattccatggcaaaggcgtaacaaaagccatagataatgttaatgatcgcattaagaattctcttataggacagaacccacttgaccaaggccatatcgatcagatcttaaacaacttagatgacacaagtgacaaatctaatcttggagctaatgcaattctttctgtatcgatagcttctgcaaaagcatcatctaaatcagagaatttagagttacataattattttaacattttgcttggaaataaaatgggcaaaacaattgatcaagttattccaatacctatgttaaatattcttaacggtggcgagcatgccgataacaata

SEQ ID NO: 279929 - DNA, 607 bp, Unknown
  Bacterial polypeptide expressing nucleotide sequence isolated from the Sargasso Sea
attgtctgcaattactgacattattggaagagaaatattagatagtagaggtaagccaactattgaagtagatgttatactagagtctggtgcatctggtagagcatctgttccatccggagcatcaactggagcatatgaagcaagtgaaaaaagagataatcaaaatcggtttggaggaatgggtgtaaggcaagctgttgattcagtaaataatgagatttttgatgttttatctggccttgaatcactagaacaaaaattaattgataatactatgatagaaatagatggaactaaaaataaaagtaaccttggagctaactctattttaggtgtttctcttgcagttgctaaagcaagtgcaactgagcttggtttgcctttgtataggtatattggtggtcctatggtaaactcacttccaatacctatgatgaatattttaaatggtggtgctcatgctgataatccaatagatattcaagaatttatgatcattccaaaatcagcaaattcatttattgatactcttaatatggggtataacgttatacaatcattaaaaaataacctaattaagttaggacttaatactaatatagga

SEQ ID NO: 279930 - DNA, 835 bp, Unknown
  Bacterial polypeptide expressing nucleotide sequence isolated from the Sargasso Sea
aatattagccgtatccatggctgtaaaaaaattatcagcaaaagttaaaaaaatacctttatttaaaaattttattgttaaaaaaaattttaaactcccctttcctttaatgaatattattaatgggggagcacatgctgataatggccttagaatacaagagtttatgattagacctgataaagcaaaatcatttaatgatgctgtaagaatgtgttttttagtaataaacaatttgaaagtattattaaaaaaagcaggtcactctattaatgtaggtgatgaaggtggctttgcgccaatgattagcaataatgagagtgctttaaagcttatagttcaagcaatcaaaaaatcaggatttaaaaatggtaaagatatatctatatgtttagatgttgcagcaaatgaattaattaaaaaaggcaaatattcaattcattctaaaaattacataagtgttgatcaatcaattaataaatatttacaacttattaaaaaatatcaaattaaatcaattgaggacccatttggtgaagatgattggaaggcatggtcaaaatttgtaaatgaaacaaaaaacaaaacacaaataattggggatgatctttttgtaactaatcttgaaagattaaaaataggctttctaaacttatctgcaaatagtattttaataaaattgaaccaaataggaactgtaaccgaaacgttagaagtaataaaatttgctcaacttattggttttaaaactatcatctcccatagatctggtgatactgaagacacatttattgctgatttagcagtagggaccaatttcaatcaaatcaaaact

SEQ ID NO: 279931 - DNA, 327 bp, Unknown
  Bacterial polypeptide expressing nucleotide sequence isolated from the Sargasso Sea
tttgggtgtatcaatggctgcctcaagagcaggcgcaaaaactaataatattccattatacgaatatttatccattgacagcgattatgtcaggcctataccaatgatgaatattttaaatggtggcagtcatgctgaaaatacggttgatatccaagaatttatgaaagtccctatgggtgcaaattctttttctaatgcactacgagttggaacagaaattttccatcagttgaaatctgagttattacaaaaaagcttgagtacagcagttggcgatgaaggaggatttgctccgaatctaagttcaacgaaacagcaattgaa

SEQ ID NO: 279932 - DNA, 832 bp, Unknown
  Bacterial polypeptide expressing nucleotide sequence isolated from the Sargasso Sea
aaaattttaaaagtaaaggcccgtcaagtatttgacagtagaggtaatccaactgtagaggctgaggtttatacaaaaaataatagtgtaactgctatttgtccgtcaggagcatcaacgggaacttatgaagcttttgagaagagagataaaaataacaaacgttatctaggcaagagtgttttaaatgctgttaatttggttaacaataaaatttcaaaaaaattaaagggtcagagtattcataaccaagaacggattgatactctattaataaacttagatggcacaagacaaaaaactaatttaggtgcaaatgcaatgcttgcagtttcaatggctgtaaaaaaactttcagctaaagaaaaaaaattacctttgtataaaactttttttataaagaaaaatttccaattaccttatcccttgatgaacattattaatggcggagctcacgctaataatggtcttagaattcaagaatttatgatcagacctgaccgtgccaagagtttttctgaggcaatgagaatatgctttatagtgattaaaaatttatcaaatttaataaaagacaaaggtttatccacttctgttggagacgaaggtggctttgcacccatgatcagtagtaacaaccaggctcttgatttaattgtgacagcgataaaaaaatcaggatttatcaatggcagagatgtttcaatatgtttggatgtagctgcaaatgaattatttaaaaaaaataaatattcaattcattctaaaacttacatatctgtcgaaaaatctatcaaagaatatcaaaaaattattaaaaaatataaaatca

SEQ ID NO: 279933 - DNA, 939 bp, Unknown
  Bacterial polypeptide expressing nucleotide sequence isolated from the Sargasso Sea
gcatgcgaaataagtcttgataacgggatatgtgcatcggcaatggttccaagtggagcatcgacaggttcgaaggaggcactagagctcagagacagtgattcaaattatcatggaaaaggagttcttaatgctatttcaaatattaataataaattaggtcctttattaattggaaaagaatcagaaaatcaaattgatattgacagaatattaattgattatgatggtacagacgataaatcatcaatgggtgcaaacgcgatattagctatatccctagcaagctctcatgttgcagctaaaaataaaaaagttaacctatatgagcatttttcaagcatctacaaagatataacaggtaaagcaaataaatactcaataccgatgccaatgtttaatattttgaacggtggagagcatgctgataataatgttgatattcaagaattcatgatcgtaccgagtggtgctaaggattttactcagataatgaaatggtcaatggaaatttatcataatttaaaagaaattttattaactaaaaattattccacagcattaggtgatgagggtggatttgcaccaaatctaaattcaaatgaagaagcaatagaattaataattgaatcaattaaagcatcaaaacttaatccaggagaagatgtgaatattgctcttgattgcgctgcaagtgagttttttgatggtaataattattttttaaaaggtgaaaataaaaaatatacatctgctgaatttacaaattatcttgataacctaactacacaatacccaatttcatctattgaggacgcaatggatgaaaacgataaagagggttggaagctagttactgataaactgggaaaaaaatgtcagctcgtcggaaatgatttatttgtaactaataaaaaaatttttttagagggcatcaag

SEQ ID NO: 279934 - DNA, 729 bp, Unknown
  Bacterial polypeptide expressing nucleotide sequence isolated from the Sargasso Sea
ttcaagaatttatgataaggccagacggcgctaaaagttttaaagaatgtatgcacatggccttccttgttattaaaaagttaaaaaaatttctagaagataaaaatatatctactagcgtaggggatgaaggtgggtttgcaccttcattagcttctgatgaagaggcaattgaggttctaatgagcgcaataacacaagccggctttaagcccggtaaagacatatcaatttgtttagacgttgctgcaaatgaattgaaagtaccaaaaagtgtagaatatttcttagatcttacaaaaaaatatcccataaaatcaatcgaagatcccttttcagaagatgactggaataattggaaaactataacacaaaaaattgactctcaaattgttggtgatgacttatttgtgactaacgcaaagagacttgaaaagggtatcaaggagaaatcagctaattctattttaattaagccaaatcaaataggcactataagcgaaacactcgatactattaggttggcccaaaaacataattttaagacaataatttctcatagatctggcgactcagaagacacttttatatctgatttagctgttgcgacaaattcttctcaaataaaaacaggctcattggccagatctgagagagtagctaagtataataggcttctaagaatcgaagagtcgcttggaaaacagtcaaaaatggctaaaatttaga

SEQ ID NO: 279935 - DNA, 808 bp, Unknown
  Bacterial polypeptide expressing nucleotide sequence isolated from the Sargasso Sea
atgtctaaaatttccaaagttattgcaagacaagtttttgatagtagaggaaatccaactatagaaacagaagtatttgttaaagatattagtgcatcagcaatttgtccttctggagcatcaaccggaacttacgaagcttttgaaaaaagagatattaataataaaaaatatcttggaaaaagtgttttaaaacctgttgaatttataaataaagtaatatcaaagaagttaaaaaattttaatattcatcaacaagaaaagatagataatttattaataaggcttgatggaacaaagcaaaaaaaaaaagttggagctaatacaattctttcagtttcaatagctgtcaaaaaattatcatctaaaattaaaaaaattccaatttataaaaatttattaattaataacaattttaaattaccttatcccttaatgaatataattaatggaggtgcacatgccaataatggccttagaattcaagagtttatgataagaccagataaagctaaatcattttctgatggtgttagaatgtgttttattgttattaataagttaagagacttaatcaagaaaatgggtcattccacttctgttggagatgaaggtggttttgcaccaatgataagtaataatgaagacgcgttaaaacttatagttaaagccataaaattatctggttttaaaaatggaaaagatatagttatttgtttggacgttgcagccaatgagttgattaaaaataaaaaatactcaattcactctaaaaaatataccagtgttgataaatctataaaaaatt

SEQ ID NO: 279936 - DNA, 661 bp, Unknown
  Bacterial polypeptide expressing nucleotide sequence isolated from the Sargasso Sea
atttgcaccaaatctcaaatctaatgaagaagcaattgaattgattttagaagcaattaaccaatcaccttttagtatagaaaaagatttgtttattgctttagacgttgccgcaagtgaattatttgagaataataaatatcatttaaaatcagatgattctcattttactactgaagaaatggtgcgttatttgaaatcattagttgaccagtatccaataatttctattgaagatggcttagatgaaaatgattggcaaggatggcgattactaactaaagaaatcggaggtgaatgtcagattgttggagatgatttaactgttacaaatattactagacttaagaaagctattgaaaataaagcaatgaatgctatacttattaaattaaaccaaataggcactattacagagacaatttcaacaatagagttagctaaaaaacatgatttttctactattatttcacatagatcaggagaaactgaagatgtaactatagctgattttgccgtagcaatgggatcaggacaaattaaaacagggtctacatgtcgtactgatagagtagcaaagtataatcaattacttcgaattgaagaaagtcttggagctaaagcaaaattcccaggtattgaagttttaggtaataaataa

SEQ ID NO: 279937 - DNA, 724 bp, Unknown
  Bacterial polypeptide expressing nucleotide sequence isolated from the Sargasso Sea
ttgaattcttctattgaaaaaatatttgctagagaaattttagattctcgaggtaaccccactgttgaagttgatgtaatgacaagcgatggattaatgggacgtgctgcagtgccctctggggcatcaacggggattcatgaagcccttgaattaagagatggggacaaaaacagatacctagggaaaggggtaaggactgccgttaataatataaataacattattgcaccctccttaaaaggctgtgaagctactgagcaatcagagaacgatagtcagcttttagcgctagatggaacagaaaataaatcaaatctaggtgcaaatgcaattctaggagtttcaatggcgattgcacacgcaggtgcaaaaattgaaaagaaatctctttatcaatacctaggaaagaacaacgcacatatacttccaatgccaatgatgaatattttaaatggcgggagccatgccgataacctagttgatattcaagagtttatgataatgccttttggtgcaaaaagattctcagaagcattgcaaatggggacggaagtatttcaccatttaaaatcagtattaaaatcaaagacattatcaactgcagtaggggatgaaggtggattcgcaccaaatctaaagtctaacgaagaagctatagaaataatacttgaatcggtattgcaagcacgggttaaaaccgggttcagatatatatttgaca

SEQ ID NO: 279938 - DNA, 745 bp, Unknown
  Bacterial polypeptide expressing nucleotide sequence isolated from the Sargasso Sea
ctgcgcatgggcgccgagatcttccatcacctcaaagccgtgctcaaggcccgcggcctgaacactgccgtcggtgacgaaggtggtttcgcgccgaacctggcttccaacgaagatgccctggctgccatcgctgaagccgttgccaacgccggctacaagctgggtgacgacgtgaccctggcgctggactgcgcatcgagcgagttctacaaggatggtcaatacgacctggccggcgaaggcaaggtattcagcggtgaaggctttgccgactacctggctggtctgaccgagcgttacccgatcatctccatcgaagacggcatggacgagtccgactgggccagctggaaagtcctgaccgacaagattggcgccaaggtacagctggttggcgacgacctgttcgtcaccaataccaagatcctcaagcgcggtatcgacgagcagatcggtaactcgatcctgatcaagttcaaccagatcggttcgctgaccgagaccctggaagccatccagatggccaaggccgctggcttcaccgccgtgatctcgcaccgtagcggcgaaaccgaagacagcaccatcgccgacctggccgtggggactgccgccggtcagatcaagaccggttcgctgtgccgttccgaccgcgtttccaagtacaaccagctgctgcgcattgaagagcaactgggcggcaaagctccatacaagggtcgcgccgagttccgcggctaac

SEQ ID NO: 279939 - DNA, 628 bp, Unknown
  Bacterial polypeptide expressing nucleotide sequence isolated from the Sargasso Sea
aatggttgataataccaatgttggtgacgaaggtggttttgctccaaatttgcaaaatactgaagaggcaattaaattgataattaaagcaatagagaaatctggttttaaaccaggagaagatatttctatttgtttggatgttgccgcaaatgagttaaaaaaacaaattacacacaataaatatgcagagttaattaaaaagtatccaatcaaatcaattgaagatcctttcaaagaagatgattgggactcatggaaaagattaacaaatgacactaatattcagatagttggcgatgatttgtttgctacaaatctggaaagactaaaaagaggtatcaaagaaaaatctgctaatgctgttctagtaaagctcaatcaaattggtacagtaagtgaaactttggatgtcattgaattagctcataaaaatggttttaaaacaatcgtctcccatagatctggcgactcagaggatacgtttatagctgatttagctgttgcgacaaattcttctcaaataaaaacaggatcgttagctagatctgaaagggtatctaaatacaatcgacttctcagaattgaagaggaacttggaaattctgccaaaatggctaaaatctag

SEQ ID NO: 279940 - DNA, 208 bp, Unknown
  Bacterial polypeptide expressing nucleotide sequence isolated from the Sargasso Sea
attgaaatgtgcgcaaaggcaggatggaattacgtcatctctcatcgtagtggagaaaccgaggataccttcatggccgactttgccgttgccatgggcggaggacagatcaaaaccgggtccgcttgtcgaagtgaaaggatcgccaaatacaatcgccttcttgaaatcgaagctgaattaggcggacttgcgatatatggttgat

SEQ ID NO: 279941 - DNA, 541 bp, Unknown
  Bacterial polypeptide expressing nucleotide sequence isolated from the Sargasso Sea
atttaaggataatttttatcgattaaatggagagaataaaaaattaaatacagatcagttgattattttttgggaaaatatttgtaaaaaatttcctattatatctattgaagatccctttgatgaaaatgattggaatggatttaaagaattgtctaagtctattggaaacaaagttcaaattgttggagatgatttatttgttactaataaagaacgattatctaaaggaataaagtctagatctgcaaattcaattttaattaagctaaatcaaattggtactttgtctgaaactattgataccattgaattagcaaaaaactcaaaatttggcgttgttgtttctcatagatctggagaaaccgaagatgtttttatttccgatcttgcggttgcattaaatgctggtcaaattaaaactggttcattgtctaggagtgatagaacagcaaaatataaccaacttattagaattgaagagaatttaggggatgacagcatttactttggaagagatttttttaataattttaattaa

SEQ ID NO: 279942 - DNA, 532 bp, Unknown
  Bacterial polypeptide expressing nucleotide sequence isolated from the Sargasso Sea
gttgctgctaacgaattaattaaaaaaagtaaatattctattcactctaaaaaatttattagtgtaaacgaaagtattaaaaaatatttaaaattagttcataaatacaaaattaagtctatagaggatcctttttccgaaaatgactggaaagcatggcatgaacttatgaaatctgtaaaaaaagttcaaatagtaggtgatgatttgtatgttacgaatttagaaagattaaaaattggatttttaaataattcttctaattcagtattaatcaaattaaatcaaataggcacagtttctgaaacattggaagttataaaatttgctcaaatcattgggtataaaacaattatttctcatagatctggtgatagtgaagatacatttattgctgatttagctgtaggaactaattctaatcaaattaaaactgggtcactagcaagatcagaaagagtagctaaatataatcaattgttaagaattgaagaaaatcttggaactaaagcaaaaatgcataaaatctaag

SEQ ID NO: 279943 - DNA, 442 bp, Unknown
  Bacterial polypeptide expressing nucleotide sequence isolated from the Sargasso Sea
gtatccgattgtttctgttgaggatggtttagatgagaatgactgggacggttggactactatgaataaaatattaggttcaaaaattcaaattgttggggacgatttaactgtaacaaattctcaaaaactacaaaaagcaattgataatcaatcaatgaatgcaatattgattaaactaaaccaaattggcactgtttcagaaacgattaaagctattaagcttgctaagtcaaatggtatgaattatatcatctcgcacagatcgggtgagactgaagatacctttatatctgatttatcagttgcaatgggtggggggcaaattaagactgggtctgtatgtcgatctgacagaacagcaaaatacaatcgcctactcagaattgaagaacaaattaaaaacgtaagattgaaagataatttaaattttattaaatga

SEQ ID NO: 279944 - DNA, 460 bp, Unknown
  Bacterial polypeptide expressing nucleotide sequence isolated from the Sargasso Sea
ttatgtgataactatccaataataagtattgaagatggtatgtcagagaatgattggaatggatggtctgaaattaccgaaagattgggaaacaggatccagcttgttggggatgatatatttgtaactaacaagaatattcttcaaaagggcatagattctattgctgctaattcgatattaattaaattaaatcaaatcggaacgttaacagaaacactccagactattgatttagctaaaaaaaaccattacacgtgtgttatttctcatagatccggcgagacagaagatacaactatagcagatctgtcagtcggtgtagatgcaggacaaataaaaaccggctcattgtctcgatcagatagagtagcaaaatataatcgactgctcagaatcgaagaagaattaggaaataataaatatagcaacaatgttttcaatcggtggttatcttgaa

SEQ ID NO: 279945 - DNA, 659 bp, Unknown
  Bacterial polypeptide expressing nucleotide sequence isolated from the Sargasso Sea
gatgtccgaaattgagtcaattttcgcaagagaagtaatcgattcacgaggtaatcctacaattgaagccgatgttattttgaaagacggctctcaggggtctgcttgtgctccttcaggagcctcgacaggttcaagagaagctttagagctaagggataaagacccgggtcgctacggtggaaagggggttttgactgcggttaataatgttaatttaaatataagaaatgctttggttggcgggtctgttattgagcaagctgtgttagatcaacgaatgttagatcttgacggaacagataataagtcaaatctaggtgcgaacgctattcttgccgtatcacttgcaattagtaaggcagccgcgaaccatcttgggatacccttatattctcacatatctaatttgagtggtaatgagagaactctcactcttccagtgccaatgatgaatattattaatggaggtgagcatgcagacaataatattgatattcaagagtttatgattcaaccgacaggagcttcctcgtttacggaagctttgcgctacggagcggaagtatttcatgcattaagaagcgtattaaagaaagatggatttagtactgcagttggggacgagggtggttttgccccagatttgccttctaatt

SEQ ID NO: 279946 - DNA, 846 bp, Unknown
  Bacterial polypeptide expressing nucleotide sequence isolated from the Sargasso Sea
tggagtttcatggcaattgcgcatgctgggtgcaaaagtaaaaaatcaacccctatatagctatttaggtaaggacaatgaccatatactacctgtgcctatgatgaatattttaaatggcggaagccatgcagataatctagtagatattcaagaatttatgattatgccctttggagctgattctttctctgaggctttacagatggggaccgaaatatttcatcatttaaaatcagtattaaaatcaaaagaaatgacaaccgccgtcggagatgaaggtggtttcgctccagatctcaagtctaatgaagaggcgatagatgtaattcttgaatctatatctaaagcagggctgagcacggggaaagatataatgttggcgctagatgttgcagcgagtgaattatttgaaaataatatttataatctgtattctgaaaataaaaagctagaatcaacagagatggtgaactacctaaatgatcttgtaaaaaaatatccgattatttctatagaggatggactccatgaagatgattgggaaggatggaaacaacttacaaaggcactaggacagcaagttcaaattgttggggacgacctaacagttacaaatatctcaagattgaaacatgctattgaagagcatagcataaatgctattttaattaaactaaaccaaatcgggacagttacggagactatccaagctatagaaatggcaaaaaaagcaaatctaggagcgattatttctcaccgttctggagaaaccgaagatacgacaatagctgatttagctgttggaatggggatggggcagataaagacaggctctatatcaag

SEQ ID NO: 279947 - DNA, 565 bp, Unknown
  Bacterial polypeptide expressing nucleotide sequence isolated from the Sargasso Sea
atggcaaaaattaaaaagattcttgctagacaaatttttgattccagaggaaatccaacggttgaggtagatgtaattactaatgataacaatttaggaagggcagctgttccctcaggagcatcaactggggaaaatgaagctgttgagctcagagatggtggagatgcttacatgggaaaaggtgttttaatggccgtcaataatgttaatacagttattgcagatcatcttattggtaaatctgtttttaatcaggaagaaatagataattcaatgattgagctagatggaactgaaaataaatgtattctgggagcaaatgcaattttaggtgtatctcttgccgtatcacaagcagctgcaaaatgtaagggtattccactttataaatacattggtggtgaattagctgttacgttgccagtaccaatgatgaatattattaatggaggatcacactctgatgctcccattgcatttcaggagtttatgatcgtaccttttaatgcaaaaaattttagtgaagcaatgaaagtggaacagagatttttcatcattgaaa

SEQ ID NO: 279948 - DNA, 910 bp, Unknown
  Bacterial polypeptide expressing nucleotide sequence isolated from the Sargasso Sea
aaaaataaaagcaaacttggcgccaatgcaatacttgctgtctcaatggcaaatatggttgcatatgcaaaatcatccaaaaaatatgtttatgaacttattcctaatatttatggatctccctctttgcctgtgccttttatgaatattttaaatggtggtgcacatgctgataactctgttgatattcaagagtttatgattgttcctcatggctttacaagatttgatgatggtttaaaggcaggtgttgaggtctatcacactttaaagaaaagactgaaagacaaaggattaggaacaaatgtaggagatgaaggtggttttgctccaaactttaaatcatcaaaagaagttttagatgaaataatgctctcaattgaagaagctggctacaaaccttctgaccaaatttcattagcattagatgctgctgcatctgagttctataaagatggtgtatacatgattgatggcaacagtttgaccaatacagagatgtctgattatttaatagatcttactggctcttatccaatagtttctattgaagatgggctcgcagaagatgattgggaaggttggaaatacttaacttctaaaataaacaactctacacaacttgttggtgacgatttatttgttacgcaggaagacgtacttcaaaaaggtattgatgaaaattgtggaaatgcaatcttaattaaagtaaaccaagttggaacaattaacgaaacttttaataccatggagctagcaagtagtcatgcatactcaagcatggtttcccataggtctggagaaacagaggattcgtttattagtcatctagttgttggaacgtctagtggtcagattaagactggtgcgccagctcgatcagagcgaacagtaaaatataatgagcttt

SEQ ID NO: 279949 - DNA, 577 bp, Unknown
  Bacterial polypeptide expressing nucleotide sequence isolated from the Sargasso Sea
tggcacacatgaagcatatgaattaagggataaagaaaacaaagattacttaggcaaaagtgtttttaaagctattgaaaatgttaatggccctattttcaaatctttaaaaaatattgatacaaaagatcaatcaaaaatagataaaattttaaaagatttagatggaacagaacaaaagaaaaaacttggtgcaaatgcaattctagcagtatcaatagcagcaattaaaaatgcagcattagaaagaaaagtttcactgtttaaacatattggtggaaattctgtgagtaaacttccaataccaatgatgaatataatcaatggaggtgctcatgcaaataattctttagaaattcaagaatttatgattagaccagacggagctaatagttttaaagagtgcatgagaatgtcatatttagttattcaaaaattaaaaaaaaatttagaaaaaattaatatttcaacaagtgtgggtgatgaagggggatttgcaccatctcttaaatcagacgaggaagctatagaattcataataaaatcaatagagaacgcaggatttaaccctggaaga

SEQ ID NO: 279950 - DNA, 696 bp, Unknown
  Bacterial polypeptide expressing nucleotide sequence isolated from the Sargasso Sea
ttaaaaaaaatattaaaaataaaggattatctacctcagtaggtgacgagggtggttttgcaccgatgataagtaacaattatcaggcattggaactgatagtatctgctataaaaaaatctggatttgtaaacggtaaagatgtttcgatttgtttagatattgcagcgaatgaactttataaaaaaaacaaatattcaattcattcaagaaaatatatttcagtcaaaaaatctattctcgaatataaaaagataattaagaaatataagattaaatcaatagaagatccttttgccgaaaatgattggacatcatggggaaaattaatgaaatctaccaaaagaattcaaatcgtaggtgatgacctatatgtaactaatctcgaaagattaaaaaagggctttttgtatttatcctcaaatgcaattttgataaaacttaatcaaattggaactgtctcagaaaccattgatgtcataaagtttgctcaaattattggatttaaaactattatttctcatagatcaggagatactgaggatacatttattgctgatttagcggtaggaacaaattcaaatcaaattaaaactggatctttagcaagatctgaaagagtagctaaatataatcaattattacgtatagaagaagcacttggaaaaaaagctagaatgaataagattcattaat

SEQ ID NO: 279951 - DNA, 802 bp, Unknown
  Bacterial polypeptide expressing nucleotide sequence isolated from the Sargasso Sea
gaaaaaattgataaaattttagtagagttagatggcagtgaaaataagaataacctaggtgcaaatgcaacattagcagtttcattagcctatgcaaagtgtacagcgattgtgaataaacaatcattatataaaagtttaggtaaatcttattctattccaattccattgatgaatattattaacggaggcgcacatgctgataatgatctaaacattcaagaatttatgattaggcccgattctgcgaataattttacagatgcaatagaaaaatgctttcttgtaatacaaaatttaaaaaaattattacaatctaaaaagatgttaacgaatgttggagatgaaggtggatttgctccatcaatcaattcaaatgaagaggctttagacctaatagttcaagctattgaaaaatcaaaactaaaaccaggtaatgacgttgtaatttgtttggatgtagctgcaaatgaacttatgaatgaaaaaggcgaatattcagttcaatcatctaattttctgtctgtagatgatgttgttaaatattacaaaaaattaacatccaactacccgatcaaatctattgaggatccattttcagaggaagattggcagtcatggaaaaaaattacttctgccgtagggaataatgtccaaatagttggagatgatttatttgtcacgaattctaaaagattagaaaaaggtattaaagaaaaatctgctaatagtattttagtaaaacctaatcaaattggaactttgactgaaactctagaagtaatttcaatggcaaaaaaag

SEQ ID NO: 279952 - DNA, 775 bp, Unknown
  Bacterial polypeptide expressing nucleotide sequence isolated from the Sargasso Sea
attccggtcggcgctgaaacattttctgaagcattaaggtgggggtctgaaattttccaagaattaaaaaaaattctttctgataatggttattcaacctcagtaggtgatgaaggtggtttttctcctgagattaaagatgtatatgatgctctttctcttttatctaaggcaattaaaaatgcaagcagaaaccttgaagatgaagttaaacttgcaattgatgctgcttcttcagagtttttcaagaatggaaattatataattgatagtggcgataaaaaattagacacttcggaaatgataaagtactgggaaacgttagtaaatgattacccaattatttctattgaagaccctttagatgagaatgattatgaaggctatggtcaaataacagatttattaggaaaaagaatacaaattgttggggatgatttatttgcaacaaattctcaaagacttaaaaaaggtatagataatggagctgcaaactcaatattaattaaacttaatcaaattggaactcttacagaaacaattgatacaattaatttagctaaaaataataattacggaacaatcatttcacatagatcaggtgaaacagaggatacatttattgcagatctttctgtagcattgtgttcaggtcagattaaaacgggatcgttatctaggtctgaaagactttgtaaatataatcaacttcttagaattgaacaggatcttggtagcaaagcaatatttaatggatcaaatattttaaaataaa

SEQ ID NO: 279953 - DNA, 778 bp, Unknown
  Bacterial polypeptide expressing nucleotide sequence isolated from the Sargasso Sea
tatgcttgcagtttcacttgctgctgcacgtgctgcagctaaatttcacaatgtcccattatttagttatatcgggggtattaacaatagtctacctacaccaatgatgaatatagttaatggtggttgtcatgcgaataataatttagattttcaagaatttatgattatcccatgtggttttgaaacatttagggaagctttaagagctggatgtgagatttttaattccttaaaaaaattactaactaaaaataattattcagtttctgttggagatgagggtgggtttgcaccagattttaattctaacaaagagtgtttagattacattattaatgcaatagaaatatcaggttacaaaccgggcgacgatgtttttattgcattagatgtagcctcatcagaattttttgaaaaaaaaaaatatattcttaagggtgagtctaaatcacttattacaagtcaattaattgagtattatcaagaattaataagtaaatatccgataatatcaattgaggacgctttgcatgaggatgattggaatggttgggctgaattatcaaaaaaaattggaaataagtgtcagttggttggtgatgacttatttgttacttctgttgaaagattaaagaaaggtattaacaattcttgcgcaaactcaattcttataaaattaaatcagattggaacactttctgagacaatagatacagttactttggccaaaaaaaataatttttcaacaatcatttctcatcgttcaggtgaaact

SEQ ID NO: 279954 - DNA, 196 bp, Unknown
  Bacterial polypeptide expressing nucleotide sequence isolated from the Sargasso Sea
tggatatcaaacaattatttctcatagatcgggagattctgaggacacatttatttctgatttagcagtaggaacaaattcttcccaaataaaaacaggctctttatgtagatcagaaagagttgcaaaatacaatcaattgttaagaatagaaaatgatttgtctaataaaaataatatggcgagattaaaatga

SEQ ID NO: 279955 - DNA, 739 bp, Unknown
  Bacterial polypeptide expressing nucleotide sequence isolated from the Sargasso Sea
atgaatataattactagagtgaaggctagacaggtatttgatagcagaggcaatccaacaatcgaagctgaagtattctgtaaagaaaaaagttcaaaggcgatttgtccatctggagcttccacaggaagttttgaagctcatgaaaaaagagacaaaaaaaataaaaaatatcttggaaaaagtgtttttggccctattaaattaataaattcaaaaatatcaaaaaaattatcaaataaaaatgttcataatcaagaacttattgactcaattttaatcaacttagacggtacaaaacataaaactaaaattggagcaaatgctattttagctgtatcgatggctgttaaaaagctctcttcaaaaattaaaaaggttcctctatataaaaattttttagttaaaaaaaattttttactcccatatccaatgatgaacataattaatggtggagcgcacgctaataataaacttagaatacaagagttcatgatccggcctgatggggctaaaaatttctcagaagcagttagaatgtgttttttggtaatacagtgtcttaaaaagattatttctaaaagaggaatgtcaatttctgttggagatgagggtgggtttgctcccatgatatcaagtaacgaggaagcattaaaacttattgtaaaatcaatagaaaaagcaggttttaaaaatggtaaacatatttctatttgtttagatgttgctgcaaatgaac

SEQ ID NO: 279956 - DNA, 185 bp, Unknown
  Bacterial polypeptide expressing nucleotide sequence isolated from the Sargasso Sea
atcaggtgaaactgaagatacaattatttctgactttgcagtatcaatgggctcaggccaaattaaaactggctctctttcaaggacagatagggtggcaaaatacaaccaactcttaaggattgaagaagaattgggttccagttcaatttttccttcatatgatatgctaggtcttaaatgaa

SEQ ID NO: 279957 - DNA, 274 bp, Unknown
  Bacterial polypeptide expressing nucleotide sequence isolated from the Sargasso Sea
agcagccaatgcggtactgatcaagcttaatcaaattggaactgtctcagaaactttggctacaattcagctttgccaaaaatcaggatggaattacattatttcacatcgtagcggggaaactgaagacacttttttggccgatttcgcagttgcaatggcaggcgggcagatcaaaactggctcagcttcacgtagcgaacgtattgctaaatataaccgattgctggaaattgaaagcgaactgggtaagtcagccatatttgaaagttga

SEQ ID NO: 279958 - DNA, 505 bp, Unknown
  Bacterial polypeptide expressing nucleotide sequence isolated from the Sargasso Sea
aaatatgctgttaattcagccaaatttatatctgcagagaaaactatagaatactatctagatttgattaggaaatatcccattaaatccatagaagatccgttttttgaagatgattgggattcttggttaaattttacaaaagaaatcaataaagacatccaagtggttggtgatgatttatttgtaacaaataaagaacgtttaaaaaaaggtattaatttaaaggcagcgaacacaatattaataaaacctaatcaaataggaactttgacagaaacattagatgtaattaatttagctcaaaaaaataattacaaaactattatttctcacagatcaggagattcagaagatacatttatagctgatttggcagtagctacaaattcatcgcagataaaaacaggatctttggctagatctgaaagagtggctaaatataaccgtttattgcgaatagaagaggagcttggaaattcggcaaaaatggctaaagtttaaa

SEQ ID NO: 279959 - DNA, 827 bp, Unknown
  Bacterial polypeptide expressing nucleotide sequence isolated from the Sargasso Sea
aaaaaatatttctatatttaaatatttaggaaattctaaaaatttccaattacctgtacctcttttaaatattatcaatggaggtgtgcacgcaagaaacaatcttgatatacaagagtttatgatacgtccagataaagcaaaatcattttctgaagcaattagaatgagttttttagtaattcaaaacttaaagttaatgcttgataacactaatgttggagatgagggtggatttgctcccaatctacaaaacaacgaagaggctattaaattaataataaaagcaattgaaaaatcgggttttaaagcaggagaagatatatcaatttgtttagatgtagcagcaaatgaattagataaacaaaaaacaatagagtactattctgaattaaccaaaaagtatccaattaagtctatagaagacccatttaacgaagatgattgggagtcttggaaaaaattgacaattaatacaaaaattcaaattgttggagatgatttgtttgcgactaatataaaaagactagaaaaaggtatcaaagaaaaatcagctaacgcaatactaatcaaattaaatcaaatcggaacagttaccgaaactttaaacgttataaatcacgctcataaaaatggctttaaaactattatttcgcatagatctggagattcagaagatacttttatagctgatttggcagtagctacaaattcaacacaaattaaagcaggctctctagctagatctgaaagagtggcaaaatataaccgtttattgaggatagaagatgaacttggaaattctgcaaaaatagctaaagtttaaa

SEQ ID NO: 279960 - DNA, 415 bp, Unknown
  Bacterial polypeptide expressing nucleotide sequence isolated from the Sargasso Sea
tttgaattcttctattgaaaaaatatttgctagagaaattttagattctcgaggtaaccccactgttgaagttgatgtcatgacaggcgatggattaatgggacgtgctgcagtaccctctggcgcatcaacagggattcatgaagcccttgaattaagagatggaaataaaaacagatatctagggaaaggggtaaggactgccgttaataatataaacaccattattgcaccttccttaaaaggctgtgaagctactaagcaatcagaaaacgatggtcagctcttagcgctagacggaacagaaaacaaatcgaatctaggcgcaaatgcaattttaggagtctcaatggcaattgcacacgcaggtgcaaaaattgaaaagaaatctctttatcagtacctaggaaaggac

SEQ ID NO: 279961 - DNA, 835 bp, Unknown
  Bacterial polypeptide expressing nucleotide sequence isolated from the Sargasso Sea
gtcatagccagacaagtttatgacagcagaggaaaccccacaatagaggcagaagtttttgctaataatatgaaagcaagagctatttgtccttcgggtgcctcaacagggtcacatgaagcttttgaaaaaagagatattttaaataaaaaatatttaggaaaaagtgttttaaaagctgtaagacttataaacacaaaaatctcaaaaaagttaaaaaatcaaaatatacataaccaagagaaaattgattttattttaattaagctagatggaaccaaacagaagaaaaaatttggtgcaaattctattttagcagtttcaatggctgttaaaaaattgtcagcaagaataaaaaaaatacctctttataaaacatttttaactaaaaaaaattataaattaccttatcctttaatgaatgttattaatggtggtgctcacgcaaataatgaccttagaatacaagaatttatgattagacccgacaaagcaaaatcatttactgaagctataagaatgtgttttttagtaattaataacttaagaaaaataattaaacagagaggcgagtccacctccgttggagatgaaggtggatttgcaccaatgatcagtaagaatgaagaagcattaaaattaatagttaaatcaattgaaaaatctggattcaaaaatggaaaagatatttcaatatgcttagatgttgcggctaatgaactttttaaaaaaaaaaaatattctattcattcaaaaaaatttgtttcagtccaaaaatcaataaatcaatataaaaagataattaataaatttaaaattaaatctatcgaagatc

SEQ ID NO: 279962 - DNA, 673 bp, Unknown
  Bacterial polypeptide expressing nucleotide sequence isolated from the Sargasso Sea
acagggactcacgaagcttttgagttacgagatattgaaaataaaaaatatttaggaaaaagcgttttaaaagcgattgagaaagtgaatggagaaattgccagtaagctagttggttattctgttgaagatcaaaaaaaaattgacaaaactcttattgagttagatggtacaaaacagaaaaaaagattaggagccaatgctattctatctgtatctatagcttcaaacaaagcagctgctttagcaaagaatttacctttatataaaaatattggtaattcaaaaactttaccaatacctctaatgaacgttattaatggaggagttcatgctaataactcattaagaattcaagaatttatgatacgcccagatagtgctaaaacttttaaagaagctttaaatatatgttttttagtaattcaaaaattaaaatcaattattagtagtaaaaatttttcaacaaatctaggtgatgaaggtggttttgcaccaatgttaactaataacgaagaggcgattgaatatattttaaccgctatagaagattctggttttaaagcgggcaaagatatttctgtatgtttagatgttgcagctaatgaactttataaagataaaaaatatgctgtaaactcaaacagatatatatcgcctgataaaacaataa

SEQ ID NO: 279963 - DNA, 706 bp, Unknown
  Bacterial polypeptide expressing nucleotide sequence isolated from the Sargasso Sea
atgaagataaagaatgtaattggaagagaagtcttagattccagaggaaatcctaccattgaggttgaaatacatatcgatggaaacaaatcaggtagggcgattgttccttccggagcatcgactggcaccaaagaagcattagagttaagagacaacgatagagctagatatagaggaaaaggtgtattaaaggcagtaaaaaatataaataaaattataaaaaaagaaatagtaggtctaagcattgaagaccaaaaacaaattgatgataaattgcttgaaatagatggaactgtaaataaagaaaatttaggggcaaatgctattttaggagtatcattggcaacagcgcattgtagagctgtagctaagaatattcctctttttgaggattttaataatagcaaggacttaaagtacaatcttcccattccatttatgaatatcctgaatgggggaagtcatgcaaacaataatgtagatattcaagaattcatgattgttcctattggcgccaaatccttctcacacgcaatccaaatgggatcagaaatttttcattcgctaaaagaaatcttacaagtccaaggtcatgttactgctgtaggagatgagggtggttttgctccaaatcttaaatctaacatcgaagcaattgaattaattcttagtgcgatagaaaaaaccaattacaaaccttttg

SEQ ID NO: 279964 - DNA, 451 bp, Unknown
  Bacterial polypeptide expressing nucleotide sequence isolated from the Sargasso Sea
aatgattgattatcttaaaactttaaagagttcatatcctatttattctatagaagacggtttagatgaagatgattggcaaggttggaaggttcttacagaagagctgggctcaaaaacccaattagtcggcgatgatttattcgtcactaatgctgctagaattaaaagaggaatagaggagtgttctgctaactctgtactaattaaggttaatcagattggctcattatcagaaaccttccaagcaattaaactatccgaagaaaataattttaagaatattatttctcacaggtcgggagaaaccgaagatgcatttatagctgatttatctgtaggaatgggcgtaggacagataaaaactggagctccttcaaggtcagatagggtggctaagtataatagacttctcatgatagagaagaattcaagtatatgctttgggtaa

SEQ ID NO: 279965 - DNA, 1108 bp, Unknown
  Bacterial polypeptide expressing nucleotide sequence isolated from the Sargasso Sea
cgacaggtttttgatagccgaggtaatccaacactagaggctgaggtattttcagaaaacggatctgccttttcaatagtaccttcaggagcatctaccggaacccatgaagcatttgaattaagagataaagataataaagattatttaggcaaaagtgtttttgtagctatttcaaatataaatcatctaatatctaaagctttaaaaaatgttgagatcactgaccaattaaagatagataaaattttaatcgaactagatggaactgaacaaaaaaagaaacttggcgctaatgctattttaggtgtatctatggcttgttgcaaattagcagcaattgaaaaaaaaattcctctttttaaatatttatccaaaaacaatgattatttattaccaatacctttgttaaacattatcaatggtggagttcatgcaaaaaataatcttgatattcaggaatttatgatacgccccgaaaaaacaaattcattttctgaagcagtaagacgtagctttattgtaatccaaaatctaaaagaaatgttagtcaatactaatgtgggtgatgaaggaggatttgcaccaaatttaaaaagcaatgaggaagcaattcaaataataataaaatctattgaaaaatcaggttttaaaccaggcgatgatatatctatctgtttagatgtcgctgcaaacgaattaaaaaaaccaaaaacaattaaatattattctaatttgataaaagagtatcctattaaatctattgaagatcctttttctgaagatgagtgggaatcttggaataaactcactaaaagcaccaatattcaaattgttggagacgatctctttgcaactaataaaaagagattacaaaaaggaatagatgaaaattctgctaacgccattcttgttaaacttaatcaaattggcactgttagcgaaacattagaagtcataaatcttgctcaaaaaaacggctttaaaacaattatttcacatagatcaggcgactcagaagatacttttattgccgatttatgtgttgcgacaaaatcttcacaaatcaaatctggttcattagctcgatctgagagggtatctaaat

SEQ ID NO: 279966 - DNA, 330 bp, Unknown
  Bacterial polypeptide expressing nucleotide sequence isolated from the Sargasso Sea
aatggcaaagatcgtcgacatcaagggtcgtgaggttctcgactcccgcggcaaccccaccgtggaagcggatgtaattctggaaggcggtatcgtcggcagcgcgtgcgctccgtccggcgcttccaccggctcgcgcgaagcgctggagctgcgtgacggcgacaagagccgttacctgggcaagggcgtgctgaaagccgtcgccaacatcaacggcccgatccgtgacctgctgctgggcaaggacgcgactgatcagcaggccctggatcgcgcgatgatcgagctcgacggtaccgagaacaaaggcaagctgggcgcccacgc

SEQ ID NO: 279967 - DNA, 388 bp, Unknown
  Bacterial polypeptide expressing nucleotide sequence isolated from the Sargasso Sea
attgggtgaaaaagttcagcttgtcggcgatgatcttttcgttacgaattcggagagacttggccgtggtattgctgagggcatcgccaacagcattcttgtaaaagtaaatcagatcggcacgctcactgagacaactgctgcagtcatgcttgcccaccgttcaggctatacctcaattgccagccaccgcagtggtgagacagaagatgccacgattgcagacttggcagttggtttatcgacgggacagataaaaaccgggtcagcatctcgaagtgatcgggtagcaaaatacaaccaattgttacgaattcaggaatcgctcggtgacggagccttgtatgcaggtcgagacgtaagacttcgttggccgggcatgtgctag

SEQ ID NO: 279968 - DNA, 815 bp, Unknown
  Bacterial polypeptide expressing nucleotide sequence isolated from the Sargasso Sea
aatggcaaaaatcgtcgacatcaaaggtcgtgaagttctcgactcccgtggcaaccccaccgtcgaagccgacgtgcttctcgataacggcatcatcggcagcgcctgcgcgccgtccggtgcttccaccggttcgcgcgaagcgctggaactgcgtgatggcgacaagagccgttatctgggcaagggtgtactcaaggctgtagccaacatcaacggtccgattcgtgacctgttgctgggcaaggacccgctggaccagaaagccctggaccacgcgatgatcaagctcgacggcactgaaaacaaaggcagcctcggcgccaacgccatcctcgcggtatccctggccgccgccaaggcagcagcccaggaccaggacctgccgttgtacgcacacattgccaacctgaatggcactccgggcgtctactcgatgccggtgccgatgatgaacatcatcaacggtggcgagcacgcggataacaacgtcgacatccaggaattcatggtgcagccagtgggcgccgagtccttctccgaaggcctgcgcatgggcaccgagattttccatcacctcaaggctgtactgaaggctcgtggcctgagcactgccgtgggagacgaaggtggtttcgcgccgaacctggcctccaacgaagatgcactgaaagtcatctccgaagcagtggccaacgctggctacacgctgggtaccgacgtgaccctggccctggactgcgccgccagcgaattctatgaagacggcaagtacaacctgtccggcgaaggccaggtgttcgactccgaaggct

SEQ ID NO: 279969 - DNA, 884 bp, Unknown
  Bacterial polypeptide expressing nucleotide sequence isolated from the Sargasso Sea
gatggaaaaaataaaaaatatacatgcaagagaaatattagatagtagaggaaaccctactgtggaatgtgatcttgagctacaggatggatcatttggtagagctgctgtaccaagtggcgcttcaacaggtattcatgaggctttagaattacgtgatggagatcaaaatagatatcttggaaaaggggtaaaaaatgctgttcaaaatattaacgaactaattaaaaaagtggttattggtaaggattttgaaaattataaagtttttgataaggtattattgaccttagatggaacagaaaataagtcaaattttggagcaaatgcaactcttgcagcaagtttagcttttgcaaaatgtttagcaaatcattcttcatctcctttttatcaatacattgcagaaaataaaaattttttactacctgtccccatgatgaatattatcaatggtggatctcacgctgataatgatgttgatattcaagagtttatgatcgcgccagttggagcaacttcattttctgaggcattaaggtatggatgtgaaatttttcactcattaaaatcaattttaaaatctaaaaatcttaatactaatgttggtgatgaaggaggatttgctcctaatgtaaatagttctgctgaggtaatagaaataataattaaatctgtagagaaggctggttttaaaatgaatgatgatattttgttatcacttgatgttgcttcaacagaattttataaaaataataaatatgatcttaggggtgaacgacaaactttatcttctaatgaaatggtaaaatatattgaaaacttatcaaataattttcctatttattcaatagaagatgggatgtctgaggatgattgggatg

SEQ ID NO: 279970 - DNA, 638 bp, Unknown
  Bacterial polypeptide expressing nucleotide sequence isolated from the Sargasso Sea
tatgtctaaaattaaaaatgtagtagccagacaaatttttgatagcagaggcaatcctaccgttgaaactgatgtttatttgcaagatggcacaatggggcgggctagcgttccttcaggtgcatcaacgggtaaatacgaagcatttgaattaagggatagcaaaaagtcatatcatggtagatctgttttcaaagcagtagaaaatataaatgtgacaatttttgacaccatttctggtttagactcactagatcaaaacaaaattgatcgaacaatgatagaattagatggaagcaaaaataaaagcaaattaggtgcgaatgctttattaagtgtttcgctggctgtggcagatgctgctgccaagtcattaaatctgcctctttataaatatcttggaggatccaaaacgtttaaaatgcctgtaccgatgttaaatgttatcaatggtggtgcacatgcaaataataatcttacatttcaagaattcatgatcattcctattaatgaacaaacatttggcaactgtttaaaaaaatcatctgaagttttccatactctaaaacagatattagaaaaaaaaggtctttctacagctgtaggtgacgagggcggtttttcacctaatttgaaaa

SEQ ID NO: 279971 - DNA, 1291 bp, Unknown
  Bacterial polypeptide expressing nucleotide sequence isolated from the Sargasso Sea
atgtcaattattagttctatccaagctattcaagttattgattctagagggacgcccactgtctcttgcaaggtagaacttgataacggcttaaatgcaatctcaatggtcccaagcggggcatcaactggctcaagagaggctttagaattaagagatggagctaaatcatttatgggcaaaggcgtcttaaaagcggttacaaatattcaagaaataattgctccagcacttataggtattgatgttagaaatcaacaggaaattgatgaaaaaatgattatgcttgatggaactagctcaaaatccaagttgggtgcaaatgctattttaggagtctcccttgcagttctaaacctaggagcaaaaacacttggtctcccactttttcattacattaatcaagtttttaataatataaatggtgaaaatcttgaaatgcaaatgcctatgccaatgttaaacataattaatggtgggcaacatgctgataataacgttgatattcaagaatttatgataatgccaattggagcaagtagtttttctcaggcaatgcaatggtcaacagaaatatatgcaaatttaaagaaacttctccaaactaaaggtttgagtaccagcgttggagatgagggagggttcgcaccaaatctttcttccaatatagaagcaatagaattaattattaccgcaattcgaaacaataatttagtggaaggcaaagatgttggaattgctttggattgcgcagcctcagaattttacgataatggaatatataatctcaaaggagagtcaaaaaagttaaattcaattgaattcactcagtatcttgaagatttaacaaacaaatatcccattttatcaattgaagatggtatggatgagaatgattttaaaggatggaatcaccttaccgatgttctaggaaaaaaatgccagttagtgggagatgacctttttgtaacaaatgcttttgagcttcaaagaggcatcgaggaatctctagcaaactcaattttgataaagttcaatcaaattggaacaatcactgaaactatgaagactatacatcttggaaatcaacatgggtttaagtcaattatttctcaccgatcaggagaaactgaagatagtactattgcagatctttgtgttggtcttggttcgggtcaaatcaagacaggtgcgccttgcaggtcagacagagtggcgaaatataatagattattgtggattgaggcacagcaatctgatttaaattttgcaaaaaatgtcattggttaaa

SEQ ID NO: 279972 - DNA, 1047 bp, Unknown
  Bacterial polypeptide expressing nucleotide sequence isolated from the Sargasso Sea
aaccaaaaattttagataagagttttgctgatttcagagaatttgatcaatatctaatagatttagatggcacagaaaataaatcaaattatggagcaaacgctattttatctcttagtcttgcttactataaggcttggtcttatgcaaactttggtgcaatatttctctctcaaggtttagataatttaattattcctgttccaatgttgaatgtaataaatggcggacaacatgctgataatgatgttgattttcaagagtttatgattttaccaataggatttaaatctttaactgaagctttatcttcaacacattctgtaataaccaatataaaaaaagaattaaaatctagatctttaaatactaatcttggtgatgaaggaggctttgctcctaacttaaaatctcatttagatgttctagatttaatatgtaattcaatttcaaaagcaggctttaaattaaatgatcactttaaaatttcattagatgcagcttcaagtgagttttattctgatggaaaatataatttcgaaggtaactcatattcaactgaagaaatgattagtgtttacgaaaatatttgtaaaaactatcctattttttcaattgaagacgcacttaatgaagaggattatgaaggttgggtaaagatcacaaataaacttggttcaaaaatacgattagttggtgatgatctttttgttacaaatatacaaaaattgcaaactggtatagatgaaaaacaagccaacagtattttaattaaattgaatcaaataggcacagttacagaaactttagaagctatcaagctagcgacagaaaatagttttgcatctattatgtctcataggtcaggtgaaactgaagactcttttatctcagatttagctgttgcttcacgctgccctctgataaaaactggttcattagcgagatctgatagagttgcaaaatataatcagttacttagaatatcagaaaatgataatattaaagggtatgctggtgaattaagtgaagtttttaaaagctagt

SEQ ID NO: 279973 - DNA, 1165 bp, Unknown
  Bacterial polypeptide expressing nucleotide sequence isolated from the Sargasso Sea
tctggtgcttctactggtatgcatgaagccattgaacttagagataatgataaaaatagatatggaggaaaaggagttttaacagcaatatcaaatataacagaaataatatctccaaaaatattaaataaagaatttaaaaatattaaagattttgatgaatttttaatttctacagatggaactaaaaataaatctaatttaggtgcaaatgcaacattggctttgagcttggcctttgctaaatcacttgcttctttcgataaaaaaaatctttttcattatttaaataattcagatcaatatattatgccagtacccatgatgaatattatcaatggtggttcccatgcagataataaagttgatattcaagaatttatgattgctcctgtaggtgcttcaagttttaaagaatcaattaggtatggagcagaaatttttcactctttgaaatcaaagttgaaagaaaaagggctaaatactaatgtaggagatgagggtggttttgcccctaatatcaattcatcgaatgatgtaattgaaataattatacaagctgttatttctactggcctcaagatgcatgaagacatcatgatttcattagatgtggctgcaacagagttttattttgatcataaatataatttaaatggagagaacaaaattttaaattctgatcaaatgatagattatttaaaaaaattatcttcagattatccaatttattctattgaggatggattgtcagaaaatgattgggagggttggaaaaatttaactaatgaaataggaaaaaaaattcaattagtaggagatgatctttttgtcaccaatattaataggcttcaagaaggaattaacaatggtagtgcaaactcgatattagtaaaacttaatcaaataggcacacttactgagacattaaatgctattgatttagcaaaacaaaataactacacttctattatatctcaccgatcaggagaaactgaagatactactatttcagatttatctgtagctacttctgtcggtcaaataaaaactgggtctttaagtagaactgatagaacttctaaatataaccaattacttagaattgaagagattttagaagataagtgctattatgcaggcagaaatatcttaaataattgac

SEQ ID NO: 279974 - DNA, 658 bp, Unknown
  Bacterial polypeptide expressing nucleotide sequence isolated from the Sargasso Sea
atgcaatccaataacccttcccaaatcaaaagcgtaaccggacgagaagttctcgactctcgaggaaaccctaccgttgaggttgacgtggctcttcaaggagggttcaaaggaagggcagcggtaccctcaggagcctcaactggccaatttgaagcggttgagttacgcgacggcggcgaaagatataaagggaaaggtgtccttcaggcagttgaaaacgttaataacgaaatagctagcgcaatcataggaatggattctctagaccaaagagcagtcgatcaaaaattaatcctcctagatggaacgaacgataaatcgaatttaggagcaaatgcgatgctcggtgtttccctcgctgcagcaaaagccagcgcaaatcatctcggacagcccttataccgataccttggaggtgcaacagcacatgtgctcccagtcccaatgatgaacgtactcaatggtggcgaacacgctgacaataacgttgacctccaagaattcatgataatgccagtaggtgctgtctctttttcggaagctttgcagtggggagctgagtgctatcacaccttaaaagaagttctaaaagctcgtggcttatcaacagcagtggagatgaaggcggtttgctccggatctcgaatcaaatgaa

SEQ ID NO: 279975 - DNA, 1288 bp, Unknown
  Bacterial polypeptide expressing nucleotide sequence isolated from the Sargasso Sea
aatgaaatcccatataaaaaatatttattcaagagaaatactagactcaagagggaacccgacagttgaggtagatttggttcttgaaaatgatatagtagcacacgcagcagtcccatcgggagcctcaactggtgttttcgaagcaatggaactcagagataataacaaaaaacgatatatgggaaaaggagtccttactgcagtaaataatgtcaatagtgaaatacgaaacgctcttattggggttgatataaataatcaagagaacattgacaatatattgattgagcttgacggtacagaaaataaatctagactaggcgcaaatgcaattctgggagcatcaatggctgcttgtagagcaggagcaaaagctaataatattcctttatacgattatttatctattagtagtgattacgttatgcctatacccatgatgaatattttaaatggcggtagccacgcagaaaacactgttgatattcaagaatttatgatctcccctattggtgcaaattcattttctgatgcacttagaattggaacagaaattttccaccaactaaaatctgagttatcacaaaaaggtatgaatacagcagtcggtgatgaaggaggatttgctccaaatcttggatcaaatgaactagcaattgaaataatattaacagctataactaatgcaggttatacaccaggggaagaggtttttatttctttagacgttgcagccagtgaattttttaaaaatgacctatatactttagaatctgaagagaaaacatattcatctgaagaaatgatcaattatttaagtgatctttcaaaaaaatatccaattatatcaattgaagacggcttggaccaaagtgattgggatgggtggaaaaaactgaacctagcaataggaaaaaatattcagatagtaggagatgatttaacagttacaaacataaagcgtttaaatagagctatagatgaagagtcaatgaattcaatcctaatcaaattaaatcaaataggaacgattacagagactgtacaagcagtaaaattagcaaaaaaggttggatttggagcaatcatatctcataggtctggtgagacagaagacacaattatttcagatttttctgttgccatgggaatgggacaaattaaaactggctcattatcaagaagcgatagagtcgctaaatacaaccagctaattaggatcgaagagcaactaggtgataaagcaaaatatgccactatggactttttaggaatgactaaatga

SEQ ID NO: 279976 - DNA, 631 bp, Unknown
  Bacterial polypeptide expressing nucleotide sequence isolated from the Sargasso Sea
atggcaaaaataacttatttaagaggtagacagatccttgattcacgcggtacccctaccgtagaggttgatatggtgcttgatgatggtgaaatttgtcgtggctcggttccatcaggggcttctactggttcacatgaagctattgaacttagagacgggaataaaaatgagtttaatggaaaaagtgtcaaaaatgcaattgaaaatattaatgaaatagtcaaaaaaaatatagagggtaaaaattttgattcttatgaaaaatttgacgatttcttgcttaatctagatgggactgataataaatctaaattaggtgcaaatactatccttgcatgttcaatgactttcctgaaatgtttagctaaaaataatggtcaggaaatttatcaatttttaaataaaaatgaagaatttatgttacctgctcctttaatgaatattataaatggtggagctcatgcaaataatggactagatattcaagaatttatgattgtacccgctggtttcgattcattttcggagtccttaagggcgggagttgaaatcttccacaatctaaaagatttattaaataagaattcacattctactgcagttggtgatgaaggtggctttgctcccg

SEQ ID NO: 279977 - DNA, 844 bp, Unknown
  Bacterial polypeptide expressing nucleotide sequence isolated from the Sargasso Sea
aatgatgaatattgtaaatggtggttctcatgcagataataatgtggatatacaagaatttatgatttcccctttaggagcaccaaattttaatgaatcaattagatatggctgtgaagttttccattcattaaaatcaatattaaaaaataaaggtttaaatactaatgttggagatgaaggaggctttgctcccgatatcaattcttctgaagcagttatagaaataatactcgaagctataaaatttactggattgaaattaggtgaagatattatgctttctctagatgttgcttctagtgaattttttaaaaatgggaaatattatcttaatggagagaaaaaaatattatcttcagaacagatggtagattatcttaaaaaattaagctcaaactaccctatatattcaattgaagatggcatgtcagaagatgattggcatggatggaaaatactaacagatgaaattggtcaaaaggtacaattagttggtgatgatttatttgttacaaacatagagcgtttgcaaaaaggtatcaataataaggtagctaattcaatattgattaagctaaatcagataggtactctttctgaaactttagaagctattaatttagcaaaaaagaatagttataactgtgttatctctcatcgttctggtgaaacagaagatacagtaatttcagatttatctgtagctacatcagtaggtcaaattaaaacaggatctttaagtcgtactgatagaacagccaaatataatcaattgttaagaatccaagagttacttggtgataaagctaaatttgcaggtaaaactattcttcaagattga

SEQ ID NO: 279978 - DNA, 1001 bp, Unknown
  Bacterial polypeptide expressing nucleotide sequence isolated from the Sargasso Sea
tatgaataaaaaaattacacatatatttgctaggtatattctagattcccgagctaatcctactgttgaagtagaagttacacttgatgatggaagctggggccgtgcagctgttccttcaggagcttcaacggggagtttagaagctcatgaattaagagaccaatcaaaagactttaacggaaaaggtgtcaacaaagcagtcgataatataaacactttaatagctgacacattaattggaagttacgccggtgatcagtcaaaagtcgatcaagttctacttgaactagatggaacaaaaaataaaagcaaacttggtgctaatgcaatacttgctgtttcaatggcaaatatggttgcttatgcaaaatcatctaaaaaatatgtttatgaacttattcctaatatttatggagccccgtctttacctgtaccttttatgaatattttgaatggtggtgcgcatgctgataactctgtcgatattcaagagtttatgattgttcctcacggttttacaagatttgatgatgggttaaaggcaggtgttgaggtctatcacacactaaagaaaagattaaaagataaaggattagcaacaaacgtaggagatgaaggtggtttcgctccaaactttacatcatcaaaagaagttttagatgaaataatgctttcaattgcagaagctggctacaaaccttctgaccaaatttctttagcgttagatgctgctgcatctgagttttataaagatggtgcatatatgattgaaggcaatagcttgaccaatacagagatggctgattatttagtagatctttcagactcttacccaatagtatcaatcgaagacgggctctcagaagatgattgggagggttggaaatacttaacttccaaaataaacgattccacacaactcgttggtgatgatttatttgttactcaggaagaagtacttcaaaaaggaattgatgaaaattgcggaaatgcaatct

SEQ ID NO: 279979 - DNA, 634 bp, Unknown
  Bacterial polypeptide expressing nucleotide sequence isolated from the Sargasso Sea
aatgataaatgaaaatgaagatgcattgaaattaatagtaaatgcaatagaaaaatcaggatttaaaaatggtaaagatgtatctatatgcttagatgtagctgcaaatgagttattcaagaaacaaaagtattcagtacactctaaaaagttaatatctgctaacaaaacaattgatcaatatctaaaattaattaaaaaatataaaattaaatctatagaagatccatttgctgaagatgattggttgtcttggaataattttatgaaaaaaataaataaagatactcaagttgtgggcgatgatttgtatgtaactaatttagagagattaaaaataggctttttaaataaatcatccaattcaatattaataaaacttaatcagataggcacagtttcagaaaccctagaagtaataaaatttgctcagttaattggctttagtaccataatatcccatagatcaggtgaaagtgaggatacgtttatttctgatctagctgtaggtactaattctaaccaaataaaaacaggatcgttagcacgatctgagagggtagctaaatataaccaacttataagaattgaagagaaacttggaaatttagcaaaaatgaataaaataaattaa

SEQ ID NO: 279980 - DNA, 463 bp, Unknown
  Bacterial polypeptide expressing nucleotide sequence isolated from the Sargasso Sea
tccattaacgaatatcaaaaaattattaaaaaatataaaatcaagtcaattgaggatccatttgctgaaaatgactggttagcatggaataaactaatgaaatcaataaaaaaagttcagatagtaggagatgatttatatgtaacaaatcttgaaagattaaaaaaaggttttttaaatatttcttcaaattctatcttgatcaagctaaatcaaattggcactgtttcagaaaccttagatgtaattaaatttgctcaaacaattggatataaaacaattatatctcatcgatcaggtgatagtgaggatacgtttattgctgatttagcagtaggcactaattcaaatcaaattaaaactggatccttagctagatctgaaagggttgcaaaatataatcaattaatccgtattgaagaagaacttggcaaaaaagggaggatgaataagatcaattaat

SEQ ID NO: 279981 - DNA, 1273 bp, Unknown
  Bacterial polypeptide expressing nucleotide sequence isolated from the Sargasso Sea
tatgaaaatacaaaacatagaaggctttgaagttatagactcaagaggcaatccaacagtagcagcgagagttaaccttgaaggctcaatatctgctttagcgatggtaccctctggagcttcgactggtcagcatgaagcaaatgagaaacgtgataaagatgcaaacagatatcaaggcaagggtgtcttaggtgcggttaatgcaatcaatacagagatatcctccttactaaaaggtaaggatatatttgacctgctagctaatgacaaactgatgatagatgcagacggaacttccaataaaagtaatcttggagcaaatgcaatcttggctgtttcaatggcgtctgcaaaagccgcttcgatagcaaataaaattcctctttatacttttttaaataataaatattcagaattctgtaatacagatatttcaccttctcttccaattcccatgatgaatattcttaacggtggagcccatgcagataatccaatcgattttcaagaattcatgattcaaccaagagggttcaattctttttctgaaacgttaagagccggagtggagatatttcataccctaaaaaatatcctctcttcaaaaggtctaaatacatcagtaggtgatgaaggaggttttgctccaaacataaaatcgcctgaagaggctcttgacctaattatgatggcaatagaaaaggcaggatatgttccaggcgaacaagttgcgttatgtctggatatagctgcaactgaattttattcggattcagtttatagcctcgtaggcatgaataaagattttagctctgctgacatgataggatacattcaagaattgtgtaaaaaatatcctataagctcagttgaagatgggcttgatgaagatgattgggacggatggacaaaactgactgaattattaggttcacaaattcaactagtcggtgatgacttgtttgttaccaacccagagagaattaagaaaggcattaaaagtaattctgccaattcagttctagttaaggtaaatcagattggaacacttctagaaacttttgaatccgttaaaacttctttggataataattttactactgttatttctcatagatctggtgaaactgaagatacatttattgcagatttagctgtagcagtggcttcaggtcagataaagacaggagcaccatcaagatcagacagggtagctaaatacaatagactattgatgatagagtcggattctaaaatatatattagatga

SEQ ID NO: 279982 - DNA, 1213 bp, Unknown
  Bacterial polypeptide expressing nucleotide sequence isolated from the Sargasso Sea
agaggaaatcccacagtagaggctgaagtttttttagaaaatgatatttctgctactgcaatctcaccatcaggagcatcgacaggtgcatttgaagctcatgaattgagggaccaggataaaaatagttttttaggcaaaagtgtaaataaagctattgaaaatataaataaccgaatttcaaaaaaattaaagggtctcgattctagtgatcaaaaaactattgataaagcactactagatttagatggaagcgaaaataaaaaaaatttaggagctaatgctactttagcagtttcattagctaattcaaaatgttcagctttatcaaataaaaaatctttatttaaaaatctaggaaattctttttcgcttcctataccattaatgaatataatcaatggcggtgcacacgctgacaatgacttaaatattcaagaatttatgattagacctgactcggcaaaaaatttcatggacgccatagaaaagtgttacgtggtaattcaaaatctaaaaaaattgttaaaatctaaaaatatgcttactaatataggtgatgaaggaggatttgcgccgtcaataaatacaaatgagcaagcattggagttaattgtgagttcaattgaaaagtcaaatctaaaaccaggtgaagatatagttatttgtttggatgtggcagctaatgaactaatcaacaagaaaggtgaatattcaattcaatctaaaaattacacatcagttgaagataatattatctattataaaaaactaacctcaaattatccaataaaatcaatcgaggatccttttgctgaagaggactgggactcatggaaaaaaataacaaacgaaataggtaacaatgttcagatagtaggagatgatctatttgtaactaattctaagcgtttaagtaaaggaataaaagaaaagtcagctaatagtattttagtaaaacctaatcaaataggcactttaaccgaaaccttagatgtaatatcaatggctaaaactgcaaattttaaaacaatcatttctcataggtcaggtgataccgaagatacatttattgctgatttggcctcggcgacaatgtcctctcaaattaaaacaggatctttggcaagatctgaaagagtagctaaatacaacaggttattacgcatcgaagaagaacttggcaagcaggctaaaatggctaaaatctagc

SEQ ID NO: 279983 - DNA, 727 bp, Unknown
  Bacterial polypeptide expressing nucleotide sequence isolated from the Sargasso Sea
cgttatggtgcggaaacatttcatgccctgaaagagattttgcaatcaaaaggctatgtcacaagtgtgggtgacgaaggcggttttgcgccaaatcttaaaagcaatgaagaagccttagaagtaatcatggatgcaattttagtagctggttatgagccgggaaaagacattttcatggctcttgacgcggcagcttcgtcattttgtgatcaaggatcttatgtttttaagaaatccggatcggggataaaaaactcaaatgagatgctcggattttacaaaagcatggttgaaaaatatccaatagtatccatagaggatcccatggatgaacatgactgggatggattttctgctatcacaaaaaaacttggggataagattcaaatagtaggggatgacttgtttgttaccgataaaaattttgtcaggaaaggtatcaagaaaaaagcagccaatgcggtactgattaagcttaatcaaatcggaactgtctccgaaactttggctacaattcagctttgccaaaaatcaggctggaactacattatttcacatcgtagcggggaaactgaagacacttttttggcggacttcgcagttgcaatggcaggcggacagattaaaactggctcagcctcacgtagcgaacgcattgcaaaatataaccgtttgctggaaattgaaaccgaactgggtgagtcagccatatttggaagttgat

SEQ ID NO: 279984 - DNA, 760 bp, Unknown
  Bacterial polypeptide expressing nucleotide sequence isolated from the Sargasso Sea
tatgaataataaaataaaaactataaaagctcgacatatattagattccagagcaaatccaacaattgaagttgaaatatacttaaatgacgaaattttcggacgcgcagcagttccttcaggtgcatctacaggcgcacttgaagcccatgaactaagagataacgatgatgcttacaatggaaaaggcgtaaatcaagcaattaaaaatgttgaaacaataattgctaaagagttgataggactagatattaccgaccaagaagctattgataagaagttgattcaattagatggaacagaaaataaaaataatttaggagcaaatgcaatcttaggagcctcaatggctgcttttaaagcaaatgcaaacttacaaaaaaaacaaccatttgaactctttccaaatatttacaattccccatccttgccaataccgtttatgaacattcttaatggtggcgctcatgcggacaattctgttgacatacaagaatttatgattgttccatatggatttgatacttttgacaggtcacttagagcaggtgttgaaacatatcacgttttaaaaaaaagattaaaagaaaaaaaactagcaacaaatgtaggcgacgagggaggttttgctccggatttcaaatcttcaatcgaaattttagatgaaataatgctttctatttcagaagcgggttatgtaccaggtgaaaatatttcacttgcattagatgttgcatcctcagaattctatgaaaaataa

SEQ ID NO: 279985 - DNA, 1282 bp, Unknown
  Bacterial polypeptide expressing nucleotide sequence isolated from the Sargasso Sea
catgcctaaaataacaaatataaaagcaagacaaataatagatagcagaggaaatccaactgttgaatgcgatatagagtttgaaaattctatttttggaagagctgcggttccgagtggagcatctactggagtgcatgaggctctagaattgagagataataataaatctatatacaaaggtaaaggagttttgaaagcagtaggaaatatcaatgataaaatttctaatgaactagttggaaaatcatttgaagatatttcttcttttgacgattttttattagaacttgatggtacggaaaataaatctaacctaggcgctaatgcaacacttgctgtaagcttagcttttgcaaaatgtttagcttcttctgaaggtcatgaactttattcttttcttggtaaagaatatacaatgagtcttccagttccaatgatgaacattattaatggaggatcacatgcagataatgacgttgatattcaagaatttatggttgcacctataggtgcaaataatttttcagacgcacttcaatatggttgcgaaatatttcattcattaaagtcacttttaaaatcaaaaggcttaaacacaaatgttggtgatgaaggtggatttgctcctaacataaatagttctagtgaagtcatagaaactgttttgaaatcagtggaggatgcgggttttaaacctggaaaagatatttatctttcacttgatgttgcatcaactgaattttacaaaaataataaatatcacttaaagggagaaaaaattgttttgtcttctgatgagatgataaaatatttagagaaattagtaaatgcttaccccatttattctattgaggatggcatgtcagaggatgattgggatggttggtctaatttaacatcaacaatagggaaaaaagttcagttagttggtgacgatttatttgttacaaacaaaacaagattgcaaaaaggtatttcagagggtgcagggaattctattttagttaaagtaaatcagattggaactttaaaagaaactttagaatcaattaaattagctaaagaaaataattttactactataatttcacatcgttctggtgagactgaagatacgacgattgctgatttatcagtcggtgtttcagcaggtcaaattaaaacaggatcattatcgagaacagatagaacagcaaaatataatcaattgttaagaattgaagaagcattacaaggtaaagcaaattatgctggatcatctatcttaaataataaataa

SEQ ID NO: 279986 - DNA, 1291 bp, Unknown
  Bacterial polypeptide expressing nucleotide sequence isolated from the Sargasso Sea
ttgaacaccatacatgaaggagtcccagtgaacccacgtatcatcaacattcaggctttggaaattttagactcgcgtgggaatccgacggttagaacatgggtcagactcgaaaacgggatcagcggggttgcttccgtgccttcaggagcctcaaccgggatcaatgaagcccttgagttaagggatggagataaaaaacgttttggcggaaaaggcgtgctgaaggcggttgaaaatgtgaataaacaaatcgctcccgaactggtggggatgcacgccgaagaccagtcgaaaattgaccaggtgatgctcgaactggatggaaccaaatccaaggaaaaacttggtgccaacgccattctcggagtttccatggctgctgcggatgccgctgccaaaaatgcgggtttgtcactctattcgtatcttggaggagtggggagcacatgcttgccggtaccgatgatgaacattctcaacggcggtgaacatgcggacaacagcgtcgacatccaagaattcatgatcatgcccattggtttgccgaatttcagagaagccctgcgatgcggatcagaaatttttcaggcgctgaagaagattcttctggccaagaattacagtacgggtgtcggggatgaagggggctttgctccgaatctcggaagcaaccaggaagcctgtgagttgattctggaagcggttgaaaaagtcggatacaaagctggcaaggaaatcttcttggcgcttgattccgcggccagttccttctttaaagacgggaaatatgaatttcgtaaatccgggggaggtgtcaaaaattcttcggaaatgctttctttctaccaggatctttgtggtaaatacccgatttgttccatcgaagaccccatggatgaaaacgattgggaaggttttgcttcggtcacaaaatcactgggagaacaagtgcagattgttggggacgacctttttgtaaccaacaccgaatttgtgaaacgcggaatcaaagaatcttctgccaatgccgtactcatcaaactgaaccagatcggaacggtttcggaaacggtcgcaaccattgaaatgtgccgcaaggcaggatggaattacgtcatctcccatcgaagtggagaaaccgaggataccttcatggcggactttgctgtcgccatgggtggtgggcagatcaaaaccggttcctcttgtcgaagtgaaaggatcgcaaaatacaaccgcctccttgaaattgaagctgaactgggcggattagcgatttatgtttgat

SEQ ID NO: 279987 - DNA, 1297 bp, Unknown
  Bacterial polypeptide expressing nucleotide sequence isolated from the Sargasso Sea
atggctaagattattaacgtgattggtcgcgagattatggattctcgtggtaacccaacagttgaagccgaagtgcatttagaaggtggttttatcggtatggcggctgcgccatctggtgcttctaccggtagccgcgaagcgctggaactacgtgatggcgacaagagccgttacttaggtaaaggtgtattaacggctgtggctaacgtaaacggccttatccgtgcagcgttaatcggtaaagatgcgactgcacaggctgaactcgatcaaatcatgatcgacttagacggcactgaaaacaaagacaagttaggcgctaacgcgattctggctgtgtctttagcggcggctaaagcggcagcagcattcaaaggcatgcctttatacgctcacattgcggaattaaacggcactcctggccaatacgctatgccagtgcctatgatgaacatcctcaacggtggcgagcacgctgataacaacgttgatatccaagaattcatggttcaacctgttggtgcgaaaaacttccgcgaagctttacgtatgggcgctgagattttccacaccctgaaaaaagtactgcacggtaaaggtttaagcacttctgtaggtgacgaaggtggtttcgcacctaacctgtcttcaaacgctaatgcattagcggtaatcaaagaagcggttgaattagcaggttacaagctgggtaccgacgtgactctggcattagactgcgcggcttctgagttctacaaagacggtaaatatgacctgtctggcgaaggcaaagtattcgattcaaacggtttctctgacttcctgaaatcactgactgagcaatatccaatcgtctctattgaagacggtctggacgagtcagattgggatggttgggcataccaaactaagatcatgggcgacaagatccaattagtgggcgacgatttattcgtaaccaacactaagatcttaacccgtggtatcgagaacggcatcgctaactcaatcctgatcaagttcaaccaaatcggttcattaactgaaaccttagcggctatccgtatggcaaaagcggcgggttacactgcggtgatttctcaccgtagcggtgaaactgaagacgctactatcgctgatttagcggtaggtactgcggctggccaaatcaagaccggttcactgtgccgttctgaccgtgttgctaaatacaaccaattgctgcgtatcgaagagcaattaggtgaaaaagcgccataccgcggtttgaaagaaatcaaaggtcaggcgtaat

SEQ ID NO: 279988 - DNA, 1258 bp, Unknown
  Bacterial polypeptide expressing nucleotide sequence isolated from the Sargasso Sea
catgaaaattaaacagatagaagctgttgaagtcttagactcaagaggcaaacccacaattagtacaactgtatatttagaggacggttcaagcggtacagctatcgtcccaagtggagcttcagctggatcattcgaagcttatgaacttagagatggcgataattcaaggtactttggttttggaacgttaaaagctgttgaacaagtaaaaggcctatcgagtcacttaacaggaatagaaagtgatgatcagaataagattgatactttacttttagatattgatggaactaaaaataaggaaaaggttggcgccaattcaattttgtctgtttcattagcttgcgctagagcttcagcaaacagcctaaatatttctctttatgaatatataaatattttattcaataatttaacttctagagaaaataaattttcaataccaagaccaatgttaaatattcttaatggtggagttcatgcaaataataatattgatattcaggaatttatgatcataccatctgataaattttcttttaaagatggattgcgaaaagctactgaagtttatatgcatttaaaaacgaatttagatcagaataaactaagcactacagtgggggatgaaggtggttttgcacctaattttgaatcaaatcaaatagttatagaaaagataatcaaatcaattgaagaaacaggaatgaaatatggtgaggatattttcttaggattagattgcgcatcatctgaattacataaagacaaaacctattgtcttgacggagagggaactaagtttagttctgatgaaatgattgattatttgatagaccttgttaacaagtatcagattatatctattgaagatcctttagatgaatctgattggagtgcttggaaaaaattctctgaaaaaactaataatttacagattgtgggagacgatatatttgtaactaacaaaaaattattagaaaaaggaattgctgaaaatgttgcaaattctatcttgataaaacccaatcaaattgggactctaaccgaaactttccaagctatagatctagctaaagctaacaattatggaacaattatttcacatagatcgggtgagacagaagatacttttatttcagatcttgctgtaggtgttgatgcaaggcaaattaaagctggagcgccagctagatctgataggacagctaaatacaatcgtcttctaattatagaaaatgagttgtatccatga

SEQ ID NO: 279989 - DNA, 1270 bp, Unknown
  Bacterial polypeptide expressing nucleotide sequence isolated from the Sargasso Sea
tatgaatacaaatataaataaaattcacgctagatatatattagattctagagctaatccaactgttgaggttgatattaccttagaggatggatcttttggacgtgcagcagttccttcaggagcttcaaccggaaaactcgaagctcatgaattaagagatggagataaaagctatctaggtaaaggtgtttcaaaagctgttaataatataaatacacttataaacgatcatttgtctggacaagatgctggaaatcaagaaaatattgataaattaatgattgctctagatggttcagataacaaaggaaaattaggcgcaaatgcaattttggctgtttctcttgcgaacttgaaagctttttctaaatcatctggcaaacatatttatgagattattccaaatgtatatggagccccttcattacctgtgccttttatgaatattttaaatggtggtgcacatgctgataataaggtcgatatccaagaatttatgattgtcccatatgggtttgaaagatttgactcttccttacaggctggggtagaaatttatcatacacttaaagagttacttaaggaaaagggtctttctacgaatgtaggtgacgaaggaggctttgcaccaaatcttaattcatcttcggaagtgatagagaccatattagaagctgtaaaaaagtctggatacaatcctgaagaagaagtagccatagcattagatgctgcagcttcagagcttcataaggatggaaagtatttaatagaggatgaagaattaagttctaatgagatggttgactacttagttaatcttgcaaatcagtatccaataatttcaattgaagatggcttaagcgaagacgattgggaaggctggacattattaacagaaaaacttggagacaatatccaacttgttggtgatgatctttttgtaacccaggaaaagatattacaaaaaggaattgatcaaaatgcagctaattctattctcataaaaatcaatcaagttggaagcataactgaaacacttgagacaatgacattaggtaaaaaaaataattatacatctatggtttctcacaggtcaggagaaacagaagatacatttattagccatttagttacaggaacatcaagtggacaaattaaaacaggtgctccagcaaggtctgagagggcagctaagtataacgaattactaaggattggagaaaaagtaggtttcgaaacttttaacaataaaaaatggaaaaattaa

SEQ ID NO: 279990 - DNA, 1282 bp, Unknown
  Bacterial polypeptide expressing nucleotide sequence isolated from the Sargasso Sea
atgagtgaaattatttcggtgaaatccattcaagtcctcgattcgaggggtaatcccacagttgaggctgaagtcacattaaaagacggcacaagtggaagagcatctgtcccatcgggtgcctcaactggaagcagagaagcagtggaattaagagatgggaataatgagatttatctaggaaaaggcgttttggcagctgttgagaatatcaattcagaaattcaaacagcactcataggccatgatatctatgatcaaagcagtattgatcagattatgatcgatcttgacggcacagaaaataaatcaagacttggtgccaatgcaattctagcagtctcactggcttgcattaaagccgcatcagcatcaaaaaagacagatctgtttcgatacttatcagatggcccttacagtttcccagtgccaatgatgaacatcatcaatggtggtgagcatgcaaataataatatagatattcaagagtttatgattctgccggttaactttgagcgattctctgatgcactcagggctggtgttgagatttttcattcactcaaagatgtccttgataagcaagggatgagtactgcggtgggagatgaaggagggtttgctcccaatctgaagaataatgtggctgcaatagagaccattattgaagcaattgagtcgagaggatacgaggcaggcaatgatattttaatcgggttagatgttgctagcacagaattttatcgcgatggaaaatatcatctatcctcagaagataagtcttttgattcagcacaattcgtagattatctcacccaaatggttgatcagtatcccattatcacgatcgaggatggtatggcagaagatgactggggtggttggaaattattgagtgatgccattggagaaaaagttcaacttgttggcgatgacctatttgtcaccaatccatcaattcttaagcaaggcattgatcaaggcattgcaaactcaattttgatcaaaccaaatcagattggaacactgactgagacattagaagcagtctctttggcaaacagaaatggatatacatctgttatatctcaccgctcaggtgaaacatcagattatacgattgcagacatatcaatgaatcctaaaatctcacaaatcaaaacaggatctttgtgtagatcggatcgcattgagaaatataatcagcttttgagaatcgaatccattgttggcgatcaggcagagtatcccggaaagaaggcttttaatcagctcaaatgat

SEQ ID NO: 279991 - DNA, 789 bp, Unknown
  Bacterial polypeptide expressing nucleotide sequence isolated from the Sargasso Sea
gatgggagaaaaactcaaaccaattatcgaaagagttcatgcaagagagattttagattctagagggtttcctacagttgaagttgaaattactgcttcaggacgtaccagcatatctgcagtcccttctggtgcttcgacaggagaatttgaagctttagaattgagagataatgataataatagatatctaggaaaaggtgttttaaaagcggtcaataacgtaataaacatctttggccctaaactcattggaatggatgcaagcagtcaaaaagaaattgatgacatgcttataaatttagatggtactgtaaataaaagctcttttggcgcaaatgcaagtctaggaatatcaatggcctgttctgtagttagcgctgctttttataataaaccattatttagctatttgaaccctaatagtgatataatgcccatacctatgattaatgtccttaatggcggaatgcacgcagatcaaggatcagatattcaagagataatgttattccctcatggtgcaaaaaattttacaaatgctattcaaatggcatccgaaatatttcattctttaaaaagcgaactcaaaaaacaggggatgagtacaactgtcggagatgagggtggttttgctccatcattgaactcaaatggtcaagcaatcgaaatacttttaaattccattgaaaaagctggttataatgttggttctgacgtctccctagcgctggatgtagctgcctctagtttcttcaaggatggtaaatatcatcttaaaattgatgg

SEQ ID NO: 279992 - DNA, 1243 bp, Unknown
  Bacterial polypeptide expressing nucleotide sequence isolated from the Sargasso Sea
atgtcaaaaatatcaaaagttagagctattcaagtttttgactctagaggtgtaccaactatttcttgcaaagttaatcttgatgatggaacttcagctatagctatggttccaagcggagcatcaactggatctaaggaggcacttgaattaagggatggaaataaggcttatcatggcaaaggtgttcttaatgctgtttcaaatgttaataaaaaattatcttcgcttgtaattggcaaagatccaggtgatcaaaatgagattgataaaatactgatagaatttgatggcacgtcagataaatctgctattggcgcaaatgctattttggcagtatctcttgcaactgcaaaagctgcatctattatgcaaagaatacctttgtataaacatttttctaatatatataaaaatataactggtgattcagcaaatcctgcgatgcctatgccaatgtttaatattttaaatggtggagaacactcaaacaataatattgatatccaagaatttatgattattccaagtggagccaaaacttttgaagaggttatgcaatggtcagtagagatatatcaaaatttaaagaaaatactttcatctaataatcattcaatagcagttggagatgagggggggtttgcaccaaatcttaaatctaatgaagaagcaataaagttaataattgaagccatcaagaattcaaatttagatctaaaaaaagatataaatattgcacttgattgtgctgcaagcgagttttttgatggtagtaaatattttatgaaaggtgaaaatcaaaatcttacatcagaagagcttgtaaattatcttgaaagtcttgttaaaaaatatcctataacttcaatagaagatggaatggacgaaaacgatgaaaatggatggaaattattaacatctcaactaggtgataaatgccaacttgtaggcgatgatttatttgttactaataaaaaaatattaaaagaaggagttcaagaaaatatcgcgaattcaattttaattaagttaaaccaaattggatctttaacagagaccatagaaacaatacatcttgcaaaagaaagtaactataaaccaataatctcccatagatctggagagacagaggatacaataattgctgatttagcagtaggtctaggggtcaagcaaataaagctggtgcaccttgcaggtcagatagaattgcaaaatataatagattgctttggataga

SEQ ID NO: 279993 - DNA, 1294 bp, Unknown
  Bacterial polypeptide expressing nucleotide sequence isolated from the Sargasso Sea
atgaaagaacaagaaattatttctaaagtttcaggttatgaaattctagattcaagaggcaatccaactgtagctgctgaaattactctaaatgatggtagatcttctatggcttttgttccttcaggagcctctacaggtaaatatgaagctcatgagaagcgagatgaagaagaaagaaggtatttagggaaaggtgtaaaaaaagcaatctcatctattgatggtgaaattaacgagctattatcaggcagatctccacatgaccaaattgatatagataaaagattatgtgaactagatggaacattagagaaaaataaattaggagcgaatgctattctcgcagtctctcttgcggttgccagatcttcttcttctgtaaagggtcagcctctatatcagactataaatcaaacatttaaagaaatttctggagaggagtcaaagcatatcttgccaatccctatgatgaatatacttaacggaggcgaacatgcagataataaaatcgatttccaagagtttatgattcaacctgttgaatttgattcatttagcaaagccctgcagtgtggtgtagaagtttttcatacgttaaaaaaagtactaaaggaaaaaaatttatctacttcagttggagatgaaggaggttttgctcctcaacttttttctgctgaagaagctttagatttaattatggattcaatcgaaatagctgggtacaaggctggtaaggaagtttttatctgtttagattgtgcttctagtgagttttacaaagataatttatataaattaacaggcatgaaaaaagattttgattctcaaggtttaacagaatacctagtgggattaactgagaagtatcccattacctcaatagaagatggtttagatgaagatgattgggtaggttggagtaccctgaataaaaatttaggttcaaaagttcaactagtgggagacgatctatttgttacaaataagagtagattacaaagaggtataaaggaaaattctgcaaattcaatcttaattaaagttaatcaaattggatctttaactgaagctcttgaaactatacatatagcgagaaagaatggttttaagaatgtgatttctcatagatcaggtgaaaccgaagatgcgtttatagctgatctatcggtaggcgtgggggcaaagcaaattaagactggtgcaccttctagaagcgacagagtttcaaaatacaataggttattattgttagaagctaagaccgacattaaatttgcaggacttaaatgag

SEQ ID NO: 279994 - DNA, 881 bp, Unknown
  Bacterial polypeptide expressing nucleotide sequence isolated from the Sargasso Sea
aaagaataacgcacatatacttccaatgccaatgatgaatattttaaatggcgggagccatgccgataacctagttgatattcaagagtttatgataatgccttttggtgcaaaaaggttctcagaagcattgcaaatggggacggaagtatttcaccatctaaaatcagtattaaaatccaaggcattatcaactgcagtaggcgatgagggtgggttcgcaccaaatctaaagtctaacgaagaggctatagagataatacttgaatcggtattgcaagcagggttaaaaccaggttcagatatatatttaacattagatgtcgctgcaagtgagttatttgaagacagtgtgtataatttattttctgaaaataaaaaattagattccatagaaatggttgaataccttagtggccttgttgaaaaataccctattgtatccatagaagatgggctgcatgaggacgattgggaaggatggaaacaactgacaaataagttaggaaataaaatacaaattgttggagatgatctaaccgttacaaatatttcacgattagaacgctccatcgaagaaagtagcatgaatgctattctaattaaactcaaccaaattggaaccgtgactgagacaattcagacaataaatcatgcaaaaaatgcgaattttggggcaatcatttcccatcgctcaggagaaactgaagacaccactatagctgatttagcagtagctatgggtatggggcaaattaaaacaggttctgcatctaggacagatcggacatgcaaatacaaccaattattacgcattgaagaagaattaggacataatggaacaatcgctaacattggctatttaggaattccaaattgag

SEQ ID NO: 279995 - DNA, 697 bp, Unknown
  Bacterial polypeptide expressing nucleotide sequence isolated from the Sargasso Sea
agtaaaaattattctactgcggtaggtgatgagggaggttttgctcctgatttaaaatctaatgaagaagctttagatttaatatgtgaggcaatagaaaaagctggctataagattgggaaagatattttccttgctcttgatgtagcagcaacagaattatttagcgagaataagtatagctataattcaaaaaaattagcaactgatgaacttatagaagtatatgaaaaattagtaaatgaatatcctataatatctatcgaggatcccttagatgaagatgattgggatgcatggtctttacttacttcgaaaataggatcaaaagtacaattggttggagatgatttatttgttactaacatcgaaagactagaaaaaggaatagaaaagaaagcgggaaatagcattttggttaaaatcaatcaaattggaaccatttcggaaactattgatgctatcaacctagctaaaaaaaatcatttttcatatatcatttctcatagatcaggtgaaactgaggattcttttatagctgaccttgcagttgcaactggttcaggtcaaataaaaactggttcatgttcaaggactgatagaacctctaaatataatcaacttttaagaattgaagacttattaggttcaggttctaaatttgcaggtctttcgacttttaaaatcaaaacttaat

SEQ ID NO: 279996 - DNA, 1276 bp, Unknown
  Bacterial polypeptide expressing nucleotide sequence isolated from the Sargasso Sea
atgcaaaaaatatcttcagtaaatgccattcaagtttttgattcaagaggtgttcctaccatatcttgtaagattactttggaagatggaatatcagcatcagcaatggttccaagtggagcatctactggttcaaaagaggcagttgaactgcgtgataatgaaattacttatcatggcaaaagcgtaataaaggctgtcaataatattaataatatattgtcatctcttgtaataggcaaaaatccaaataatcaaaaagaaattgatgaatcgttaatactatttgacgataccaaagataaatcaaatgttggagctaatgcaatattagcaatatcacttgcagtagctcatgtggcagcaaaagctaacaatatctcactatatgagcacttctcgagggtctataaagacattactggtgaaaatgttaaccatagtatgcctttgccaatgtttaatatcctaaatggtggtgagcatgctgataacaatatagatattcaagagtttatgataattccaagtggtgcaaaagattttgttgaggtgatgcaatgggctacagaaatttatcataatttaaagaaaatacttctaatcaataatcactcaacagcggttggtgatgaaggtggctttgcacctagtcttgaatcaaatgatgaagcattgaaattaattgttgatgctataaaagaaacagaattagtccccggtaaagacgtaaatattgctcttgattgtgcagcaagtgagttttttgatggcaaagaatatattttaactggagaaagtaaaaaattatcatcttcagcatttactgactatttagatgatttgaccaaaaaatatcctattgtatcaattgaagatggcatggatgaaaatgatattgagggatggaagcttctcacagaaaaattaggatcaacttgtcaacttgttggagacgatttatttgttacaaacaagaaaatacttaaagatggcattaataaagaaatggccaattcaatacttattaagtttaatcaagttggttcaataactgaaacgattgaaactattcatttcgctaatcaaaataattttaagtcaatcatctcgcaccgttctggcgagactgaagatactacaattgctgatcttgcagtaggcctgggaattggacaaattaaaaccggagctccttgtaggtctgatagagtagcaaaatacaatagattgctttggatagaagaagaaagtagcaatattttgcttaaatgaa

SEQ ID NO: 279997 - DNA, 690 bp, Unknown
  Bacterial polypeptide expressing nucleotide sequence isolated from the Sargasso Sea
aatgtcaaaaattaaaaaaattcatggaagacagattttcgatagtagaggaaaccctacaattgaagttgatataaccctagaagatggaagttttggaagggcatctgttccctcgggagcttccacaggcgcatatgaagcttatgagcttagggatggtgcaaaagctttatcaggaaaaacagttttaaaagccgtaaatggtattaacactgaaataaatgacttacttagtggaatggaagcatacgaacaagaagcaatcgataatagaatgattgatcttgactcaactaaaaataaatctcgattaggtgcaaatgcaattttaggtgtttcgctagcattatcaagggctcaagcaaactcagaaggaaagcctttatatgagtatttgaattcttcagactcatatattctacctgtccctatgatgaatctaattaatggtggggcgcattctaataattcattgtttattcaagaatttatgattatgccaatatcttcagaaacatttaatcaagcaattataactggctctgaaatttttcattcactaaaaaatttattagagaatgatggatttagcaccaatgtcggagatgaaggaggtgtagcgccagatttaaaaacaagtgaagaagctttgtcttatctatgtaaggcaattgaaaaaagcaggct

SEQ ID NO: 279998 - DNA, 1258 bp, Unknown
  Bacterial polypeptide expressing nucleotide sequence isolated from the Sargasso Sea
aatgtcaaaaattacaaaagtagtttcaaggcaagtatttgatagtaggggtataccgacaatcgaaacagaaatcttttgtgggaaagtttcttcaaaagctatttgcccttcaggcgcgtcgactggttcatatgaggcatttgaaaaaagagatgtcacaaataaaaaatatttaggaaaaagtgttttttctgctgtatcaaaagttaataagataatttcaaaaaaaattctaaataaaaatgttcacaatcaagaattgattgactcaattcttataagattagatggaacaaagcaaaaaaataaactaggtgcaaatgcaattttgtctgtatctattgcagtgaaaaaattatcggcaaaattgaaaaaaataccattgtataagaactttttgattaaaaaaaattttaaattaccttttccccttatgaacatcatcaatggaggtgctcatgctaacaatagtttaaaaattcaagaatttatgattagacctgataaagctaagaattttagcgaggcaatgaatatttgttttttagtaatacaaaacttgaaaaaattacttatcagtaaaaatttatctacatctgttggagacgaaggtggttttgctccaatgatatcaaaaaatgaggaagcattaaaattaatctcgaacgctataaaaaaagcaggttttgttaacggaaaagatgtatcaatatgtctagatgttgctgcaaatgaactttttaaaaataacaaatatgcaatagattcaaaaaaatatatctcatacaaagacacaatatcattctactcaaaaattattaaaaaatttaaaataaaatctattgaagatcctttcgcagaaaatgattggaaatcatggtctgatttacataaaaaagaaaaaaaaatacagatagtaggtgatgatctttatgtaacaaatctgcaaagattgaaaaagggttttttatatcaatcatcaaattctattttaattaagttgaatcaaataggtacagtttctgaaactttagaggttataaaatttgcccaaaatataggttatacgactatcatttctcatagatcaggcgactcagaagatacgtttatatctgatttagcagttggaactaattcaaatcagataaaaacgggctcattatgtagatcggaaagggttgcaaaatttaatcagttgttgagaatagaagctgaccttttaaaaagcaaaaatatggctaaattgaaatga

SEQ ID NO: 279999 - DNA, 1288 bp, Unknown
  Bacterial polypeptide expressing nucleotide sequence isolated from the Sargasso Sea
atgaaatcccatataaaaaatattttttcaagagaaatactagactcaagagggaacccaacagttgaggtagatctggttcttgaaaatgaaattgtagcgcgtgcagcagtcccatcgggagcctcaacaggtgattttgaagcagttgaactcagggacaacgataagaaccgatatatgggaaaaggagtcctctctgcagtaaataatgtcaatagtgaaatacgaaacgctcttattgggattgatataaacaatcaagagaatattgataatatattaattgaacttgatggaacagaaaataaatctagactaggtgcaaatgcgattctaggagtatcaatggctgcttgcagagcaggggcgaaagctaatgatatccctttgtacgattatttatctatcaaaagtgattatgttatgcctataccaatgatgaatattttaaacggcggtagtcatgcagaaaatacaattgatattcaagaatttatgatcttcccaattggtgcaaattcattttcaaatgcactccaaatgggaacggaaatttttcaccaattaaaatctgagttatcacaaaaaggtctaaatacagcagttggtgatgaaggaggctttgctccggatttaacttctaatgaacaagcgatcgaaataattttggcagcaataactaatgcaggttataaatctggagaagaggtttttatcgctctggatgtagctgctagtgaattttttaaaaatgacttatatgccttagcttctgaagaaaaaacatattcatcaggtgaaatgattaactatttaagcgatcttgtaaaaaaatacccaattatttcaattgaagatggtttggaccaaagtgattgggatgggtggagaaaactaaatctagaaatcggtgccaacattcagatagtaggagatgatttaacagttacaaatttaaaccgtttaaatagagcagtagatgaaaaatcaatgaattcaatcctgatcaaattaaaccaaataggaacgattacagaaactgttcaagcagtacaattagcaaaaaaagttggatttggggcaataatatctcataggtctggagagacagaagatacgattatttcagatttctctgttgcaatggggatgggacaaattaaaactggttcattatctagaagtgatcgagtcgctaaatacaaccaacttattagaatcgaagaggaattaggaaataaagcaaaatacgctactatggactttattggaatgtccagatgag

SEQ ID NO: 280000 - DNA, 1276 bp, Unknown
  Bacterial polypeptide expressing nucleotide sequence isolated from the Sargasso Sea
tatgaataaaaaaattaaaagcattaatgctcgtcatatattagattcaagagcaaatccaacaattgaagttgaagttactacgagtgataatatcaaaggtcgtgccgcagtaccatctggagcctcaactggagcccttgaagctcatgaacttagagataatgatccatcctataacgggatgggagtaaataaagcgatcgaaaacgttaaaacaataatttcagacactttaataggtgaggatgtaactgatcagagcaatattgacgataagttaattgaattagatggaactgataataaaaataatcttggagcaaatgcaatcttagcagtgtctatggcctcaatgagagcaagtgcaaatcaacaaaacaaacaactttttgaactcttcccgaatatttacggaccaccttctctacctgttccttttatgaatattctcaatggaggtgcacacgctgataactctgttgatattcaagaatttatgattgtaccatttggtttcgaaacttttgatacctctttaagagcaggtgttgagatttatcatgtacttaagaaaagactgaaatcaaataagctttcaaccaatgttggtgatgaaggagggtttgctccaaactttaatacttcaacagagatccttgacgaaattatgcaatccatttctgaagctggttacgaaccaggtagaaatgtctctttagctttagatgttgcagcttcggaattctttacagatgatttttataggattgaaggaaatgaacttaacagccaggaaatgtcagattatttaataaatcttacatcgaactatccaataatatcaattgaggatggattagcagaagatgactgggatggatggaaatatctaacagaaaaaataggagatactattcaacttgttggagatgacttatttgttactcaagaaaaaatcttagaaaaaggagtcactgatagttgtgcaaactcaatcttagttaaagtgaatcaagttggaagtgtgagtgaaacaatcaatacgatgacactggccaaagacagcaactattcatctattgtttcgcacagatcgggtgagacagaagatacatttataagtcatttatgtgtcggcacttcaagtggacaaataaaaacaggtgcacctgcgagatcagaaagaacagcaaagtacaatgagttacttcgaattggggaaaaaataggttttgatcaattcaatattcaagaattgggatatagcaaatga

SEQ ID NO: 280001 - DNA, 1282 bp, Unknown
  Bacterial polypeptide expressing nucleotide sequence isolated from the Sargasso Sea
catgagtgaaattatttcagtgaaagctattcaggttcttgattcaagaggcaatccaacagtcgaggctgaagtcactttagaagacggcacgaccggacttgcatcggtgccctcaggcgcttcaacaggaagcagggaagcggttgagttaagagacggggacaaagatatttatttaggaaagggcgtttcagcggccgttaaaaatatcaattcagaaatacaatctgcactcaaaaatcaggatatttatgaccaaagtaagattgatcaaatcatgattgatttagacggtacagaaaataaatccagacttggcgccaatgcaattctcgccgtctcacttgcttgcattaaggctgccgcagcatcgaaggacatacgattgtttaagcatttatcaccgggtccgtatacttttcctgttccaatgatgaatatcattaatggaggcgagcatgcgaataacaatattgatattcaggagtttatgattctgcctgtaaattttgatcgcttttccgatgcgctcagggctggcgttgagatttttcattcactcaaggatgttcttcatgaaaaaggaatgagtactgcggttggcgatgaaggaggatttgctccaaaccttgaaaacaataaagctgcaatagagatcattattgaggccattgaatcaagaggatatcaggccggcagtgatatttttataggattagatgttgccagcactgaattttatcgggacggtgaatatcatttgtcttccgaaggtcaggcctttgattcgtcagattttgttaattatctttcacaaatggttgatgaatatcccattattaccatcgaggatggaatggccgaagatgattgggatggatggaaattattgagcgatgctattgcgaaaaaggttcaactggttggcgatgatctttttgtcaccaatccatcgatccttaaagaaggcattgatcgaggaatcgccaactcaattttaattaaaccgaatcaaattggaacgttgagtgagactttagaggctgtttctttggcaaataaaaacggatatacatctgtcatatcacatcggtcaggtgagacatcggattctacgattgcggatatttcaatgaaccctcaaatctctcaaatcaaaacaggatctttgtgtaggtcagatagaattgagaaatacaaccaattactcagaattgaatccatagtgggtgatgaggcagagtatttaggaaagaaggcttttaatcagatcatatga

SEQ ID NO: 280002 - DNA, 1246 bp, Unknown
  Bacterial polypeptide expressing nucleotide sequence isolated from the Sargasso Sea
atgggtgccgctatcagcgacatcttcgctagggccatcatcgattcaagagggaatccaaccgttgaagtcgactgctatgtcgatggtgtattgaggggtagggcagcggttccttcaggagcaagcactggaacacacgaagcagtagaattgagagatggcgggactcagtggatgggcaagggggttcaagaggcagttgacaatgtcaacggtccaatcagagaggcactgatcggaatgaatccttctgaacaggagagtattgactctctcctgataaaattggacggctctgagaacaaaggttccttgggggccaatgccatattgggagcctcactggcctgcttgagggcttcttcagacggagaactttggaagcatatctgtcacggagacgagatcagtctcccagttccgatgatgaatattctgaacggcggagcacacgccgaatcgaatgtcgatgtccaggaattcatggtcgtccctcatggtttccaatccttctcggaggctctaagagctggagtcgagatttaccattccctcaagaccacattaaagcaagagggactacttggtggagtcggggatgaaggtggcttcgccccgaatctttctaggaatgaagaaggactgcgtttggtcagagaggcaatagaggtagcaggatacgctccagggaaagaggtctccatagccttagacgtagcagctcaggaattcttcgatggctcaaactacctaattgatggggaactaatatctggaacaaacctcggtagaaaatactcagattggttggatgagtatccaatcgtatcaatcgaggatccattcggagaggacgattgggactcttggaaggaattcacctccagagaaggacacagggtacagatagtcggtgatgacctgtatgtgacaaatcctaagaggctcgagaaaggaatctctatccaggcctcaaatgctatactaatcaagttgaaccagattgggaccttcactgagactatggaagtgattcgcaagtcaagagaggctggttttgggactataatcagtcataggtcaggagagacttctgacgacataatttccgatttggccgttggcacaaactcaatgcagatcaagacgggggcaccggctaggtcagacaggacatcgaagtacaaccaactgattcgaatatcagaggaggttgggaactactctcaactattccaatgag

SEQ ID NO: 280003 - DNA, 316 bp, Unknown
  Bacterial polypeptide expressing nucleotide sequence isolated from the Sargasso Sea
tatggctaagattattaacgtgattggtcgcgagattatggattctcgtggtaacccaacagttgaagccgaagtgcatttagaaggtggttttatcggtatggcggctgcgccatctggtgcatctaccggtagccgcgaagcgctggaactgcgtgatggcgacaagagccgttacttaggtaaaggtgtattaacggctgtggctaacgtaaacggtcctatccgtgcggcgttaatcggtaaagatgcgactgcacaggctgagcttgatcaaatcatgatcgacttagacggcactgaaaacaaagacaag

SEQ ID NO: 280004 - DNA, 1297 bp, Unknown
  Bacterial polypeptide expressing nucleotide sequence isolated from the Sargasso Sea
atggctaagattattaacgtgattggtcgcgagattatggattctcgtggtaacccaacagttgaagccgaagtgcatttagaaggtggttttatcggtatggcggctgcgccatctggtgcatctaccggtagccgcgaagcgctggaactgcgtgatggcgacaagggccgttacttaggtaaaggtgtattgactgctgtggctaacgtaaacggtcctatccgtgcagcgttaatcggtaaagatgcgaccgcacaggctgaactcgatcaaatcatgatcgacttagacggcactgaaaacaaagacaagttaggcgctaacgcgattctggctgtgtctttagcggcggctaaagcggctgcagcattcaaaggcatgcctctatacgctcacatcgctgaattaaacggcacacctggccaatacgctatgccagtgcctatgatgaacatccttaacggtggtgagcacgcggataacaacgttgatatccaagaattcatggttcaacctgttggcgcgaaaaacttccgcgaagctttacgtatgggcgctgagattttccacaccctgaagaaagtactgcacggtaaaggtttaagcacttctgtgggtgacgaaggtggtttcgctcctaacctgtcttctaacgccgatgcattagcggtaatcaaagaagccgttgagttagcgggttacaagctgggtactgacgtgactctggcattagactgcgctgcttctgagttctacaaagacggtaaatataacctgtctggcgaaggcaaagtattcgattcaaacggtttctctgacttcctgaaatcactgactgaacaatatccaattgtctctatcgaagacggtctggacgagtcagattgggatggttgggcataccaaactaagatcatgggcgacaagatccaattagtgggtgacgatttattcgtaaccaacactaagattttaacccgtggtatcgagaacggcattgcaaactcaatcctgatcaagttcaaccaaatcggttcattaactgaaaccttagcggctatccgtatggcaaaagcggcgggttacactgcggttatttcacaccgtagcggtgaaactgaagacgctactatcgctgatttagcggtaggtactgcggctggccaaatcaagactggttcactgtgccgttctgaccgtgtggctaaatacaaccaattgctacgtatcgaagagcaattaggtgaaaaagcaccgtatcgcggtttgaaagaaatcaaaggtcaggcgtaat

SEQ ID NO: 280005 - DNA, 424 bp, Unknown
  Bacterial polypeptide expressing nucleotide sequence isolated from the Sargasso Sea
aatggatgaaaatgattgggatggatggaaacttttaactgaaaaaattggagacaaggttcagcttgttggcgatgatttatttgtcactgatatttcaaggttatctaagggaataaatgaaaaaattggtaattcaattttaatcaaatttaatcaagttggttcattaacggagaccatctcctctattaatttagccacagaaaataactttacttcagtaatatcacatagatctggtgaaacagaagattctacgatttcagacctttgtgttgctttcaacactggacaaattaaaacaggatcaatgtctagaagcgacagaatgtctaaatacaatcaattaattagaattgaggaagaattaggcgaatctgctgtatatctaggaaaaaaagcatttaagttaaacttctaa

SEQ ID NO: 280006 - DNA, 523 bp, Unknown
  Bacterial polypeptide expressing nucleotide sequence isolated from the Sargasso Sea
tatgaaaaataattattacaacattgaaggtgaaaaacttaccaatattgagatggctgattatttggttaacctaactgaaaattatccgatcctctcaatcgaagatggattaggtgaagatgactgggaagggtggaaatatcttactgacaaacttggacaaaacattcaacttgtaggagatgacttatttgtgactcaggaaaaaattctccaaagaggaattgatgatggatgtgcaaattcaattcttgtaaaggttaatcaagtaggaagtgttactgaaactatagaaaccatgaagcttgctgaaaaaaataattataactctttagtatcgcatcgatcaggagaaacagaagatacatttataagtcatctatgtgtaggtacatcaagtggtcaaattaagacgggtgctcctgcacgatctgaaagaacttcaaagtataatgagctacttcgtatcggtgaggtagttggttttgattcattcaacataagcaattggggaaaataa

SEQ ID NO: 280007 - DNA, 523 bp, Unknown
  Bacterial polypeptide expressing nucleotide sequence isolated from the Sargasso Sea
atgagtaaaattacaaaaataatcgcaagacagattttcgatagcagaggaaatcctaccattgaagttgaagttttttctaataaaattagtgctagtgctatatgtccctctggagcatcaacaggtagttttgaggcctatgagaaaagagaccaaaataataaaaaatatcttggtaaaagtgtttttaaagctgtagatacagttaacaaaattatttcaaaaaaaattaaaaatcaaaatatccatgatcaagtaaaaattgataatattcttattcgacttgatggtactaaacaaaaaaaaaaattaggtgcaaatactattctagctgtctctatggcaattaaaaaattgtcggcaaaagtaaaaaatattcctctttataagacatttttaatcagtaaaaattttaaattaccctatccgttgatgaatattattaatgggggtgcgcatgctaataatggtcttcaaatacaagaatttatgatcagacccgataaagctaaaaatttca

SEQ ID NO: 280008 - DNA, 1060 bp, Unknown
  Bacterial polypeptide expressing nucleotide sequence isolated from the Sargasso Sea
ctggtgggcatggaggtgtccgatcaaaaggcgctggaccaggccatgctggatgccgatggtaccgggaacaagggtaacctgggcgccaatgccatcctggcggtgtctttggctgcggctaaggcggcggcagtggatcagggcaagcctctctacgagtacatctctgacctgcaagacgatgacaacgaatactccctgccagtacccatgatgaacatcatcaatggtggtgagcatgccgataacaatgtggacattcaggaattcatgatccagccggtgggcgcgcccactgtggccgaagcgatccgatacggtgcagaaatctttcacgccctgaaaggggtgcttaagaagcgtggcctgaataccgcggtaggcgatgaaggcggttttgcgcctaatttgccgagtaacgaagcggcgctggaagcgattatggaagccatcgaaatcgcgggctataaggccggtgatgacgtgactctggcgcttgactgtgcagccagcgaattctacaaggatggcaagtatgtgttggcgggcgaagaccgcagcatgaattctgaagagtttgccgattatctggctgagctgtgcgatcgctatccgatcatttccattgaagatggcatggacgagtctgactgggatggctggaaaattctcactgaaaagctgggcaaaaaagttcagttggtcggtgatgatttgttcgtgaccaacacccgtattctgcagcgtggcattgacgagaaagtggctaactccattcttatcaaattcaaccagatcggttctcttaccgaaaccttggatgccatcaagatggccaaggatgccggctacactgcggtcatttctcatcgcagtggtgaaactgcggataccaccattgcggacttggctgtggctacggctgcagggcagatcaagacaggctccttgtgccgttctgatcgagtggccaagtacaaccgtttgattcgcattgaacaagagctggggcgtgctgcgtaccatggccgtaaagagttcaagctgctcggctaag

SEQ ID NO: 280009 - DNA, 1006 bp, Unknown
  Bacterial polypeptide expressing nucleotide sequence isolated from the Sargasso Sea
aatgagcaaaatatcaaaggttatagcacgtcaagtttttgacagtagaggaaacccaacaattgaagctgaagtattttctaaaaacactagctcatctgctatttgtccctctggtgcatcaaccggatcttatgaggcatttgaaaaaagagacaagaataacaaaaaatatttaggcaaaagtgttcttaattcagtgaaattagtaaataaaataatttcaaaaaaacttaaaaatcaaaacgtacacaatcaagaaaaaattgattcattgttaatcaatttagatggaacaaagcaaaaaacaaaatttggtgccaatgccattttatctgtttcaatggcagttaaaaagctttcagctaaattaaaaagaattcctctatataaaagttttttagttaaaaaggattttaaattaccctacccattaatgaatataataaatggaggagcccatgccaataatggattaagaatccaagaatttatgatcaggccagataaagcaaaaagtttttctgaggcaataaggatatgttttttagtaatatataatttaagaagtttaattaaaaaaaaatctttatctacatctgtaggtgatgagggtggttttgcgcccatgatcagtaaaaatgaagaggctctaaatttaattgtaaaagcaataaatagatcaggatttaaaaatggtaaagatgtatcaatttgtcttgatgtagcagctaatgagctgtttaaaaaaaatttatattcaattcactcaaaaaaatttgaaaatgttgaaaaatctataaaaaattacattaaaattattaataagtataaaattaaatcaatagaggatccattttctgaaaatgattggtcttcttggggcaagttaatgggtttagttaaaaaaacacaaattgttggagatgatttgtatgtaacaaatcttgaaagattaaaaaaaggttttttaaatagctcgtcaaacgctattttaatcaaactt

SEQ ID NO: 280010 - DNA, 1261 bp, Unknown
  Bacterial polypeptide expressing nucleotide sequence isolated from the Sargasso Sea
aatgagtaaaataaccaaagtaatagctagacaagtttttgatagcagaggaaatccaacaattgaagcagaagtttattgtaaaaatttaagcgcctcttcaatttgtccctctggagcttctacaggaacttatgaagcttacgaaaaaagagataaaacaaataaaagatatttagggaaaagtgttttaaaacctgtttcttatgtaaataaagtagtatctaaaagactaaagaatcaaaacgttcataatcaagaaaaaatagatcatattttaataaaattagatggcacaaaacaaaaaaccaaaattggtgccaatgctatacttgctatttcaatggcagtaaaaaaactgtcagcaaaaattaaaaaaattcctctttataaaagttttatcgttaagaaaaattttaaactcccataccccttaatgaatattataaatggtggagctcatgcgaataatggtctacgtattcaagagtttatgataagaccagataaagcaaagtcttttgtagatggagtaagaatatgctttcttgttattaatagtttgcgtactctcataaaaaaaatgggccattcgacctctgtaggtgacgaaggaggctttgctccaatgattagtgataatgaaaacgccttaaaactcattgtacaagctattaaacaagcaggttttacaaatggaaaagaagtgtctatctgtttggatgtagcggcaaatgaacttataaaaaaacaaaaatactcaattcattcaaaaaaatttatatctgtagatcagtcaattcaaaaatatcttaaattaattaaaaaatataaaattaaatctatagaagatccatttggtgaaaatgattggaatgcttggacaaaatttgttaacaaaacaaaaaataaagttcaaatagttggtgatgatctttttgttacgaaccttgaaagattaaaagtaggatttttaaatttatcagctaattcaattttaattaaattgaaccaaataggcacagttacggaaactttagaagtaatcaaatttgcacatttaattggatataaaactattatttctcacagatcaggtgatagtgaagatacttttattgctgatttagctgttggaacagactcaaatcaaattaaaactggttctttagctagatctgaaagagtttcaaaatataatcaacttattcgtatagaagaggagcttggaaaatcttctaaaatgaataaagttaattaa

SEQ ID NO: 280011 - DNA, 1067 bp, Unknown
  Bacterial polypeptide expressing nucleotide sequence isolated from the Sargasso Sea
caatactgagataagtaatgtgctttgcggtatggaagcatctgcgcaagaagaaatcgacaataaaatgattgagctagactcaacaaataataaatctcgattgggagcaaatgcgatattaggtgtttcactggcatcatcaagagctcaagctaattcagaaggtaagcatttattcgaatatttaaactcatcagattcttatattttacccgttcctatgatgaatttgattaatggtggggcgcattctaataattcattatttattcaagaatttatgattatgccagtatctgcagaaacatttaatcatgcaattataactggttctgaaatttttcattcccttaaaagtttattagaaaatgacggatttagcactaatgttggagatgaaggtggtgtagcaccagatttaaaaacaagtgaagatgcattatcttatttgtgtaaagccattgaaaaagcgggttatagacttgaagaggatatagtctttgctttagatattgctgcatcagagttatataatgatggccaatattttttatctaatgataatgcatctagcagtgatgatttaattgatatgtgggaagatctaacaaaaaaatacccaattttttcaattgaagaccctttacatgaagatgattgggatgggtgggtaaatctaaatgaacgaattggaaaaaaaacacagatagtaggtgacgatctttttgtaactaatccagaaaggttaaaaatgggtatagaaaagaatgcagctaattcaatacttattaaagttaaccaaataggcactatcactgaaacattagaaacaattaatattgctaaaaataataaatattcatgtgttatttctcatcgttccggggaaacagaagacacatttatagcggatttatctgtttcaacaaattctggtcaaatcaaaacaggttcaatgactaggtctgatagagttgcaaaatataatcaattaattagaattgagagtgatcttaagaataattccagatatgcaggtaaatcaattttaaagaagaattaat

SEQ ID NO: 280012 - DNA, 1242 bp, Unknown
  Bacterial polypeptide expressing nucleotide sequence isolated from the Sargasso Sea
aatgaaagaacaagaaattatttctaaagtttcaggttatgaaattctagattcaagaggcaatccaactgtagctgctgaaattactctaaatgatggaagatcttctatggcttttgttccttcaggagcctctacaggtaaatatgaggctcatgagaggcgagatgaagaagaaggcaggtatttaggaaaaggtgtaaaaaaagcaatctcatctattgatggtgaaattaacgagctgttaacaggcagatctccgcatgaccaaattgatatagataaaagattatgtgaactagatggaacatcagagaaaaataaaataggagcgaatgctattctcgcagtctcacttgcagttgctagatcttcttctactgtaaagggtcagcctctatatcagactataaatcaaacatttaaagaaatttctggagaagagcctaagcatatcttgccaatccctatgatgaatatacttaacggaggcgaacatgcagataataaaatcgatttccaagagtttatgattcaacctgttgaatttgatacttttagcaaagcccttcagtgtggtgtagaggtttttcatacgttaaaaaaagtactaaaggaaaagaatttatctacttcagttggagatgaaggaggtttttctcctcaacttttttctgctgaagaagctttagatttaattatggattcaatcgaaatagctgggtacaaggccggtaaagaagtttttatctgtttagattgtgcttctagtgagttttaccaagataacttatataaattaacaggcatgaaaaaagaatttgattctcaaagtttaactgaatacctagtgggattggctgagaaatatcccattatctccatagaggatggtttagatgaagatgattgggaaggttggagtgtcctgaatgaaagattaggttcaaaagttcaattggtgggagacgatctatttgtcactaataagaatagattgcaaagaggtataaaagaaaattctgcaaattcagtcttaattaaagttaatcaaattggatctttaaccgaagctcttgaaactatatatttagccagaaagaatggttttaagaatgtaatttctcataggtcaggtgaaaccgaagatgcatttttagctgatttatcagttggcgtaggggcgaggcaaattaagactggtgcaccttctagaagcgacagagtttcaaagtacaatag

SEQ ID NO: 280013 - DNA, 1276 bp, Unknown
  Bacterial polypeptide expressing nucleotide sequence isolated from the Sargasso Sea
atgtcaaaaattaaaaaaattaaaggaaggcagattttcgatagtagaggtaatcctactattgaagttgatattacacttgaagatggtagtttcggtagggcatcagttccttcaggagcttctacaggagcatatgaagcttatgagcttagagatggagaaaaaactttatctggaaaaactgtattaaaagccgttgagggtatcaatactgagataagtaatgtgctttgtggaatggaagcatctgcgcaagaagaaatcgacaataaaatgattgagctagactcaacaaataataaatctcgattaggagcaaatgcgatattgggtgtttcactggcatcatcaagagctcaagctaattcagagggtaagcatttatacgaatatttaaactcatcagattcatatattttacctgttcctatgatgaatttgattaatggtggagcgcattctaataattcattatttattcaagaatttatgattatgccagtatctgcagaaacttttaatcatgcaattataactggttctgaaatttttcattcacttaaaagtttattagaaaatgatggatttagcactaatgttggagatgaaggtggtgtagcgccagatttaaaaacaagtgaagatgcattatcttatttgtgtaaagccattgaaaaagcgggttatagacttggagaggatatagtctttgctttagatattgctgcatcagagttatacaatgatggccaatattttttatctaatgataatgcatctagcagtgatgatttaattgatatgtgggaagatctaacaaaaaaatacccaattttctcaattgaagaccctttgcacgaagatgattgggatgggtgggtaaatctaaatgaacgaattggaaaaaaaacacaaatagtaggtgacgacctttttgtaactaattcagaaaggttaaaaataggtatagaaaagaatgcagctaattcaatacttattaaagttaaccaaataggcactatcactgaaacattagaaacaattaatattgctaaaaataataaatattcatgtgtcatttctcatcgttctggggaaacagaagacacatttatagcggatttgtctgtttcaacaaattctggtcaaatcaaaacaggctcaatgactaggtctgatagagttgcaaaatataatcaattaattagaattgagagcgatcttaagaataattccagatatgcaggtaaatcaattttaaagaagaattaat

SEQ ID NO: 280014 - DNA, 940 bp, Unknown
  Bacterial polypeptide expressing nucleotide sequence isolated from the Sargasso Sea
aaacacaatattagctgtgtcaatggctgcaaaaaaactctcagcaaaagttaaaaaaataccattatataaaaactttatagtgaaaaaaaacttcagacttccttttccattaatgaatattataaatgggggagcacatgcagataacggtcttagaattcaagaatttatgattagacctgataaagcaagatcttttaatgatgctgtccgaatgtgttttttggtaattaacaatttaaaaaaattacttaaaaaagctggtcattctattaatgttggtgacgaaggaggttttgcaccaattataagtgacaatgaaaatgcactcaaacttattgttaaagcaatcaaaaaatctggttttaaaaacggtaaagatatatctatttgtttagatgtggcagcaaatgaattagtaaaaaaaggaaaatactcaattcactctaaaaaatatattagtgttgatagttcaataaataaatatttaaatttgataaaaaaatatcagattaaatctatagaggacccatttggtgaagatgattggaaagcgtggactaaatttttaaataaatctaaaaataaaacacaaattgtaggagatgatctttttgttactaatcttgagagattaaaagtaggttttctaaatttatcagcaaacagtattttgataaaattgaatcaaattggaactgttacagaaactttagaagttattaaatttgcccaattaataggttttaaaacaattatttctcacagatcaggtgataccgaagatacatttattgcagatttagctgtgggtacaaactcaaatcagatcaaaactggttctttagcaagatcagaaagaatagctaaatataatcaattattacgtattgaagaaggtcttggtagatctgcaaaaatgaataagattaattaa

SEQ ID NO: 280015 - DNA, 448 bp, Unknown
  Bacterial polypeptide expressing nucleotide sequence isolated from the Sargasso Sea
atgaaacttaaaaacataactgcaagagaaatttttgatagtaggggaaacccgactgttgaatgtgaattaatctttgaaaatattccatttccttttcgaggaatggttccatcaggtgcttcaactggaaaatttgaggcattagagctaagagatttagactctaatagaatgagtggcaaaggtgtacttaaagctgtatctaatgttaatgaactgattaaaccaataattttagaaaagtctttcaatggctttaaagattttgataaatttttgatagatttagacgggacagaaaataaatctaaatttggcgcgaatgctattttgtctttaagtcttgcttactataaggcatggtcttactcaaattttggagctatattcctatctcaaggtactgaaaaattaactatccctgtaccaatgcttaatgtaatta

SEQ ID NO: 280016 - DNA, 1285 bp, Unknown
  Bacterial polypeptide expressing nucleotide sequence isolated from the Sargasso Sea
catgagtgcaatcgtagatatcatcggccgcgagattctggattcgcgcggcaaccccaccgtcgaatgcgacgtgctgctcgaatcgggcacgatgggccgcgcggcggtgccgtcgggcgcgtccaccggctcgcgtgaagcgatcgaactgcgcgacggcgaagccggccgctacaacggcaagggcgtgctgaaggcagtcgagcatatcaacaccgaaatctccgaagccatcatgggcctcgacgcgtcggaacaggcgttcctcgacaagacgctgctcgagctggacggcaccgacaacaagtcgcgcctcggcgcgaacgcgatgctggccgtgtcgatggccgtcgcgaaggcagccgccgaagaggccggcctgccgctgtaccgctacttcggcggttcgggtgcgatgcaactgccggtgccgatgatgaacatcgtcaacggcggcgcgcacgcgaacaacagcctcgacatccaggaattcatgatcgtcccggtgagccagccgacgttccgtgaagccctgcgttgcggcgcggaagtgttccacgcactgaagaagatcctgagcgaccgcggcatgagcacggcagtcggcgacgaaggcggcttcgcgccgaacttcggcagcaacgacgagtgcctgtcgacgatcctgcaggcaatcgagaaggccggctaccgtgcgggcgaagacgtgctgctcgcgctcgactgcgcggcatccgagttctaccacgacggcaagtaccagctcgcgggcgaaggcctgcaactgtcgtcggccgaattcaccgactacctcgcgacgctcgccgacaagttcccgatcgtgtcgatcgaggacggcatgcacgaaagcgactgggaaggctggaagctgctgaccgaccgcctcggcaagaaggtgcagctggtcggcgacgacctgttcgtcacgaatacgcgcatcctgaaggaaggcatcgagaagggcatcgcgaactcgatcctcatcaagatcaaccagatcggtacgctgaccgaaacgttcgcggcgatcgaaatggcgaagcgcgcgggctacacggccgtgatctcgcaccgctcgggcgaaaccgaagattcgacgatcgcggacatcgcggtcggcctgaacgccggtcagatcaagacgggttcgctgtcgcgcagcgaccgcatctcgaagtacaaccagctgctgcgcatcgaggaagatctcggcgacatcgcaagctacccgggtaaatcggctttctataacctgcgctaa

SEQ ID NO: 280017 - DNA, 1294 bp, Unknown
  Bacterial polypeptide expressing nucleotide sequence isolated from the Sargasso Sea
aatggataattcaactatatataagataattgctagggaaattttggattctcgaggtaatccaacaatagaagtggacgtaacactatcggatggatctttaggacgagcagcagttccttctggcgcctctacaggggagcatgaagctgttgaattgcgcgataatgatactttacgatacttaggaaaaggagtaaaaaaagcagttaaaatagttaacacaactattgcaaatgaaataattggattagatgcgttaaatcaaaaaaatatagatgaagctatgatttcattagatggaacttcaaataaatcaaagctaggtgctaattcaatacttggcgtttcaattgcagtggcaaaatctgcatcaaattctaagaagatgccattttatgaatatataaatcaaaataaaacctatactatgccgatacctatgatgaatataattaatggcggaagccatgctgataataatgtggattttcaagaattcatggttttcccaataggagcaaggtcattttcaaatgcattacaaatgggtactgaaatatttcaccaattaaaaaaagtgttaaaaaataaaaatcttagtacatcagtaggcgatgaaggtgggtttgcacctaatttgaaatctaaccatgaagcaatagaggttattttaaaagcaatagataatgcgggatataaagctggtaaagacgtttatatagctttagatgttgctgcaagtgagctctttgataaagataagtatataataaaatcagaaaatagatctttatcgtccgatcaaatgatttcatattatcaaaatataattgaaacatatcctataatttcgattgaggatggcttagatgaaaatgattggggaggttggtctttaatgaatgaaacgctgggagataaagttcaaatagttggcgatgatttaacggtaacaaatataaaccgattacaaaaagcaattgatttgaaagctatgaatgcaattttaatcaaattaaatcaaattggtactttaacagaaacattggatgctattgcccttgcaaagaaagctgattttggagcaataatatctcatagatcaggggaaacagaagatacaactatagcagatttagctgttgcaagtggggttggtcaaattaaaacaggtagcgcatctcgaacagatcgcatttgtaaatataatcagcttctcagaattgaacaaaatctgtcaaataaatctaattatcctggagctgaagtattaggtcataatgagaagtaa

SEQ ID NO: 280018 - DNA, 1255 bp, Unknown
  Bacterial polypeptide expressing nucleotide sequence isolated from the Sargasso Sea
aatgagcaaaattacaaaagttgttgcaagacaagtttttgacagcagaggtaacccaacagttgaagcagagatatttgttaaaaatttaagctcaagttcaatttgtccatctggagcatctactggaacatatgaggcatttgaaaaaagagacaaagccaataaaaaatatctcggtaaaagtgtttttattcctattaaatatataaattctgtaatctcaaaaaaattaaaaaatcaaaatattcataatcaagagagaattgatcatattttaattaaattggatggtaccaaacagaaaaaaaaaataggcgctaatgctatactggctgtttctatggctgcaaaaaaattatcagcaaaaataaaaaaaatacccttatataaaaattttctagttaaaagtaattataagctcccatatccattaatgaatataattaatgggggtgctcatgcaaataatggacttagagttcaagaatttatgattagacctgatagagcaaagtctttttctgaagctgttagaatgtgtttcatagtaataaataatttgaaaaaattaataaaacaaatgggacactcaacatctgtaggtgatgaaggaggttttgcaccaatgattaatgataatgaaagtgccttaaaacttatagtaaaagcaatcaatttatctggatttaaaaatggaaaagacatttcaatttgtttggatgttgctgcaaatgaactgattaaaaataaaaagtattcaatccattcaaaaaaatttatttctgttgataaatctattcaaaattatttgaaacttattaaaaaatataaaattaaatcaattgaggatccgtttggagaaaatgattggaatgcatggactaaatttttaagcaaaacgcaaaaagtacaaatagttggtgatgatttatttgtaactaatttagaaagattaaaagttggttttttaaatatatcagcaaattctattttaattaaattaaatcaaattggcactgtaactgaaacacttgaagttattaaatttgctcaattgataggatataaaacaattatttcacacagatctggtgacagtgaagattcatttattgcagatttggcagttggaacaaactcaaatcaaattaaaacaggttctcttgctagatcagaaagagttgcaaaatataatcagcttattcgtatagaggagaaacttggaaaacattcaaaaatgaatacaatttaa

SEQ ID NO: 280019 - DNA, 1048 bp, Unknown
  Bacterial polypeptide expressing nucleotide sequence isolated from the Sargasso Sea
gggaggtggtcgtgagcaaaataagatctgtttttgtaggcagatactagattctcgcagaaacccgacggtcgaggtggaagtttcacttgatagtggtgctagtggatgggccatggtccccagcggtgcttctacgggacagttcgaagcggtggagttgagagacggggaagaaacatggtcgggtaagggagtcaagaaggctgtaagtcatgtcaacaatgaaatagcagatgctgttttaggtttagatgccacagatcagcgtgtgctcgatcagacaatgatcgatttagatggcaccgatgacaaaagcagacttggagctaatgcgattctaggagtgtccttggcagttgctagatctgcagctaaagatgcaggaatccctcttttcaaatacataggaggtgccaatgctcacctgctcccagttcctatgttcaatgtgataaacggtggtatgcacgccgataacaacatagattttcaagaatttatggtgatgcctgtgggtgcggcttcttacagagaagcgttgcagtggggtgcagaaatatatcactcccttaagtcagttttaaaagaccgaaagatgtcaacgacagttggggatgagggtggatttgcgcccaatctctcttccaatgaagaagcactgcaaatacttatagacgcaatagagaaatcgaacctcaccccgggtgatgacatttcattagctctcgatgttgcttctactgaattttttcagaaagagagttaccgaattgaagccgaaaatctttctttaaattcagatgaaatggtttcctatctagcggcgttgtgcgacaaatacccgatttgctctatagaggatggtatggctgaagaggactgggaaggttggtcgaaactcactaaagaacttggccataagattcagctagtaggggatgatctatttgtcactaactccctgagacttgagcgtggaatttcatcaggtatagctaattccattctggtaaaagttaaccagataggaactttaactgaaact

SEQ ID NO: 280020 - DNA, 265 bp, Unknown
  Bacterial polypeptide expressing nucleotide sequence isolated from the Sargasso Sea
attgggactgttacggagactatcgaagctatagaaatggcaagaaaagcaaatctaggggtgattatttctcatcgttctggagaaactgaagatacaacaatagctgatttagctgttggaatgggaatgggccagataaagacaggctccatatcaagaactgatcgaacatgtaaatacaatcaattacttcgtattgaagaagaattaggaaaagcagcaaaaatagctaaccttagttatttaggtatacctagatgag

SEQ ID NO: 280021 - DNA, 515 bp, Unknown
  Bacterial polypeptide expressing nucleotide sequence isolated from the Sargasso Sea
ttctgaaaataaaaaattagattccatagagatggttgaataccttagtggccttgttgaaaaataccctattgtatccatagaagatgggcttcatgaggacgattgggaaggatggaaacaactgacaaataagttaggaaataaaatacaaattgttggagatgatttaactgttacaaatatttcacgattagagcgctctatcgaagaaagcagcatgaatgctattctaattaaactcaaccaaattggaactgtgactgagacaatccagacaataaatcatgcaaaaaatgcaaattttggggcaatcatttcccatcgctcaggagaaactgaagacaccactatagcagatttagcagtagctatgggtatgggacaaattaaaacaggttctgtatccagaacggacaggacatgtaaatacaatcaactattacgtattgaagaagaattaggacataatgggtcaatcgctaacattggctatttaggaattccaaattgag

SEQ ID NO: 280022 - DNA, 946 bp, Unknown
  Bacterial polypeptide expressing nucleotide sequence isolated from the Sargasso Sea
cttaggagctaatgcgatgttagcggtttctatggctgttaaaaaattgtctgcaaaagtaaaaaaattacctttatataaaactttttctaaaaaaaataactttcaattaccttatccattaatgaacattattaatggtggagcgcatgcaaacaatggtcttagaattcaagaatttatgatcagacccgatagagcaaaaacttttactgaagcgatgcggatttgttttgttgtcattaaaaacttaagtaaattaattaaagataaaggtttatcaacttcagtaggtgatgaaggtgggtttgctcccatgatcagtagcaataatcaagctttagatttaattgtgagttcaattaaaaaatcaggatttattaatggtaaagatgtttctatttgtctagatgtggctgctaacgaattatataaaaaaaacaaatactctattcattcaaaaagttatatttcagtagataaatcaattaaagaatatcaaaaaattattaaaaaatataaaattaagtccattgaagatccatttgctgaaaatgattggttggcatggaataaattaatgaaatcaataaaaaaagttcaaatcgttggagatgatttgtatgtaacaaatcttgaaagattaaagaaaggtttcttaaatatttcctctaattctatcttaataaaactaaatcaaattggtaccgtttcagaaaccttagatgttattaaatttgctcaaactattggatataaaacaattatatctcaccgatcaggagatagtgaggatacgtttattgctgatttagctgtgggcactaattcaaatcaaattaaaacaggatccttagctagatctgaaagggttgcaaaatataatcaattaatccgtattgaagaagaacttggaaaaaaagcgaggatgaataagatcaattaa

SEQ ID NO: 280023 - DNA, 758 bp, Unknown
  Bacterial polypeptide expressing nucleotide sequence isolated from the Sargasso Sea
ttcaaatagtttaagagcaggagttgagatttttcataatttgaaggcaagtctaaataaactctcgctatctacttctgtgggagacgaaggtggttttgctcctaatttaactagtaatgccgaagcgctagatataattctagactcgattaaaaaatctggatataagagtggagaagaagtttatctgggtttagatgtggctagttctgagttctacaaaaatgaaaaatatataatgtcagatggtcatacgtataatagtgatgagttttgtgggtatttagaaaatctttgtgataattatcctatcatatcaattgaagatggaatggctgaaaatgattgggacggatggagtaagttaacaaataatctaaataagaagatacaattagttggtgatgatgtatttgttacgaataaaagaatctttaaaaaaggaattgataaagaagtagctaatgcaattttaattaagtttaatcaaataggcactattactgaaactttggagacaatagatttagcaagagaaaataattacaactatattatttctcaccgtagtggcgaaacagaagatgttacaatcgcagatatgagcgtaggtacatcatctggtcagattaaaacaggatcattatccagatctgatagagttgctaaatataatcaattattaagaattgaagagcaacttggcaaggaatacttcaataaagataatgtttttgatagatggctaaaatgaa

SEQ ID NO: 280024 - DNA, 958 bp, Unknown
  Bacterial polypeptide expressing nucleotide sequence isolated from the Sargasso Sea
atgaataaaatatttcgagttaaagctcgacaggtttttgatagtagaggaaatcctacaatcgaagccgaagtattttcaaataatctaagtgcatcagcaatatgcccatcaggagcatccacaggtacttacgaagcttttgaaaaaagagataaatttaacaaaagatatctaggtaaaagtgtattgaaagctgttgaattaattaataaaaaaatttcaaaaaaaataattaatcaaaatattcataatcaggaaaaaattgatagcatcctaataaatttagatggaacaaagcaaaagaaaaaattaggagcgaattcaatattagctgtatcaatggcagtcaagaaactttcttcaaaaattaaaaaaaaacctttatatcaatgttttttagaaaaaaaaatttttaaactaccttatccattaatgaacattattaatggtggagcacatgcaaataatggcctaagaattcaagagtttatgattagaccagatggcgctaaaaattttaccgaagctgttagaatgtgctttgtagttattcaaaatttaaaaaaaataattcacagaaaaggtttttcagtttccgtaggggatgaaggtggttttgctcctatgatttcaaataatgaagtcgctctcaaattaatagttcaagctataaaaaaatcaggttttattaatggtaaacatatttctatttgtcttgatattgctgctaacgaattaatcaaaaaaaacaaatattctattcactctaaaaattttattagtgtaaacgaaagtattaaaaaatatttaaaattgtttaaaaaatacaaaattaaatctatagaggaccctttttctgaaaatgactggaaagcatggtatagcctcatgaaatctgtaaaaaaagttcaaatagtaggtgatgatttgtatgttacgaaatttagaaagatta

SEQ ID NO: 280025 - DNA, 556 bp, Unknown
  Bacterial polypeptide expressing nucleotide sequence isolated from the Sargasso Sea
aatgccaaaaattaaaaaaattaaagctagagaaattattgatagtcgtggcaatccaactgttgaatgtgatatttatttatcagatgaaatctttggaagagcagcagttccttctggagcatctactggtatgcatgaagccattgaacttagagatcatgataaaaataggtatggaggaaaaggagttttaaaagcattatctaatattacagaaataatatctccaaaaatattaaacaaagaatttaaaaatattaaagattttgatgaatttttaattgctacagatggaactaaaaataaatctaatttaggtgcaaatgcaacattagctttgagtttagcctttgctaaatcacttgcttcttatgagaaaaaaaatctttttcattatttaagtaattcagatcaatacattatgccagtacctatgatgaatattattaatggcggctctcatgcagataataaagttgatattcaagaatttatgattgctcctgtaggtgcatcaagttttagagaatcaatcagatatgagcagaaattt

SEQ ID NO: 280026 - DNA, 1279 bp, Unknown
  Bacterial polypeptide expressing nucleotide sequence isolated from the Sargasso Sea
atgtcaaaaatatcgaatgtaaatgctattcaagtttttgattctagaggcattcctacaattgcttgcgaaataaaacttgataacgggatatgtgcatcggcaatggttccaagtggagcatcgactggttctaaggaggcactagagctcagagacagtgattcaaattatcatggaaaaggagttcttaatgctatttcaaatattaataatcaattaggtcctttattaattggaaaagaatcagaaaatcaaattgaaattgacagaatattaattgattatgacggtacagtcgataaatcatctatgggggcaaatgctatattagcaatatccctagcaagctctcatgttgcagctaaaaataaaaaagttaacctatatgagcatttttccagtatctacaaagatataacaggcaaagcaaataaatactcaataccgatgccaatgtttaatattttgaacggaggagagcatgctgataataatgttgatattcaagaattcatgatcgtaccgagtggtgctaaggattttactcagataatgaaatggtcaacggaaatttatcataatttaaaagaaattttattatctaaaaattattccacagcagtaggtgatgagggcggatttgcaccaaatctaaattcaaatgaagaagcaatagaattaatcattgaatcaattaaagcatcaaaacttaacccaggagatgatgtgagcattgctcttgattgtgctgcaagtgagttttttgatggtaataattattttttaaaaggtgaaaataaaaaatatacatatgcagaatttacaaattatcttgataacctaattacacaatacccaatttcatctattgaggacgcaatggatgaaaatgatgtagagggttggaagctagttactgataaattgggaaaaaaatgtcagctcgtcggcgatgacttatttgtaactaataaaaaaatttttttagaaggcatcaatcacaaacttgctaattcaattttgattaaatttaatcaggttgggactataacggaaacaattgggacaattgattgtgcaagagaaaatggctataaatgcattatatctcacagatctggagaaactgaggatacaactatttcagatttagcagttggattaggagcatcacaaattaagactggagcaccttgcagatcagacagaattgcaaaatataatagattgctttggattgaaaataaaagcaatgatattttgttaaatgaataaa

SEQ ID NO: 280027 - DNA, 283 bp, Unknown
  Bacterial polypeptide expressing nucleotide sequence isolated from the Sargasso Sea
aatgcttgtgaaggttaaccaaattggaaccttatcggaaaccttgagtgcagttgaaatggcacaccgagcaaactttactaatgtaatgagccatagatctggcgagaccgaagacgcgacgatagctgatcttgcagtcgcaactaattgtggtcagattaaaactggttctttggcacgatctgacagactagccaagtataaccaacttatccgcattgaagaggaattaggggataccgccgtatatgcggggcattcaatcttaaagtcgaaatag

SEQ ID NO: 280028 - DNA, 384 bp, Unknown
  Bacterial polypeptide expressing nucleotide sequence isolated from the Sargasso Sea
tgtcatggagaaagtttatgacctcgatgaataaaaaaattcaaatagttggtgatgatttgtatgttacaaatcttgagagattaaaaattggttttttaaatcagacttcaaatgcaattttaataaaattaaatcaaattggaacagtgactgaaacattagaggttattaaatttgcacataatattggttttaatactattatttctcatagatcaggagaatcggaggatactttcatcgcagatttatcagttggaacaaattcaaatcagttaaaatcaggttctttatgtaggtctgaaagagttgcaaaatataatcaaatactgagaatagaagaaactctaggtaaaaaagcaaaaatgaacagtttatgat

SEQ ID NO: 280029 - DNA, 721 bp, Unknown
  Bacterial polypeptide expressing nucleotide sequence isolated from the Sargasso Sea
atgcaatggtcttctgaggtatatataaatttaaaagaaatcttgcattctatgaagctttccacttcagttggagatgaaggaggatttgctcctaatctgaactcgaatgaagaagctataaaactaatcgaagaatctataattaaatctgatctaaaaccaggaattgatattaatattgcattggattgtgctgcaagtgaattctttaagaatggtaaatatattttaagtggtgagggcaaggaattatcatctgatgagttttcggattatttaaaaaatttgattagtaaatacccaattacttcaattgaagacggcatggatgaaaatgatattgatggttggaaagttctaacaaaaaaaattggaaataaatgtcaattagttggagacgacttattcgtaacaaataaagaaattttaagtaaaggtattaaaaaagaaatagcgaatgctatattgataaaatttaatcaagttggaagcttgactgaaactattagagctattgagtgcgcaacttctgctgcatataaatcaattatttcgcacagatcaggggaaactgaagataccacgattgctgatcttgcggtaggtctaggcgtaggccaaataaaaacaggtgcaccatgcagatctgacagagtttcgaaatataatagactgctttggatagaagaagaaaataataagattcttcttaaatgaa

SEQ ID NO: 280030 - DNA, 1276 bp, Unknown
  Bacterial polypeptide expressing nucleotide sequence isolated from the Sargasso Sea
tatgaataaaaaaattaaaagcatcaatgctcgtcatatattagattcaagagcaaatccaacaattgaagttgaagttactacgagtgataatatcaaaggtcgtgctgcagttccatctggagcctctacaggagcccttgaggctcatgaactcagagataatgattcttcctttaatgggatgggagtgaacaaagcgatcgaaaatgttaaaacaataatttcagatactttagtaggtgaggatgtaactgatcaaagcaatattgacaacaagttaatcgaattagatggaactgataacaaaaataatcttggagcaaatgcaatcttagctgtgtctatggcctcaatgagagcaagtgcaagtcagcaaaacaaacaactttttgaactcttcccaaatatttacggaccaccttcactacctgttccttttatgaatattctcaatggaggtgcacacgctgataactctgtagatattcaagaatttatgattgtaccatttggctttgaaacttttgatacctctttaagagcaggtgtcgagatttatcatgtacttaagaaaagacttaaatcaaataagctttcaaccaatgttggtgatgaaggaggatttgctcctaattttaatacttcaacagagatccttgatgaaattatgcaatccatttctgaagctggttatgaaccaggtggaaatgtttctttagcgttagatgtcgcagcctcggaattttttacggatgatttttataggattgagggaaacgaacttaatagccaggaaatgtcagattatttaataaatctatcttcgaattatccgatcatatcaattgaggatggattagctgaggacgactgggatggatggaaatatctgacagaaaaaataggagacacaatacaacttgttggagatgacttatttgttacgcaagaaaaaatcttagaaaaaggagtcgctgatagttgtgcaaactcaatcttagttaaagttaatcaagttggaagtgtgagtgaaacaatcaatacgatgacactggccaaagaaagcaactattcatcaattgtttctcatagatcaggtgagacagaagatacatttataagtcatttatgtgtcggcacttcaagtggacaaataaaaacaggtgcacctgcgagatcagaaagaacagcgaagtacaatgagttacttcgaattggggaaaaaataggttttgaacaattcaatattcaagaattgggatatagcaaatga

SEQ ID NO: 280031 - DNA, 1264 bp, Unknown
  Bacterial polypeptide expressing nucleotide sequence isolated from the Sargasso Sea
tcgtcatattgtcggccgcgagattctcgacagtcgcggaaaccccaccgtcgaggtggatgtcacccttaacagcggagccttcggccgtgcggcagtaccgtcgggcgcctccaccggcgcacacgaagccgcggagcggcgggacggcgatccggcgcgctacggcggcaagggagtgcttggtgccgtcgaggtggtgaataccgagatctacgaggcgctggccggtttggacgccgacgagcaggagcatatcgaccgcctgatgtgtgatctcgacggtaccgagaacaaggggcggcttggggcgaatgcgatcctcggcgtttccatggccgtggggaaggcggcggccgaggatgccaggcttccgctctaccgttatgtcggtggcagccacgcccggaccctgccggtgccgatgatgaacatcttgaacggcggtgcgcatgcggacaacccgatcgatatccaggagttcatgatcatgccggtgggggcggccagcatagcggacgcagtgcgggtcggatcggaaattttccagacccttaagaaacagctcctggacgccggccacggcaccaatgtgggagacgagggcggatttgcgccgaacctgaagagcgccgacgaggcgctaggcttcattagcaagtccatcgaggcggccggctacaagccgggcgacgacgtggtcctcgcactcgacgcggcgtcgacagaattctacgtcgatggcaaatatgcactggcgggcgagggcaagttgttcgattccggtgcgatggtcgaatatctggtcgatctgtgcgcacgctacccgatcatctcgatcgaggacgggatggcggaagacgactggggcggctgggtggcgctcaccgaggcggtgggcgaccgtgtccagctggtcggcgacgatctgttcgtcaccaacccggtgcgactgcgcgacggcatcgcgaagggggcggcaaactcgatcctgatcaaggtcaaccagatcggcacactttcggaaactctcgacgccgtcgagacggcacacaaggcgtcctacacgtcggtcatgtcgcatcgctcgggcgagaccgaggacgctaccatcgccgacttggctgtggcgactaactgcgggcagatcaagacgggctcgctcagccggtccgaccggcttgctaagtacaaccagctgatacgtatcgaggaagcgcttggcccggcggccacctatgcgggacgttcgatccttcgctag

SEQ ID NO: 280032 - DNA, 1288 bp, Unknown
  Bacterial polypeptide expressing nucleotide sequence isolated from the Sargasso Sea
aatgtacaaaataaaatcagttgttggaagagaaatacttgactcaagaggaaatccaactgtaggcgtggaaattgaattagatggtggaattataggttcagcttcagttccgtcaggagctagtacaggatctagagaagctttggaacttagggactctgacccaaatagattcaatggtaaaggagtccttaaagcggtagaaaatattaataagaaaatagaaaaaatcctcatagataaagattctcgcaaccaaaaagagatagatgaattaatgattgaccttgatggttcagaagaaaaaaagaatttaggagctaatgctattttaggagtttcattagctgtactttctgcctccagtagagccgaaggtttagagatttatgaaaaaatagcagaattatcagaagaaaaaaaaccatctctattaccagtaccaatgctaaatattatgaatggaggagcacatgctattaactccactgattttcaagaatttatgatagctccaatgggattcgatagttttggggaatccattagagctggttctgaaatttacttcacactaggtaaaattttagaaaatgaaggattatcaacaaacgttggatatgaaggaggttatgctccgtctaatctttcaaataaacaagtacttgattttattatcacagctactgaaaaagcaggatatatacctggtgatgatatttttatctcacttgatccagcatcttcagaattcggtaataaatctgaatacttgctaagcaaagaaaatattaaattatcatctgaggagatggtcgaatactactcaaatcttatagaggaatatcctatatattcgatcgaagatggtttgtctgaggatgattggaacggatggaatatttttaccagcaaacacggtaaaaaaacccaaatagttggagatgatttattcgttactcaaaaaaagtatttagaaaaaggaattaatgaaaagtcggctaacgcaatacttataaaattcaaccaagttggaactatttcagaaacactagaaactatacaacttgcttcaaataacaattttaaatctgttataagccatagatcaggagaaactgaagatacaactatagcagatttagctgtaggaactaactctggacagataaaaactggagctcctgctcgatcagacagggttgcaaaatacaatcgattgcttagaattgaagagaaacttaaagataaagcaacttttgctggaaaatctatactactttaa

SEQ ID NO: 280033 - DNA, 1287 bp, Unknown
  Bacterial polypeptide expressing nucleotide sequence isolated from the Sargasso Sea
ttgtggaaaaaacattaaaacctataatagaaaaaattcatgctcgtgagattttagattcaagaggttttccaactgttgaggttgaggttacagcttctggacatactggattatctgccgtgccatcgggagcttcaacaggagaatttgaagccttagagttgcgtgatgtcgattctagcagatttaatggtaagggggtattaagtgctgtaaataatgtaataaatcactttggaccagcattaattggtaaagacgctagtgatcaaaaatcaattgatgagttgcttataaatcttgatggatctccgaataaaagcacatacggagcaaatgctagcttaggaatttctatggcttgtgctgtggttagtgcatctttttttaataaaccgctatatgaatatttaaatccacagagtagcatcatgccaattccaatgattaatgtgttaaatgggggaatgcatgctgatcaaggatcagatcttcaagaaattatgttgtttccgcatggagctgaaagtttttctaagtcaattcaaatgggttcggaggttttccattgcttaaaaaatgaattaaaaagtcgtggtctaaataccacagtaggagatgagggtggttttgcacctgctttaaagtctaatgaccatgccattgaaatgctgcttaactctattgaaaaagcaggttttgtagtcggaaaagatatttcgctagcgctggatgtcgcagcatcaagtttttataaagatggtaaatatcacttgaaagttgatggaagcattctaggcacagatgagatgatttcattttatgagaaccttataagtcaatatccgattgtttctattgaggatggtttagatgaaaatgattggagagggtggacaagcttgaataaggtgctaggagataaaattcaaattgtaggcgatgatttaacagtgacaaatcctaaaaaattacaaaaagctatagatgagaaatctattaattctatattaataaaattaaatcaaataggtactgtttctgaaacaattgaatcaattgaaatagcaaaatcaaatgactataattatataatctctcatagatctggggaaactgaagatacttttatatctgatttatcggtggctatgggtggtggtcaaattaaaacgggttcagtttgtcgatcagacagaaccgccaaatataataggcttttacgcattgaagaaatgctggagtctccgactttttgtaacagcttaagttttataaaatgaa

SEQ ID NO: 280034 - DNA, 865 bp, Unknown
  Bacterial polypeptide expressing nucleotide sequence isolated from the Sargasso Sea
aatgatgaatataattaatggcggggcacacgcaaacaataacattgatattcaggagtttatgattattccagtaagtgcacctaacttcaaagaatccctcagatacggtgctgaagtgtttcattgcttaaaaaaagttcttaaccaaaagcaacttaatactgctgtaggagacgaaggtggttttgcgcctgatctaaatacgaatgaagaggcgctagatacaatattagaagccataatgaatgtaggtttaaaggagggaaaggacattgttttggcacttgatgtagcgagtagcgaattttataaagacggttattatcatttagaatctgaaaatcgtaaatttaattcagaagagttctcaagctatcttgggcatttagtcaattcttatccaataatatcaattgaggacggcatggacgaatctgattggaatggatggaaaattctatcagaagaactaggtcataaaattcaattggttggagatgacttattcgttacaaataagaaaattcttcaggatggagttgacaaagaaatagcaaactcaattttaatcaagccaaatcaaattggtacaattaccgaaacaattgaagctattgatctggctattaagtctaattatacagcaatagtatctcatcgttcaggagaaacatcagacactactatttctgacattgcagttggaacaagagcgtcccaaataaaaacaggatccttatcaaggtcagatagggtggcaaaatacaatcaattgcttaggattgaagagagcttaggtaatagagcaactttcgatgtaaagaatgcatttgctgttccttttcttaataacgatacataa

SEQ ID NO: 280035 - DNA, 1273 bp, Unknown
  Bacterial polypeptide expressing nucleotide sequence isolated from the Sargasso Sea
atgaagattaaagatgtaaaaggtaggcagatactcgattcaaggggaaatcctacagtagaggtagatattaagctagatgatgatagcgaaggaagaggcatatctccatcaggagcttcaacaggaagtctggaagcattagagcttagagatgataacaaggaaatgtataatggtaaatctgttttaaaagcagtagcaaacgttaatgagaacattaagaatgctataaaaggtaaatcgttcaattctcaagaggattttgataattttcttatagatcttgatggatcagagaataagaatgtattaggtgctaatgcaattctttcgtcttctcttgcttatgctcatgcttctagcttatctaaaaatattcctttatataaatcatttattaataataactatactttaccagttccaatgatgaatatactcaatggtggagctcatgctaacaatgaacttaattttcaagagtttatgatattaccaattaaattcacttcattctctgaatcactcagagcaggaacagaaatctttcatgaattaaaaaaattattaatctcaaaaaacttaagttcagcagttggtgatgagggtggctttgctcctaacttatcatctaacgaggatgcgttgaatattatattggatgcaataaacagcgctggatatactcccggcgaagatatctttcttggattagatgtagctagcactgagttttataaacaagataaatatatattaaatgataaaaataccttagattcatcgtcattttgtgattatttagttaaactatgtgataactatcctatcataagcattgaagacggcatgtcagaggatgattggaatggctggcatgaaatcactgaaagactcggaaataagattcagcttgttggcgatgatatatttgtaactaataagaatattcttcaaaaaggcattgattcaattgctgctaattcgatattgattaaactgaatcaaattgggacattaacagaaacacttcaaacaattgatttggctaaaaaaaataactatacatgcattatctcacatagatcaggcgagacagaggatacaactatagcagacctatcagttggcgtagatgcgggacaaataaaaactggttcattatctcgatcggatagagtagcaaaatataatcggctccttagaattgaagaagaattaggaaataataaatatagtaataatgtttttaataggtggttatcttgaa

SEQ ID NO: 280036 - DNA, 889 bp, Unknown
  Bacterial polypeptide expressing nucleotide sequence isolated from the Sargasso Sea
gatcgcaaataaacaatcactttataaaagtttaggcaaatcttattctctaccaattccattgatgaatattataaatggaggcgcccacgcagataatgatttaaatattcaagaatttatgattaggccagactctgctaaaaattttacagatgccatggaaaaatgttttcttgtaatacaaaatttaaaaaaactattacaatcaaaaaaaatgttaacaaatgttggtgatgaaggtggatttgctccatcaatcaattcaaatgaagaagctttagacttaatagttcaagctatcgaaaaatcaaaattaaaaccgggtaatgacgttgtaatttgtttagatgtagctgcaaacgaactaaaaaatgaaaagggagaatattcagttcaatcatctaactttctgccagtagctgatgttgtaagctattacaaaaaattaacatccaactacccgatcaaatccattgaagatccatttgcagaagaagattggcaatcatggaaaaagattacttctgcaataggaaacaatgttcaaattgttggagatgatttatttgtaacgaattctaaaagactagaaaaaggcataaaagaaaaatctgctaatagtattttagtaaaacccaatcaaattggaactttgactgaaactttagaagttatttcaatggcaaaaaaagcaaatttcagcactatcatttcacaccgatctggtgacacagaagacacgtttatagctgatttggcagtggccactatgtcttctcaaattaaaacaggttcattagcaagatctgaaagagtcgctaaatataacagattattacgcgtcgaagaagaacttggcaatcaagccaaaatggctagaatctag

SEQ ID NO: 280037 - DNA, 286 bp, Unknown
  Bacterial polypeptide expressing nucleotide sequence isolated from the Sargasso Sea
aatgcgattttagtaaaattgaatcaaataggcactctatctgaaactatagaagctattaatcttggaaaaaaaaataattttaattcaataatttctcatagatcaggggaaacagaagatactactattgccgatttatctgtcgctgtttctgctggtcaaataaaaactggctcactttcaagaactgatagaactgcaaaatataatcaattattgagaatagaagaaatgcttggttcaggggctaaatatgctggtaaatcaattctaaaacattgac

SEQ ID NO: 280038 - DNA, 676 bp, Unknown
  Bacterial polypeptide expressing nucleotide sequence isolated from the Sargasso Sea
atggcaaaaattaaaaagattataggtagacaagtttttgacagccgaggtaatccaacagttgaggcagaattattttcagaaattggttctactttagcaattgtaccttcgggtgcatcaaccggaacacatgaatcttacgaattaagagataatgaaaataacgagtatttgggtaaaagtgtttttaaagcggtagaaaatataaatggtcctatttttaaagctataaataatattgacacaaaagatcaaaaaaaaattgataaaatattaatagaattggatggcacagaacaaaagaaaagattaggtgcgaatgcaatattagcagtatcaattgctgcaattaaaaacgctgcattagaaaaaaaaactccattatttaagtttatgggaggtaatgccgtaaacaaactacccatccctatgatgaatataattaatggtggggcacatgcaaacaattctttagaaatacaagagttcatgattagaccagatggagctgaaagtttcaaagagtgcatgagaatgtcttatttggttattcaaaaattaaaaaaaaatttagaaaacatgaatatttcaacgagtgtaggagacgaaggtggttttgcaccctctttaaaatcggatgaacaggcaatagaattcattatacaatcaattg

SEQ ID NO: 280039 - DNA, 1270 bp, Unknown
  Bacterial polypeptide expressing nucleotide sequence isolated from the Sargasso Sea
tatgaatacaaatataaataaaattcacgctagatatatattagattctagagctaatccaactgttgaggttgatattaccttagaggatggatcttttggacgtgcagcagttccttcaggagcttcaaccggaaaacttgaagctcatgaattaagagatggagacgcaagttttttgggcaaaggcgtttcaaaagctgttgataatataaatacacttataaatgatgaattagttggacaagactctggaaatcaagaaaatattgataaattaatgattgctctagatggttcagacaacaaaggaaaactgggcgcaaatgcaattttggctgtttctcttgctaacttgaaagctttttctcaatcatccggcaaacatgtctatgaaattattccaaatatatatggagccccttcgttacctgtgccttttatgaatattttgaatggtggcgcacatgcagacaataaggttgatattcaagaatttatgattgtcccatacgggtttgaaagatttgattattccttacaggctggggtagaaatatatcatacgcttaaagaattacttaaggaaaaaggtctttctacgaatgtaggtgatgaaggaggctttgccccaaatcttaattcatcttcagaagtgatagaaactatattagaagctattaaaaagtcaggatataaccctgaagaagaagtagctatagcattagatgctgcagcttcagagtttcataaggatggaaagtatttaatagaggatcaggaattaagttctaatgagatggttgactacttagttaaacttgcaaatcagtatccaataatttcaattgaagatggcttaagcgaagacgattgggaaggctggacattactaacagagaaacttggagagaatgtccaacttgttggtgatgatctttttgtaacccaggaaaagatattacaaaaaggaattgatcaaaatgcagctaattctattctcataaaaattaatcaagttggaagtataactgagacacttgagacaatgaatttaggtaaaaaaaataattacacatctatggtctctcacaggtcaggagaaacagaagatacatttataagtcatttagttacaggtacatcaagcggacaaattaaaacaggagctccagcaaggtctgagagagcagcaaagtataacgaactactcaggattggagaaaaagtaggttacgaaacttttaacaataaaaaatggaaaaattaa

SEQ ID NO: 280040 - DNA, 1066 bp, Unknown
  Bacterial polypeptide expressing nucleotide sequence isolated from the Sargasso Sea
aaatattgccatcgataatataaataaaaaaatttcaaataaattaataggattagaatgtgatgatcaaaacaatatagataatattttgatagatttagacggcagcgaaaataaagcaaatttaggagcaaacgctactcttgctgtttcgttggctaattctaaatgcgcagctttatcaaataaaaaatctttatttaaaaatttgggaaataatttttcacttccatttccattaatgaatattattaatggaggagcgcatgcagataatgacctaaatattcaggagtttatgataaggcctgactcagctaaaaactttatggatgctattgagaagtgctttatagtaattcaaaatttaaagaagttattaaagtctaataagatgttaactaatgttggagatgagggagggtttgctccatcaataaacacaaatgaacaagcattagaattaatcgttaacgcaattgaaaaatcaaaatttaaaccaggaaaagatatagttatttgtttagatgtagctgcaaatgaactgattaatggaaaaggcgaatattctattcaatctaaaaatttctcatcagcagatgctaacatcgattattacaaaaaattgatctctaattatcctataaaatcaatcgaagatccttttgcggaagaggactgggagtcttggaaaaaagtaacaaatgaaataggtaaaaatgtacaaattgtaggtgacgatttatttgttactaatgttaagagattaagcaaaggtataaaagaaaaatcagctaattctattttagttaaacctaatcaaatcggtactttaactgaaaccttagaagttatctctatggcgaaagctgctggtttcaatacaatcatatcccatagatcaggcgatacggaagatacatttattgccgatttggcctcagcgacaatgtcctctcaaattaaaactggatcattagcaagatctgaaagagtggcgaaatacaacaggttattgcgcatcgaagaagaacttggaaataattcaaaaatggctagaatttag

SEQ ID NO: 280041 - DNA, 819 bp, Unknown
  Bacterial polypeptide expressing nucleotide sequence isolated from the Sargasso Sea
ctcctattgcatttcaagagtttatgattgttccattaaatgcagaaagtttctctcacgctatgaaaattggcacagaaatttttcataatttaaaaagtatcttatcaggtagaggtttatcaatttcagtaggtgatgaaggagggtttgctccaaaattaaaaggaactgaggatgcacttgaaaccattattaaatctatatcatctgcaggatttaaacctggtgaagatgttatgattgctcttgattgtgcttcatctgaattttttgaagataatcattatgattacaggatatttgaaggtaaaaatggaaaagtctttgattctgtacaacaggctgattatttatctgatcttgttagtaaatatccaattatatcgattgaagatggtatggatgaaaatgattggagtggttggattcattcaacaaatgttcttgggaataaagttcaattagttggtgatgacctttttgttactaatacaaatattttacaaaaaggtatcgatcaaaaagctgcaaattctattttaattaaagtaaatcaaataggtactctgacagaaactatcaatgcaataaacttggcaaaagaacatggattttcgactgttatttcgcataggtctggtgaaaccgaggataatattatagcagatttagcagttgcattgaatgctggtcaaataaaaacaggctctctttctaggtcagacagaatgtcaaaatataatcaactacttcgcattgaagagcaacttggaagtaaagcattttatccaaaaagagaagcttttactttttaag

SEQ ID NO: 280042 - DNA, 1087 bp, Unknown
  Bacterial polypeptide expressing nucleotide sequence isolated from the Sargasso Sea
aaatttttaggcaaaagtgtaaatattgctgttgaaaatataaataataaaatttcaaataaacttaaaggttatgactcagacgaccaaaaaaaaatcgataaagctttattagatttagatggaagtgaaaataaaacaaatttgggagctaatgctactttagcagtctcactagctaattcaaaatgttcagctttatcaaacaaaaaatcattatttaaatatcttggtagcactttctctttacctataccattaatgaatattattaatggtggtgcgcatgccgacaatgacttaaatattcaagaatttatgattagacctgactcagctaaaaattttatggacgctattgaaaaatgttatgttgttattcaaaatttgaagaaattacttaaatctaacaaaatgctcacaaatgtaggagatgaaggtggatttgctccatcaattaatacaaatgagcaagctttggatttaattgtaaatgcaatagaaaagtcaaatttaaaaccaggaaaagatatagttatttgtttagatgtagcagctaatgaattaattaatgagaaaggggagtattcaattcaatctaaaaattatacatcagtcgaagataatattaattattataaaaaacttacatctaactacccaataaaatcaatagaggacccttttgccgaagaagactgggaatcttggaaaaaaattactaacgaaatagggaaaagtgttcaaattgttggagatgatttattcgtcacaaatgtaaaacgtttaagtaaaggaataaaagaaaagtcagcaaattgtattttagtaaaacctaatcaaataggcactttaactgaaactttagaagtaatttcaatggcaaaagccgcagattttaatactatcatttctcatagatctggggataccgaagatacatttatcgctgacttagcgtccgcgaccatgtcgtctcaaattaaaactggatctttggcgagatctgaaagagtagctaaatataataggttattacgcatagaagaagaacttggaaatcaggccaaaatggctagtatctaac

SEQ ID NO: 280043 - DNA, 367 bp, Unknown
  Bacterial polypeptide expressing nucleotide sequence isolated from the Sargasso Sea
gcagttagtaggtgatgatttattcgttactaatactgaaaggttaagaaaaggaatattagaaaaatccgcaaattcaatattaataaaggtaaatcaaattggcacattaacagaaactctggaagctatggatctagctaaaagtgcaggttttactagtgttatcagtcatagaagcggcgaaacagaagatacaacgattgccgatttatctgtggcaacgagagctgggcaaattaaaactggctctttgagcagaagtgaaagaattgctaagtacaataggctcttaaggattgaagaagagttgggggatcaagctagatttgctggtgatttaggtttaggtccaaaaaatatatag

SEQ ID NO: 280044 - DNA, 1165 bp, Unknown
  Bacterial polypeptide expressing nucleotide sequence isolated from the Sargasso Sea
tggggcatctactggagtgcatgaagctttagaattgcgagataatgatagatctaaatataaaggtaaaggagttttgaaagcagtaggaaatatcaatgataagatttctaatgaactagttggaaaatcatttgaagatatttcttcttttgacgattttttattacaactcgatggtacggaaaataaatctaacctaggtgcaaatgcaacccttgctgcaagtttagcttttgcaaaatgtttagcctcttttgaaggtcatgaattgtattcttttcttggtaaagaacatacaatgagtcttcctgttccaatgatgaacattattaatggcggttcacatgcagataatgatgttgatattcaagaatttatggttgctccaattggtgcaaataatttttcagaagcacttcaatatggttgcgaaatatttcactcattaaagtcgttattaaaatcaaaaggcttgaatacaaatgttggtgatgaaggtggatttgctcctaacataaatagttcaagcgaagtcatagaaactgttttgaaatcagtggagaatgcaggatttaaaccaggaaaggatatttatctttcacttgatgttgcatcaactgaattttacaaaaataataaatatgatttacaaggagaaaaaattgttttgtcttctgatgaaatgatcaaatatttagagaaattggtaaaagcttatcccatttattcaattgaagatgggatgtcagaagatgattgggatggttggtctaatttaacatcaacaataggaaaaaaagttcagttagttggtgatgatttatttgttacaaataaaaaaagattacaaaagggtatttcagagggtgcgggtaattctattttagttaaagtaaatcaaataggaactctaaaagaagctttagagtcaattaaattagctaaagcaaataatttcactactataatttcacatcgttctggcgagactgaagacacgacgattgctgatttatcagttggtgtttcagcaggtcaaattaaaacaggttcattatctagaacagatagaacggcaaaatataatcaattattacggattgaagaagcactaaaaagcaaagcaaagtatgctggttcttctatcttaaataacaattga

SEQ ID NO: 280045 - DNA, 489 bp, Unknown
  Bacterial polypeptide expressing nucleotide sequence isolated from the Sargasso Sea
agatttacctgactccttggttttctaagtatccaatcataacagtagaagatggtatggcagaggatgattgggatggatggaagttattgacagaagcacatggaaaaaatgtgcaactagttggcgatgatctttttgttacgaatacatccatacttaaagagggaatagaaaaaggagttgcaaattcaattctgataaaagttaatcagattgggactttaacagaaacactcaatgcaattagtatggctaaagaggcaggttatactgctgtaatttcacatcgatcaggcgaaactgaagatacaacgatttccgatcttgctgtagcgacctcagctggacagataaaaacaggatcattatctcgctcagaccgtgtcgcaaaatataatcgtttgattaaaattgaagatgaattagaaacaaattcttcgtatcttggaaaagatgtattttctaatatattaaatgaaatttaag

SEQ ID NO: 280046 - DNA, 640 bp, Unknown
  Bacterial polypeptide expressing nucleotide sequence isolated from the Sargasso Sea
aatgagtaaaataactaaagttatagcaagacaggtttttgacagccgaggaaatccaacaattgaagcagaagtttttgcaaataatatgaaagctagagcgatatcgccatctggagcctccaccggatctcacgaagcatatgaaaaaagggataaatcaaacaagagatacctaggcaaaagtgtcttcaaagcagttaaattaattaacacaataatttcaaaaaaattgaaaaaccaaaatatccataatcaagaaaaaattgattacatcttaataaaacttgatggaactaagcaaaaaaagaaatttggagcaaatgcattattggcagtttcaatggcagttaaaaaattatctgcaagaattcgaaaaataccactttataaaactttttttattaaaaaggattttaaattaccctatccattaatgaatgtaattaatggtggagcacatgcaaataatggtcttagaatacaagaatttatgattagacctgataaagctaaatcaattactgaagcattaagaatatgttttttagtaattaataacttgaaaattttaattaaaaaaaggggtgaatctacctcagttggagacgaaggtggttttgccccaaatgataaatga

SEQ ID NO: 280047 - DNA, 280 bp, Unknown
  Bacterial polypeptide expressing nucleotide sequence isolated from the Sargasso Sea
tctgcaaaatagtattttaataaaattgaaccaaataggaactgtaaccgaaacgttagaagtaataaaatttgcacaactcattggttttaaaacaattatctcccatagatctggtgataccgaagatacatttattgctgatttagcagtaggcaccaattcaaatcaaatcaaaacggggtctcttgcaagatcagagagaatagcaaaatataaccaactaattcgtattgaagaagatcttggtagatcggctaaaatgaataaaattgactaa

SEQ ID NO: 280048 - DNA, 1288 bp, Unknown
  Bacterial polypeptide expressing nucleotide sequence isolated from the Sargasso Sea
tttgaattctattattgaaaaaatatatgctagagaaatcttagattcacgaggaaatccaactattgaggtcgacgtcataaccaagtctggagttatggggcgagcagctgtaccatcaggagcatctactggtggacatgaggcattagaattaagagacggtgataatagtagatacctagggaagggggtaagaaatgcaatcaataatgtaaatacaattatttccgttacattggagggctgtgatgtaacacaacagtctaaaaacgacaatttaatgatagccttagatggtacagaaaataaatcaaggcttggtgccaatgcaattcttggagtttcaatggcaattgcgcatgctggtgcaaaagtaaaaaatcaacccctatatagctatttaggtaaggacaatgaccatatactacctgtgcctatgatgaatattttaaatggaggaagccatgcagataatctagtagatattcaagaatttatgatcatgccttttggcgctgattctttctctgaggctttacaaatggggactgaaatatttcaccatttaaaatcagtattaaaatcaaaaggaatgtcaacttccgttggagatgaaggtggttttgcaccagaccttaggtcgaatgaagaggcgatagatgtgattcttgagtctatatctaaagcaggaatgagcacaggtaaagatataatgttggcgctagatgtggcagcaagtgagttatttgaaaataatatttatcatctgcattctgaaaataaaaagttagaatcaacagaaatggtgaactacctaaatggtcttgtaaaaaaatatccaattatttctatagaggatggactccatgaagatgactgggaaggatggaaacaacttacaaagacactaggacatcgagttcaaattgttggtgacgacctaacggttacaaatatctcacgattgaaacatgctattgaagagcatagcataaatgctattttaattaaactaaaccaaattgggacagttacagagactatccaagctatagaaatggcaaaaaaaacaaatctgggggtgattatttctcaccgttctggagaaaccgaagatacgacaatagctgatttagctgttggaatggggatggggcagataaagacaggctctatatcaagaactgatcgaacatgtaaatataatcaattacttcgtattgaagaagagttaggaaaaacagcgaaaatagccaatcttagttatttaggtatacctagatga

SEQ ID NO: 280049 - DNA, 1005 bp, Unknown
  Bacterial polypeptide expressing nucleotide sequence isolated from the Sargasso Sea
ttcaactggggaacatgaagctgttgaactaagagatggcaaaaaaaaatttatgggtaaatctgtcgataaagctgttaataatgttaatgagcttattgcaaatgaactcaatggtcaatctatttttgatcaggaaaaaattgacgatttaatgattaagctagatggaactgaaaacaagtcaaggttaggagcaaatgcaattcttggcgtttcattagcctgcattagagcagcttcaattgaatcaaaaaaaccactatacaaatatattggtggtaaagaagcaagaacacttcctgttcctatgattaatattgtgaatggaggatcccattcaagtgctccaattgcttttcaagaatttatgattgttcctcttggggctaatagtttttctcatgcaatgcaaatgggaacagaaatttttcataatctaaaacaaattttagtttcaaagggattaaacaccacagttggagatgagggaggatttgccccatcattcagtggcacagaagacgcattggaaacaattattaagtcggttaaagcagctggataccgtttagaaaaagatattaaaattgctttggattgtgcagcttctgagttttatgttaatggaaattatgattatactatttttgaaaagagtcaaggaaaagttatcaactccttagaacaaattgactatttatctagtttaacaaaaaaatatccaataatttctattgaagatgggatggatgaaaatgattggaaaggatggaaattattaacagataagattggggaaagagttcagctagttggtgatgatctctttgttacaaatgttgagaaattatctaaaggaattgcaaataaaactgcaaattcgattttaataaaagtaaatcagataggcacattgactgaaaccatttctgcagttcgtatggctcaaagggctggttatactgcagtaatatcgcatcgctctggcgaaactgaagatac

SEQ ID NO: 280050 - DNA, 199 bp, Unknown
  Bacterial polypeptide expressing nucleotide sequence isolated from the Sargasso Sea
ttggtttttaaaacaatcatctctcatagatctggcgatactgaagacacatttattgctgatttagcagtgggcaccaaatcaaatcaaatcaaaactgggtctcttgcaagatcagagagaatagcaaaatataaccaactaattcgtattgaagaagaccttggtagatctgctaaaatgaataaaattgattaat

SEQ ID NO: 280051 - DNA, 823 bp, Unknown
  Bacterial polypeptide expressing nucleotide sequence isolated from the Sargasso Sea
aatgaacattattaatggtggagcacacgcagataacggtctaaggattcaagaattcatgataagaccagataaagcaaaaagtttttctgaagctgtaagaatttcgtttttggtaattcaaaacttaaagggtttgattaaaaataaaggactatctacttccgtaggagacgaaggaggctttgcaccaatgataagtaaaaatgaagatgcgctagatttgattgttagagcaataaataaagcagggttcaggaatggcagagatgtatcgatatgtcttgatgttgctgcaaatgaactttttaaaaaaaacctttattctatacactcaaagaaatttgaaagtgttgaaaaatcgataaaaaattatgttaaaattattaataaatataaaattaaatcaatcgaggatccgttttccgaaaatgattggtcttcatggagtaaattaatgaattctgtcaaaaaaactcaaatcgtcggtgatgatttatatgtaactaatttagaaagattaaaaaaaggttttttaaataattcatctaatgctatcttaattaaactcaatcaaataggaactgtttcagaaactctagaagttattaagtttgcgcagattattggttatgagacaataatttctcatagatctggtgaaagtgaagatacttttattgctgatttggctgtaggaacaaattctagtcaaataaaaactggttcattatcaagatcagaaagagttgctaaatacaatcaattactgagaattgaagaagagctaggaaaaaaggctaaaatgaataaaattcattaa

SEQ ID NO: 280052 - DNA, 1273 bp, Unknown
  Bacterial polypeptide expressing nucleotide sequence isolated from the Sargasso Sea
aatgcccaaaattgaaaatctaacctccattcaagttctggattcaagaggacttcctacaatttctacggaaatactattagatgatggaactagatcagtttcaatggtccctagcggcgcttcaactggtgaaaaagaagctcttgagctacgagatggaggtgaagcattcctcggtaaaggcgtaacaaaagccatagttaatgttaatgatcgcataaagaattctcttataggagagaatccacttgaccaagatcatatcgatcaaatcttgaataacttagatggcacagctgacaaatctaatcttggagctaatgcaattctttctgtatcaatagcttctgcaaaagcttcatctaaatcagagaatttagatttacataattattttaacattttgcttggtaataaaatgggcaaaacaattgatcaagttattccaataccaatgttaaatattcttaacggtggtgagcatgccgataataatatcgatatacaagaattcatgattattccaaaaggagctgttaatttttcgcaagctatgcagtggtcttctgagatatattggaatcttaaatctattcttaaagaaaaaggtttatcaactgcagtaggtgatgaaggtgggtttgctccaaatctcaacacaaatagagaagctcttgagttaatagcaagggcggtagataaaactgatcttaaattgggttcagatatctgtatatccttggattgtgctgcaagtgaattttatgaaaatggtacttatcatcttaagggtgaagatagagagcttactagttcagaatttgttgaatatttagagggtttggcaaatgatttcccaataatatctattgaagatgggatggatgaaaatgatctagagggatggaagctgcttactaaacaaattggaggaaaatgtcagcttgttggcgatgatctttttgttacaaatcctgaagtcctcaaaaaaggaataagtgatgagatcgctaattcagttttaataaaatacaaccaaattggaacaatatcagaaacacttgaaacaatttctattgccttaaataacgactatcaaaatattatttcgcacagatctggagagaccgaggactcatcaatttctgatctggcagttggaacaggagctggtcaaattaaaacgggagcaccatgcagatctgaaagggttgcaaaatataataggctttattggattgataagaaaaatagcttttcatatggctga

SEQ ID NO: 280053 - DNA, 1261 bp, Unknown
  Bacterial polypeptide expressing nucleotide sequence isolated from the Sargasso Sea
aatgagcaaaataactagagttataggaagacaggtttatgatagcagaggaaacccaacaattgaggcagaagtttttgcaaacaatatgaaagcaagagctatttgcccatcaggtgcttccacaggctcgcatgaagcatatgaaaaaagagatttatcaaataaaaaatatttaggaaaaagcgtcttaaaaccagtagaattaattaataaagtaatttcaaaaaaattaaaaaatcaaaatatacacaatcaagagaaaatagattctattttaattaagcttgatggaacaaagcaaaagaaaaaatttggtgcaaattcattattggcagtgtcaatggctactaaaaaattatcagcaagaattaaaaaaacccctctttataaaacttttttaactaaaaataattataaattaccttatccattaatgaacgtaattaatggtggagcacatgcaaataatggtcttaggatacaagaatttatgatcagaccagatagagcaaagtccattaaagaagcaatgagaatgtgttttttagtcattaataatttaagggctataattaaaaaaagtggcgaatccacttcagtaggcgatgaaggaggctttgcccctatgataaatgacaatgaagatgctttaagattaatagttaaggcaataaaaaagtcaggatttaaaaatggaaaagatatatcaatatgtttagatgttgctgctaatgaattaattaaaaaaaaaaattattctgttcactccaaaaaattcataaatactgataaaactatagaaaaatatttaaaattaatcaaaaaatataaaataaagtcaattgaagatccttttgctgaagacgactggttatcttggaataaatttatgaaaaagattgcaaaaaaaactcaaattgttggtgatgacctttatgtaactaacctagaaagattgaagataggctttttaaacaagtcatctaattcaatactaattaaattgaatcaaataggaactgtaaccgaaacattagaggtaattaaatttgcacatttaattggattcagtaccataatatctcatagatctggagacagtgaggatacctttatttcagatctagccgtaggtaccaattccaatcaaataaaaactggatcattggcacgttctgaaagagtagcaaaatataatcaacttttaagaattgaagagaaacttggaaaagctgcaaaaatgaataaaattaattaa

SEQ ID NO: 280054 - DNA, 226 bp, Unknown
  Bacterial polypeptide expressing nucleotide sequence isolated from the Sargasso Sea
attagaagttattaaatttgctaaattgattggttttaaaacaattatttctcacagatcaggtgaaagcgaagacacatttattgctgatcttgctgttggtacagactcaaatcaaataaaaacaggcagtttagctagatctgaaagagtagctaaatataatcaattaatcagaattgaagaaagtcttggctccaaggctaaaatgaataaaattcattag

SEQ ID NO: 280055 - DNA, 670 bp, Unknown
  Bacterial polypeptide expressing nucleotide sequence isolated from the Sargasso Sea
atgtcaaaaatactaaaagttcatggtttgcaagtttttgactcaagaggtattccaactgtttcatgtaaaattactctagaaaatggattaagtgctacatcaatggcaccgagcggagcatctacaggctctaaagaagcgcttgaacttagggacagtgaagagagttatgctggtaaaggtgtattcaaggctattgaaaatataaataatgtattagggcctcttattgttggaaaagatccttgtcatcagaatgacattgataatattcttatatcgtgtgatggaacagctgacaaatcaaagatgggagcaaatgcaatcctagctgtttcgcttgcagtggctacggttgcatcaaaattaaaaaagaaaccgctttatgagcattttgcggaaatatataaggatatttctggaaatgtaccaaagaaaactattccaatgccaatgtttaatatactcaatggcggtgaacatgcagataataatgttgatattcaagaattcatgattattccgtctaaagctaaaaatttttcacaagtcatgcaatggtcgtctgaaatttatcaaagccttaaaagtattcttatatctaagaaatattcatctgcggttggagatgagggtggctttgctccatctctaaattcaaatgagg

SEQ ID NO: 280056 - DNA, 829 bp, Unknown
  Bacterial polypeptide expressing nucleotide sequence isolated from the Sargasso Sea
atgccaatgttaaatatattaaatggaggagagcacgcaaataacaacattgatattcaagaatttatgataattcctaaagctgctaaaaactttagagaggcaatgcaatggtcctctgaaatatattggaaccttaagaagattttaaaaaaaaatggccactcaaccgcagtaggtgatgagggtggttttgcaccaaatttaaaatctaatgaagacgcaattaagcttatagttgaatcaatatcagcttcaaaattaaaaccaggtgaggatgtttttttatcgctagattgcgcttcaagtgaattttacaaaaacaaaaagtatcatttaaaaggagaacaaaaaatcttagattcgaaggaatttactgactacttatcaaatttaattgatagttatccaattatttcaattgaggatggtatggatgaagatgatcatgaggggtggaatattttaacaaaaaaaattggttcacattgtcaattagttggagacgatttatttgtaacaaataaagatatacttttagatggtattaataaaaatttagcaaactcaattttgattaagtttaatcaaattggatcaataactgaaactattcaaacaattgatttagcaattaagcatgaatataagtcaataatttctcataggtctggtgaaacagaagatactacgatttcagaccttgctgttggtctaggtgttggccaaattaaaactggtgctccatgtagatctgacagagttgcaaaatataacagattactatggatcgaagaggagaattctaaattaagtttttctaaatgaa

SEQ ID NO: 280057 - DNA, 1288 bp, Unknown
  Bacterial polypeptide expressing nucleotide sequence isolated from the Sargasso Sea
aatgaaatcccatataaaaaatatttattcaagagaaatactagactcaagagggaatccaacagttgaagtagatctggttcttgaaaatgatatagtagcacgtgcagcagtcccatcaggagcctcgactggtgactttgaagcaatggagctcagagaccagaacaaaaaccgatataagggcaaaggagtcctttccgcagttaataatgtcaatagtgaaatacgaaccgctctaattgggactgacataaacaatcaggagaacattgataatattttaatagaactggatgggacagaaaataaatctaggctaggtgcaaatgcgattctgggggtatcaatggctgcttgtagagcaggggcaaaagataatgatatccctctatatgattatttgtccattaataatgattatgttatgcctataccaatgatgaatattttaaatggcggtagccatgcagaaaacactgttgatatccaggaatttatgatctccccggttggtgcaaattcattctctaatgcacttagaattggaacagaaatttttcaccaattaaaatctgaactatcacaaatgggcttgggcacagcggttggtgacgaaggaggatttgctccagatctaggctcaaatgaacaagcaattgaaataatattaacagctataaccaatgcaggttattctccgggaaaagaagtttttattgctcttgatgtagcagctagtgaattttttaaaaatgacttgtataccttgaagtctgaaaataaaacattttcatctgaagaaatgattaactatttaagtgaccttacaaaaaaatatccaattatttccattgaagacggcttagatcaaaacgattgggatgggtggaaaaaattaaatctagaaataggtgccaacattcagatagtaggagatgatttaactgttacaaacataaatcgtttaaatagagcaatagatgaaggttcaatgaattcaatcctaatcaaattaaaccaaataggaacgattacagaaactattcaagcagtaaaattggcaaaaaaggttgggtttggagcaataatatctcataggtctggtgaaacagaagacacgatcatttcagatttttctgttgccatggggatgggacaaattaaaactggctcattatcaaggagcgatagagtcgctaaatataaccaattaattagaatcgaagagcaactgggtgataaagcagaatacgctactatagactttttaggattagctagatga

SEQ ID NO: 280058 - DNA, 666 bp, Unknown
  Bacterial polypeptide expressing nucleotide sequence isolated from the Sargasso Sea
aatgcccaaaattgaaaatctaacctccattcaagttctggattcaagaggacttcccacaatttctactgaaatattgttagatgatgggactagatcagttgcaatggtacctagcggcgcttcaactggcgaaaaagaagctcttgaacttcgagatggaggtcaagcattccttggaaaaggcgtaacaaaagccatagataatgttaatgatcgcataaagaattctcttataggagagaatccacttgaccaagatcatatcgatcaaatcttaaataacttagatggaacaagtgacaaatctaatcttggagctaatgcaattctttctgtatcaatagcttctgcaaaagcatcatctaaatcagagaatttagatttacataattattttaacattttgcttggtaataaaatgggcaaaacaattgatcaagttattccaatacccatgttaaatattcttaatggtggtgagcatgccgacaacaatatcgatatacaagaattcatgattattccaaaaggagctgttaatttttcgcaagccatgcagtggtcttctgagatatattggaatcttaaatctattcttaaagaaaaaggcctatcaactgcagtaggtgatgaaggtgggtttgctccaaaatctcaatacaa

SEQ ID NO: 280059 - DNA, 922 bp, Unknown
  Bacterial polypeptide expressing nucleotide sequence isolated from the Sargasso Sea
atgagtaaaataaaaaaagtcatagctagacaagtatatgacagtagaggtaatcccacaattgaagctgaagtttttgcaaataatatgaaagccagagctatatgcccttctggagcttccacaggtactcatgaagcttttgaaaaaagagacgttttaaataaaagatatttaggaaaaagtgttttaaaacctgttgaatcaattaataaaatcatttcaaaaaaattaaaaaatcaaaatatacataatcaagaaaaaatagattccattttaattaaacttgatggaactaatcaaaaaaagaaattcggagcgaatgcattgctagctgtttcaatggcagttaaaaaattatcagcaagaattaaaaaaactccactttataaaacctttttagtaaagaataattttaaactaccatatccattaatgaatgtaattaacggtggcgcacatgcaaacaacggtcttaggatgcaagaatttatgattagacctgatagagctaaatcaattgttgaaggaataagaatgtgttttttagtaattaataatttaaaaagtataattaaaaaaagtggagactccacttctgttggtgacgaaggtggttttgctccaatgatacacgataatgaagatgctttaaaattaatactaaaagcaataaaaaaatcaggttttaaaaatggaaaagatatatcgatttgtcttgacgttgctgcaaatgaattatttaaaaataataaatattcaattcattctaaaaaatttatatccccgaacaatacaattgatagatatttaaaattaattaaaaaatataaaattaaatcaatcgaagatccatttgcagaagatgattggttatcatggaataaatttatgaaaaaaattacaaaaaatacacaaatag

SEQ ID NO: 280060 - DNA, 544 bp, Unknown
  Bacterial polypeptide expressing nucleotide sequence isolated from the Sargasso Sea
atgagtaaaatcaaaaaagttgtagcaagacaggtttatgacagtagaggaaatcctaccattgaggctgaggtattttcaaataatttaagtgcttcagcaatttgtccttcaggtgcttcaacaggaacttttgaggcttatgaaaaaagagataaaagtaataaaaaatacctaggaaaaagcgttttaataccggttgcaactgttaataaattaatttcaaaaaaattaaaaaatcaaaatatccatgaccaagagagaatagatagtattcttataaaattagatggcacaaaacaaaaaacaaagttaggtgcgaatacaatattagctgtatccatggctgtaaaaaaattatcagcaaaagttaaaaaaatacctttatataaaaattttattgtcaaaaaaaattttaaactcccctttcctttaatgaatattattaatgggggtgcacatgctgataatggccttagaatacaagagtttatgattagacctgataaagcaaaatcatttaatgatgctgttagaatgtgtt

SEQ ID NO: 280061 - DNA, 1050 bp, Unknown
  Bacterial polypeptide expressing nucleotide sequence isolated from the Sargasso Sea
aatggctaagataacaaaggttataggaagacaagtatttgatagcagaggcaatccaacaatagaggctgaagttttttacaaaaatataagtgccacagctatttgtccctctggtgcttctacaggttctttcgaagcttatgaaatgagagataaaaaaaataataaatatttaggaaaaagtgttttaaaatctgtaaaatctataaatactattatttcaaaaaaattaaaaaatcaaaatttgcataatcaggaaaaaattgattatattttgataaatcttgatggaacaaaacaaaaaaaaaaatatggagcaaatacaatacttgctgtgtccatggcagtaaaaaaactttctgcaaaaataaaaaaaataccattgtttaaaacatttttagcaaaaaataattataaacttccttatccattaatgaatgttatcaacgggggagctcatgcgaataatggtttgagaattcaagaatttatgattaggcctgatagagcaaaatcaatccaagaaagtataagaatttgttttattgtaattaataatcttaaaaaattgattaaatccaggggtgaatctacctcggtaggtgatgagggtggctttgctccaatgatagatagtaatgaagaagcattaaaattaattgtgaaagcaattaaaatttctggatttaaaaatggtaaagatattagtatttgtttagatgttgcggctaatgaattatttaaaaaaggtaaatattcaattcataataaaaaatttgaatcaccagatgaaactattaggaaatatttaaatttaattaaaaaatataaaattaaatcaatagaggatccatttgaagaaaatgattggatttcttggaataaatttatgagaaaaataaagtttactcaaattgtaggagatgacttatatgtaacaaatttagaaagacttaagataggttttctcaataaatcatcaaattcaatattaattaaattaaatcaaataggcactgttacagaaacattggaggtgataaaatt

SEQ ID NO: 280062 - DNA, 573 bp, Unknown
  Bacterial polypeptide expressing nucleotide sequence isolated from the Sargasso Sea
aatgcccaaaattgaaaatctaacctccattcaagttctggattcaagaggacttcctacaatttctactgaaatactattagatgatggaactagtgcagttgcaatggtcccaagcggcgcttcaactggggaaaaagaagctcttgagcttcgagatggaggtcaagcattcctcggtaaaggtgttacaaaagccatagataatgttaacgatcgcataaagaattctcttataggagagaatcctcttgaccaagatcatatcgatcaaatcttaaataacctagatggtacaagtgacaaatctaatcttggagctaatgcaattctttctgtatcaatagcttctgcaaaagcatcgtctaaatcagagaatttagatttacataattattttaacattttgcttggtaataaaatgggcaaaacaattgaccaagttattccaatacccatgttaaatattcttaacggtggtgagcatgccgacaacaatgtcgatatacaagaattcatgattattccaaaaggagctgttaatttttcgcaagctatgcagtggtcttctga

SEQ ID NO: 280063 - DNA, 1258 bp, Unknown
  Bacterial polypeptide expressing nucleotide sequence isolated from the Sargasso Sea
atgaagattaaacaaatagattcacttgaagtcttagactcaagaggtaagcctactttatgtacaactgtttatttagaagacggttctagaggtacagcacttgttccaagcggagcctctgctggttcatttgaagcgcatgagcttcgagatggtgataaatcaagatattttggttttggcactctaaatgctgttaaacaagtaaaagatatatcaaatcatctaataggtttagaaagtaacgatcaaaataaaattgataatctgcttatagatattgatggcactaaaaataaagaaaaaattggagctaactcaattctgtcaatttcattggcttgcacaagagcttcagcaaatagtctcaatatttctctttatgaatatataaatattttatttaacaattccgcttctaagaaaactagattttcaatgccaagaccgatgctaaatatccttaatggtggagctcatgcaaataataatattgatattcaagaatttatggtcattccatctgataaattttcttttaaagatggattgcgtaaagcaactgaagtctatatgcatttaaaagaaaatctagccaaaaaaaatcttagcactacagtaggagatgaaggtggctttgcacccaactttgaatcaaatcaatttgtcatagaagagataattaagtcaattgaaggaataggaatgaaatatggagatgatattttcttgggattagactgcgcatcatccgagctgtataagaaagaaacttatcaaatgaaaagtgaaggcaatgaatttaattctgatgaaatgattgagtacttgataaacctcgttaataaatatcagattctttccattgaagatcctttagatgaatcagattggaatggttggaaaaaattctcagaaaaagctaatgacttacaaatagtcggcgatgatatatttgtaacaaaaaaagaattattagaaaaaggaataactgaaaaagttgcaaattctatcttaattaaacctaatcaagtaggcactttaacagaaactttgcagactatagatttagctaaatctaatgattatggaacaatcatttctcatagatcaggcgaaacagaagatacttttatttcagatcttgcagttggagttgatgcaaagcaaattaaaactggagctccggccagatcagacagaacagctaagtacaatcgtcttctaatgatagaaaatgagctgtatccatgaa

SEQ ID NO: 280064 - DNA, 640 bp, Unknown
  Bacterial polypeptide expressing nucleotide sequence isolated from the Sargasso Sea
aatgtctaaaatttctaaagttattgcaagacaagtttttgatagtcggggaaatccaactatagaaacagaggtatttgtgaaagatattagtgcctcagcaatttgtccttctggagcgtctacaggaacttacgaagcttttgaaaaaagagatataaaaaataaaaaatatcttggaaaaagtgttttaaaacctgttgaatacataaataaagtaatatctaaaaagttaaaaaattttaatattcatcaacaagataaaatagacaatttattaattagacttgatggcaccaaacaaaagaaaagagttggggccaatacaattctttcagtttcaatagctgtcaaaaaattatcatctaaaattaaaaaaattccgatttataaaaatttactaataaataaaaattttaaattaccctatcctttaatgaatataattaatggaggtgcacatgcgaataacggtcttagaattcaagagtttatgataagaccagataaagcaaaaactttttctgaggggcttagaatgtgttttattgttattaataaattaagaaatttaattaagaagatgggttattctacttctgtaggtgatgaaggtggtttcgcaccaatggataaatga

SEQ ID NO: 280065 - DNA, 553 bp, Unknown
  Bacterial polypeptide expressing nucleotide sequence isolated from the Sargasso Sea
gaattttttgaagataatcattatgattacaggatatttgaaggtaaaaatggaaaagtctttgattctgtacaacaggctgattatttatcggatcttgttagtaaatatccaattatatcgattgaagatggtatggatgaaaatgattggagtggttggattcattcaacaaatgttcttgggaataaagttcaattagttggtgatgacctttttgttactaacacaaatattttaaaaaaaggtatcgatcaaaaagccgcaaattctattttaattaaagtaaatcaaataggtactctgacagaaactattaatgcaataaacttggcaaaagaacatggattttcgactgttatttcgcataggtctggtgaaaccgaggataatattatagcagatttagcagttgcattgaatgctggtcaaataaaaacaggctctctttctaggtcagatagaatgtcaaaatataatcaactacttcgcattgaagagcaacttggaagtaaagcattttatccaaaaagagaagcttttactttttaag

SEQ ID NO: 280066 - DNA, 1261 bp, Unknown
  Bacterial polypeptide expressing nucleotide sequence isolated from the Sargasso Sea
aatgtctaaaatttcaaaaattattgcaagacaagtttttgatagcagaggaaatccaacaatagaaactgaagtatttgtaaaagacattagtgcctcagcgatttgtccctcgggtgcatctacaggaacttatgaagcttttgaaaaaagagatataaataataaaaaataccttggaaaaagcgttttaaaacctgttgaatttataaataaggtaatatcaaaaaagttaaaaaattttaatatccatcaacaagaaaaaatagataatttattaattaggcttgatggtacaaaacagaaaaaaaaagttggagctaacgcaattctttctgtctcaatagctgtcaaaaaactttcatcaaaaataaaaaagataccaatttataaaaatttacttgtaaataaaaacttcaaattaccatatccaatgatgaatataattaatggtggagcacatgcaaataatggtcttagaatacaagaatttatgatcagaccagacaaagcaaaatcattttcagagggtgttaggatatgttttatagtcatcaataaactaagagatttaataaaaaaaatgggtcattctacgtctgtaggtgatgaaggtggatttgcgcctatgataaatgataatgaaagtgcgctaaaactaatagtaaaagcaataaacttatctggttttaaaaatggaaaagatatagttatttgtttggatgttgcggcaaatgagttaataaaaaataaacattattcaattcattctaaaaagtacgtaaatgtggacaaaacaatttctgaatacctaaaattaataagaaaatataaaataaaatcgatagaagatccatttggtgaaaacgattggtctgcatggacaaaattattaacacaaacaaaagataaagtgcaaattgttggtgatgacctatttgttacaaatttggaacgattaaaaattggtttcttgaatgtttcagcaaattcaatattgattaaattaaatcaaattggaactgtaactgaaacattagaggtaataaaatttgcaaaattgatagggtataagactataatttctcacaggtctggagacagtgaagacacatttattgcagattttgcagttggcactgattctaatcagataaaaacaggatcattgtctagatcagaaagagtatcaaaatataaccaattgttaagaattgagcataatcttggaaaaaaatctaaaatgcataatattaattaa

SEQ ID NO: 280067 - DNA, 845 bp, Unknown
  Bacterial polypeptide expressing nucleotide sequence isolated from the Sargasso Sea
taaactcccctttcctttaatgaatattattaatgggggtgcacatgctgataatggccttagaatacaagagtttatgattagacctgataaagcaaaatcatttaatgatgctgttagaatgtgttttttagtaataaacaatttaaaagtattattaaaaaaagctggtcactctattaatgtaggtgatgaaggtggctttgcaccaatgataagtgataatgagagtgctttaaaacttatagttcaagcaattaaaaaatcaggttttaaaaatggtaaagatgtatctatttgtttagatgttgcagcaaacgaactaattaaaaaaagtaaatattcaattcattctaaaaattacataagtgtcgatcaatcaattaaaaaatatttagagcttattaaaaaatatcaaattaaatcaatcgaggatccatttggtgaggatgattggaaggcatggtctaaatttgttaatagaacaaaaaacaaaacacaaataataggtgatgacctttttgtaactaatcttgaaagattaaaaataggttttctaaacttatctgcaaatagtattttgataaaattgaaccaaattgggacagtaaccgaaacgttagaagtaataaaatttgctcaacttattggttttaaaacaatcatctctcatagatctggcgatactgaagacacatttattgctgatttagcagtgggcaccaaatcaaatcaaatcaaaactgggtctcttgcaagatcagagagaatagcaaaatataaccaactaattcgtattgaagaagaccttggtagatcagctaaaatgaataaaattgattaat

SEQ ID NO: 280068 - DNA, 1282 bp, Unknown
  Bacterial polypeptide expressing nucleotide sequence isolated from the Sargasso Sea
atgcctaaaataacaaatttaaaagcaagacaaataatagatagtaggggaaatccaactgttgaatgtgatatagagtttgaaaattctacctatggaagagctgcggttccaagtggagcatctactggagttcatgaggctttagaattgagagataatgataaatccaaatataaaggcaagggagttttaaaagcagtaggcaatatcaatgatactatttctactgaactagtcggaaaatcatttgaagatatttcttcttttgacgattttttattacaactcgatggtacagaaaataaatctaacttaggagctaatgcaacccttgccgcaagtttagcttttgcaaaatgtttagcttcttctgaaggtcatgaattatattcttttcttggtaaggaacatacaatgagtctaccagttccaatgatgaacattattaatggaggctcacatgcagataacgatgttgatattcaagaatttatggttgctcctattggtgcaaatagtttttcagaagcacttcaatatggttgcgaaatatttcattcattaaagtcacttttaaaatcaaaaggtttaaatacaaatgttggtgatgaaggtggatttgcgcctaacataaatagttctagtgaagtcatagaaactgttttaaaatctgtagaggatgctggttttaaaccaggaaaagatatttatctttcacttgatgttgcatcaactgaattttataaaaataataaatatgatttacaaggagaaaaaattgtattgtcttcagatgagatgattaaatatctagagaaattagtaaatgcttatccaatttattctattgaagatggaatgtcagaagatgattgggatggttggtcaaatttaacatcaacaataggaaaaaaagttcagttagttggtgatgatttatttgttacaaataaaaaaagattacagaaaggtatttcagagagtgcagggaattctattttagttaaagtaaatcaaataggtactctaaaagaaactttagagtcgattaaattagctaaagaaaataattttactactataatttcacatcgttctggcgagactgaagatacgacgattgctgatttatcagttggtgtttcagcaggtcaaattaaaacaggatcattgtctagaacagatagaactgcaaaatataatcaattattaagaattgaagaagcattacaaggtaaagcaaagtttgctggatcttctatcttaaataataattgac

SEQ ID NO: 280069 - DNA, 847 bp, Unknown
  Bacterial polypeptide expressing nucleotide sequence isolated from the Sargasso Sea
atggcaaaaatcaaaagtgttaaagggcgacaagttttcgatagtagaggaaatcctactgttgaagctgaaatctttttagataatggctcttcagcgacagcaatatcaccctcaggcgcatctacaggagcatttgaagctcacgaattaagggataaagatcaaaataaatttttgggtaaaagcgttattaatgcagttcaaaatataaatagtaaaatttcaaataaactcaaaaacttagacttaagtcatcaagaaaaaatcgataaaattttaatagagctagatggaagtgaaaataagactaatctaggcgcaaatgcaacattagcagtttcattagcctatgcaaagtgtacagcaattgcaaataaacaatcactttataaaagtttaggtaaatcttactctatacctataccattgatgaatattattaacgggggtgcacatgctgataatgatttaaatattcaagaatttatgattaggcccgattctgcaaaaaattttacagatgctgttgaaaaatgctttcttgtaatacaaaatttaaaaaaattattacaatctaaaaagatgttaacaaatgttggagatgaaggcggatttgctccatcaatcaattcaaatgaagaagctttagacttaatagttcaagctattgaaaaatcaaaattaaagccaggcaatgacgttgtaatttgtttggatgtggctgcaaatgaacttatgaatgaaaaaggagaatattcagttcaatcatctaattttctgtctgtagatgatgttgtaaactattacaaaaaattaacatccagctacccgatcaaatctattg

SEQ ID NO: 280070 - DNA, 211 bp, Unknown
  Bacterial polypeptide expressing nucleotide sequence isolated from the Sargasso Sea
ttggcacaaaaaaataatttcagcacaattatttcacatagatctggagactcagaagacacatttattgctgacttagcggttaaaactaattcatcgcaaattaaaactggatctttagccagatctgaaagggtagctaaatataatagattgttaaagattgaagaagagcttggaaaaagatcgaaaatgaataaaattcaataaa

SEQ ID NO: 280071 - DNA, 1276 bp, Unknown
  Bacterial polypeptide expressing nucleotide sequence isolated from the Sargasso Sea
tatgtctaaaatagtccaagtaaaggcaattcaaatatttgattcacggggaacacccaccatttcatgtaaagtaattcttgataatggcatgcaaggaattgctatggttccaagcggagcatctactggatcgaaagaagctctcgagttgagagatagtgaaatcaaatatcatggaaaaggagttctaaatgcagttgataacattaataacattctaggaccattagttgttggaaatgatcccatccaacaagaaaaaattgatcaaagcttgatagatcgagatggaacaaatgataaatcacaattaggcgctaattcaattttagcaatatcaatagcagtttctcgggttgcggcatctttaaaaggtataagccttcatgagcatttctctgatttatataaagatatgactggtgaaaaaccacaacaatctttgccgatgccaatgttaaatatattgaatggaggagagcacgcagataacaacatagatatccaagaatttatgatcattccaagtggagcagaatcttttacacaagcaatgcaatggtcttctgaggtatatataaatttaaaagaaatcttgcattctatgaagctttctacttcagttggagatgaaggaggatttgctcctaatctgaactcgaatgaagatgccataaaactaatcgaagaatcgataattaaatctgatctaaaacctggaatcgatattaatattgcattggattgtgcagcaagtgaattttttaaaaatggtaaatacattttaagtggcgaggacaaggaattatcatctgatgagttttcggattatttaaaaaatttgattagtaaatacccaattacttcaattgaagacggcatggatgaaaatgatattgatggttggaaacttttaacaaaaaaaattggaaataaatgtcaattagttggagatgacttattcgtaacaaataaagaaattttaagtaaaggtattaaagaagaaatagcgaacgctatattgataaaatttaatcaagttggaagcttgactgaaactattagagctatagagtgtgcaacttctgctgcatataaatcaattatttcgcacagatcaggagaaactgaagataccacgattgctgaccttgcggtaggtctgggcgttggccaaataaaaacaggtgcaccatgcagatctgacagagtttcgaaatataatagattgctttggatagaagaagaaaataataagattcttcttaaatga

SEQ ID NO: 280072 - DNA, 1303 bp, Unknown
  Bacterial polypeptide expressing nucleotide sequence isolated from the Sargasso Sea
catgtccaagatcgttaaagtgatcggtcgtgaaatcatcgactcccgtggtaacccgaccgttgaggccgaagttcacctggaaggtggttttgttggtatggcagccgctccgtctggcgcgtccaccggttcccgcgaagcgctggaactgcgtgacggcgacaagagccgtttcctgggtaaaggcgtgctgaaagctctcgaagccgtaaacggcccgatcgctcaagctctgctgggtaaagatgccaaggaccaggccactgtcgaccagatcatgatcgacctcgacggtaccgagaacaaatccaagttcggcgccaacgccatcctggctgtttccctggccaacgccaaagctgccgctgctgccaaaggcatgccgctgtacgcccacatcgccgagctgaacggcaccccgggtgtctactccatgccgctgccgatgatgaacatcatcaacggtggtgagcacgccgacaacaacgtcgacatccaggagttcatgatccagccggttggcgccaagaccctgaaagaagctgtccgcatgggcgccgaagtgttccacaacctggccaaagtgctgaagtccaagggctacaacactgccgttggtgacgaaggtggtttcgctccgaacctgaaatccaacgccgaagcgctggaagtgatcgccgaagccgttgccgctgccggttacaaactgggcaccgacatcaccctggccatggactgcgctgcttccgagttctacgacgcagagaagaaagagtacaacctgaaaggcgaaggtcgtgtcttcacctccaacggtttctccgacttcctggctgacctgaccaccaagttcccgatcgtctccatcgaagatggcctggacgaatctgactgggatggtttcgcttaccagactgctgaactgggcaagaaaatccagatcgtgggtgacgacctgttcgtaaccaacaccaagatcctgaagcgcggtatcgacaacggcatcgccaactccatcctgatcaagttcaaccagatcggttccctgaccgaaactctggctgccatcaagatggccaaagacgctggctacactgccgtcatctcccaccgctccggtgagaccgaagacgcgaccatcgccgacctggccgttggtaccgctgctggccagatcaagaccggttccatgagccgttctgaccgtgttgccaagtacaaccagctgatccgtatcgaagaagcgctgggtgccaaggctccgttccgtggtctgaaagaagtgaagaaccaggcttaa

SEQ ID NO: 280073 - DNA, 1279 bp, Unknown
  Bacterial polypeptide expressing nucleotide sequence isolated from the Sargasso Sea
atggaaaaaataaaaaatatacatgcaagagagattttagatagtagaggaaatcctacagttgaatgtgatgtggaattagatgacggctcttttggaagagcagctgttccaagtggagcatcaacaggagtccatgaagcactagaattacgtgatggggatacaaacagatatcttggaaaaggtgttaaaaaagccgttcaaaatataaacaacatgattaaaaatgaagttgtaggaaagatttacagcaactatcaagcttttgataaaaccgttttggatttagatggaacggaaaataaatctaatataggagcaaatgcaacgcttgcagcaagtctagcttttgctaaaagtttggcagatcatacatcaactactctctatcaacacattgcagaagatgataattttttattacctgtgccgatgatgaatattattaatggtggatctcatgcagataacgatgttgacattcaggagtttatgattgcgccagttggagcatcttcattttctgaatcattaagatttggttgtgagatttttcactcattaaaatcaatattaaaatcaaagagcctcaacactaatgttggtgatgagggtggctttgctcctaatgtaaataactccgcagaagtaatagaaattattttaagtgctgtagaaaaagctggtttaaaaattaatgatgatattctcttatccctagatgttgcttcaacagaattttatcaaaataataaatacgaactaaagggtgaaggacaaacactgagttcagacgaaatggttagctatattgaaaatttagcaaacaactttcccatttattctattgaggatggcatgtccgaagatgattgggatggttggattgagctaactaaaagaattggaaacaaagttcagttagttggtgatgatctttttgtaacaaatattaaaagattaaaaacagggattgaaaaaaatgctggaaatgcgattttagtaaaactaaatcaaattggtactttatctgaaacaatagatgctattaatcttggaaaaagtaataattttaattcaataatttctcacagatctggtgagactgaagatacaactattgcagatctttctgtagctgtgtctgccggtcaaataaaaacaggatcactctcaagaacagacagaactgcaaaatacaatcaattattaagaattgaagaaatgcttggctctagtgcaaaatacgctggcaaaacaattctaaaacattgac

SEQ ID NO: 280074 - DNA, 550 bp, Unknown
  Bacterial polypeptide expressing nucleotide sequence isolated from the Sargasso Sea
gtctgtatttgtcttgatgtagcagctaatgagttatataaaaataacaaatattctattcattcaaaaaaacatgaaacagtcgataaatctattaaagaatataagaaaataataaaaaaatataaaattaagtctatcgaagatccttttgcagaaaatgactggatgtcctggagcaaattaattaaatcaataaataaagttcaaattgttggcgacgatctttatgtaactaatcttgaaagactaaaaaaaggttttttaaataactcatctaatgcaattttaattaaacttaaccaaatcggtacagtttcagaaacactagatgtaataaaattcgcacaaattattggatataaaaccatcatttcccatagatcaggagactcagaagatacatttattgctgatttggctgtaggaactaattctaatcaaataaaaacaggatctctcgcaagatcagagagagtttctaaatataatcaacttataagaatcgaagaagaacttggaagaacagcaaaaatgcataaaatataaa

SEQ ID NO: 280075 - DNA, 1270 bp, Unknown
  Bacterial polypeptide expressing nucleotide sequence isolated from the Sargasso Sea
aatgaagattaaagatataaaagcttacgaaatattagactcgagaggtcatcctacagtaggtgctaaggtcattttatctgatggtaatacagggatctctttagtcccttcaggtgcttctacaggaaagtatgaagcggttgaaaaaagagataacaataatgacaggtttcttggtcaaggtgtgacaaatgctgtaaacaatattcataaccatattctacccatcttacgagatagagacgcatcagatttattcactaatgatttactaatgctagaagctgatggaacagattctaaagaaaatttaggagcaaatgcaatattagctgtctctatggcttgcgcaaaagctgcctctatctcactaaaaattagtttgcatgattacatcgctaataagacttcagaattgtatggcagggaaattacacaaaagttaccagttcctatgttgaatattctaaatggaggtgctcatgccgataatccaattgatttccaagaatttatgatccgacctttcaaatttaatacattttctgattccttaagatgtggcgtagaaatttttcacacacttaagaaaacattagaaaaaaagaatttaaatacttctgtcggagacgaaggaggttttgcaccaaatctaagcactccggaatcagcgctggacctaattatggaatcgatagaagaagcaggttacaaaccaggggaagaggtcaatttatgtctagatgttgcagctactgaattttattctaattcattctataaaatgcaaggtcaaccagatcttaactctaatgaaatgatcgattgcttaaaaaccttgaagaattcatatccaatttattctattgaagacggtttagatgaagacgactggctgggttggaaaaatctcactcaagagttaggatcaaaaactcaattagtaggagatgacctatttgtcactaatactaaaagaatagaaaaagggatagaagagtcttcagctaacgctgttttaatcaaaatgaatcaaattggtactttatcagaaactttacaggcaataaaaatcacagatgaaaataattttaataatgttatttcgcataggtcaggtgaaactgaagacacatttatagctgacttatcagtaggtacaggtgcaggacaaattaaaactggagcaccttctagatctgatagagttgcaaaatacaatagacttttgttaatagaaaagaattcagatatatgtttcggttaa

SEQ ID NO: 280076 - DNA, 493 bp, Unknown
  Bacterial polypeptide expressing nucleotide sequence isolated from the Sargasso Sea
ttcaaaaaaatttattaatacagataagacaattcaaaaatatcaaaaactaattaataaatataaaattaaatctattgaagatccatttgcagaggatgattggttgtcgtggaataagttttgtaaaaaaattgactctaaaatccaagttgttggtgacgatttatacgtaacaaatcttgagcgtcttaaaataggttatttaaatagatcttctaatgctatattaataaaacttaatcaaattggcactgtcacagaaaccattgaagtaataaaatttgctcaattaattggatttaatacaattatatcgcatagatctggtgaaagcgaagatacatttatatctgatttagctgttggtacaaactctaatcagataaaagctggttcactagcgagatctgagagagtggcaaaatataatcaattaattaggattgaagagaaacttggcaaatctgcaaaaatgaataaaattaactaa

SEQ ID NO: 280077 - DNA, 1264 bp, Unknown
  Bacterial polypeptide expressing nucleotide sequence isolated from the Sargasso Sea
atgcatatcaaatcaattgacgcaattgaaatacttgactctagaggcgtcccttcaattcatacatctgtcgttttaaattcaggacataaaggagaagccatggttcctagtggggcttcaacaggaaaaaaggaggcgtttgaacttagagataatgatgagagatttgatggaaagggtactaaaaaagcgatcgaaaatataaagagcttaatacagcctgctttattaggtaagccaattgaggaacaaaaagaattggaccaaataatgattaatcttgatggcacaagacaaaagaaaaaaataggtgcaaactcgatactttcagtctctctcgcctgcacaagggccgctgcaaatgcaatgaacctccctctttatgactatatacgtattctttttaattctaaatcaggtaaaggatcaaccctttcaatgcccaagccaatgttaaatatttttaatggcggatcccattctaataataggatagatatacaagaatttatgattatgccttctgatgatgttagtttttctgagggtttaaaaaactgtgttcaagtttatacgtcattaaaaagacttctttcatcaaaaggttggagcacaaatgttggagatgagggtggatttgctcctaatcttgaatcaaatgaagaagttatagagtacttaataaaagcaattcaaagtgcaaatttttcatatggcaaagatatttttatttctttagattgtgctgcttcagaattttttgatggaaagaattatattttaaatgctacagatgaaactttttcatcggatggtttggtagattactatgtcaaacttatcaaaaaatttgatattaaatctatcgaagatcctttgcatgaggatgattgggatggatggataaaattaacaagggaattaaatggagtacaaatagtcggagacgatatatttgtaactcagagagagctattaaaaaagggaatagactcacatgccgggaatgcaatccttataaagcccaatcaagtaggaacactgactgaaagtttggaaagtattcagcttgcaaaagaaaacaaattcaatactatcatttcacataggtctggagaaacagaagatccttttatagctgatctagctgttggggtggacgcaaagcaaataaagacgggtgcaccatcaagatcagatagaaactcaaaatacaatagactactaattattgaaaatgagctctacccaaaaaaataaa

SEQ ID NO: 280078 - DNA, 1276 bp, Unknown
  Bacterial polypeptide expressing nucleotide sequence isolated from the Sargasso Sea
aatgacaattataagtaagattaagggaagagaaattatagatagtcgcggtaatccaacgctagaagtggatgtatttttatctgataatattatgggcagagcttcagttccttcaggagcttccacaggagcatatgaagtaatagaaaaaagagataatgataatagatatttaggtaagggagtaaaaaaagctgttgaattagttaataatgaaataaataaagctttaataggccaaaatgctatagaacaaaatattattgatgatattttaattaaccttgatggaactagtaataaaatgaatttaggaggaaatagtattttaggagtttctctagcatgttctagagcagttgctcatagtaaaaatattcctttgtttaagcatattggagatgattcttccctaaccttgccaataccatttatgaatattataaatgggggggctcatgcaaataatagcttagattttcaagaattaatgattgttccatttggttttactcgttttagtgatgcattaagatgtggagctgaagtttttcagtcattaaaaaaacttctattaaataatgattattctatagcagtaggagatgaaggaggttttgctcctaatttttctagtcataaagaagctttagattacataattcttgctattgaaaacgcgggatacatgcctggtaaaaatgtttctattgctttagatgtagcctctacagaattttattctaacaacgaatataatttaaaaggtgaaaataaaaaattagatagtcaaggtttgatagattttttagattctcttactagtgaatatcctattatttcaatcgaagatggcttagctgaagacgattgggaaggatggaaaagtatgacagatcaaattggaaataatgttcaattggttggagatgacttatttgtaacgaatacagatagacttagaagaggagttgaagaaaaaatagcaaattcaattttgataaaatttaatcagataggaactttaactgaaacattaaacgcaattagtatggcaaaaaaagcatcttatacttcaatgatttctcataggtcaggagaaacagaggatcattttattgctgatctagctgtcgctactaatgctggtcaaattaaaacaggttcattatccagatctgatagattatctaagtataatcaattattaagaatagaagagcttttaggagaggatgctttatataataagaaccaaaatttttataaataa

SEQ ID NO: 280079 - DNA, 1167 bp, Unknown
  Bacterial polypeptide expressing nucleotide sequence isolated from the Sargasso Sea
gcgcgtcgacgggttcgcgtgaagcgatcgagctgcgcgacggcgaagccggccgttacggcggcaagggcgtgctgaaggccgtcgagcacatcaacaccgaaatctccgaagcgatcatgggcctcgacgcttccgagcaggctttcctcgacaagaccctgctggaactcgacggcaccgacaacaagtcgcgcctcggtgcgaacgcgatgctggctgtttcgatggccgtcgcgaaggctgcggctgaagaagccggcctgccgctgtatcgctacttcggcggttcgggcgcgatgcaactgccggtgccgatgatgaacatcgtcaacggtggcgcgcacgcgaacaacagcctggacatccaggaattcatgatcgtgccggtcagccagccgaccttccgcgaagcactgcgctgcggcgccgaagtgttccacgcgctgaagaagatcctgtcggaccgcggcatgagcacggcggtgggcgacgaaggcggcttcgcaccgaacttcggcagcaacgacgaatgcctgtcgaccattctgcaagccattgaaaaggccggctaccgcgcgggcgaagacgtgctgctcgcgctcgactgcgcggccagcgagttctatcacgacggcaagtaccagttggcgggcgaaggcctgcaactgtcgtccacggaattcgccgactacctggcgaacctggccgacaagttcccgatcgtctcgatcgaagacggcatgcacgaaagcgactgggcaggctggaagacactgaccgacaagctcggcaagaaggtgcaactggtgggcgacgacctgttcgtcaccaacacgcgcatcctgaaggaaggcattgagaagggcatcgccaactcgatcctgatcaagatcaaccagatcggtacgctgacggaaaccttcgcggcgatcgaaatggcgaagcgtgccggctacacggctgtgatctcgcaccgctcgggcgaaaccgaagattcgacgattgcggacatcgcagtcggcctgaacgccggtcagatcaagacgggttcgctgtcgcgctcggatcgtatctcgaaatacaaccagttgctgcgcatcgaggaagacctcggcgatatcgctagctatccgggcaagtcggcgttctacaatctgcgctaat

SEQ ID NO: 280080 - DNA, 1255 bp, Unknown
  Bacterial polypeptide expressing nucleotide sequence isolated from the Sargasso Sea
atgagtaaaattaccagagttatagcaaggcaggtatttgatagtagaggaaacccaaccatcgaagcagaagttttcagctatgaaaaaagttcaagcgcaatttgtccatccggtgcatcaacgggttcttatgaggcgcatgagaaaagagacaaaaaaaataaaaaatattttggaaagagtgtttttggccctgtcaaatacattaattcaaaaatatcaaaaaaattattaaataaaaatgttcataatcaagaacttatcgattcaattttaattaatttagacggcactaaacataaaacaaaaattggggcaaatgcaattttagctgtatcaatggctgtaaaaaaactctcgtcaaaaattaaaaaaattccactttataaaaactttataattaaaaaaaacttcaaactaccttttccaatgatgaatataattaacgggggcgcacatgcaaataataaattgagaatacaagaatttatgatccgtccggatggagcaaaaaatttttcagaggctgtgagaatgtgttttttagtaatacagtgtttaaaaaaaattatttcagatagaggaatgtcaatttctgttggtgacgaaggtggatttgctccaatgatatcaagtaatgaggaggcattacgactaatagtaaaatcaattgaaaaagccggctttaaaaatggtaagcaaatatcaatctgcctagatgttgctgctaatgaattatataaaaacaagaaatactcaattcattcaaaaaaatacctaaatgtagagcaaacaattaataagtatatcaaattaattaaacagtttaaaattaagtctatagaagaccctttttttgaaaacgattggttggcatggagtagattcaaaaaagctacaaaaaaaatacaaattgttggtgatgacctatatgtaaccaatttggagagacttaaaaaaggttttttatacgagtcttccaattcaattctgattaaactcaatcaaattgggacagtttctgaaacattagatgttattagatttgcaaataatattggatataagactgtcatttcacacagatcaggagacagcgaagatactttcattgcagaccttgcggtaggtactaattcaaatcaaataaaaactggttcattgtcaagatctgagagagtttcaaaatataatcaattaataagaattgaggaagatttggggtccaatgctaggatgaattatttgtgag

SEQ ID NO: 280081 - DNA, 505 bp, Unknown
  Bacterial polypeptide expressing nucleotide sequence isolated from the Sargasso Sea
gaaagtaagattaagccatttacaagtgatgaattctcaaaatttttaattaatttatgtaaaaaatattcaattatttcattagaggatcctttctcggaagatgattggaattcttgggcaaaatttactaaattatttggagacagtattcaaattgttggtgacgatctgtttgctactaatttaaatctaattaataaaggcattgaaagaggggctgcaaatgctgtcttaattaagcctaaccaaataggcacattaactgaaactatggatgcaattgagctcgcacaatctaatggatacgaaaccgttatttctcatagatctggagaaacagaaaatacctttatatccgatttagcagttgctactaattctggacaaattaagacaggatctatgtcaaggtcggaaagaattgcaaaatttaatcaattattacgaatagaagaaaattttgacctaaaaaaatctataaaaaacaacaagttctattgaa

SEQ ID NO: 280082 - DNA, 384 bp, Unknown
  Bacterial polypeptide expressing nucleotide sequence isolated from the Sargasso Sea
catgagtgaaattatttcagtgaaagctattcaggttcttgattcaagaggcaatccaacagtcgaggctgaagtcactttagaagacggcatgaccggacttgcatcggtgccctcaggcgcttcaacaggaagcagggaagcggttgagttaagagacggggacaaagatatttatttaggaaggggcgtttcagcggccgttaaaaatatcaattcagaaatacaatctgcactcaaaaatcaggatatttatgaccaaagtaagattgatcaaatcatgattgatttagacggtacagaaaataaatccagacttggcgccaatgcaattctcgccgtctcacttgcttgcattaaggctgccgcagcatcgaaggacat

SEQ ID NO: 280083 - DNA, 193 bp, Unknown
  Bacterial polypeptide expressing nucleotide sequence isolated from the Sargasso Sea
ttgaattcttctattgaaaaaatatttgctagagaaattttagattctcgaggtaaccccactgttgaagttgatgtaatgacaagcgatggattaatgggacgtgctgcagtaccctctggcgcatcaacggggattcatgaagcccttgaattaagagatggagacaaaaacagatacctagggaaagggg

SEQ ID NO: 280084 - DNA, 661 bp, Unknown
  Bacterial polypeptide expressing nucleotide sequence isolated from the Sargasso Sea
ttcagtaggtgatgaaggtgggtttgcacccatgatcagtagtaataatcaagctttagatttaattgtgagtgcaattaaaaaatcaggatttgttaatggtaaagatgtttctatttgtcttgatgtggctgctaatgaattatataaaaaaaacaaatactctattcattctaaaagttatatttcagtaaataaatctattaaagaatatcaaaaaattataaaaaaatataaaattaaatctattgaagacccatttgctgaaaatgattggttagcatggaataaattaatgaaatcaataaaaaaagttcagattgttggagatgatttgtatgtaacaaatcttgaaagattgaagaaaggtttcttaaatatttcttcaaattctatcttgatcaagctaaatcaaattggcactgtttcagaaacgttagatgtaattaaatttgctcaaacaattggatataaaacaattatatctcatcgatcaggtgatagtgaggatacgtttatcgctgatttagcagtaggcactaattcaaatcaaattaaaactggatccttagctagatctgaaagagttgcaaaatataatcaattaatccgtattgaagaagaacttggaaaaaaagcgaggatgaataagatcaattaa

SEQ ID NO: 280085 - DNA, 847 bp, Unknown
  Bacterial polypeptide expressing nucleotide sequence isolated from the Sargasso Sea
ataaataatggtgggatgaataatattaattatggagcaactaaaaccgtttttaatatgccatatcctttaatgaatattataaatggaggtgcacacgctaataactcattagaaatacaagaatttatgattagacctgatggagcaaaaagtttcaaagattgtatgcagatgtcttttttagtaattcaaaatttaaaaaaaaatctagaagataaaaaaatttctacgagtgtaggtgatgagggtggattcgcaccttctttaggttcagatgaagaggccatagagataattattaaatcaatatctgcagcaggatttaaaccaggtaaagatatatcgatttgtttagatgtagctgcaaatgagctagaaaatccaaaagatgttgaatattttttaaaattaacaaaaaaatatcctattaaatctattgaagatccttttccagaagatgattgggataattggaaaaaattaacacaagaagttaatacacaaatagttggcgacgacttgtttgtgacaaacaaaaaaagactagaaagaggagtcaaagaaaaatcagctaactctattttaattaaaccaaatcaaataggaactgtaagcgaaactctggaaacgataaaattagctcaggataacaattttaagacaataatctcacatagatctggcgactcagaggatacatttattgcagatttagctgttgcgacaaattcaactcaaataaaaacaggctcacttgcaagatctgagagagtagctaaatataataggttgttacgcatagaagaagaacttggaaatcaagccaaaatggctaaaatctaaa

SEQ ID NO: 280086 - DNA, 1201 bp, Unknown
  Bacterial polypeptide expressing nucleotide sequence isolated from the Sargasso Sea
aatgccaaaaattaaaaaagttaaaggtcgacaagtttttgacagcagaggaaatccaacagttgaagctgaagttttttcagaaaatggatctgctttagcaattgtaccgtcaggtgcatctacaggaacacatgaggcatacgaattacgagacaaagataacaaaaattattttggaaaaagcgtttttaaagccgttgaaaatataaatggtccaattgcaaatgttcttaaaaatattgatataaatgaacaagagaaaatagataacattctaattgatttagacggaactgaacaaaaaaaaaaaattggagctaattcaattttagctgtttctatggcatcatgtaaattatcatctttagaaaaaaaaattcctctatataagaacttaagtaaatccgaaagttatcaattacctgtaccgttattaaatattataaatggtggtgtacacgctagaaataatctcgatattcaagaatttatgatacgtcctgacaatacaaaatcatttgctgaagcaatcagacacagttttttagtaattcaaaatttaaaaaaaatgctaaatacaaataatgttggtgacgaaggcggttttgcgccagatttaaaggataatgaggaagctataaacctaataattaaagcaattgaaaaatcagggctaaagccaggtattgatatttcaatttgtttagatgtggctgcaaatgagttagacaagccaaaatcaatagaatattattctgatttaattaaaaaatatcccattaaatcaatagaagatccttttggtgaggatgaatgggggttatggaaaaaattaacaaaaagcacaaaaatacagattgttggtgacgatttgtttgccacaaacattaaacgacttgagaaaggcattgatgaaaagtcatgtaatactatactagttaaactcaaccaaattggcacagtaaccgaaacacttaaagtcatagatttagcgaagaaaaataattttaaaacaattatttctcatcgatcaggcgactcagaagatacatttatagctgatttagcagttgcgacaaattcatctcaaattaaaacagggtctttagctcgttccgagagagtatctaagtataatcggctaattagaatagaagaggaacttggaaatctcgcaaaaatggctaaaatcaaataa

SEQ ID NO: 280087 - DNA, 1282 bp, Unknown
  Bacterial polypeptide expressing nucleotide sequence isolated from the Sargasso Sea
atgaaagtagatcaattaaagttttatgaggttatagattcgagaggtaatcctacaattgcctgcaagattttttctggaaaattttcgtctataagtatggttccttctggcgcctcaactggttcaaaagaagctcaagaaattagagataacgataaaaaaagatttcttggtaaaggacttaaagaagtaataaagaaaactgagcatcaaatatttgatgtgatttcccaaaaaaatttattagatcaacaagaaattgataacggtctcattgagctcgatggcagtaagaacaaatcaaatattggagcaaatataattcttgctacatctatggcggtttctaagttagcttcacattcagaaaatatggagttatttaaatacattaatcaaattgcaaaagcatatgaaattgattgcgattattcattacctttgccgatgatgaatattcttaatggcggcgctcatgcaaacaatcctcttgagtttcaagagtttatgattcaaccagctggatttgagaattttaatgagagcctcagatcaggaatagaaatatttcataatcttaaaaaagagttgcaggaaaataatttttcaacttcagtgggggatgaggggggctttgctccagatatctctgatactaaaaaggctttagattttatctgttccgcagttgaaaaatcaggctataaaatgggagaagaaatttttatcgctatggactgtgctgcgtctgagatatttattaatggagaatatctttttgaaggtaaaaatcatgataattcaggtttaattcaaatttatgaagaacttatcaaaagttatcctattaaatcaatagaagatcctttagatgaagatgattgggatggatggaaagctattactaagcaaataggagatgaagtgtctattgtgggtgatgatttattcgttaccaataaaaaaatattggaaaagggaataaacaatggctcagctaattcaattctaattaaagtgaatcagattggaacagtaagcgaaaccttagagacaattagcttggcaaatcaaaataatattaatactgttatatctcacaggtctggagaaacagaagatacatttatttcagatttagcggttggaataggggcagggcaaataaaaacaggggcaccttccagatctgatagaaccgcaaaatacaacagacttttaatgattagcagcgataataatttttcttttgaaggaatgaatgggatcaaacaatgat

SEQ ID NO: 280088 - DNA, 1279 bp, Unknown
  Bacterial polypeptide expressing nucleotide sequence isolated from the Sargasso Sea
atgaaaattattaacctacacgcaagagaattacttgattccagggggaatcctacccttgaggttgagttaacccttgataacaacatgccttcttgtgcgattgttccctctggtgcttctactggtgaaaatgaagctatcgagttacgagatggtgacaagtctagattccaaggaaaaggtgtgttgcgtgctgttgataatgtaaatactgctatattcaagaatataaaaaataaagttttttattctcaagctgagctagatagctatctaattgatcttgatggtactcaaaataagggtagtttgggtgccaatgctattcttggcgtttctatggcatttgctagggcaatagcgcgttattcgaaaatacctttgtataagtcctttgatgattcatttaagtttttaatgcccgctcctatgataaatattattaatggaggtagtcacgcaaacaataacattgattttcaagaatttatgatttatccattaggcgctaggtcattttctcaaaccttgaaaatgggctctgaaattttttgtcaattaaaatttttgttagaagaaaaagggttttcaaccgctgttggtgatgagggtggctttgcgcctaatcttagatcaaaccaagaagcgattgaaattatacttgaagcaatcgaaagaagcccttatagtgctggagacgaaatatttctgtcattagatgttgcagctagtgaattatttgacagtgaagaatatcatatacaatctgaaaataaaaagctatctagcgataagatgattgaatatataataagcttagttaatcaatatcctattatatcgatagaggatggtttagatcaaaatgactggactggctggactgagcttaacggatctattggaaataaatgtcaaatagttggtgatgatttaactgtaacaaataaagaatttcttgcaaaatcagttgaatacaaggctatgaatgcaattttaataaaattaaatcaaattggaacagtaactgaaacaatcgagacaatcaaccttgcaaaaaagcatcattatggaacaataatttcacaccgctctggagaaactgaagacacaataatttctgatttttcagtatcgatgggtactggacaaatcaaaacaggatccttatcccggactgaccgcattgctaaatataatcaattattaagaattgaagagtcgctaggcagtgaagcagtttttctaggagaaaaatctctaggattcaattaaa

SEQ ID NO: 280089 - DNA, 634 bp, Unknown
  Bacterial polypeptide expressing nucleotide sequence isolated from the Sargasso Sea
aatgagtacaataatcgatattcatgcgcgggaaattttagatagtcggggaaatcccacagttgaagtcgatgtaactttggaggacgggacactaggccgagcatccgttccctcgggcgcatcaacgggtgctcacgaggcagtagaaaagagagatgctgataaaaaacgatacaatggaaaaggtgtgcttaacgcagtagctgcagttaatggtgaattagctgatgcattggtcgggtatgatgtcagtgaacaagcgtcaattgacgcttcaatgattgaaatagatgggacaccaaataagtcgcgtttaggagccaatgcaattctgggtgtttcacttgcctgcgcgaaagcagctgctgatttttgcaatttatctctatatcgatatgtcggtgggcccaccgcaaaaactcttcctgttccaatgatgaatattattaatggcggcgaacacgctgataatcctattgatattcaagagtttatgattatgcccgtggcagcggaaaatataaaagatgctgtccgaatagggtcagaaatttttcatactctaaaaaacgaaaaaaagacgcaagcttatcaactggaattggcgacgagggtggtttgctccaaacat

SEQ ID NO: 280090 - DNA, 1297 bp, Unknown
  Bacterial polypeptide expressing nucleotide sequence isolated from the Sargasso Sea
catgtctgagatcgtcaatattatcgcccgtgagatcatggattcacgcggtaacccaacagtagaagccgacgttttcctggccagtggtgctatgggtcgtggttgcgcgccatctggtgcttctaccggtacccgtgaagctttagaactgcgtgatggtgacaaaagccgttacttaggtaagggcgtgcgtactgcagtggccaatatcgatggcccaatcaaagcagctttagtaggtaaaagtgcctataagcaagctgaagtggaccagatcatgatcgatctggacggcactgagtctaaatctaagttaggcgctaatgctattctggctgtgtctttagctgtagcccgcgcagctgctgctgacaaaaaaatcccactgtatcagcacattgccgacttaaatggcacaccaggcgtgtattccatgccagtacctatgatgaatatcatcaacggtggtgagcatgcggataacaacgtcgatattcaggagtttatggttcagcctgttggcgctaaaactttcgctgaagctctgcggatgggcgctgaaattttccaccaactgaaaaaagaactgcacagtcagggcttaaatacagcagtaggtgatgaaggtggtttcgcaccggatctgaagtctaacgaagaagctttaactgtgatctctaaagctgtagccgctgcaggttacgagctgaataaagacatcactttggcattagactgtgccgcttctgagttttatgttgatggtaaatacaagctgtctggcgaaggcaaagaattcacttcttatgaattcaacgacttcctggctggtttagctagccgtttccctatagtttcaatcgaagacggtttggatgagtcagattgggatggctggaaagacatgaccaataaaatgggcaacaaaatccagctggtcggtgatgatttattcgtgaccaacaccaaaatcctgacccgtggtattgaacagggcattggtaactctatcctgatcaaatttaaccaaatcggtagcttaactgaaactttagcagccattaaaatggcgaaagatgcgggtttcactgcagtgatttcacaccgttcaggcgaaactgaagattcctttattgctgacttagctgtaggtactgctgctggtcaaatcaaaacaggttctttatgccgctcagaccgcgtgtctaagtacaaccaattactgcgtatcgagcaggaattaggtgctaaagccccgtaccgtggccgtgtagaaattaaaggccaggcgtaa

SEQ ID NO: 280091 - DNA, 590 bp, Unknown
  Bacterial polypeptide expressing nucleotide sequence isolated from the Sargasso Sea
aaaatcaattaaaaatgcgggttttgtaaatggtaagcatatatcaatttgtttagatgttgcagctaatgaattattcaaaaataagaagtactctatacattccaataaatacataaacgtagatagaactatttatcaatatcttaaattaataaaaaaatttaaaataaaatctatagaagatcctttttctgaaaacgattggtcggcttggagtaaattcaataaagtaacaaaaaaattacaattggttggagacgatttatacgttacaaatctagaaagattgaaaaaaggttttttatatgaatcctctaattcaattttaattaaactaaatcaaattggtacagtttctgaaactttagaagtaatcaaatttgcaaataatataggatataaaacaatcatatcacatagatcaggagatagtgaggatacatttattgcagatctggctgtgggtactaactctaatcaaataaagacgggttcattatctagatctgagagagtttctaaatataaccaattaatccgaatagaagaagatttatcatctaaagcaaaaatgaataaattatgag

SEQ ID NO: 280092 - DNA, 547 bp, Unknown
  Bacterial polypeptide expressing nucleotide sequence isolated from the Sargasso Sea
agcttcagaattatataaagatggtcaatattttttatctaatgataacgcatctagcagtgaagatttaattgatatgtgggaggagcttacaaacaaatatcccattttttcaattgaagaccccttgcatgaagatgattggagtggatggataaatcttaatgaaagaattggaaaaaaaacacagattgtgggtgatgatctttttgtaactaatccagaaagattaaaaatgggtatagaaaagaatgcggccaattcaatactaataaaagttaatcaaataggaactataactgaaacactagaaactattgatattgctaaaaacaataaatattcttgtgttatttcccatcgttctggagaaacagaggatacatttattgcggatttatctgtggctacaaattctggccagataaaaacaggatcaatgacgagatctgatagagttgctaaatataaccaattaattagaattgagagcaatctccagaataattctagttacgcaggtaaatcaattttaaagaagaattaa

SEQ ID NO: 280093 - DNA, 956 bp, Unknown
  Bacterial polypeptide expressing nucleotide sequence isolated from the Sargasso Sea
aggggccaatgcgatattaagtgtttcgcttgcctgtgctgacgctgcttcaaagtatttgggtattcctctttataaatatttaggtggctccaaagcatttagaatgcctacacctatgctgaatattataaatggaggagcccatgcaaataataatttatcatttcaagaatttatgattatacctgtaaaatgcaaaacgtttacagaatctattagaaaagcatccgaagtttttcatacacttaaacaaattttagaaaaaaaaaatatatcaactgcagttggagatgaaggcggttttgcaccgaatttaaaaaatgaagatcaagcctgcgcactaattaaagaggcaattactaaaacaggatataatttaggaaaagatttctttttatcattggatgtcgcagcatctgaattttataataataaaaaatataaaatcctatcagagaagagagcgttttctagtgatcaattttccgattatttaatcaaattatgtaaaaaatattctattatttctcttgaagatccttttgcagaagatgactggaaagcatggcaaaaatttaatcataattatggctctaaaatacaagttgttggggacgatatatttacaacaaatatagatttaatttcaaaaggcataaaaatgaaagctgcaaacgctgtcttaattaaggtaaatcaaattggaacgttaactgaaaccatgaaggcaatagagcttgctcaaatgaatggtttagaaactattatctctcaccgatctggtgaaacagaaaatacttttatttctgatctttcagtagcaacaaattctggtcaaattaaaacagggtcaatgtctcgttctgatagaattgctaaattcaaccaattaattagaattgaggaattttttaattctaaaaaatcattaaaaatcaacaagttctactaat

SEQ ID NO: 280094 - DNA, 559 bp, Unknown
  Bacterial polypeptide expressing nucleotide sequence isolated from the Sargasso Sea
ggcattgatgtcaatttagctttagattgtgcttctagtgaattctataatggaaatgaatatgttttagacggggaaaataaaattttttcttctcaagagtttgcaaattacttagaggatcttgtttcaagatatccgattatctcaattgaagatggtatggatgaaaatgatatagaaggatggaggatactttcagagcttattggagacaggtgtcagcttgttggagatgatttatttgtcactaataaaaaaatccttgagggaggtattgaaaaaggtatagctaattcaattttgattaagtttaatcaggtaggaactttatctgaaacaatcgaaactattatgtgcgctaacaaaaataattataaaaccattatttcacacagatcaggtgaaacagaagatactacaatttctgatctcgcagtcggcttgggatctggtcagattaaaacaggagcgccatgcagatcagacagggttgcaaaatataatagattactttggatagaagaagagagtatcgatattttgcttcatgaataaa

SEQ ID NO: 280095 - DNA, 1089 bp, Unknown
  Bacterial polypeptide expressing nucleotide sequence isolated from the Sargasso Sea
gagtaacaaaagctatagacaatattaatgatcgcataaagaattctcttataggagagaatccacttgaccaagatcatatcgatcaaatcttaaataacttagatggcacaagtgacaaatctaatcttggagctaatgcaattctttctgtatcaatagcttctgcaaaagcatcatctaaatcagagaatttagatttacataattattttaatattttgcttagtaataaaatgggcaaaacaattgatcaacttattccaatacctatgttaaatattcttaacggtggtgagcatgccgataacaatatcgatatacaagaattcatgattattccaaaaggagctgttaatttttcgcaagccatgcagtggtcttctgagatatattggaatcttaaatctattcttaaagaaaaaggcctatcaactgcagtaggtgatgaaggtgggtttgctccaaatctcaacacaaatagagaagctcttgagttaatagcaagggcggtagataaaactgatcttaagttaggttcagatatctgtatatccttggattgtgctgcaagtgaattttatgaaaatggcgcttatcatcttaagggtgaagatagagagcttactagttcagaatttgctgaatatttagagggtttggcaaatgatttcccaataatatctattgaagatgggatggatgaaaatgatctagagggatggaaattgcttactaaacaaattggaggaaaatgtcagcttgttggcgatgatctttttgttacaaaccctgaagtcctcaaaaaaggaataagtgatgagattgctaattcagttttaataaaatataaccaaattggaacaatatcagaaacacttgaaacgatttctattgccttaaataacgactatcaaaatattatttcgcacagatctggagagaccgaggactcatcaatttctgatctcgcagttggaacaggagccggtcaaattaaaacgggagcaccatgcagatctgaaagggttgcaaaatataataggctttattggattgataagaaaaatagcttttcatatggctgat

SEQ ID NO: 280096 - DNA, 903 bp, Unknown
  Bacterial polypeptide expressing nucleotide sequence isolated from the Sargasso Sea
ttaattatttaggtgataaaaataatccatgcatactccctgtccctcaaattaatattcttaatgctggtagtcattcagactctcccattgcttttcaagaattcatgatagttccagttggagcaaaaagtttttcaaatgctcttcagattgcaaatgaagtttttcataatcttaaacaaaatctaaaatctaaaaacctaagtacatctgttggagatgagggtggatttgctcctaagctaaatggaactgaggatgcgctaaatataataattgactctgtaaatgatgctgggtataaagttaatgatgatattatgatagcacttgattgtgctgcatcagaattttattctaatggagtttatgattattcaatatttgaaggtaaaaatgcaagaaagttaaattcagatgaacaggttgaatatcttatttcactttgcgaaaagtttccaattatttctattgaagatggaatggatgaagatgactgggatgggtggaaaaaacttacagaaaaaattggaaataaagttcaacttgtaggagatgatttatttgtaactaatataaaaagacttcaaagagggattactgaaaaaacaggaaattcaattttaatcaaattaaatcaaataggaactttaactgaaacaattcaatcaataaaattagctacaaaaaataatttttctacagttatctcacatagatcaggagaaacagaagactctacaatagctgatttatctgttgcttttaatacaggtcaaattaagacaggctctatgtctagaagtgatcggatggctaagtataatcaactgctaagaatagaagaagagcttggtgaaaatgctaaatacctaggtataaatgcatttaaattttaat

SEQ ID NO: 280097 - DNA, 1051 bp, Unknown
  Bacterial polypeptide expressing nucleotide sequence isolated from the Sargasso Sea
agaaaaatctgtttttgacaaacaagaattagataatttgatgattgatttagatggcactgaaaataagtgtattcttggtgctaatgcaattctgggtgtttctcttgctatctctcaggctgctgcaaaaagtaaaaatttaccattgtatcaatatattggtggtaactcagcaattacacttccagtcccaatgatgaatataataaatggtggatctcactctgatgcacctatagcatttcaagagtttatgattgttccagtaaatgcagaaagtttctctcatgcgatgaaaattggcacagaaattttccataatttaaaaagtatcttatcgaaaagaggtttatcaacttcagtaggcgatgagggaggatttgctccaaaattaaaaggaactgaagatgctcttgaaactataatcaaatctatatcatctgcaggatttaagcctggtcatgatgtgatgattgctcttgattgtgcttcatctgaattttttgaagataatcattatgattacagaatatttgaaggtaataatggaaaagtctttgattctgaacaacaggctgattatttatctgatcttgttagtaaatatccaattatctcgattgaagatggtatggatgaaaatgattggagcggttgggttcattcaacacaaattcttggcaataaagttcaattagttggtgatgatctttttgttactaatacaaatattttacaaaaaggcatagatcaaaaagctgcaaattctattttaattaaagtaaatcaaataggtaccctgacagaaaccattaatgcaattaacttggcaaaagaaaatggattttcgactgttatttctcatagatcgggtgaaactgaagataatattatagctgatttagcagttgcattgaatgctggtcaaataaaaacaggttctctttctagatctgacagaatgtcaaaatacaatcaactacttcgtattgaagaacaacttggaagtaaagcattttatccaaaaaaggaagcttttacattctaa

SEQ ID NO: 280098 - DNA, 683 bp, Unknown
  Bacterial polypeptide expressing nucleotide sequence isolated from the Sargasso Sea
tcttatatctaagaaatattcatctgcggttggagatgagggtggctttgctccatctctaaactcaaatgaggaagccttgcagttaataattgaagctattaaaaaatctaatcttagaccaggtattgatgtaaatttggctttagattgtgcttctagcgaattctataatggaaatgaatatattttagacggggaaaataaaattttttcttctcaagagtttgcaaattacttagaagatcttgtttcaaagtatcctatcatttcaattgaagatggtatggatgaaaatgatatagaaggatggaagatactttctgagcttattggagacaggtgtcagcttgttggagatgatttatttgtcaccaataaaaaaattcttgaaaaaggtattgaaaaaggtatagctaattcaattttgattaagtttaatcaggtaggaactttatctgaaacaatcgaaactattatgtacgctgataaaaataattataaaaccataatttcacacagatcaggtgaaacagaagatactacaatttctgatcttgcagtcggcttgggttctggtcagattaaaacgggagcgccatgcagatcagacagggttgcaaaatataatagattactttggatagaagaagagagtatcgatattttgcttcatgaataaa

SEQ ID NO: 280099 - DNA, 642 bp, Unknown
  Bacterial polypeptide expressing nucleotide sequence isolated from the Sargasso Sea
catgaatccaaaaattgctgaagttacgcaacgtattattgagcgtagcaaggaaacgcgtaaagcgtatttagaaaagattgaagacgcacgtcgtcaaggcccgcatcgtggtgtgttgtcttgcggcaacttagcgcatggctttgcggcctgtggaacgagtgaaaaagccgaccttcgttcgatgaccaaggctaatgtcgctatagtatcagcttataacgatatgctttcagctcaccagccttatgaaacctatcctgcgctcattaaagaagctgtgaaagaagttggcagtgttgcacagtttgctggtggtgttcctgctatgtgcgatggcgttacgcaaggccagtctggcatggacttaagcctaatgagtcgtgataatatcgctcagggtgcagctatcgcgctttctcataacatgtttgatagcacactgatgttaggtatttgcgataagatcgtgcctggactgctaatgggcgcacttacatttggtcacctgccaactgtttttgttccagcgggtccaatgccatctggcttaccgaataaagaaaaagcgcgcgttcgccaagaattcgctgaaggtaaagtagggcgtgacgcactgcttgaagctgaatctcaatc

SEQ ID NO: 280100 - DNA, 515 bp, Unknown
  Bacterial polypeptide expressing nucleotide sequence isolated from the Sargasso Sea
aatgaaacccaaaaaagttaacaaaattgtcgaagaagtaactaaaaatattatcaaaagatctaaatcaaatagattaaaatatttacaaaaacttaatgcagcaaaagatttaaatatcagaagagatttattaagttgtggaaatattgctcactctattgcaggttgtagttcttcagagaaaaaggaaattatttctggagaaaaaccaaacattgctattgtatcggcatataatgatatgttgtcagcacataaaccatatgaaaattatccttctataataaaaaaagttattcatagaaacaacggtacatgtcaatttgctggcggtgttcctgcaatgtgtgatgggattacacaaggacaagctggaatggaattatcattattctccagggatgtaattgcacaagcaacagcaattgcactaagtcacaatgtttttgatggggcaataatgttagggatatgtgataagatagttcccggtttgttaatgggctgcctct

SEQ ID NO: 280101 - DNA, 757 bp, Unknown
  Bacterial polypeptide expressing nucleotide sequence isolated from the Sargasso Sea
atgcatccagttgtagcgcgcgtgaccgagcgcattgtccagcgcagcgcagacacccgcggcgcctaccttgccggcgttgacgccatgatcgcccgcaagcccgcccaagaccgcatgggctgcgccaacctggcccatgcctacgcggcgctgccgggttctgacaagttcaaggtcacggtcgagaaggcgcccaacatcggcatcgtcacggcctacaacgacatgctctcggcccaccagccgtaccaaggctaccctgccatcctgcgtgacgaagccgccaagttgggggccaccgtgcaagtggcgggcggtgtacccgcgatgtgcgacggtgtgacgcagggtacgcccggcatggagctgtcgctgttctcccgcgatgccattgccatggccactgcggtagcgctgtcccacgatgtgttcgatggcgcgctgctgctgggcgtgtgcgacaagatcgtgccgggcttgctgatcggtgcgctgcattacggccacttgccctgcgtgtttgtgcccgcaggccccatgggcacgggcctgtcgaacaaggacaaatccaaggtgcgcgagcagtacgcacaaggcctggtggggcgtgacgagctgctgaaggccgagtccgccgcgtaccacagccccggcacctgcaccttctacggcacggccaacagcaaccagatgctgctcgaagccatgggcctgcatgtgcctggcgcggcgttcgagtcgcccggcacccagg

SEQ ID NO: 280102 - DNA, 743 bp, Unknown
  Bacterial polypeptide expressing nucleotide sequence isolated from the Sargasso Sea
tatgccattaaataaaacactgttaaaagtaaccgatagaattacagagcgttcaaaagatagtcgggaaaaatatgttggtagaatgaggtccgctctagaaagaggtcctagacgcgcgcatctttcttgcggaaatcaggcacatgcttacgctgctatgggagcagacaaagaaacattagctaataaaagagtgccaaacattggtatagtatcagcctacaacgatatgttatcagctcatcaacctttttataattttcctgatttgataaaacaggaggcaagaaatcagggcgctacagcgcaggttgctggaggcgttcctgcaatgtgcgatggtataacgcaaggtgaagcaggtatggagttatccttgttttcgcgtgacgttatcgccatgtctgcaggtatagctttaagccacaacacttttgatagtacaatttatttaggtgtttgtgataaaatcgttcccggtttagtcatggcagctgctacctttggttttctacctgcaatttttttgcccgctgggccgatgacctctggccttcccaatgatgaaaagtctcttatccgtcaaaagttcgcaactggtgagattggtcgcgccgaattaatgagtgcagaaatgaaaagctatcatggccctgggacgtgtacattttacggaacagccaattcaaatcaaatgcttatggaatttatggggctacaacttcccggctcatcttttg

SEQ ID NO: 280103 - DNA, 877 bp, Unknown
  Bacterial polypeptide expressing nucleotide sequence isolated from the Sargasso Sea
aatgaaacccagaaaagttaacagaattgtcgaagaagtaactaaagatattatcaaaagatctaaatcaaatagattaaaatatttacaaagacttaatgcagcaaaagatttaaacatcagaagagatttattaagttgtggaaatattgctcactctgttgcaggttgtagttcttcagagaaaaaagaaattatttctggagaaaaacctaatattgctattgtgtctgcctataatgatatgttgtcagcacataaaccatatgaaaattatccatcgttaataaaaaatgttatccaaaaaaacaacggtacatgtcagtttgctggcggtgtccctgcaatgtgtgatggtattacacaagggcaagctgggatggaattatcactattctcaagagatgtaattgcacaagccacagcaattgcactaagtcacaatgtttttgatggagcaataatgttgggtatttgtgataagatagttccgggtttgttaatgggatgtctttctttcggacatttaccagtaattttcattccagctggtccaatgacaacaggcattaataattctgaaaagaaatcagccagggaaaattatgtaaataaaaaaatttcaaaatcagaacttttagaagttgaaagcaaggcatatcatagtcctggtacatgtacattttatggaactgctaatacaaaccaacttctattagagtttatggggttgatgttgccaggtgctgcatttataaatccaaacaataaactgagaacattattttctgaatgggcctcaaaaagaattgttgaaataagtagttcaaaagaaaaaaataaatgtataggggaaatgatagacgaaaagtctata

SEQ ID NO: 280104 - DNA, 954 bp, Unknown
  Bacterial polypeptide expressing nucleotide sequence isolated from the Sargasso Sea
ttgcccgcagccaaaaagccgtgctatttacctgcaacgtctggaaaaagcccgcctgaaagggccgcaccgcagcgtgctgagctgcggtaatctggcgcacggttttgccgcctgtaatcagcaggataaaggcgatttacgcagtttaaccaaagccaacattggcatagtgtcgtcgtacaatgacatgttgtcggcgcaccagccctatgagcaatacccggccctgattaagcaagccgtgtctgaagtgggtagcgtcgcacagttcgctggcggcgtgccagctatgtgtgatggcgtgacacaaggtcagcctggcatggagcttagcctgttaagccgcgatattattgccatgtcggcagcggttggcctatcccacaacatgtttgatggcggcttgatgctgggtatttgcgacaaaatcgtacctggtttgtttatggctgcgatgagctttggtcacctgccatttgtgtttgttcctgcggggccaatgccatcaggcataccgaacaaagagaaagcccgtgttcgccagctgtatgctgaaggtaaagttggcaaagaggaattactggcggcagagtcagcttcttaccactctgcgggtacctgtacattttatggcacggccaactctaatcagctggtcgttgagattatggggctacatttacccggcgcatcttttgttaacccgggcacacagcttcgggatgagctgactaaggccgccgcacgtcaggtaacgcggctaacagatttaggtaccgattatctgcctgccggtaaaatgattgatgctaagtctgtggtaaacggcattgtaggcttgttggcaaccggcggctctaccaaccataccatgcacctgatagcaatggcccgctcagccggctttattgtaaattgggatgatttcgctgaattatctgctgctacacc

SEQ ID NO: 280105 - DNA, 885 bp, Unknown
  Bacterial polypeptide expressing nucleotide sequence isolated from the Sargasso Sea
gcggcgctggacgccggcggcaccgcgcagtttgccggcggcgtgccggccatgtgtgatggcgtcacgcaggggcaggacgggatggagctgtcgctgttctcgcgcgacacgattgccctgtcgacggccgtggcgctgtcgcaccagatgttcgacgcggcgctgtacctgggcgtgtgcgacaagatcgtgccggggctggtgatcggcgcgctgtcgttcggccacctgcccgccgtgttcgtgccggccggccccatgaccaccggcatcagcaacgatgaaaaagcccgtacgcgccagctgtacgcagaaggcaaactctcgcgcgccgacctgctggaagccgaatccaagtcgtaccacggggccggcacctgcacgttctacggcacggccaactccaatcagatgctgatggaggtgatgggcctgcacctgccgggcaccgcgttcatcaacccgaacacgccgctgcgcgaggcgctcacgcgggaatcggctcgccaggcgctcaagctcgtcttcagcggcgaccaatacacccccattgccgacgtgctggatgagcgcgccttcgtcaacggcatcgtcggcctgctggccaccggcggctcgaccaaccacacgctgcacctggttgcgatggcgcgtgcggccggcatcctgctcacgtgggacgacttcaacgatctgtcgggcgtgattccgctgctggcacgggtgtatccgaacggcaaggccgacgtgaacgagttccaggccgcggggggcctctccatcgtcattcgcgaactgatcgacgccggcctgctgcacgacgacgtgacaacgatcatgggcaagggcctgcgccgccatgcgcaggagccgttcctggac

SEQ ID NO: 280106 - DNA, 1918 bp, Unknown
  Bacterial polypeptide expressing nucleotide sequence isolated from the Sargasso Sea
atggtttccccgcattcgcaattgttgaaggtcacgcaacgcgtgatcgagcgcagcaaacccacccgcgagtcatatctcgcgcgcatcgagcacgcgcaaggcaaatttccggcgcgcggcgcgctctcctgcgccaatctggcccacggttttgccggcctcgtaggcaacgacaagctcgtgatcaagcaggttcgcgaaccgaacatcggcatcgtgtcgtcgtataacgaaatgctgtccgcgcacgcgccgtacaaaaactacccggacatcatcaaggaggccgcgcgggaaaacggcggcgtcgcgcagttcgcgggcggtgtgccggccatgtgtgacggcgtcacgcagggtaacgcgggcatggaactgtcgttgttctcgcgcgaagtgatcgcgatgagcacggcggtcgccctcacgcacaacatgttcgacgcggcgctgtgcctgggcatctgcgacaagatcgtgccgggtctgctgatcggcgcgctgcaattcggccatctgccgacgattttcgtgccggccggcccgatgggtagcggtctgtcgaacgacgacaaagccaagacccgccaactcttcgccaccggccagtgcggccgcgacgcgctgctcgaagcggaagccgcggcgtatcacagccagggcacctgcacgttctacggcaccgcgaacagcaatcagatgctgatggaagtcatgggcctgcatctgccgggctcggccttcgtccatccgcatacggcgttgcgcgacgcgctgaccgcgcaggccgcgcgccgcgtgctcgatctgacggtggagcgcggcaactacacaccgatcggccatgtggtcgacgagaaagcggtcgtcaacggcatcgtcgcgttgctggcaacgggcggatcgaccaaccatacgctgcacctggtggcgattgcgcgggcggccggcatcgtgatcgactggaacgatttcgatacgttgtcgcaagcggtgccgctgctcgcaaagatttacccgaacggcaaagccgacgtgaatcacttccacgcggccggcggtgttgcgttcctggttcgcaatctgcttgaaggcggcttgctgcatgaggacgtgaacaccgtcgcgggcaaggggctcaagcactacacgcaagagccgaagctgatcgacggcaagctgcaatgggtgccgggcgcggacaagagcgaagacacggcggtgctgcgcggcatcaaggagccgttccagccggacggcggcttgcgtctgatgcagggcaagctcggccgcggcgtgatcaagatttccgcggtggcggcgcagcatcgcaaggtgaaggcgccggctatcgtgttcgattcgcaggaagcggtacaggccgcgttcgacaacggcgaactgaagcgcgacttcatcgcggtggtgcgcttccagggcgcgcgcgcaaacggcatgccagagctccatcgtttgactccgctgctcggtgtgttgcaggatcagggtttccatgtcgcgctggtgaccgacggccgcatgtcgggcgcttcgggcaaggtgccggcggtgatccatctgtcgccggaagcgttgctgcaaggcccgatcggcaaggtccgcacgggcgacatgctggtgatcgacgctgacgccggcgtgctcgacatcgagatcgatgcagccgaatgggcggcgcgaccggaagcagtgccgcagcatcaggcggaaaacgaagtcggtttcggccgtgaactgttcggcgtgtttcgcgcggcggcggcgccggcggagctcggcgcctcggtgttcggtccgatggtcggcgagcgcgcggcgcaccatggtgagccggcccaggcacacaccaaagcacacggcaacgcacatacaagcaccacgcgagccagctaaa

SEQ ID NO: 280107 - DNA, 1828 bp, Unknown
  Bacterial polypeptide expressing nucleotide sequence isolated from the Sargasso Sea
atgcactcagtcgttcaatctgttaccgacagaattattgcccgtagcaaagcatctcgtgaagcgtatttagccgcgttaaatgatgctcgtaaccatggcgtacaccgtagctcgttaagctgcggtaacttagcccacggttttgctgcttgtaatccagatgacaaaaattcattgcgtcaactgactaaagccaacatcgggattattaccgcattcaacgacatgttgtctgcgcaccaaccctatgaaacctatcctgaattgctgaaaaaagcctgtcaggaagtgggcagcgttgcacaggtcgccggtggtgtacctgcaatgtgtgacggtgtgactcaaggtcaacccgggatggaattgagcttactgagtcgtgaagtgattgccatggcgacggcggtgggcttatcccacaacatgttcgatggcgccttattactaggtatttgcgacaaaatcgtgcctgggttattaattggcgccttaagttttggtcatttacccatgctgtttgtgcctgcaggcccaatgaagtcgggtattcctaacaaggaaaaggcccgcattcgccagcaatttgcccaaggtaaagtcgatagagcgcagctgcttgaggccgaagcccagtcttaccacagcgctggcacttgtactttctacggtacggcgaactcgaaccagctaatgctcgaagtcatggggctgcaattaccgggttcatccttcgtgaatcctgacgacccactgcgcgaagccctgaataaaatggcggccaagcaggtgtgtcgcttaaccgaactgggcactcaatacagcccaatcggtgaagtggttaatgagaaatccgtggtaaacggcatagtggcgctgctggcaaccggtggttctactaacttgaccatgcacattgtggcggcggcgcgtgcagccggcattatcgtgaactgggatgatttttctgaactatctgacgcggttcctttgctggcccgtgtttatccaaacggtcatgcggacatcaaccacttccatgccgccggtggtatggctttccttatcaaggaattactcgatgcaggcttactgcacgaggatgtcaacacagttgccggttttggtctacgtcgctacacccaagagcccaaattactcgatggcgagctgcgttgggtcgatggtccaacgatcagcttagataccgaagtgttaacctctgtcgctacgcctttccaaaacaacggtggcttaaaactgcttaagggcaacttgggtcgtgctgtaattaaagtctcagccgtgcaagaaaaacaccgtgtagttgaagcgccagccgtggtgattgacgatcaaaacaaactcgatgcgctgtttaaatccggcgcgttagaccgagattgcgtggtggtggtaaaaggccaagggccgaaagccaacggtatgccagagctgcacaagttaacgccactgttaggctctttgcaggataaaggctttaaagtggcactgatgacagacggccgtatgtcgggtgcatcgggcaaagtacctgcagcgattcacttaacgccagaggctatcgatggcgggctgattgccaaagtgcaagatggcgatcttattcgtgtcgacgcgctgactggtgagctgagtttattagtctccgatgctgaacttgccgcgagaaccgctgctgaaattgatttacgccactcacgctatggaatgggtcgtgagttgtttggggcactgcgttcaaacttaagcagtccagaaaccggtgcgcgcagtaccagcgccattgacgaactttattaat

SEQ ID NO: 280108 - DNA, 994 bp, Unknown
  Bacterial polypeptide expressing nucleotide sequence isolated from the Sargasso Sea
atgaatccaaaaattgctgaagttacgcaacgaattatcgagcgtagtaaagaaacgcgtaaggcgtatctagaaaaaattgagagtgcacgacgtcaaggaccacaccgtggtgtgttgtcatgcggtaaccttgctcacggctttgcagcatgtggaacaagcgaaaaatcagatcttcgttcaatgaccaaagccaacgtggcaattgtgtctgcgtataacgatatgctttcagcgcaccagccttacgagacgtatcctgcgctcattaaggatgcagtgcaagaagtaggcagcgtagcccagttcgcaggtggcgtacctgctatgtgtgatggtgttacacaaggccagtctggcatggacttaagcctaatgagccgtgataacattgctcagggggctgccattgcgctttctcacaacatgttcgatagcgcactgatgctaggtatctgcgacaaaatcgttcctgggctacttatgggcgcactaacgttcggtcatttgccaacggtttttgtgccagcgggtccaatgccatcgggtcttccaaacaaagaaaaagcccgtgttcgtcaagaatttgccgaaggtaaagtagggcgtgacgcgctgcttgaagctgaatctcaatcttaccactctgcaggtacctgtacgttctacggaacggcaaactcgaaccaactagtggttgaaatgatgggcttgcaccttcctggttcgtcgtttgttaatccgggcacacctttgcgcgacgcgctaacaaaagcggctgcggttcaagcaacacgcttaactgatctgggcgacaactatacgccaattggtcacattgtagatgcaaaagccattgtgaacggccttgtaggtcttcttgcaacgggcggttcgactaaccacaccatgcaccttatcgcggttgcgcgcgctgctggttacattgttaactgggatgatttctcagatatctcaaatgcggttccgc

SEQ ID NO: 280109 - DNA, 1828 bp, Unknown
  Bacterial polypeptide expressing nucleotide sequence isolated from the Sargasso Sea
catgcactcagtcgttcaatctgttaccgacagaattattgcccgtagcaaagcatcacgtgaagcataccttgctgcattaaacgatgcccgtaaccatggcgtacaccgtagctcgttaagctgcggtaacttagcccatggttttgcggcttgtaaccccgatgataaaaacgcattacgtcaattgacgaaggccaatatcgggattattactgcattcaacgatatgttgtcagcacatcaaccctatgaaacgtatcctgatttattgaaaaaggcctgtcaggaagtgggtagtgttgcgcaggtggccggtggtgttcccgccatgtgtgacggcgtgactcaagggcaacctgggatggagctgagcttactgagtcgtgaagtgattgccatggcaaccgcggttggcttatcccacaatatgttcgatggcgccttactccttggtatttgcgacaaaatcgtgcccggtttattgattggtgcgttaagttttggccatttacctatgctgtttgtgccagcaggcccgatgaaatcgggtattcctaacaaggaaaaagcccgtattcgtcagcaatttgcccaaggtaaggtcgatagagcacaactactcgaagcggaagcccagtcttaccacagtgcgggtacttgtaccttttatggtacggctaactcaaaccaattgatgctcgaagtcatgggcctacaattgcccggttcatcttttgtgaatcctgacgatccactgcgtgaagccttaaacaaaatggcggcgaagcaggtttgtcgcttaaccgaactgggcactcagtacagtccaatcggtgaaattgttaatgaaaaatcgatagtgaacggcattgttgcattgctggcgaccggtggttcaacaaacttaaccatgcatatcgtggcggcggcgcgtgcagcgggcattattgtcaactgggatgacttttcggaattatccgatgcggtgccattgctggctcgggtttatccaaacggtcatgcggacattaaccatttccacgccgctggcgggatggctttccttatcaaggaattactcgatgcgggcttagtgcacgaggatgtcaacacagttgcaggttttggtctacgtcgttacacccaagagcccaaattactcgatggcgagctgcgctgggtcgatggtccaaccgtcagcttagataccgaagtattaacctctgtcgctacacctttccaaaacaacggtggtttaaaactgcttaagggcaacttaggccgcgcggtgataaaagtgtctgccgttcaaccgcagcatcgagtggtggaagcgcccgctgtggtgattgacgatcaaaacaaactcgatgcgttatttaaatccggcgcattagaccgagattgtgtggtggtggtgaaaggccaagggccgaaagccaatggtatgccagagctgcataaactaacgccgctgctaggttcactacaggataaaggctttaaagtggcgctgatgaccgacggtcgtatgtcgggtgcatcgggcaaagtgcctgcggcgattcatttaaccccagaagcgattgatggtgggttaattgccaaggtacaagatggcgatttaattcgtgttgatgcgctgaccggcgagctgagtttattagtctcagacaccgtgcttgctgccagaactgccgctgaaattgatttacgccattctcgttatggcatgggtcgtgagttatttggggcactgcgttcaaacttaagcagtccagaaaccggtgcgcgtagtactagcgccatcgatgaactttactaa

SEQ ID NO: 280110 - DNA, 1858 bp, Unknown
  Bacterial polypeptide expressing nucleotide sequence isolated from the Sargasso Sea
catgacgtcgctgcaccccactctggcgaaggtcaccgaacgcgtgatcgcccgcagccaatcgacccgttccgcctatctgcagcgcatcgacggcgcgcagggcaagttcccggcgcgcggcgcgctgtcgtgcgcgaacctcgcgcacggtttcgccggcctcgagggtaacgacaagttctcgatcaaggcgatccgcgagccgaacatcggcatcgtgtcctcatacaacgagatgctgtccgcgcatgcgccgtacaaggatttccccgagatcatcaaggcggccgcacgcgagaacggcggcgtcgcgcagttcgcgggcggcgtgcccgcgatgtgcgacggcgtcacgcagggcaacccggggatggagctgtcgctgttctcgcgcgaggcgatcgcgatgggcacggccatcgcgctcacgcacaacatgttcgacgcggcgctctgcctcggcatctgcgacaagatcgtgccgggcctgctgatcggcgcgctgcagttcggccacctgccgacgatcttcgtgccggccggcccgatgacgagcggcctgtcgaacgacgacaaggcgaagatccgccagcagttcgcgaccggccaggttggccgcgacgcgctgctcgaagccgaatcggccgcgtatcacggccacggaacctgcacgttctacggcaccgcgaacagcaaccagatgctgatggagctgatgggcctgcacctgccgggctcggctttcgtccatccgcacacaccgctgcgtaccgcgctgacggccgaggccgcgcgccgcgtgctcgacctgaccgtcgagcgcggccactacacgccgatcggtcacgtgatcgacgagaaggcgatcgtcaacgggatcgtcgcgctgctcgcgacgggcggctcgaccaaccacacgctgcacctcgtcgcgattgcgcgcgcggccggcatcctgatcgactggaacgatttcgacgaactgtcggcggtcgtgccgctgctcgcgaagatctacccgaacggcaaggccgacgtgaaccatttccacgcggcgggcggtgtcgcgttcctggtgcgcaacctgctcgaaggcgggctgctgcacgaggacgtgacgacggtcgccggcaagggtctcgcgcactacacgaaggagccgaagctgatcgacggcaagctgacgtgggtcgacggcgcggccgagagccacgacacgaaggtgctgcgcggcattcgcgacccgttccagccggacggtggcctgcgcctgatgcagggccgcctcggccgcggcgtgatcaagatttcggcggtcgcgcccgagcaccgcaaggtgacggcgcccgcgatcgtgttcgattcgcaggaagccgtgcaggaagcattcgatcgcggcgagctgaagcgcgatttcgtcgcggtggtgcgcttccagggcgcgcgcgcgaacggcatgcccgagctgcaccgtttgacgccgctgctcggcgtgctgcaggatcagggcttccacgtcgcgctggtcaccgacggccgcatgtcgggtgcgtcgggcaaggtgccggccgtgatccacgtgtcgccggaagcgttgctggccggcccgctcggcaaggtgaagacgggcgatacgctcgtgatcgacgcggaagccggcgtgctcgacatcgaggtcgacgccgccgagtggcaggcgcgcctggtcgcgcagccgctgcaccaggccgagaacgaggtcggtttcgggcgtgaactgttcggcgtgttccgcgcggccgccgcgccggccgagcagggcgcatcggtttttggcgcgctggtcggcgaaacggccgcccacgtcgccgcatga

SEQ ID NO: 280111 - DNA, 1038 bp, Unknown
  Bacterial polypeptide expressing nucleotide sequence isolated from the Sargasso Sea
catgaatccggttatacaacaggtcacagacagaatagcggcacgcagtgagaaaagccgtgcgctttatctgcagcggatggaacaggcccgtgccaaggggccgcaccgcggagctttggcctgtggcaatctggctcatggttttgctgcttgttcctctcaggaaaaaactgatttacgcagtttaaccaaagcaaacatcggcattatctcttcttacaacgatatgctttcggcgcatcagccttatgaagcttatccggctattattaaagccgcagcagcagaagtgggcagtgtggctcaatttgctggtggtgtgccggccatgtgtgatggtgtgactcaaggtcagccgggcatggagttgagtttattaagtcgtgacattatcgccatgtctgcagctgttggcctgtcgcacaatatgttcgacggcggcatgatgctgggtatttgtgacaagatagtaccgggtttattaatggcggctttaagttttggccatctgccttttgtgtttgtgccagctggcccaatgccatcaggtattccgaacaaagaaaaagcccgtgttcgtcagctctatgctgaaggcaaagtaggccatgacgaattattagattctgaatctgcgtcttaccacagtgctggtacttgtactttctacggtactgcaaactcgaatcagcttgtggttgaagtgatgggcttgcatttacctggtgcttcttttgtcaatccaggcacgcctttacgtgatgaattaaccaaagctgcagcccgtcaggtgactcgtttaactgacttaggcactgactacttaccaattgctcacattgttgatgtaaaagctgtagtgaacggtattgttggcttactggcgactggtggttctaccaaccacaccatgcatttaatagctgtagcccgttctgctggttttattgtgaactgggatgactttgcagagctgtcgcatgctactcctttagtgaccaagatttaccctaacggtcaggccgatatcaacca

SEQ ID NO: 280112 - DNA, 1610 bp, Unknown
  Bacterial polypeptide expressing nucleotide sequence isolated from the Sargasso Sea
cctagacgcgcgcatctttcttgcggaaatcaggcacatgcttacgctgccatgggagcagacaaagaaacattagctaataaaagagtgccaaacattggtatagtatcagcctacaacgatatgttatcagctcatcaacctttttataattttcccgatttgataaaacaggaggcaagaaatcacggcgccacagcgcaggttgctggaggagttcctgcgatgtgcgatggtataacgcaaggtgaagcaggtatggagttatccttgttttcgcgtgacgttatcgccatgtctgcaggtatagctttaagccacaacgcttttgatagtacaatttatttaggtgtttgtgataaaatagttcccggtttgatcatggcagctgctacctttggttttctacctgcaatttttttgcccgctgggccgatgacttctggccttcccaatgatgaaaagtctcttatccgtcaaaagttcgcaactggtgagattgatcgcgccgaattaatgagtgcagaaatgaaaagctatcatggccctgggacgtgtacattttacggaacagccaattcaaatcaaatgcttatggaatttatggggctacaacttccaggctcatcttttgtcaacccagggacaccgcttcgtgaagctctcactaagtatggaactcaaaaagcattagatatttcgttttctagtagtgagttctgcccagcctatgaaatcttaaatgaaaaagcatttgtaaatgggatagttggtttaatggcaacaggaggctcaacaaatttagtacttcacattcccgcaatggctaaggcagcaggcataaatttggctatggaagattttgaagatatagcaaaactaatacctctcatggctaaaatttatccaaatggcttagctgacgtaaatcattttcatgccgctggtgggctttcgtttatgattaatgagttgttaaatgaaggcttacttcacgatgatgtgaaaaatgtaagtgggcatggaatgaaccagtaccgaaatgaggctcggctaatagacaatgagataaaatttataaaaggtgccgtgacttctgctaaccagaaaattcttcgcccattgaaggatccatttcaaagaactggggggttgaagcaagttaatggtaatttaggtagtgctataacaaaggtttcggctgttgaacctgatctcagggtaattaaagccccagttcaaatttttcacgatcaagaagcaatcaagacagcgtttaaaaacaatgaattcaaagaagatacaatatttgtggttcgttttcagggaccgcgtgcaaatggcatgcccgagttacacagcttaactccagtactgtccgccttacaggaccgaggcttaaaggttgcattggttaccgatggtagaatgtccggggcatcaggaaaagtgccatccgccatacatgttacacccgaagctgctaatggcgggcctatttcaaagcttcgagatggtgatattgttttgctagatgctgacaatggaatacttgaagttcaaactgagaactttgaaagtagatcatcggtttctatcgacctttctga

SEQ ID NO: 280113 - DNA, 667 bp, Unknown
  Bacterial polypeptide expressing nucleotide sequence isolated from the Sargasso Sea
aatggtctatgaaaatatcattgttgaacgtaaagatagtataggcattatcactttaaatcggccaaaggccttgaatgcgctttctgcggatctgactagggagctggaggctgcattgcgggatcttgataatgatgatgctgtgggatgcatgatattgacaggatccgacaaggcatttgctgctggagcagacataaaagaaatgcagtccaagacattcatggacgtatatcttcaagacttcataactgtggcttgggaacatgttgctaaggttagaaaaccgataattgcagctgtttcaggttatgctcttgggggtggctgtgaaatggcaatgatgtgtgacttcataatagctgctgataatgctaaattcggtcaaccagaaattacgataggaactatccccggagctggtggtactcagcgtcttactagaatggtagggaaatccaaagctatggaaatgtgtttgacaggtcgaatgatggatgccgaagaagcagaaagggccggcttagtgagccgtgtcgttcctctagcagatctaatgccagaagtaatgaaagtagcacacagaatatctgagttatctaggccagcgattatgatggcgaaggaatccgtcaacaagtcatatgaaatgtcattggctgag

SEQ ID NO: 280114 - DNA, 778 bp, Unknown
  Bacterial polypeptide expressing nucleotide sequence isolated from the Sargasso Sea
atggtctatgaaaatatcattgttgaacgtaaagatagtataggcataatcactttaaatcggccaaaggccttgaatgcgctctctgcggatctgactagggagctggaggttgcattgcgagatcttgataatgatgctgctgtgggatgcatggtgttgacaggatccgagaaggcatttgctgctggagcagacattaaagaaatgcagtctaagacattcatggacgcatatcttcaagacttcataactgtggcttgggaacatgtcgccaaggttagaaaaccgataattgcagctgtttcaggttatgctcttgggggtggctgtgaaatggcaatgatgtgtgacttcattatagctgctgataacgccaaattcggtcaaccagaaattacaatagggactatccctggagctggtggcacacagcgtcttactagactggtaggaaaatccaaagctatggagatgtgtttgacaggtcgaatgatggatgccgaagaagcagaaagggcgggcctcgtgagccgtgttgttcctttagcagacctaatgcctgaagtaatgaaagtagcacagagaatatctgagttatctagacccgctattatgatggcgaaggaatccgtcaacaagtcatatgaaatgtcattggctgagggaatcaaatttgagcggcgtttgtttcactcaacatttgcaacggatgaccaaaaagagggaatggccgcgttttcagaaaaacgcgagccaaattttaaaaatcggtaaa

SEQ ID NO: 280115 - DNA, 550 bp, Unknown
  Bacterial polypeptide expressing nucleotide sequence isolated from the Sargasso Sea
atgcgaaaaggtaaagttgaaagaaacactaaagaaacaaagataagctgtgaagtcaacttagacggaactggccaatctaaaatttcaacacaaattggttttcttgaccatatgctagagttattatctcatcacagtttgattgatataaatttaaaatgtgaaggagacactaatgttgatcttcaccattcagttgaagatactgcttacgcaattgctttagctataaacaaagcactagatgataaaaaaggaattaatagatatggcttttcatatgttccgatggatgaatgcttatcgagatgtgttattgatttaagtggaaggcctgagcttgtgtggaatgttaatcttggtttaaaaaaaattggtgaaatggatacagagttattccatgaattttttaaagccttttcaaatgaatctaaatgtaatttacatattgaaaacctatatggaaaaaacaatcaccatattattgaatcatgctttaaagcctttgctaaaagtttaagattagctgtcgaaatgataacagaag

SEQ ID NO: 280116 - DNA, 592 bp, Unknown
  Bacterial polypeptide expressing nucleotide sequence isolated from the Sargasso Sea
atgaagagaaaagctaaaatatccagaaagacaaaagaaacatctatagaagttgacttaaatattgatggaaaaggaaaatataaaatagatacaggcataggattttttaatcatatgctagagcagttgtcgaaacattcaatgatagacttaaaattaaaagcaaaaggggacacccatatagatttacatcatactactgaagatacaggaatagctgttggggaatgtttaaaaaaagcgtccaaaaattttagaggaataaagaggtattctcatgcattgttaccaatggatgaaacgttgaccagggttgctatagatgtatctaacagaccttatttaatttggaatgttaaattgaaagtagagaaattaggcgagatggatactgagcttttcaaagaattttttcaggcattttcacaagcagctggaattactttacatattgaaaatatatatggtgataacagccaccatattatagaatcttgttttaaaggattggctaggtcattaagatcagcattggagatagacccaagaaataaaaaagggataccgtctaccaaaggttcattataat

SEQ ID NO: 280117 - DNA, 355 bp, Unknown
  Bacterial polypeptide expressing nucleotide sequence isolated from the Sargasso Sea
tatgaggaccgcaaatatcgtcagaaaaacaaaggaaacttccataactgtagacgtcaatttagacggtaccggagagtatgatattaaaactggtgtaggttttttagaccacatgcttgagcaagtatcaaagcactcccttatagatcttaaaatcaaagcaacaggcgatattcatattgacttgcatcacacaactgaagataccggcattgcgattggtgaagctattaaaaagcacttggagaaaaaaagtattaaaagatatgcaagtgaaacggttccaatggatgaaacttttagtaaggtatcactagatatttcaacagaccttatttggtttggaatgtaa

SEQ ID NO: 280118 - DNA, 409 bp, Unknown
  Bacterial polypeptide expressing nucleotide sequence isolated from the Sargasso Sea
atttgacctacaccataccacagaagatgtagggattgctataggcgaatgtattaaaaaggcttctaacaaatttaaaggaattaaaagatacgcacatgcaatgataccaatggatgaaactctctctagagtcgcaatagatgtatcaaacagaccctacttaatttggaaagtaaatttaaaagttgaaaaacttggtgaaatggacacggaattatttaaagaatggtttcaagcattttcccagtcagctggcgttacacttcacatggaaaatatatatggcgataacagtcaccatataattgagtcatgctttaaaggattagctagaactttaagaagcgctttagaaatagatccaagaacaaaaaacgttataccatctactaaaggctcattataa

SEQ ID NO: 280119 - DNA, 157 bp, Unknown
  Bacterial polypeptide expressing nucleotide sequence isolated from the Sargasso Sea
cgccggcgtcacgctgcatatcgacaacctgcgcggcttgaacgcccatcatcagatggaaacggtgttcaaggcgttcgggcgtgccttgcgcatggccgtcgaactggacgaacgcgcggcggggcagattccgtcgaccaagggcagcctttaa

SEQ ID NO: 280120 - DNA, 533 bp, Unknown
  Bacterial polypeptide expressing nucleotide sequence isolated from the Sargasso Sea
aatttggatggtaaaggcgagtacaaataaaaaacccaaattgggttttttggatcatatgcttgaacaattatccaagcattcattaatagatataaaactttatgttaaaggtgatacacacatagacttacaccatagtactgaagatgctgggattgcacttggagaagcaattaaaaaggcaggaaaaaattttaaaggaattaaaagatattctagtgcattaatcccaatggacgagactctgaccagagtagctattgatatctctggaagaccttatttagtttggaatgtaaatttaaaggttgaaaaattaggggaaatggacactgaactttttaaagagtggtttcaagctttttctcaatcagcaggtatcactctgcatgttgaaaacatctacggagataatagccatcataaaattgagtcatgtttcaaagctttagcgaaagctttgaaagatgctttgactattgacaaaagaataaaaaatattgttccatcaacaaaaggtaaaatttaat

SEQ ID NO: 280121 - DNA, 517 bp, Unknown
  Bacterial polypeptide expressing nucleotide sequence isolated from the Sargasso Sea
atgagaaaaggacaagtagacagaaacacaaaggaaactaaaatttcttgctcaatcaatcttgatggaatgggtatttctaacatttccactggaattggtttttttgatcatatgttagatttgtttgtacaccacagtttaattgatatggatctcaaaactatcggagatacaaatgtagacttacatcacagtgttgaagatacagcgtatgcaattgcactagctacaacaaaagcacttgatgataaaaaaggtataaatagatacggttttttttatgtaccaatggatgaatgtctttcaagatgtgtaattgatttcagtgggagacctgaattgatatggaaggttaatctaggtttagacaaaatcggcgagatggatacggagctctttctagagttttttaaagcttttacaaatgaagctaaatgcaatcttcatatagaaaatatctatggcaagaataatcaccatattattgagtcttgttttaaggctttgcaaaaag

SEQ ID NO: 280122 - DNA, 409 bp, Unknown
  Bacterial polypeptide expressing nucleotide sequence isolated from the Sargasso Sea
catagatcttcaccacacaacagaagatactggaattgctattggtgagtgtcttaaaaaagcatcaaaaaaatttattgggataagaagatatgctcacgcaatgataccaatggatgaaactttaactagagttgcattagacgtttcaaacagaccgtatttaatttggaaagtagatttgaaagttgaaaaacttggagaaatggacaccgaactattcaaagaatggtttcaagctttttcgcaatctgcaggaattacattacatattgagaatctatatggcgacaacagtcaccacaaaatagagtcgtgttttaaaggtttagcaagatcgcttagagcagcacttgaaatagatccaaaaaataagaaagtagtgccatctactaagggctctttataa

SEQ ID NO: 280123 - DNA, 490 bp, Unknown
  Bacterial polypeptide expressing nucleotide sequence isolated from the Sargasso Sea
atcggttttctagaccatatgctggatttgtggactttccatggtttattcaatctgaaattaacctgcaaaggtgacctagaaattgatacccatcacacaactgaagatatcgccattgcccttggaagtgctttgtacaaagcagttggcgaaaaaaaaggtattgttcgatacggtttttcctatgttccaatggatgaagcattgataagggttgcacttgatttgtcgggaagacctgaattcgtctttttcggagaatttttacaatcatcaataggcaatctggatactcaaatgatcagacacttttttaaatcattagccatttattctagaatgactttgcacatgtctattctttatggaataaacgatcatcacaaatgtgaaggactttttaaagctttaggaagggcattaaggcaagctgttgaaattgatcctcggcgaattggagtcgcttcatccaagggggttctctgat

SEQ ID NO: 280124 - DNA, 898 bp, Unknown
  Bacterial polypeptide expressing nucleotide sequence isolated from the Sargasso Sea
cggtttaggtactgacagcttccctcaaaaagactttgacctagcgcataatgccatgatgggcatttttgaaagccaaggtgttacctttgacgacgtgcttatttgcccacattttgatgaagacaactgcacctgccgtaaacccaagcttggtatggtgaaagactaccttcagcaaggcaaagtagactttacccgctcttatgtgattggcgacagaatgaccgacgttcagcttgctgaaaatatgggaattaaggcgctgcaatacaaccgcgacaaccttgactggaacacagttcaaaagaccattcttgcttcgtctcgtattgcagaagtggttcgtactacgtctgaaaccgatattagagtgcgtgtagatttagactctcaagagaaatcggctattcacacggggcttggctttttcgatcatatgctcgatcaaattgccgttcacggtggctttcagcttaatgtgtctgtagatggcgatttgcacattgacgatcaccacagcgttgaagataccgcgctagcgattggagaagcccttaaaaaagcgctaggagacaaacgcggtattggtcgctttggctttgcactgcctatggatgagtgtcgcgcagaatgcataatggatatctcaaaccgccctcaccttaaatttgaagcggagtttagccgtgaccaagtgggtgaaatggccacagaaatggtgccacactttttctattctttagcgcaaagtatgggcttatctctacacttatcgacaagcgaaggtaatgcgcaccatcaggttgaaagcttatttaaagtatttggtcgcgcgctgcgtcaagccattgcattaaaaggcgacgcactaccaagcagtaagggagcgctgtaa

SEQ ID NO: 280125 - DNA, 259 bp, Unknown
  Bacterial polypeptide expressing nucleotide sequence isolated from the Sargasso Sea
atgaaaagaaaagctaaaattttaagaaaaactaaagaaaccaacatttccgtcgaggctaatattgatggcaagggcaaatataatataaaaactgggataggttttttagatcatatgcttgagcaattatcaaagcactcgttgatcgatttaaatattaaagcaaaaggcgatacgcatattgatcttcatcatactaccgaagatagtgggatagcaataggcgaagctattaaaaaagccgcaggaaattaaa

SEQ ID NO: 280126 - DNA, 592 bp, Unknown
  Bacterial polypeptide expressing nucleotide sequence isolated from the Sargasso Sea
tatggcgagaaaagctaaaataaatagaaaaactaaagaaaccaatattgttgtagaagccaacttagatggtaaaggatcttataaaatagatactaaaattggttttttaaatcatatgatagaacaactatccaaacattctttaatagatttaaaaataaaagcacaaggagatacacatattgatttacatcatacaactgaagacactgggattgcagttggcgaatgtattaaaaaagctcttggatcttcaaaaggaataaaaagatatgcacacgcattaattcctatggacgaaactttaaccagagtaacaatggatatatctaataggccatatttaatttggaaagtaaaattaaaagttgagaagttaggggaaatggatacagaattatttaaagaatggttccaagctttttctcaagcagctggcattacgttacatgttgaaaatgtttatggggataatagtcaccacataattgaatcttgttttaaaggacttgcaagatcactacgagaagccatagaaatagacaagagaattaaaaacaaagttccttcaaccaaaggcgttttgtaa

SEQ ID NO: 280127 - DNA, 406 bp, Unknown
  Bacterial polypeptide expressing nucleotide sequence isolated from the Sargasso Sea
tatgagatctgctaaagtacaaagaaaaacaaaagaaacagatattttctgtgaaattactattgatggaagtggtaaaagtgaagtttcaacaggaataggtttttttgatcacatgttagaaattttttctcatcacagcctcatcgatctaaagcttaaggcaacaggagacacacatgttgatttacatcacacagttgaggacactgcatatgtgcttgctcaagccattactaagtctattggagaaaaaagaggcataaacagatatgggttttattacattacaatggatgatagcttatctagaacagtaattgatttttctggtaggccagaatttgtgtggaaagtaagcctgggtttgaaaaaaattggagaaatggacacagagctttttcaa

SEQ ID NO: 280128 - DNA, 409 bp, Unknown
  Bacterial polypeptide expressing nucleotide sequence isolated from the Sargasso Sea
atagatcttcatcacactactgaagacacaggtattgcaataggagaagctttaaaaaaagctgcaaaaaaatttgttggtatcagacgttatgctcatagagttattcctatggatgaaactttgactagagtagcaattgatgtttcgaacagaccttatttgatttggaaagtaaaattgaaagtagaaaaacttggagagatggatactgaattatttaaagaatggtttcaagctttttcacaatctgctggtattactttacatgttgaaaatatttatggtgataatagtcatcatattatagagtcttgttataaaggtttagcaagatctttgagagatgctttagagatggatcctagaaataaaaaaagtattccatcaactaaaggctcgttataag

SEQ ID NO: 280129 - DNA, 511 bp, Unknown
  Bacterial polypeptide expressing nucleotide sequence isolated from the Sargasso Sea
atggaacgtaaggcacagattcatcgtaaaacctcagaaacagacattcatcttgactttcagattgatggtgaaggacagtcctcttgtcaaagtggtattgcgtttttagatcatatgttggacttatttgcgacgcatggcctttttacattgactgtaaaagcggagggtgatcttgaagttgatgcccatcataccacagaagatattggtatctgtttgggacttgcctttaaagaagcgattggcgatgcaaaaggcatttatcgttacgcatccggcttgattcctatggatgagtccttgtgtcaaatggccattgatattagtaatcgcccccatctctctttcaaaggggatcttgcgaaaaccaaggtgggtgactttgatgttgaactagtggaagagttttttaccgccttcgtgagtaatgcccgtgtcagtcttcatatagacattctgtcgggaacgaacttgcatcatatgatagaagccctgtttcaaagcc

SEQ ID NO: 280130 - DNA, 408 bp, Unknown
  Bacterial polypeptide expressing nucleotide sequence isolated from the Sargasso Sea
ttgatcttcaccacacaactgaagatactggaattgcaattggtgaatgtttgaaaaaagcatctaaaaaatttgttggtataaaaagatacgctcatgcaatgataccaatggatgaaacactaactagagttgcaattgatgtttcaaacagaccctatttaatttggaaagtaaaattgaaagtagaaaaattaggtgagatggatacagaattattcaaagagtggttccaagcgttctcacaagctgcaggaattactttgcacatagaaaatatttacggcgataacagtcaccacataatcgaatcttgttttaaaggattagctagatcattaagagctgctttagaaatggatccaagaaataaaactacaataccttctacaaaaggttctttataaa

SEQ ID NO: 280131 - DNA, 208 bp, Unknown
  Bacterial polypeptide expressing nucleotide sequence isolated from the Sargasso Sea
tatggctagaaaaggaaaagtatctcgaaaaacaaaagaaaccagcattaatgttgaggttaatattgatggtaaaggtaaataccaaattgacactggtataggtttcctagatcatatgctggaacaattatcaaagcattcattgattgacctaaaagtaaaagcaaaaggagatactcatatcgatcttcatcacacaacagaa

SEQ ID NO: 280132 - DNA, 442 bp, Unknown
  Bacterial polypeptide expressing nucleotide sequence isolated from the Sargasso Sea
atggcgactaattcattctataaaccaacctcgggaaatattttgccccgctatgcagggatagcaacatttatgcggttaccctacgtgcctctagaacaggccaaggatgttaacattggcttaatcggtgtgccatgggatggtggtaccacaaaccgggctggcgctcgtcatgggccgaggcaaatcagagatttgtccaccatggcgaggaatgtaaaccatagcagtggaatacagcccttcgaattggcaaattgcgcagatcttggtgacgcgcctgtaaatccaatagatttaatagactctttaaacaagattgaagagttttttagggctgtgcatgctcaaaatattattcccctctcggctggtggggatcatttggctaccctcccgataatgagaggtatagtgaccggagagcctctgggtatgg

SEQ ID NO: 280133 - DNA, 475 bp, Unknown
  Bacterial polypeptide expressing nucleotide sequence isolated from the Sargasso Sea
catgcttgagcaattatcaaaacactcttcaatggatatgaatattaatgctaaaggtgatacgcacattgatctccaccacacaaccgaagatacgggaattgcgattggtgaatgtttaaaaaaagcgtcaaaaaaatttgttggaattaaaagatatgctcacgcgatgataccaatggatgaaacattaactagagttgcaattgatgtttcaaacagaccttatttaatttggaaagtaaaattgaaagtagaaaaattaggtgagatggacacagaattatttaaggaatggttccaagctttttcacaagctgcaggaattactttacacgttgaaaatatttatggcgataacagccaccacataatagagtcttgctttaaaggattggcacgatcattaagagctgctttagaaatggatccaagaaacaaaactacaataccttctacaaaaggttctttataa

SEQ ID NO: 280134 - DNA, 280 bp, Unknown
  Bacterial polypeptide expressing nucleotide sequence isolated from the Sargasso Sea
atgccccagtcaagaactgccattatcgaacgcaaaacccgggaaaccctggtgaaggttaaactgaatctggatggagaaggaataagtgaaaccaataccggaatcggttttcttgatcatatgctggatcaattggcgtttcacgggctcatggacctcgaggtttcctgcaagggggacctttacatcgacagtcatcacaccactgaagacattggaattgcactcggccaggctctcaaagaagccctggggaaaaaaagggaattcgacgtta

SEQ ID NO: 280135 - DNA, 303 bp, Unknown
  Bacterial polypeptide expressing nucleotide sequence isolated from the Sargasso Sea
tggatgaaacgatgtcacgagtttccatcgatgtgtctattcggccatatctcatatggcgtgtccagttctcgcgccccaaattgggtgaaatggacacggagctcttcaaggaatggtttcaggccttcgcacagaatgcgggtgtgaccctgcatgtggaaaatgcctacggtgagaacaaccaccatatcgtggaggcctgttacaaggggctggcgcgtgcgttgcgagacgctatagagagtgatcctcgaagttcagcagacgtaccatctaccaagggtgtgctgaacgcctaag

SEQ ID NO: 280136 - DNA, 466 bp, Unknown
  Bacterial polypeptide expressing nucleotide sequence isolated from the Sargasso Sea
caattgtctaaacattcatcaatagatttaaatttaaaggcgaaaggagatactcacattgatcttcaccatacaacggaagatacaggtattgcaattggggaatgcttaaaaaaagcatctaaaaattttattggtatcaaaagatatgcacatgctctattaccaatggatgagaccttaactagagttgcaatagatgtttctaacaggccttatcttatatggaatgtaaaattaaaagttgaaaaattaggagagatggatactgaactttttaaagagtggtttcaggcattttcccaatcggctggaataactttgcacgttgaaaatatttatggtgataatagtcaccacattattgagtcttgcttcaaaggcttagcaagatcactaagatctgctttagaaattgatccaagaaataaaaaaacaataccatctactaaaggttctttataaa

SEQ ID NO: 280137 - DNA, 214 bp, Unknown
  Bacterial polypeptide expressing nucleotide sequence isolated from the Sargasso Sea
atggcacgtcagggggagatccatcgggtcaccggtgaaaccgatgtgaaggtgcggctggacctggacggttccggccagtgccaggccagcaccggcgtgccgttcctcgatcacatgcttcatcagatcagcagccacagcctgatagatctggacgtcaatgcggtgggcgatacccacatcgatgatcaccacaccaatgaggacgtgg

SEQ ID NO: 280138 - DNA, 242 bp, Unknown
  Bacterial polypeptide expressing nucleotide sequence isolated from the Sargasso Sea
tatgaaaagaaaagctaaaataaataggaaaactaaagaaactaacatttcggtcgcagtcaatttagacggaaaaggaaaatataaaattaaaacaggcattggttttctcgatcatatgcttgaacaactatctaagcattcattaattgatttagaagtaaaagctaaaggtgacacgcatatagatttacatcacacaactgaagatacaggtattgctatcggtgaggctataaaaa

SEQ ID NO: 280139 - DNA, 421 bp, Unknown
  Bacterial polypeptide expressing nucleotide sequence isolated from the Sargasso Sea
ggtgatactcatattgaatttgcatcacaccactgaagatacaggaattgctattggtgaagctttaaaaaaagctttaaaaaaatctgttggcattaaaagatatgctcacgcgatgatcccaatggatgaaactttatcacgtgtagcaattgatatctcaaatagaccgtatttaatttggaaagtaaatttaaaagttgaaaaacttggcgaaatggatactgagctttttaaagaatggtttcaagcgttttcgcaggcagctggaattactttacacgttgaaaatatttatggggacaatagtcaccacattattgagtcttgctataaaggattggcaagatctttaagaactgcattggaaatagatccgaggaataaaaaaacaattccttctacaaaaggttctttataa

SEQ ID NO: 280140 - DNA, 503 bp, Unknown
  Bacterial polypeptide expressing nucleotide sequence isolated from the Sargasso Sea
ttcaacacaaattgggttttttgatcacatgcttgaattattatctcatcacagcttgatagatatagatttaaaatgtgaaggagatactaatgttgatcttcatcattcagttgaagatacagcctatgcaattgctttagctataaacaaagcactgaatgataaaaagggaataaacagatatggtttctcatatgttcctatggatgaatgtttatcaagatgtgttattgatttaagtggaagaccagagcttgtctggaatgttaatcttggtttaaaaaaaattggcgaaatggacacagagttattccatgaattttttaaagctttttcaaatgaatcaaaatgtaatttacatattgaaaacttgtatggaaaaaataatcaccatattattgaatcatgctttaaagcctttgctaaaagtttaaggttagctgttgaaatagataacagaagaaaagacaatataccgtcatcaaaaggcactctgtaat

SEQ ID NO: 280141 - DNA, 208 bp, Unknown
  Bacterial polypeptide expressing nucleotide sequence isolated from the Sargasso Sea
tatgaaaagaaaagcaaaaattactagaaaaacaaaagaaaccagtatttctgtcgcggtcaatttagacggtaaagggaagtataaaattaaaacaggaattggttttttggatcatatgttagagcaattatccaagcactctttaattgatttagaaataaaagctaaaggtgacacgcacattgatttgcaccacacaacagag

SEQ ID NO: 280142 - DNA, 408 bp, Unknown
  Bacterial polypeptide expressing nucleotide sequence isolated from the Sargasso Sea
tatgtctagaaaagcagctgtaaaacgaaagacaaatgaagttgaagtaattattgacctaaatattgatggaaaaggaatttatgaaattaatactggaattcctttttttgatcatatgctagagcaactatccaaacatggcttctttgatcttaggattattgcaaatggagatacagaaattgatttccaccatacagtcgaggacgtaggaatatgtctgggtgaagcatttgaatctgcccttggagataaaaagtcgataaatagatatggacatttttcagttccatttgatgaaactttatcttcctcaactattgatttgagtggaagacctttcttcatattcaacgtggaaatgagttctggtaaagttggggaatttgatgttgaactaactag

SEQ ID NO: 280143 - DNA, 537 bp, Unknown
  Bacterial polypeptide expressing nucleotide sequence isolated from the Sargasso Sea
aatgagaaaaggaattgttgaaagaaataccaaggaaaccaaaatttcttgttctgttaacttagatggatcagggaaagcaaacatatcaactggaattggatttttcgaccacatgcttgaactttttgttcatcacagccttattgatatggatttaaaaactgcaggcgacacaaatgtggactttcatcatagtgttgaagacacagcctatgcaattgccattgcaacgattaaagcccttggagaaaaaaaaggaattaaaagatatggcttttgttatattcctatggacgagtgtctttctcgctgtgttttagattttagtggtagacctgagcttgtttggaaagtaaatttaggcttagaaaaaataggtgatatggatactgagttattcattgagttttttaaagcgtttacaaacgaatcaaaatgtaatcttcatatagaaaacttatatggacagaacaatcatcatataatagaatcttgtttcaaggcttttgctaaaagctataggatggcagttga

SEQ ID NO: 280144 - DNA, 383 bp, Unknown
  Bacterial polypeptide expressing nucleotide sequence isolated from the Sargasso Sea
agacattgggattgcactcggccaggccctgaaagaagccctgggtgaaaaaaagggaattcgacgttatggccatgctttcattccgatggatgaagctctgctgcgggcggtacttgactgttctggcagacctgacttcgtcttcaacggagaattcggaaggtacaatcttggagacctggatacccagatgattccccatttcttcaagtccctggctttcaactgcggtttaactctgcatctcagtatcctctacggcagtaacgatcatcataagtgtgaggggcttttcaaagcctttgccagggctttttcggatgctgttacattgaacccaaggagaatgggagtgagttccaccaaagggactctctgat

SEQ ID NO: 280145 - DNA, 262 bp, Unknown
  Bacterial polypeptide expressing nucleotide sequence isolated from the Sargasso Sea
atggctagaaaaggaaaagtatctcgaaaaactaaagaaacaagcatcaatgttgaggttaatattgacggtaaaggtaagtaccaaattgacactggtataggtttcttggatcacatgttagaacagttgtcaaagcattcacttattgatttaaaagttaaagcaaaaggtgatacacatattgatcttcatcacactactgaagatacagggattgcaatcggtgaagctttaaaaaaagcagctaaaaaatttgtag

SEQ ID NO: 280146 - DNA, 448 bp, Unknown
  Bacterial polypeptide expressing nucleotide sequence isolated from the Sargasso Sea
ttctatagatttaaaacttaaagcaaaaggtgatactcatattgatcttcatcatactactgaagatacaggaattgcaattggagaatgtctcaaaaaagcatctaaaaaatttgtaggtataaaaagatatgctcatgcattaattcctatggatgaaacattaactagagttgcattggacgtttcaaatagaccttatttaatttggaatgtaaaattgaaagttgaaaaattaggtgaaatggatactgaattattcaaagagtggtttcaagctttttcacaagctgcaggtatcactttacatgttgaaaatatttatggtgataatagccatcatataattgaatcatgttttaaaggattggctagatcattgcgtgcagcattagaaatggatcctagaaataaaaaaaccataccttcaacaaaaggttctttataa

SEQ ID NO: 280147 - DNA, 328 bp, Unknown
  Bacterial polypeptide expressing nucleotide sequence isolated from the Sargasso Sea
ttggacatttcttcgcccccattagatgaagcattagttcaagtcactttagactgctctggtagaccgcatctatcttatgatcttcaattaaaagctcctagaataggaaattatgatactgaactagtaagagagttttttattgcctttgtaaataacagcggcattactctgcatattaatcaaatacgaggcagtaattcacatcacatagttgaggcgtgctttaaagctttttcaagagcaatgagaatggctaccgaaatagatctaagaagatctgattcaattccaagcagtaaaggaatgttagaaaaaaaataaa

SEQ ID NO: 280148 - DNA, 475 bp, Unknown
  Bacterial polypeptide expressing nucleotide sequence isolated from the Sargasso Sea
atgttagagcaattatctaaacactcatctattgatatgaatataaaagtcaaaggtgatactcatatagatctgcatcatacaactgaagattctgggatcgcaataggtgaagcattgaaaaaagctttaaagaaatctattggtatcagaaggtatgcgcatgcaatgattccaatggatgaaactttatcgcgtgttgcaattgatatttcaaacagaccttatttaatttggaaagttaatttgaaagttgaaaaacttggtgagatggatactgaacttttcaaagagtggtttcaagctttttctcaagcagcaggaattactttacacgtcgaaaacatttatggtgataatagtcatcacattattgagtcatgttttaaaggattagcaagatcattaagaactgcattagaaatagatccaaggaatagaaaaacaattccatctactaaaggttctttataag

SEQ ID NO: 280149 - DNA, 466 bp, Unknown
  Bacterial polypeptide expressing nucleotide sequence isolated from the Sargasso Sea
agcactagctaagcattcactaattgacctagaagttaaagccaaaggtgacacgcatattgatttgcaccacacaactgaagatacaggtatagctattggtgaagctattaaaaaagctgcaggcaaaagaaaaggaattactagatacgcttcaactatgataccgatggatgaaactcttagccgagtttcaattgatgtatcgaacaggccttatttaatctggaaagtaaatttaccagtagagaaacttggtgaaatggatacagagctatttaaagaatggttccaagcattttcccaatcagcaggagttactttacacgttgaaaatatttatggtgataatagtcaccacaagattgagtcttgttataaaggtttagctagatcacttaaggatgctttagcgatagataaaagaattaaaaactcaataccttcgacaaaaggctctatttaa

SEQ ID NO: 280150 - DNA, 249 bp, Unknown
  Bacterial polypeptide expressing nucleotide sequence isolated from the Sargasso Sea
tatgaaacaaaaaagaatcgtaaaaattgaacgagaaaccaaagaaaccaaaataaaactagaacttaaccttgaaggttctggaatttcagatgtaaagaccggaatcggttttcttgatcatatgttggatttgtggactttccatggattattcaatctgaaattaacttgcaaaggtgatctagaaattgatacccatcacacaactgaagatatcgccatcgcccttggaaatgctttggacaa

SEQ ID NO: 280151 - DNA, 589 bp, Unknown
  Bacterial polypeptide expressing nucleotide sequence isolated from the Sargasso Sea
aatgcgaaatggtaaggtagagagaaacacgaaagaaaccaagataagttgtgaagttaacttagatggcgttggccaatctaatattacaacacaaattgggttttttgatcatatgttagaattattatctcatcacagcttgatagacatagatttaaaatgtgaaggagatactaatgttgatcttcatcattcagttgaagatacagcttacgcaatcgctttagctataaataaagcactggatgataagaagggaataaacagatatggcttttcatatgttcctatggatgaatgtttatcaagatgtgtaattgatttaagtggcagaccagagcttgtgtggaatgttaatcttggcttaaaaaaaattggtgaaatggacactgagttattccatgaatttttcaaagcattttcaaatgaatcaaaatgtaatttacatattgaaaatctgtatggaaataacaaccatcatatcattgaatcatgctttaaagcttttgctaaaagtttaagatttgctgtcgaaatagataatagaagaaaagacaacataccatcttcaaaaggcactctttaa

SEQ ID NO: 280152 - DNA, 265 bp, Unknown
  Bacterial polypeptide expressing nucleotide sequence isolated from the Sargasso Sea
atgaagcgaaaagcaaagataagtagaaaaactaaagaaaccaagattgatgtagatataaatatcgatggtaagggcaaatttaaaatagacacaggcattggttttttagatcatatgttagaacagttatctaagcactcctcaattgatttaaaagtaaaagctaaaggagatacacatattgatcttcaccacacaactgaggatacagggattgcaattggtgaatgtttaaaaaaagcattcaaaaaaatttggtagg

SEQ ID NO: 280153 - DNA, 585 bp, Unknown
  Bacterial polypeptide expressing nucleotide sequence isolated from the Sargasso Sea
gaaaaggtaacataaatcgcaaaaccaaagagacaaatatctcttgcagcgtaaaccttgacggcacaggacaatctaaaatatctacaggcataggtttttttgatcatatgcttgagttgatgtctcatcatagccttatagatattgatctgaaagtcaaaggcgatactcacgttgacctacatcacacaattgaagattctggatatgtaattgcgcaatcaattttaaaagctcttggaaaaaaacaaggaataaaaagatatggctttttttatgttccaatggatgattgtttatccagatgtgtgttagatttttctgggagaccagaacttgtttggaaagttaagcttggtttaaaaaaaataggcgaaatggatacagagctttttcacgagtttttcaaggcttttacaaatgaagcaaaaataaaccttcatattgaaaacctatatggaaaaaacaaccaccacataatagaatcttgttttaaagcttttgccaaaagtttaagaatttctgttgaagttgatgaaaagattaaaaatttaattccttcttctaagggctcgctttgat

SEQ ID NO: 280154 - DNA, 413 bp, Unknown
  Bacterial polypeptide expressing nucleotide sequence isolated from the Sargasso Sea
aatgcgaacttctacaatagaaagaattactaatgaaaccaaggttaatttggttcttaacctagacggtgtcgggagagggaaaattaatactaatatccccttctttgatcatatgcttgaacaactcactttccattctttagttgacctcgaattaaatgcacgaggggatatcgatattgatttccatcactctgttgaggattgtgggatttgtttgggaaaggcttttttggaggctctcggggataaaaaaggaataaatagatacggcttttttttacttcctatggatgatgccttgataagggttgctctagatttttcaggacggtcgtttctcagttggaaagtaaactttccaactaacagagttggtaattttgatctagagcttgtgcgtgagtttt

SEQ ID NO: 280155 - DNA, 472 bp, Unknown
  Bacterial polypeptide expressing nucleotide sequence isolated from the Sargasso Sea
gcttgaacaattatcaaagcactcttctatggatatggatattaaagccaagggagacactcatattgatcttcaccacacaaccgaagatacgggaattgcaattggtgaatgtttaaagaaagcttccaaaaaatttgttggaattaaaagatatgcacatgcaatgatacctatggacgaaacattaactagagttgcaatcgatgtttcaaatagaccatatttaatttggaaggttaagcttaaagtagaaaagctaggtgaaatggacacagaactttttaaagaatggtttcaagcattttcacaagccgcaggaattactttacatgttgaaaatatttatggtgataacagccaccacattattgaatcttgttttaaaggattagcaagatcattaagagctgcgttggagatggatccaaggaacaaaaatacaattccttctacaaaaggttctttataa

SEQ ID NO: 280156 - DNA, 265 bp, Unknown
  Bacterial polypeptide expressing nucleotide sequence isolated from the Sargasso Sea
tatgaaaagaaaagcaaaaattactagaaaaacaaaagaaactagcatttcagtctctgtcaatttggatggaaaaggaaaatataaaataaagaccgggattggtttcttagatcatatgctagagcaactttccaaacactctttaatagatttggaagtcaatgctaaaggagacacgcatattgatttacaccacacaacagaagatacgggtatagctataggtgaggctatcaaaaaagcagctggtaacagaaaagga

SEQ ID NO: 280157 - DNA, 331 bp, Unknown
  Bacterial polypeptide expressing nucleotide sequence isolated from the Sargasso Sea
tatgactagaaaagctaaaatattgagaaaaaccaaagagaccactattagtgccgaagtcaatttagacggcaagggtaattataagattaaaacccaaattggatttttggatcacatgctcgaacaattatcaaagcactctttgatagacattaaacttaatgtaaaaggagatacacacatcgatcttcaccacagcactgaggacacgggtatagcattgggcgaggcgattaaaaaagcagcaggaaagttcaaaggaataaaaagatattctagcacacttatccccatggatgaaactttgaccagagttgcaattgatgtt

SEQ ID NO: 280158 - DNA, 452 bp, Unknown
  Bacterial polypeptide expressing nucleotide sequence isolated from the Sargasso Sea
ttctttaattgatttaaaagttaaagcaaaaggagatactcatatagatcttcatcacactacagaggacacaggaattgctattggtgaggctttaaaaaaggcggctaaaaaatttataggaataaaaagatacgcacacacagttattccaatggatgaaacattaacgagagttgcaatagacgtatcaaatagaccttatttaatctggaaagtaaaattaaaagttgagaaactaggtgagatggatacagaactatttaaagaatggttccaagcattttctcaatctgctggtattactatgcacgtagaaaatatttatggtgataatagccaccacataattgagtcttgttataaagcattagcaagatcattaagagctgcattagagatggatccaagaaacaagaaaagtatcccatccactaaaggctcattataag

SEQ ID NO: 280159 - DNA, 450 bp, Unknown
  Bacterial polypeptide expressing nucleotide sequence isolated from the Sargasso Sea
tctttaatagatatgaagttgttgctaaaggcgatactcatattgatttgcatcacacaacagaggatactggtattgctataggggaagccataaaaaaagccgcagggaatcttaaggggattaaacgattttcaagtaaaattattcctatggatgaaactttaacaagggtttctatggacatttctaataggccatatctgatttggaaagtagatttgaaagttgaaaaacttggagaaatggatactgaacttttcaaagagtggttccaggccttttctcaagccgcaggcattactttgcatgtagaaaatatatatggagacaatagtcaccacaaaattgaatcttgtttcaaagccttagccagatctctcagagaagctttggaaatagacaaaagaattaaaaacattcttccttcgacaaaaggaaaactttaaa

SEQ ID NO: 280160 - DNA, 481 bp, Unknown
  Bacterial polypeptide expressing nucleotide sequence isolated from the Sargasso Sea
tatgaaacaaaaaagaatcgtaaaaattgaacgagaaaccaaagaaaccaaaataaaactagaacttaaccttgaaggttctggaatttcagatgtaaagaccggaatcggttttcttgatcatatgttggatttgtggactttccatggattattcaatctgaaattaacttgcaaaggtgatctagaaattgatacccatcacacaactgaagatatcgccatcgcccttggaaatgctttggacaaagcattaggtgaaaaaaaaggtattgttcgatacggtttttcctatgttcctatggatgaagcactgctaagggttgcacttgatttgtcaggcagaccagaattcgtcttttcgggagaatttttacaaacatcaataggcaatctggatactcagatgatcagacatttttttaaatcattagccatgacttctagaatgactatgcacatgtccattctttatggaata

SEQ ID NO: 280161 - DNA, 358 bp, Unknown
  Bacterial polypeptide expressing nucleotide sequence isolated from the Sargasso Sea
tttggatggaactggttctgcaaaagtaaatacaggccttggattctttgatcatatgctaaccttggttgcaggacatgctcttattgatctagacgttcattgcagtggtgaccttcatgttgatggccaccattcagttgaagatgttggccgtgcatttggtactgcacttaaagaatgcttgggagaccgttctggcatttggcgctatgggcatgcgatcgtcccaatggacgaatctcttgttactgctgcagttgacctcggtggtcgaagtacctgtgttattgatgtagtttttcctgcaccgacaatcggcacttttgacaccgaactggtagaagtcttttgggaa

SEQ ID NO: 280162 - DNA, 493 bp, Unknown
  Bacterial polypeptide expressing nucleotide sequence isolated from the Sargasso Sea
attggtttttttgatcatatgctagagttatttgttcatcatagtcttatcgatatgaatttgagtaccgtgggcgatgttagcgttgatttacatcacagcgtagaagataccgcttatgcaattgctcaatcaacaattaaagcacttggagaaaaaaaaggaataaatcgttatggttttttttatgttccaatggatgaatgtcttagcaggtgtgttattgattttagtggtaggccagaattagtttggaaagtaaatcttggactagaaaaaattggtgaaatggataccgaattatttatagagtttttcaaagctttctccaatgaagcaaaatgcaatcttcatattgaaaacctatacggacaaaataatcaccacattattgaatcgtgttttaaggcttttgctaaaagctatagaattgctgttgagttagatttaaggagaaaagacaaaataccttcttcaaaaggcacactttaat

SEQ ID NO: 280163 - DNA, 456 bp, Unknown
  Bacterial polypeptide expressing nucleotide sequence isolated from the Sargasso Sea
aacactcttcaatggatatgaatataaaagctaaaggagatacgcacattgatcttcaccacacaactgaagatactggaattgcaattggtgaatgtttgaaaaaagcatctaaaaaatttgttggtataaaaagatacgctcatgcaatgataccaatggatgaaacattaactagagttgcaattgatgtttcaaacagaccttatttaatttggaaagtaaaattgaaagtagaaaaattaggtgagatggatacagaattatttaaagagtggttccaagcgttctcacaagctgcaggaattactttgcacgtagaaaatatttacggcgataacagtcaccacataatcgaatcttgttttaaaggattagcacgatcattaagagctgctttagaaatggatccaagaaataaaactacaataccttctacaaaaggttcattataaa

SEQ ID NO: 280164 - DNA, 310 bp, Unknown
  Bacterial polypeptide expressing nucleotide sequence isolated from the Sargasso Sea
tatgagcagaaaagctaagattttgagaaaaactaaagagaccaatatttccgttgaagtaaatttagacggaaaaggcaagtatcaaataaagaccaaaataggttttttagatcatatgctggaacaactatcaaagcattctctaatagatatgaaaataattgcaaaaggagatactcacattgatttgcatcacacaacagaagattctggtattgctataggcgaggcaataaaaaaagctgctggaaatttgaaaggaattaaacgatattctgctaagtatattcctatggatgaacattaa

SEQ ID NO: 280165 - DNA, 406 bp, Unknown
  Bacterial polypeptide expressing nucleotide sequence isolated from the Sargasso Sea
atgaagagaaaagctaaaataaataggaaaacaaaagaaaccagcatatctgttgatatgaatattgatggtaagggtaaatataaaattgatactggaataggttttcttaatcacatgcttgaacaattatcaaaacactcttcaattgatatgaatataaaagctaaaggagatactcacattgatctccatcatacaacagaggactctggtattgcaattggtgaatgtttaaaaaaagcatctaataaatttaagggaattagacgttactcccatgcgttaattcctatggatgaagctttaacaagagtagtaatagatgtttcaaatagaccttacttaatatggaacgtaaaattaaaggttgagaaattaggagaaatggatacagagcttttaa

SEQ ID NO: 280166 - DNA, 307 bp, Unknown
  Bacterial polypeptide expressing nucleotide sequence isolated from the Sargasso Sea
atgaagaggaaagcaaaaataagcagaaaaactaaagaaactaacattaatgttgatttaaatattgatggtaaaggtaaatataaaattgaaactgggataggttttttaaatcatatgcttgaacaattatctaaacactcttcaatggatataaatcttaaagctaaaggagatactcacatagaccttcaccatacaactgaagatacaggaattgctattggagaatgtttaaagaaagcatctaaaaaatttgtaggaattaaaagatatgctcatgcaatgataccaatggagaaacata

SEQ ID NO: 280167 - DNA, 388 bp, Unknown
  Bacterial polypeptide expressing nucleotide sequence isolated from the Sargasso Sea
catggataaagcaaaaagattttctaaaaaaagtcgtgaaactgaagaaactcagatagtagtttctgtagatatagatggttcaggtaactataaaatagatactggcaacggaatgtttgatcatttattagctcaaatttctaggcatgggttgattgatttagatatatcagctaaaggtgatacacacgtagggtggcatcatttagtcgaggatacggctatagtttgtggcaaggcattaaaagaggctgtaggggatggggttgctatcaatagagtaggtaatacatatatgcctttggatgaggctttagttcttacagtagttgactatagtggtcgaggatattcagttattgatgcgcctttgacagaatcagac

SEQ ID NO: 280168 - DNA, 599 bp, Unknown
  Bacterial polypeptide expressing nucleotide sequence isolated from the Sargasso Sea
aattaccaaacgcattttaagcaaaggccgcaccgccactgtggtacgcaccacgcgtgaaaccgacattagcgtcagcgtggatttagacaataaaggcggcaacagcatcagcactggcgtgggcttttttgaccatatgctggatcagatagccacccacggtggtttttcgctgcaagtcagtgtgaaaggtgatttgcatattgacgatcaccacagtgtggaagatacagcactggcgctgggtcaggcactgaaacaagccattggcaacaaacgcggcattaaccgttttggttttgtgctgcccatggatgaatgccgcgccgagtgtactttagatttatccggccgcccgctgctgaaatttgacgcagatttaggcacaggcttagttggcgagctgaacctggagatggtgccgcactttttccgcagtttaagcgacgccatgttaatgacgctgcatttgtcggtaagccctggtaataaacaccatatggtggaaggtttatttaaagcttttggccgcgctttgggtcaggccattttaaaaagtggtgacgcgctgccaagcagcaagggtgtactctaga

SEQ ID NO: 280169 - DNA, 289 bp, Unknown
  Bacterial polypeptide expressing nucleotide sequence isolated from the Sargasso Sea
atgaagaggaaagcaaaaataagcagaaaaactaaagaaaccaatatcaatgttgatttaaatattgatggcaaaggtaaatacaaaattgaaactggcataggttttttaaaccatatgcttgaacaattatccaagcattcatctatggatataaatatcaaggctaagggtgatacccacatagatcttcaccacacgacagaagatacagggattgctattggagaatgtttgaaaaaagcatctaagaaatttgtaggaataaaaaggtatgcccatgcgttga

SEQ ID NO: 280170 - DNA, 289 bp, Unknown
  Bacterial polypeptide expressing nucleotide sequence isolated from the Sargasso Sea
tatgagaactgctaaaataaatagaaaaacaaaagaaactgatattctttgcgaaataaacctagatggaacaggtaagaatgatatttcaacaaatataggcttccttgatcatatgttagaaatattttctcaccacagccttgttgacttaaaacttagagcaaagggagacattcatgttgatcttcatcatactgttgaggacactgcctatgtattagcgcaggctactaataaagctcttggagaaaaagaggcattaatagatatggttttttttatataa

SEQ ID NO: 280171 - DNA, 475 bp, Unknown
  Bacterial polypeptide expressing nucleotide sequence isolated from the Sargasso Sea
catgcttgagcaattatcaaaacactcttcaatggatatgaatattaaagctaaaggtgatacgcacattgatcttcaccacacaactgaagatactggaattgcaattggtgaatgtttgaaaaaagcatcaaaaaaatttgttggcattaaaagatatgcgcatgcaatgatacctatggatgaaacattaacaagagttgcaattgacgtttcaaatagaccttatttaatttggaaagtaaaactaaaagtagaaaaattaggcgagatggacacagagctatttaaagaatggttccaagcattctcacaagctgcaggaattactttgcacattgaaaatatttacggtgacaacagtcaccacataatcgaatcttgttttaaagggttggcacgatcactaagagctgctttagaaatggatccaagaaataaaactacaataccttctacaaaaggttctttataa

SEQ ID NO: 280172 - DNA, 150 bp, Unknown
  Bacterial polypeptide expressing nucleotide sequence isolated from the Sargasso Sea
gaatcaaaaatttcttcaggaataggtttttttgatcatatgcttgaaattttttctcagcatagcttaatcgatgttgagctaaaagtagatggcgacacacacgttgattttcatcacactgttgaagactcagcttatgctttatca

SEQ ID NO: 280173 - DNA, 409 bp, Unknown
  Bacterial polypeptide expressing nucleotide sequence isolated from the Sargasso Sea
attgtatctccaccacacaacagaagatacgggaattgcgattggtgaatgtttaaaaaaagcgtcaaataaatttgttggaattaaaagatatgctcacgcgatgataccaatggatgaaacattaactagagttgcaattgatgtttcgaatagaccttatttaatttggaaagtaaaattgaaagtagaaaaattaggtgagatggatacagaattatttaaagaatggttccaagctttttcacaagctgcaggagttactttacacgttgaaaatatttacggcgataatagtcaccacataatcgaatcttgctttaaaggattagcaagatcattacgtgctgctttagaaatggatccaagaaataaaactacaataccttctacaaaaggttctttataa

SEQ ID NO: 280174 - DNA, 241 bp, Unknown
  Bacterial polypeptide expressing nucleotide sequence isolated from the Sargasso Sea
atgaaaagaaaagctaaaataaatagaaaaaccaaagaaactaacatttctgtcgtagttaatttagatggaaaaggaaaatataaaattaaaactggaattggttttcttgatcatatgcttgagcaactagctaagcactcgttaattgatttagaagttaaagcaaagggcgatacgcatattgatttacatcacacaactgaagatacaggtatagctattggtgaagctataaaaa

SEQ ID NO: 280175 - DNA, 295 bp, Unknown
  Bacterial polypeptide expressing nucleotide sequence isolated from the Sargasso Sea
tatgacaagaaaagcaaaaattataagaaaaactaaggaaactaatatttctgtcgcagtcaatattgacggtaaaggtaaatacaatattaaaactggaataggctttctcgaccacatgcttgagcagttatcaaagcattccttaattgatattgaagttaaagccaaaggcgatactcacattgatcttcaccacactactgaagatacaggtatcgctattggagaagctatcaaaaaagctgcaaataatagaaaaggtataacaagatatgcttctactatgatacca

SEQ ID NO: 280176 - DNA, 711 bp, Unknown
  Bacterial polypeptide expressing nucleotide sequence isolated from the Sargasso Sea
gcaaagttgatttagcacgttcatatgtcattggcgatcgccaaaccgatattggccttgctcaaaatttatgttgtgaaggcattttgtatgatggcagctggcctgccattgttacaaagcttacaacggctaaccgcgaaggccgtgttacgcgtaacaccaaagaaacccaaattgatgtagccataaacctagatcaaactaaaaacggtagtatcgaaacaggccttggcttttttgatcatatgcttgatcaaattcgcacgcacgccaacattggtttaaacattaaagcgaaaggcgatttacacatagacgagcaccaccttgttgaagatattggtattgccctaggtgttgcacttaaacaggcgcttggcactaaatcgcaaatagcgcgctatggttttgcactaccaatggatgaatgtaaagcagaggcacagattgatttatcgggccgcgcttcatttgtattaaacgctaattttagccgcgaaaaagccggcgatttagacgtacaaatggtggagcactttttcaaaagcttaagcgataatgccgctattagccttattttatcggtgagcgacggtaactgtcatcaccaagtagaaggcttatttaaagcgttttcacgtgcccttcgtatggcagtagcacaagacacgacccaacaaacagccagctctaagggatgtttatgat

SEQ ID NO: 280177 - DNA, 577 bp, Unknown
  Bacterial polypeptide expressing nucleotide sequence isolated from the Sargasso Sea
ggaagtaaaagaaaaactaagagaaacagaaatagtttgttcaataaacttagatggggtgggcaaagctaatacaaaaacaggcgttggcttttttgatcatatgcttgaaattttttctcatcacagcctcatcgacatagatcttcaagcaaacggggacacgcacgttgattttcatcacacaattgaggatagtggatatgtattagctcaatcaatcataaacgccctaggagataaaagaggaatcaaaagatacggctttttctatgttccaatggatgagtgcctttctagatgtgtaattgatttttctggtaggcctgagttagtttggaaagtagatttagggttaaaaaaaattggcgaaatggatacagagctattccatgaattttttaaagcttttagcaacgaatcaaagtgtaatttacatatagaaaatttttatgggaccaacaaccatcacataatagaatcatgcttcaagtcatttgcaaaaagtatcagaatagccattgaagtagacgaaagaataaagggtgttataccttcctcaaagggcactatttaa

SEQ ID NO: 280178 - DNA, 441 bp, Unknown
  Bacterial polypeptide expressing nucleotide sequence isolated from the Sargasso Sea
atatgaatattaaagccaaaggtgatactcatattgatttacaccacacaactgaagatacaggaattgctatcggtgaagctttaaaaaaagctttgaaaaaatctatcggcataagaagatacgcacacgcaatgatacctatggatgaaactttatcacgtgttgcaattgacatatcaaataggccatatttaatttggaaagtaaatttgaaagtggaaaaacttggagagatggatacagaactatttaaagaatggtttcaagctttttctcaagcagctggaattactttgcacgttgaaaatatttatggtgataatagtcaccacattatcgagtcttgttttaaaggattagcaagatcattaagaactgctttagaaattgatccaaggaatagtaaatcaattccatcgactaaaggctctttataag

SEQ ID NO: 280179 - DNA, 589 bp, Unknown
  Bacterial polypeptide expressing nucleotide sequence isolated from the Sargasso Sea
aatgcgtaaaggcaaggtagaaagaaacactaaagaaaccaagataagttgtgaggttaacttagatggtgtcggccaatctaagatttcaacgcaaattggtttttttgatcatatgttggaattattatcccatcacagcttgatagatataggtttaaaatgtgaaggagatactaatgttgatcttcaccattcagttgaagatacagcttacgcaattgctttagctataaacaaagccctagatgataaaaaaggaattaatagatatggcttttcatatgttccaatggatgaatgcttatcgagatgtgttattgatttaagtggaaggcctgagtttgtttggaatgttaatcttggtttaaaaaaaattggtaaaatggatacagagttattccatgaattttttaaagccttttcaaatgaatcaaaatgtaatttacatattgaaaacatgtatggaaaaaacaatcatcatatcattgagtcatgctttaaggcttttgccaaaagtttaagatttgctgtcgaaattgataacagaagaaaagataacataccatcatcaaaaggtactctttaa

SEQ ID NO: 280180 - DNA, 592 bp, Unknown
  Bacterial polypeptide expressing nucleotide sequence isolated from the Sargasso Sea
aatgacagatcgcaaagcttcgatagaacgaaaaactaaagaaacggaaattgaggtcacagttagtctagatggagggaattcttcaattgatactggaatacccttctttacgcacatgcttgaacaattggccaaacactcaggtatgggcctttttgttaaatcaattggtgacttagaggttgatgcacaccacacggtagaagatgtgggtatctccattggagaagcatttaataatgcgcttggcgaaaaacttggcattaggagattttcatcagtgagtgttcctttggatgaagcgttaatagatgtagcacttgatatatcaggtagagctttttgtaattatgaaattgatttccctggggaaaagatattaggggatccaccttttgacccacaattaatggaggagttctggagagcttttacagcggcatcaaaagtaacacttcatatttcactggtaagagggaaaaacacccatcacattgttgaagctacatttaaaggcgttgcgcgagccttacgggatgcagtgaaaattgaaggtgccgatcttccctccacgaaaggatccttgtga

SEQ ID NO: 280181 - DNA, 616 bp, Unknown
  Bacterial polypeptide expressing nucleotide sequence isolated from the Sargasso Sea
attgtgtcgggggattagagtgagcaacagaagagcgacagtaaacagaaaaactggagagactgaaataactatgaccttcgatttagaagggacagggaagtatgaagtgtctacaggaaatgggtttttggaccatatgctggcccaaatgccacgccatgggttgtttgatctggaagtgaaagcaataggcgatgtggaaactggatggcatcatttggttgaggactgtggaattgtatttggtcaagtatttgctaaggctttgggatcccctgttgggattataagaatggcacattcttacgtgccccttgatgaaactttagctcgggtagtgatcgatttaagtgggagaccacatgctcaaattaatactggattagaagatgttatggttgagaccctgccaggcgacttaataggacatttccttgaatcttttgcttatgaagctaaagtaaatttgcatgctgaagtgattacgggccaaagccctcaccataaagccgaagccatttttaaaggtttggcgagagctcttagacaagctgtatctatagatgagagagcaccagatgctatccctagtactaaggattctttagggtga

SEQ ID NO: 280182 - DNA, 589 bp, Unknown
  Bacterial polypeptide expressing nucleotide sequence isolated from the Sargasso Sea
atgcgaaaaggaaaagttgaaagaaacactaaagaaactaagataatctgtgaagttaacttagatggcactggtcaatctaaaattttaactcaaattggtttttttgatcatatgttggaattattatcccatcacagcttgatagatttagatttaaaatgtgaaggagataccaatgttgatcttcaccattcagttgaagatacagcttacgcaattgctttagctataaacaaggcattagatgacaagaaaggaataaatagatatggtttttcatatgttccaatggatgaatgcctatcaagatgtgtaattgatttaagtggaagacccgagcttgtgtggaatgttaaccttggtttaaaaaaaattggcgaaatggatacagagctattcaatgaattttttaaagctttttcaaatgaatcaaaatgtaatttgcatattgaaaatctgtatggaaaaaataatcaccatatcattgaatcatgctttaaagcttttgctaaaagtttaagatttgctgtcgaaatagataacagaagaaaagacaacataccatcatcaaagggcactctttaat

SEQ ID NO: 280183 - DNA, 466 bp, Unknown
  Bacterial polypeptide expressing nucleotide sequence isolated from the Sargasso Sea
atgtctttatcaaaaaatttgtataaagaattatcactcgttacctcaaatgctgcaatagcagcgtttcattttattggtaaaaatgacaaaaatgctgctgataaagcggctgtggatgtgatgagaaaaatgttaaatgatatggatattaacggtaaaattgtaattggagaaggtgaactagatgaggcaccaatgttatatttgggcgaagcacttggtgataaaaaaggtatacctatagatatagctgttgatcctgttgagggaacaaactttgtggctaaaaatatgcctggtggactttcagtcatagccatatccaataagggcgacttatttaatgccccagaaacttatatggataaaattgctatatctaaagatataccaaatgaatgtgttgacttagatttttctatagaaaaaaacattagtaatatttcagatacaaaaaaataaa

SEQ ID NO: 280184 - DNA, 475 bp, Unknown
  Bacterial polypeptide expressing nucleotide sequence isolated from the Sargasso Sea
tatgcttgagcaattatcaaagcattcattaatggatctaaaagtaaaagctaaaggagacacacacatagatcttcaccacaccactgaagatacaggtattgcaattggtgaagctttaaaaaaagctgctaaaaaatttgttgggattaagcggtatgctcacagacttattccaatggacgaaaccttaactagagttgcaatcgatgtttcaaacagaccttatttgatttggaaagtaaaattaaaagtagaaaaacttggggagatggataccgaactatttaaagaatggtttcaagccttttctcaatctgctggaattactttacatgttgaaaatatttatggggacaatagtcaccacattattgagtcttgttataaaggtttagcaagatctttaagagatgctttagaaatggaccctagaagtaaaaaaagcattccatcaactaaaggctcattataa

SEQ ID NO: 280185 - DNA, 421 bp, Unknown
  Bacterial polypeptide expressing nucleotide sequence isolated from the Sargasso Sea
ggagatactcacatttgatcttcatcacactacagaagatacaggaattgcaattggagaagctttaaaaaaagcagctaaaaaatttgttggcatcaaacgttatgcacatagagtaattccaatggatgaaactttaactagagtggcaattgatgtttcaaacagaccttatttgatttggaaagtaaaattaaaagttgaaaaacttggtgagatggacacagaattatttaaagaatggtttcaagctttttcacaatctgctggtattactttacacgttgaaaatatttatggggataacagtcatcatattattgagtcttgttataaaggtttagcgagatctctaagagatgctttagagatggatcctagaaataaaaaaagcattccatcaactaaaggctcactataa

SEQ ID NO: 280186 - DNA, 274 bp, Unknown
  Bacterial polypeptide expressing nucleotide sequence isolated from the Sargasso Sea
atgaaacgtaaaggtaaaattagtagaaaaacaaaagagaccagcattagtgttcatttaaatattgatggcaaagggaaatataagattgatactgggataggttttttaaatcatatgctagaacaattatccaagcactcatcaattgatatgaatattaaagctaaaggtgacactcatattgatcttcaccacacaacagaggacacggggatagcaataggagaggcattaaaaaaggctttgaaaaaatctgtaggtataagaagat

SEQ ID NO: 280187 - DNA, 604 bp, Unknown
  Bacterial polypeptide expressing nucleotide sequence isolated from the Sargasso Sea
aacgatattcagaaaagcttacttgcgtcgtcacgtattgcagaggtggtacgtaccacctctgaaaccgacattcgcgtgcgtgtagatcttgattcgcaggctaagtcgacaattcaaaccggcatgggcttttttgaccacatgctagaccaaattgctacccacggtggcttcgagctaaacctgactaccgatggcgatttgcacattgacgatcaccacagtgtagaagacaccgcccttgcccttggcgaagcgcttaaaaaggctctgggcgacaaacgcggtataggtcgctttggtttcgcgttgccaatggatgagtgtcgtgcggaatgtattatggacatttcaaaccgcccacaccttaagtttgacgctgaatttagccgcgaccaggtaggtgaaatggccaccgaaatggtgccgcacttcttctactcgcttgcacaaagcatgggactatcgctgcacctttccaccagcgaaggtaatgcacaccaccaggtagaaagcctgtttaaagtatttggccgtgcgctacgtcaagccattacgcgccaaggtgatgcactaccaagtagtaaaggagccctgtaat

SEQ ID NO: 280188 - DNA, 595 bp, Unknown
  Bacterial polypeptide expressing nucleotide sequence isolated from the Sargasso Sea
tatgaaacaaaaaagaatcgcaaagattgaaagaataactagcgaaacaaaaataaaactagaacttaaccttgatggttcgggaaaagcagatgtaaaaactggaatcggatttctggatcatatgctggatttgtgggtctttcacggtttgttcaatctaaaattaacctgcaaaggcgatcttgaaattgatgcccatcacacaactgaagatatcgccctcgctcttggaagtgccctggccgaagcggttggtgaaaaaaaaggaattgttcgatacggtttttcctatctacccatggatgaatccctgctgcgggttgcacttgatttgtcagggagacctgaatttgtcttttccggtgaatttgtacagtcatcaataggcagtctggacactcagatgatcaggcacttttttaaatcactggccatttcttccggaatgacactgcatatgtccattctttatggaattaacgatcatcacaaatgcgaaggtctctttaaagcattaggaagggcattaaggcaggctgttgaaattgatacccgtcgtacaggagtaccatcaaccaaggggattctctga

SEQ ID NO: 280189 - DNA, 427 bp, Unknown
  Bacterial polypeptide expressing nucleotide sequence isolated from the Sargasso Sea
atgcgagaagctaaagttgagagaaaaacaaaagaaaccaaaataaatgctagtgtagttctggatggctcgggaatttataaaattgacactggtattgggtttttagatcatatgctagaacaactctctcggcacagtcttattgatctgaaagtaaaggccatcggcgatcttcatattgactttcatcatacaactgaggacaccggcatagtgataggtgaagcgttagacaaggccctcggagatagaagtggaattactagatatggttttgctttggtacccctagacgaagctctgacgagagtagtagtagactgttctaataggccgggccttgtatggaaagtgggtttctctagaccaaaagttggtgaaatggatacagagctgtttaaggagtggttccaagggtttgctc

SEQ ID NO: 280190 - DNA, 270 bp, Unknown
  Bacterial polypeptide expressing nucleotide sequence isolated from the Sargasso Sea
aatgaagagaaaagctaaaatttcaagaaaaaccaaagaaacgtcaatcagtgtagatttaaatattgatggaaaaggtaagtacaaggttgacacaggtataggatttttaaatcacatgcttgagcaattatcaaagcattcatcgatagatttaacattaaaggcaaaaggagatactcacatcgatcttcaccatacaacggaagatacaggtattgcaattggcgaatgtttaaaaaaagcatctaaaaattttattggtatcaa

SEQ ID NO: 280191 - DNA, 589 bp, Unknown
  Bacterial polypeptide expressing nucleotide sequence isolated from the Sargasso Sea
aatgcgaaaaggtaaagttgagagaaacaccaaagaaaccaagataagttgtgaaattaacttagatggtgttggacaatctaaaatttcaacacaaattggtttttttgatcatatgctggaattattatctcatcacagtttgatagacatagatttaaaatgtgaaggagacactaatgttgatcttcaccattctgttgaagatacggcttacgcaattgctttagctataaacaaagcactagatgataaaaaaggaatcaatagatatggcttttcatatgttccgatggatgaatgcttatcgcgatgtgttattgatttaagtggaaggcctgagcttgtttggaatgttaatcttggtttaaaaaaaattggtgaaatggatacagagttatttcatgaattttttaaagccttttcaaatgaatctaaatgtaatttacatgttgaaaatctatacggaaaaaacaatcatcatatcattgaatcatgctttaaggcttttgccaaaagtttaagatttgctgtcgaaattgataacagaagaaaagataacataccatcatcaaaaggtactctttaa

SEQ ID NO: 280192 - DNA, 274 bp, Unknown
  Bacterial polypeptide expressing nucleotide sequence isolated from the Sargasso Sea
ttgtcgatcttatcgggacgaccaggtctcttctacgaagttgagtacgtgaggtccagggtgggtgactttgatcttgatctgctcagggaattttttcaggggttggtcaaccacgggatgttaacccttcatttggacaatttaaaaggcgctaatgctcatcaccaagcggaaacgctgtttaaaggatttggcagggccttgagaatggccttatctgttgatgagaaaaacataggacacataccgtccacgaagggtactttatagt

SEQ ID NO: 280193 - DNA, 238 bp, Unknown
  Bacterial polypeptide expressing nucleotide sequence isolated from the Sargasso Sea
aatgaagcgaaaagctaatatcttaagaaaaacaaaagaaacatctattaaagtcgatttaaatattgatggcaagggaaaatacaaaattgacacaggaataggttttcttaaccatatgttagaacaattatcaaaacactcatcaattgatttaagtgtaaaagctaaaggtgacacacatatcgacttacatcatacgaccgaggataccggcattgcaatcggagaatgttaa

SEQ ID NO: 280194 - DNA, 292 bp, Unknown
  Bacterial polypeptide expressing nucleotide sequence isolated from the Sargasso Sea
gaagctctatcaagggtagttttagatttttcgggcagaccaggattacatatgaaggtagattttgttaaggatactgtcggggatatagaggtggatatgtttgagcactttttccaatctttatgtaatcacgcgttcttaactttgcacatagaaaattttactggagataatacacatcatcagatagaaactatttttaaagcttttgggcgagcgttacgaatggctctatccattgatccaaggcaggagaatgctataccgtctactaaaggttccttataac

SEQ ID NO: 280195 - DNA, 424 bp, Unknown
  Bacterial polypeptide expressing nucleotide sequence isolated from the Sargasso Sea
aaaggtgatacgcacattgatcttcaccacacaactgaagatactggaattgcaattggcgaatgtttgaaaaaagcatctaaaaagtttgttggtataaaaagatatgcccatgcgatgataccgatggatgaaacattaactagagttgcaattgacgtatcaaacagaccttacttaatttggaaagtaaaattgaaagtagaaaaattaggtgagatggatacggaactgtttaaagaatggtttcaagctttttcgcaagctgcaggaattactttgcacattgaaaatatctatggtgataacagtcaccacataatcgaatcttgctttaaaggattagcaagatcattacgagctgctttagaaatggatccaagaaataaaactacaataccttctacaaaaggttctttataaa

SEQ ID NO: 280196 - DNA, 592 bp, Unknown
  Bacterial polypeptide expressing nucleotide sequence isolated from the Sargasso Sea
tatgaaacgtaaggccaatataagtagaaaaacaaaagagaccaacattagcgttgatttaaatattgatggtaagggtaagtataaagttgacacaggcataggatttttagatcacatgcttgaacaattatcaaaacattcttcaatggatatgaatatcaaagctaaaggtgatacgcacattgatcttcaccacacaactgaagatactggaattgcgattggtgaatgtttgaaaaaagcatctaaaaaatttgtcggtataaaaagatatgctcatgcaatgataccaatggatgaaacattaactagggttgcaatcgatgtttcaaatagaccttatttaatttggaaggtaaaattgaaagtagaaaaattaggtgagatggatacagaactatttaaagagtggtttcaagccttttcacaagctgcaggaattactttgcacgttgaaaatatttatggtgataatagccaccacataatagagtcttgctttaaaggattagcaagatcattacgtgctgctttagaaatggatccaagaaataaaactacaataccttctacaaaaggttctttataa

SEQ ID NO: 280197 - DNA, 592 bp, Unknown
  Bacterial polypeptide expressing nucleotide sequence isolated from the Sargasso Sea
tatgaagcgtaaaggtaaaattagtcgaaaaacgaaagagaccagcatcagcgtcgacttgaatattgacggtaaaggtaaatataaaattgatactggaataggttttttaaatcatatgttggaacagctatctaagcattcttcaattgatatgaatattaaagccaaaggtgatacccatattgatttacaccacacaactgaagatacaggaattgctatcggtgaagctttaaaaaaagctttgaaaaaatctatcggtataagaagatacgcacacgcaatgatacctatggatgaaacattgtcacgtgttgcgatcgatatatccaataggccatatttaatttggaaagtaaatttgaaagtggaaaaacttggagaaatggataccgaactatttaaagaatggttccaagctttttctcaagcagctggaattactttgcacgttgaaaatatctatggtgataatagtcaccacattattgagtcttgttttaaaggattagcaagatcattaagagctgctttagagattgatccaaggaatagtaaatcaattccatcgactaaaggctctttataa

SEQ ID NO: 280198 - DNA, 592 bp, Unknown
  Bacterial polypeptide expressing nucleotide sequence isolated from the Sargasso Sea
atgaagaggaaagcaaaaataagtagaaagactaaagagaccagcatcagtgttgatttaaatattgatggtaaaggtaagtataaaatcgacacaggtataggatttttagatcacatgcttgagcaattatcaaagcactcttctatggatatgaatattaaagctaagggagatacccatattgatttacaccatactacagaagatacagggatagctattggtgaatgtttaaaaaaagcttcaaagaaatttataggaattaaaagatatgctcatgcaatgataccaatggatgaaacattaactagagttgcaatcgatgtttcaaacagaccatatttaatttggaaagttaatctaaaagtagaaaagcttggtgaaatggataccgaactatttaaagaatggtttcaagcattttcacaagctgccggcattactttacatgttgaaaatatttatggtgataacagccaccacattattgaatcttgttataaaggtttagcaagatcattaagagctgcgttggagatggatccaaggaataaaaatacaattccttctacaaaaggttctttataag

SEQ ID NO: 280199 - DNA, 574 bp, Unknown
  Bacterial polypeptide expressing nucleotide sequence isolated from the Sargasso Sea
agttaaaagaaaaaccaaagaaacagaaatcacttgtgaaataaacattgatggcactggtcaaaatgaaatttctactggcatagggttttttgatcacatgcttgagatattttctcatcacagcctaatagatttaaaaataaaagcagagggggatacgcatgttgaccttcaccacaccgttgaggacacagcctatgctcttgctaatgcaataaataaatctattggagaaaaaaaaggcataaatagatatggtttcttttatataacaatggatgaaagtttgtcgcgtacggttattgatttttctgggaggccagagtttgtgtggaaggttgatttaggtttaaagaaaatcggtgaaatggacacagagcttttccatgaattttttaaggcatttgctaatgaggcaaaatgtaatttacatatagaaaacctttatggagataacaaccaccatattattgagtcttgttttaaatcatttgcaagaagtgtcagatatgctttgataattgatcaaaagattaaagacaaaataccatcatcaaaaggaacgctataa

SEQ ID NO: 280200 - DNA, 592 bp, Unknown
  Bacterial polypeptide expressing nucleotide sequence isolated from the Sargasso Sea
atgaagcgaaaagcagagataagtagaaaaactaaggaaaccaaaatcgatgtagctataaacatcgacggtaagggcaagtttaaaattgatactggcattggttttttagatcacatgttagaacaactctcaaagcactcttcaattgatttaaaagtaaaagctaagggagatacacacattgatcttcatcacacaactgaggatacaggtattgcaattggtgaatgtttaaaaaaagcatcaaaaaaatttgtaggtataaaaagatatgctcatgcaatgattccaatggatgaaactttaacaagagttgccttagatgtttcaaatagaccatacttaatttggaaagttgatttaaaggtagaaaagctaggtgaaatggacactgaattatttaaagagtggtttcaagcattttcacaagcagcaggaatcacgctacacatagaaaatttatatggcgacaatagtcatcacaaagttgagtcttgttttaaaggattagcaaggtctttacgaagtgcacttgagattgatccacgtaacaagaacgtaataccatcgactaaaggttctttataag

SEQ ID NO: 280201 - DNA, 505 bp, Unknown
  Bacterial polypeptide expressing nucleotide sequence isolated from the Sargasso Sea
aataaagaccaaaataggtttcttagatcacatgcttgagcaacttgctaagcattctctcattgatatgaaaataaatgctaaaggcgatactcatatcgatcttcatcacacaactgaagacacaggtattgctatcggagaggctataaaaaaggcagctggaaatcgaaaaggaattaaaaggtacgctactacaaacatccctatggatgaaacgctaacccgtgtttctttggatatatcgaatagaccatatttaatttggaacgtagaccttaaagtagaaaaacttggcgaaatggatacagaactttttaaagaatggtttcaagcttttgcacagtctgcgggtataacgctacatgtagaaaatatttacggtgaaaatagtcatcataaaattgagtcttgttttaaagccctagcaagatctcttaaagaagctctggaaattgataaaagaattaaaaattcaataccatctactaagggcactatttaa

SEQ ID NO: 280202 - DNA, 589 bp, Unknown
  Bacterial polypeptide expressing nucleotide sequence isolated from the Sargasso Sea
tatgagaactgcatctatagaaagaaatacaaaagagaccaaaatagactgtaaattaaatattgatggaactggggtgtcgagaattaatactggtataggtttttttgatcacatgcttgaaattttctctcatcacagcttaatagatgttgagcttagtgttgatggagatacacacgttgatttccaccacactgtcgaagatactgcctatgccctttctgatgctattaataaagcaataggggacaaaaaaggaataaacagatacggcttcttttatataacaatggatgaaagtctctctcgaacagttattgatttttctggcagacctgagcttgtgtggaaagttgagttaggtttggagaaaattggagaaatggacacggagctttttaaagaattttttaaagcatttaccaataatgcaaaatgtaatcttcatattgaaaatttttatggaactaacaatcatcatatcatagagtcttgctttaagtcgtttgcaagaagcgttcgggccgcactaacaattgatgaaagaataaaaaatattataccatcgtctaaaggcgtgctttag

SEQ ID NO: 280203 - DNA, 548 bp, Unknown
  Bacterial polypeptide expressing nucleotide sequence isolated from the Sargasso Sea
tatgaaacgtaaagctaacatatctagaaaaactaaagaaacatcaattagtgtggatcttaatattgatggaaaaggtcaatataagatagacactggaattggttttttgaaccatatgttagaacaactttctaaacactcttctatagatatgaaaataaaagctaaaggagacactcatatagatcttcatcacacaacagaagatactggaatagcaatcggagaatgtttaaaaaaagcatcaaagaaatttattggcataaagagatatgcgcatgccatgatacctatggatgaaacattaaccagagttgcaattgatgtatcaaatagaccctatttaatttggaaagttaaactcaaagtagaaaaacttggtgaaatggatacagaactattcaaagaatggttccaagctttttcacaagctgctggaattacattacacgtagaaaatatgtatggggataatagccaccatataattgaatcttgctttaaaggacttgctagatcacttagagcagcccttgaaatagacc

SEQ ID NO: 280204 - DNA, 376 bp, Unknown
  Bacterial polypeptide expressing nucleotide sequence isolated from the Sargasso Sea
atgaaaagaaaagctaaaataaatagaaaaaccaaagaaactaacatttcggtcgcagtcaacttagatggaaaagggaaatataaaattaaaactgggataggttttcttgatcatatgcttgagcagctagctaagcactcattaattgacttagaagttaaagccaaaggcgatacacatattgatttacaccatacaactgaagacacaggtatagctatcggggaagctattaaaaaagctgcaggtaaccgaaaagggattacaagatatgcatcaacaatgattcccatggacgaaactttgagccgagtttcaatagatgtatcgaacagaccatacttaatttggaaagttaatttaccagtcgaaa

SEQ ID NO: 280205 - DNA, 451 bp, Unknown
  Bacterial polypeptide expressing nucleotide sequence isolated from the Sargasso Sea
aatgtcatctctaaggcaatctgaaataaaaagaaaaacgaatgaaacagatatttctgtatttataaacttagatggaaatggaatttctgagattgatactgggataccattcttagatcatatgcttcatcaaatatccagtcatggtttgtttgatttaaaaataaaagcaattggagatacccatattgatgatcatcatacaaatgaagatgtaggaatcgcattaggcaaagcattttcaaaagccttgggagaaagaaaaggaataagtcgatttggacatttctttgccccattagatgaagcattagttcaagtcactttagactgctctggtagaccgcatctatcttatgatcttcaattaaaagctcctagaataggaaattatgatactgaactagtaagagagttttttattgcctttgtaaataacagcggtatt

SEQ ID NO: 280206 - DNA, 592 bp, Unknown
  Bacterial polypeptide expressing nucleotide sequence isolated from the Sargasso Sea
tatgaagcgaaaagcaaaaataagtaggaagaccaaagaaactagtatcagcgttgatttaaatattgatggcaagggcaagtacaaagttgatacaggtataggatttttaaatcatatgcttgagcaattatcaaagcattcttctatggatatgaatataaaagctaagggagatactcatattgacttacatcacactacagaagatacagggatagctattggtgaatgtttgaaaaaagcttcaaagaaatttataggaattaaaagatatgctcatgcaatgataccaatggatgaaacattaacacgagtagcaattgatgtttcaaacagaccttatttaatttggaaagttaagcttaaagtggaaaaacttggtgaaatggatacagaactattcaaagaatggtttcaagcattttcacaagctgcaggaattactttacacattgaaaatatctatggtgataacagccaccacataattgagtcttgctttaaaggtttagcaagatcattgagagctgcgttagagatggatccaagaaataaaaatacaattccttccacaaaaggttctttataa

SEQ ID NO: 280207 - DNA, 589 bp, Unknown
  Bacterial polypeptide expressing nucleotide sequence isolated from the Sargasso Sea
tatgcgtaaaagctttattgaaagaaacaccaaagaaaccaaaatcatatgtaaaacaaacctagatggtagtggtatttcagatatttcaacaggaattgggttttttgaccatatgttagaaatattttctcaccacagtttaatagatttagagctcaaagcagagggtgatacccatgtcgatcttcatcatacggtagaggacgcttcttattctatcgcccaatctattgttaagtcattaggtgataaaaaaggaatttctcgctatggattttattatattcctatggatgagtgtttgtctagatgcgttattgatttttctggaagaccagaacttgtttggagtgtaaagcttggattagaaaaaattggtgaaatggataccgagttatttgaagagttttttaaagcttttgccaatgaagctaaatgcaacttacacattgaaaacctctatggaaaaaacaatcatcacattatagaatcatgcttcaaggcgtttgcaagaagtataaaagaagcagtcagggttgatgaaagaataaaaaacataataccatcttctaaaggtatattgtaa

SEQ ID NO: 280208 - DNA, 592 bp, Unknown
  Bacterial polypeptide expressing nucleotide sequence isolated from the Sargasso Sea
tatggcaagaaaagcaaaaataataagaaaaactaaagaaactaatatttctgtcgcagttaatattgatggaaaaggaaaatataatattaaaactggaattggttttttagatcatatgcttgagcagttatcaaagcattccttaattgatattgaagtaaaagccaaaggcgatactcacattgatctgcaccatactactgaggacacaggtatagctatcggagaagctatcaaaaaagctgcaggtaatagaaaaggtataacaagatatgcttctactatgataccaatggatgaaacactaagcagagtttcaattgatatatctaataggccttatttaatttggaaagtaaatttagcggttgaaaagttaggtgagatggatactgagttattcaaggaatggttccaagcattttcacaatctgcaggtgttactttacacatagaaaatatttatggtgataatagtcaccacaaaatagagtcatgctttaaaggtttagctaggtctctaaaagatgcacttgaaatagataaaagaataaaaaattctgtgccatctacaaaaggctctttataa

SEQ ID NO: 280209 - DNA, 286 bp, Unknown
  Bacterial polypeptide expressing nucleotide sequence isolated from the Sargasso Sea
atgagaaaagtaagtgaatcaagaaaaactaaggagacagacatcagtctatctttgaacttagatggatcgggtatgagtaatttaaaagcaaacctgcctttccttgagcatatgcttgaccagactactaggtattcatcaattgacttagatttagatgccaaaggtgatttagaaatagatgcacaccatactgtagaggacataggtatcactcttggatcagcctttgacaaggcacttggcgataaaaaaggtatacagagatttggctatgcttata

SEQ ID NO: 280210 - DNA, 592 bp, Unknown
  Bacterial polypeptide expressing nucleotide sequence isolated from the Sargasso Sea
atgaagaggaaagcaaaaataagcagaaaaactaaagagaccagtatcagtgttgatttaaatattgatggcaaaggcaagtataaagttgatacaggtataggatttttagatcatatgcttgagcaattatcaaagcactcctctatagatatgaatattaaagccaaaggagacacccatattgatctacatcataccacagaagactcgggtatagctattggcgagtgtttaaaaaaagcttcaaagaaatttatagggattaaaagatatgcgcatgcaatgataccgatggatgaaacattaactcgagttgcattggatgtatctaataggccttatttaatttggaaagttaagcttaaagtagaaaagcttggtgaaatggatactgaactattcaaagaatggtttcaagcattttcacaagctgccggaattactttgcatgttgaaaatatttatggtgataacagccaccatataattgagtcttgctttaaaggattagcgagatcactaagagctgcattagagatggatccaaggaataaaaatactattccttctacaaaaggttctttataat

SEQ ID NO: 280211 - DNA, 544 bp, Unknown
  Bacterial polypeptide expressing nucleotide sequence isolated from the Sargasso Sea
atgaagaggaaagcaaaaattagtagaaaaactaaagagaccagtattagtgttgatttaaatattgatggtaagggtaagtacaaagttgacacgggcataggatttttagaccatatgcttgaacaattatcaaagcactcttctatggatatgaatataaaagccaaaggagatacccatattgatctgcaccacaccacagaagatgcaggcatagctattggtgagtgtctaaaaaaagcttcaaagaaatttgttgggataaaaagatatgcacatgcaattataccaatggatgaaacattaactagagttgcaatcgatgtttcaaatagaccatacttgatttggaaagttaagctgaaggtagaaaagcttggtgaaatggatacagaactattcaaagaatggtttcaagcattttctcaagctgcaggaattactttgcacgttgaaaatatttatggtgataacagtcaccacattattgagtcttgttttaaaggattagctagatcattaagagctgcatggagatgac

SEQ ID NO: 280212 - DNA, 436 bp, Unknown
  Bacterial polypeptide expressing nucleotide sequence isolated from the Sargasso Sea
cgtaggtgacctacatattgattttcaccacaccaccgaagataccggcatcgtgatcggtgaggccgtaaaacgggctctcggcgaccgggcggggatcacacgctatggctctgccctggtgcccttggatgaggccctcacccgctgcgtggtggattgttccaaccggccgtacctcgtgtggaaggtcggcttcaaccggcccaagctgggcgagatggacacggaactgttccgggaatggttccaggcctttgcgcaagccgccgggctcaccttgcacgtggataatctttatggcgagaacaaccaccacatcatcgaggcgtcgtttaaggccctcgcgcgggcgctgcgccaggcggtgacgatggacccgcgcgcggagggggtggtgccctccaccaagggcacgctctcggatcaggattaa

SEQ ID NO: 280213 - DNA, 568 bp, Unknown
  Bacterial polypeptide expressing nucleotide sequence isolated from the Sargasso Sea
gaacgtaaaacccgggaaaccctggtaaaggtcaaactgaacctggatggtgaaggaacaagtgaaaccaataccggaatcggttttcttgatcatatgctggatcaattggcgtttcatgggctcatggacctggcggtttcctgcgagggggaccttcacatcgacagtcatcattccaccgaagacattgggattgcagttggccaggccctgaaggaagccctgggtgaaaaaaaaggaattcgacgttatggccatgcctacattccgatggatgaagctcttctgcgggcggtacttgactgttctgggagacctgatttcgtcttcaacggagaattcggaaggtacaatcttggagacctggatacccagatgattccccatttcttcaagtccctggctttcaactgcggtttaactctgcatctcagtattctctacggcagtaacgatcatcataagtgtgaggggcttttcaaagcctttgccagggctctttcggaagcggttacgttggacccaaggaggatgggagtgagttccaccaaagggactctctgat

SEQ ID NO: 280214 - DNA, 524 bp, Unknown
  Bacterial polypeptide expressing nucleotide sequence isolated from the Sargasso Sea
tatgagaaaagcgagcatagacagaaatacaaaagaaactaaaatttcttgctctgttaatcttgatggaataggcaaatcagaaatttctactggtataggtttttttgatcacatgcttgaaatcgtttctcatcacagcttaattgatattaatttaaaggcagaaggggacacacatgtagacttacatcacacggttgaggatgttggatacgttctttctcagtcaattttaaaagctcttgacaaaaaactaggtattaaaagatacggtttttactatatccccatggatgaatgtttatcaagatgtgttttggatttttcaggaagacctgagttagtttggaaagtaagtctagatttagaaaaagtaggagaaatggatacggaattattccatgaattttttaaagcgttttcaaatgaagctaagtgtaacctgcatgttgaaaacttatacggaaaaaacaatcatcatataattgaatcatgctttaaggcttttgctagaagcttaa

SEQ ID NO: 280215 - DNA, 592 bp, Unknown
  Bacterial polypeptide expressing nucleotide sequence isolated from the Sargasso Sea
atgaagcgtaaagcaaaaataagcagaaagacaaaagaaactaacatcaacgttgaacttaacattgatggaaaaggtaaatacaaagttgacacaggcatagggtttttagatcacatgcttgaacaactatcaaagcattcttcaatggatatcaatataaaagccaagggtgatacacacatcgatcttcatcacacaacagaagacacaggtattgcaatcggtgaatgtttaaaaaaagcttctaaaaagtttgttggcattaaaagatatgcgcacgcaatgataccaatggatgaaacgcttactcgtgttgcaattgatgtatcaaatagaccttacttaatttggaaagtaaaattaaaagtcgagaagctcggagaaatggatacagagcttttcaaagagtggtttcaagctttttcacaatcagcaggaattactttacacgttgaaaatatttacggtgataatagtcaccacataatagagtcttgttttaaaggcttagcaagatctttaagagctgcattggaaatggatccaaggaacaaaactactattccttctaccaaaggttctttataaa

SEQ ID NO: 280216 - DNA, 592 bp, Unknown
  Bacterial polypeptide expressing nucleotide sequence isolated from the Sargasso Sea
atgaaacgtaaagccaaaataagtagaaaaacaaaagagaccaacatcagtgttgatttaaatattgatggtaagggtaagtacaaagttgacacaggtatagggtttttagatcacatgcttgaacaattatcaaaacactcttcgatggatatgaaaattaaagctaaaggtgatacgcacattgatcttcaccatacaactgaagatacgggaattgcaattggtgaatgtttgaaaaaagcatctaaaaaatttgttggtattaaaagatatgcacatgcaatgataccgatggatgaaacattaactagagttgcaatcgatgtttcaaatagaccttatttaatttggaaagtaaaattgaaagtagaaaaattaggtgagatggatacagaattatttaaagaatggttccaagccttttcacaagctgcaggaattactttgcatgttgaaaatatttatggcgataacagccaccacataatagagtcttgctttaaaggattggcacgatcattaagagctgctttagaaatggatccaagaaaaagaactacaataccttctactaaaggttctttataaa

SEQ ID NO: 280217 - DNA, 489 bp, Unknown
  Bacterial polypeptide expressing nucleotide sequence isolated from the Sargasso Sea
gatttttagatcatatgcttgagcaattatcaaaacattctttgattgatttaaaagttaaagcaaaaggagatactcatattgatcttcaccacacaacagaagacacaggtattgctattggtgaagctttaaaaaaagctgctaaaaaatttgtaggaataaaaagatatgcacatacagttattccaatggatgaaacattaacaagggttgcaattgatgtttcgaatagaccttatttaatttggaaagtgaaattgaaagttgagaaacttggagagatggatactgagttattcaaagaatggttccaagcgttctctcaatctgcaggtattacaatgcatgttgaaaacatttatggtgataatagccaccacattattgagtcttgttataaagctttggcaagatcattaagagctgcattagagatggatccaagaaataagaagagcataccatctactaaaggctcattataag

SEQ ID NO: 280218 - DNA, 382 bp, Unknown
  Bacterial polypeptide expressing nucleotide sequence isolated from the Sargasso Sea
tatgaaacgtaaagctaaaataagtagaaaaacaaaagagaccaacattagcgttgatttaaacattgatggtaagggtaagtacaaagttgacacaggcataggatttttagatcacatgcttgaacaattatcaaaacactcttcgatagatatgaatattaaagctaaaggtgatacgcacattgatcttcaccacacaactgaagatacaggaattgcaattggtgaatgtttaaaaaaagcatcaaaaaagtttgtcggtattaaaagatatgctcatgcaatgataccaatggatgaaacattaactagagttgcaattgatgtatcaaacagaccttatttaatttggaaagtaaaattgaaagtagaaaaatta

SEQ ID NO: 280219 - DNA, 592 bp, Unknown
  Bacterial polypeptide expressing nucleotide sequence isolated from the Sargasso Sea
atgaaacgtaaagccaaaataagtagaaaaacaaaagagaccaacatcagcgttgatttaaatattgatggtaaaggtaagtacaaagttgacacaggtataggatttttagatcacatgcttgagcaattatcgaaacactcatcaatggatatgaatattaaagctaaaggtgatacgcacattgatcttcaccacacaactgaagatacagggattgcaattggtgaatgtttaaaaaaagcatcaaaaaaatttgttgggattaaaagatatgcacattcaatgataccaatggatgaaacattaactagagttgcaattgatgtctcaaacagaccttatttaatttggaaagtaaaattgaaagtagaaaaattaggtgagatggatacagaattatttaaggagtggttccaagctttttcacaagctgctggaattactttgcacgttgaaaatatttatggtgataacagtcaccacataattgagtcttgctttaaaggattagctagatcattacgagctgctttagagatggatccaagaaacaaaactacaataccttctacaaaaggttctttataaa

SEQ ID NO: 280220 - DNA, 538 bp, Unknown
  Bacterial polypeptide expressing nucleotide sequence isolated from the Sargasso Sea
tgaggtaaatattgatggtaaaggaaaataccaaattgatactggaataggttttttggaccatatgcttgagcaattatcaaagcattcattaatagatctaaaagtaaaagctaaaggagacacacacatagatcttcaccacaccactgaagatacaggtattgcaattggtgaagctttaaaaaaagctgctaaaaaatttgttgggattaagcggtatgctcacagacttattccaatggacgaaactttaactagagtagcaatcgatgtttcaaacagaccttatttgatttggaaagtaaaattaaaagtagaaaaacttggggagatggataccgaactatttaaagaatggtttcaagccttttctcaatctgctggaattacattacacgttgaaaatatttatggtgacaatagccaccacattattgagtcttgttacaaaggtttagcaagatctttaagagatgctttagaaatggaccctagaagtaaaaaaagtattccatcaactaaaggctcattataa

SEQ ID NO: 280221 - DNA, 415 bp, Unknown
  Bacterial polypeptide expressing nucleotide sequence isolated from the Sargasso Sea
tatgattagaaaggctcacttagaaagagttactaaagaaacagacataagagtaaatattaatatcgacggaaaaaataattataaaataaattcggggatagggtttttagaccacatgttagaacaactttctaaacatagctttatagatattgatttaacggccaagggtgatcttcacattgactaccatcatactacggaagacactggttatgctattggaaaagcaatagatgaagctataggagataggaggggtattactaggttcgcgcacgcatatattcctatggatgagactctgactagagtagcaattgatttttctggcaggccttacttgatatggaaagtatttttcacgcaaaataaattaggagacatggatacagagttgtttaaggaatgg

SEQ ID NO: 280222 - DNA, 502 bp, Unknown
  Bacterial polypeptide expressing nucleotide sequence isolated from the Sargasso Sea
tatgagatcaatagacttagaaagaaatactaaagagacgcaaataaagctttctcttaatttagatggtagcggttctgcagatttatccgtggaattacctttttttgctcacatgcttgatcaactcgttagacacggtgactttgatttacagctaaatgctataggcgatcttgagatcgatgcacatcacactgttgaggatattggaataattctaggcgaagcctttaactctgctttaggcgataaaaaaggcatcaaaaggtttggctctgcttacgcaccactagatgaatctttatctagagttgttgttgatttctcaggaagaccaggattgttttgggatgttgaatttaaaagagaattcatcaatgattttgatttgcaattgttggaagaattttttcatgggtttacaaacaaagccctagcaaccattcacgttgataatctaaaaaggggcaaatgctcatcaccaagcagaaacaatatt

SEQ ID NO: 280223 - DNA, 484 bp, Unknown
  Bacterial polypeptide expressing nucleotide sequence isolated from the Sargasso Sea
atgaaacgtaaagccaaaataagtagaaaaaccaaagagaccaatatcagtgtcgatttaaatattgatggtaagggaaaatataaagttgatacaggcatagggtttttagatcatatgcttgaacaattatctaagcattcttctatggatatgaatattaaagctaaaggtgatactcatattgatcttcaccatacaactgaagatactgggattgcaattggcgaatgtttgaaaaaagcatctaaaaaatttgttggtattaaaagatatgcacatgcaatgataccgatggatgaaacattaactagagttgcaattgatgtttcaaacagaccatatttaatttggaaagtaaaattaaaagtagaaaaattaggtgagatggacacagaactattcaaggaatggttccaagccttttcacaagctgctggaattactttgcacattgaaaacatatacggtgataatagtcacc

SEQ ID NO: 280224 - DNA, 564 bp, Unknown
  Bacterial polypeptide expressing nucleotide sequence isolated from the Sargasso Sea
aaacgaaagaaacaaatatttcggtcgaggtaaatctcgatggaaaaggaaagtataaaataaagaccaaaataggtttcctagatcatatgttagaacaacttgctaagcactctctcattgacatgaagataagtgctaaaggagacacacatatagaccttcatcatactactgaagatacaggtatagctatcggtgaagctataaaaaaagcagctggaaaccgaaaaggaattaaaagatatgcgactacaaatgtaccgatggatgaaactttaactcgtgtttctttggatatatcaaatagaccttatctgatctggaatgtagatttgaaagttgaaaagttaggtgagatggatactgaactttttaaagaatggttccaagcctttgcacaatctgctggtataacactgcatgttgagaatatttatggtgaaaacagtcaccataaaattgagtcttgttttaaagccttagcaagatctttaaaagaagcgcttgaaattgataaaagaattaaaaattcaataccatctactaagggcactatttaaa

SEQ ID NO: 280225 - DNA, 405 bp, Unknown
  Bacterial polypeptide expressing nucleotide sequence isolated from the Sargasso Sea
tatgaacagaaaagcaaaaattactcggaaaactaaagaaacaagtatatctgttactgtaaatttagatggtaaaggaaagtataaaattaaaactggaataggctttttagatcacatgcttgaacaattatccaaacactctttgatagacttagatgtaaaagctaaaggcgataaacatgttgatctacaccacacgacagaagacacgggtattgctattggtgaggctattaaaaaagctgctgggaacagaaagggaatcacaagatacgcatcaactatgataccaatggatgagacacttagccgtgtctcaattgatgtatctaatagaccttatctaatttggaaagtagatttgccagttgagaaacttggtgagatggacacagaattatc

SEQ ID NO: 280226 - DNA, 559 bp, Unknown
  Bacterial polypeptide expressing nucleotide sequence isolated from the Sargasso Sea
atggctagaaaaggaaaagtatctcgaaaaacaaaagaaaccagcatcaatgtagaattaaacatcgatggcaaaggtaagtaccaaattgacactggcataggctttctagatcatatgcttgaacagttatcaaaacattctttaattgatttaaaagttaaagcaaaaggagatacacatatcgatcttcaccacacaacagaggatactggtattgctataggtgaagctttaaaaaaagctgctaaaaaatttgtaggaataaaaagatatgctcatagagttatcccaatggatgaaacattaactagagttgctattgatgtttcaaatagaccttatttaatttggaaagtaaaattaaaagtcgaaaaacttggtgagatggatacagaactttttaaagaatggttccaagccttctctcaatctgcaggtattactatgcacgtagaaaatatttatggtgataatagccaccacataattgagtcttgttacaaaggtctagcaagatcattaagagatgctttagagatggatccacagaaataaa

SEQ ID NO: 280227 - DNA, 592 bp, Unknown
  Bacterial polypeptide expressing nucleotide sequence isolated from the Sargasso Sea
tatgaaacgtaaagccaaaataagtagaaaaacaaaagagactaacatcagtattgatttaaacattgatggtaagggtaagtacaaagttgacacaggcataggatttttagatcacatgcttgagcaattatcaaaacactcttcaatggatatgaatattaaagctaaaggagatacgcacattgatcttcaccacacaactgaagatactggaattgcaattggtgaatgtttgaaaaaagcatctaaaaaatttgttggtataaaaagatacgctcatgcaatgataccaatggatgaaacattaactagagttgcaattgatgtttcaaacagaccttatttaatttggaaagtaaaattgaaagtagaaaaattaggtgagatggatacagaattatttaaagagtggtttcaagctttttcgcaggctgcaggaattactttgcacgttgaaaatatttatggagataatagtcatcacataatcgagtcttgttttaaaggattagcaagatctttacgtgctgctttagaaatggatccaagaaataaaactacaataccttctacaaaaggttctttataa

SEQ ID NO: 280228 - DNA, 592 bp, Unknown
  Bacterial polypeptide expressing nucleotide sequence isolated from the Sargasso Sea
tatgaagcgaaaagcagagataagtagaaaaactaaagagaccaaaatagatgtagcattaaatatcgatggcaagggtaaatttagcatagatactggaattggttttttagatcatatgttagaacaattatcaaaacactcatctattgatttaaaagttaaagcaaaaggtgatactcacattgatcttcatcacactacagaggatacaggtattgcaattggagaatgtttaaagaaagcttcaaaaaaatttgttggtataaagagatatgcccatgcaatgataccaatggatgagacattaactagagtggccttagatatttcaaatagaccttatttaatttggaaagttgacctaaaagttgaaaaacttggagagatggagacagaactgtttaaagaatggtttcaggcattttcacaagcagctggaattacgttgcacatcgaaaatttatatggagacaatagtcaccataaagtagagtcttgctttaaaggtttagcaagatcacttagaagtgcacttgaaattgattcacgaaacaaggacgtaataccttctactaaaggttctttataa

SEQ ID NO: 280229 - DNA, 559 bp, Unknown
  Bacterial polypeptide expressing nucleotide sequence isolated from the Sargasso Sea
tatgcctagaaaaggaaaagtatctcgtaaaacaaaagaaaccagcatcagtgttgaagttaacattgatggtaagggtcagtacaaaattgacactgggattggttttttggatcatatgttggagcaattatcaaagcactctctaattgatttaaaagttaaagctaaaggagatacacatatcgatcttcatcatactactgaagatacaggtattgcaattggtgaggcattaaaaaaagctgcaaaaaaatttgttggtatcaaacgttatgctcatagagttattccaatggacgaaactttaactagagtagcaattgatgtgtcaaacagaccttatttaatttggaaagtaaaattgaaagttgagaaacttggagaaatggatactgaattattcaaagaatggttccaagctttttcacaatctgcaggtattactttacacgttgaaaatatttatggagataacagtcaccacattattgagtcttgttataaaggtttagcaagatctttaagagatgctttagagatggatcctagaaataaa

SEQ ID NO: 280230 - DNA, 400 bp, Unknown
  Bacterial polypeptide expressing nucleotide sequence isolated from the Sargasso Sea
atgtctagaaaaggaaaaatatcccgaaaaactaaagaaactagtatcagtgttgaagttaatattgatggtaaagggaaataccaaattgacactggaataggttttttagatcacatgcttgaacaattatctaagcattctttaattgatttaaaagttaaagcaaaaggagatacacacatagatcttcaccacacaactgaagatacaggcattgcagttggtgaagctctaaaaaaagctgctaaaaaatttgttgggataaagcgttatgctcacagacttattccaatggacgaaactttaactagagttgcaatcgatgtttccaacagaccttatttgatctggaaagttaagttaaaagtagaaaaacttggggagatggataccgaac

SEQ ID NO: 280231 - DNA, 424 bp, Unknown
  Bacterial polypeptide expressing nucleotide sequence isolated from the Sargasso Sea
tatggcaagaaaagcaaaaattagtagaaaaacaaaagaaactagcatttccgtttccgtaaatttagacggtaaaggtaaatataaaattaaaactggcataggttttctagaccacatgttagaacagttatccaagcactcattgatagatttagaagtaaatgctaaaggcgacacacacattgatttacaccacacaactgaggatacaggtattgctattggtgaagctattaaaaaagccgccggaaatcgaaaagggataaaaagatacgcttcaactatgataccaatggatgaaacattaagtagagtttctatcgatgtatccaaccgtccttatttaatatggaaagtcaatttagcagtagaaaaattaggtgaaatggatacagaattatttaaagaatggttccaagcc

SEQ ID NO: 280232 - DNA, 538 bp, Unknown
  Bacterial polypeptide expressing nucleotide sequence isolated from the Sargasso Sea
atgaaacgtaaagccaaaataagcagaaaaacaaaagagaccaacatcagcgttgatttaaatattgatggtaagggtaagtacaaagttgacacaggtataggatttcttgatcacatgcttgagcaattatctaaacactcttcgatggatatgaatattaaagcaaaaggtgatacgcatattgatcttcaccacacaactgaagatacgggaattgcaattggtgaatgtttaaaaaaagcatctaaaaagtttgtcggtattaaaagatatgctcatgcaatgataccaatggatgaaacattaaccagagttgcaattgatgtttcaaacagaccctatctaatttggaaagtaaaattgaaagtagaaaaattaggtgagatggatacagaactatttaaggaatggttccaagccttttcacaagctgcaggaattactttacatgttgaaaatatttatggcgataacagccaccacataatagagtcttgctttaaaggattagcaagatcattacgtgctgcttgaa

SEQ ID NO: 280233 - DNA, 410 bp, Unknown
  Bacterial polypeptide expressing nucleotide sequence isolated from the Sargasso Sea
tatgaagcgaaaagcagaaattaccagaaaaactaaggaaaccagaatcgatgtagcaataaatatcgatggcaaaggaaagttcaaaatagacactggtattggttttttagaccacatgttagaacaattatcaaaacactcttcaattgatttaaatgtaaaagccaaaggagatacacatattgatcttcaccatacaactgaagatacagggattgcaattggcgaatgtttaaaaaaagcatcaaaaaaattcgtaggtataaaaagatatgctcatgcaatgattccaatggatgaaactttaacaagagttgccttagatgtttcaaacagaccctacttaatttggaaggtagatttaaaggtagaaaagctaggtgaaatggataccgaattatttaaag

SEQ ID NO: 280234 - DNA, 379 bp, Unknown
  Bacterial polypeptide expressing nucleotide sequence isolated from the Sargasso Sea
tatgaagcgaaaagctagtataaccagaaaaacaaaagaaactaaaattgatgttgatatcaatattgatggaaaaggaaaatataagattaaaacaggtattggatttttagatcatatgttagagcaactctctaaacattcttctattgatataaaattaaaggctaaaggtgatacccatattgatttacatcacaccacagaagatactggaattgctattggagaatgtttaaaaaaagcatcaaaaaattttgtaggtattaaaagatatgctcatgctttattaccaatggatgaaacgttaactagagttgcgattgatgtatctaatagaccttatcttatttggaatgtaaaattaaaagtagaaaaa

SEQ ID NO: 280235 - DNA, 592 bp, Unknown
  Bacterial polypeptide expressing nucleotide sequence isolated from the Sargasso Sea
tatgaagcgaaaagcagagataagtcgaaaaactaaggaaaccaaaatcgatgtagctataaatatcgatggtaaaggcaagtttaaaatagacactggtattggttttttggaccacatgttagaacagttatctaaacactcatcaattgatttaaaagtaaaagctaaaggtgatacacatattgatcttcaccacacaaccgaagatacaggcattgcaattggtgaatgtttaaaaaaagcatcaaaaaaatttgtaggtataaaaagatatgctcacgcaatgatcccgatggacgaaactttaacaagagttgctttagatgtttcaaatagaccttacttaatttggaaagttgatttaaaggtagaaaagttaggcgaaatggatactgaattatttaaagagtggttccaagcattttcacaagcagcaggaattacattacacatagaaaatttatatggtgacaatagtcatcacaaagtggagtcttgttttaaaggattagcaagatctttaagaagtgcacttgaaattgatccacgaaataagaacgtaataccatcgactaagggttctttataa

SEQ ID NO: 280236 - DNA, 592 bp, Unknown
  Bacterial polypeptide expressing nucleotide sequence isolated from the Sargasso Sea
atgaaacgtaaagccaaaataagtagaaaaacaaaagagactaacatcagtgttgatttaaacattgatggtaagggtaagtacaaagttgacacaggcataggatttttagatcacatgcttgaacaattatcaaaacactcttcaatggatatgaatattaaagctaaaggtgatacgcatattgatcttcaccacacaactgaagatacaggaattgcaattggtgaatgtttaaaaaaagcatctaaaaaatttgttggtattaaaagatatgctcatgcaatgataccaatggatgaaacattaaccagagttgcaatcgacgtatcaaacagaccatatttaatttggaaagtaaaattgaaagtagaaaaattaggtgagatggatacagaattatttaaagaatggttccaagctttttcacaagctgcaggaattactttacacattgaaaatatctatggtgataacagccaccacataatcgaatcttgctttaaaggattagctagatcactacgagctgctttagaaatggatccaagaaataaaactacaataccttctacaaaaggttcattataaa

SEQ ID NO: 280237 - DNA, 592 bp, Unknown
  Bacterial polypeptide expressing nucleotide sequence isolated from the Sargasso Sea
atgaagaggaaagcaaaaataagcaggaaaactaaagagaccagtatcagtgttgatttaaacattgatggtaaaggtaagtataaagttgacacaggcataggatttttaaatcatatgcttgaacaattatcaaagcactcttctatggatatgaatattaaagccaaaggagatactcatattgatttgcatcatacgacagaagacacaggtatagctattggtgagtgtttaaaaaaggcttcaaagaaatttgtaggaattaaaagatacgctcatgcaatgataccaatggacgaaacattaactcgtgtcgccattgatgtttcaaacagaccatatttaatttggaatgttaaacttaaagtagagaagcttggcgaaatggatacagaactattcaaagaatggttccaagcattttcacaagcagctggaattactttacacgttgaaaatatttatggtgataatagccaccacattatagaatcttgttttaaaggtttggcaagatcattgagagttgcattggagatggatccgaggaataaaaatacaattccttctacaaaaggttctttataag

SEQ ID NO: 280238 - DNA, 526 bp, Unknown
  Bacterial polypeptide expressing nucleotide sequence isolated from the Sargasso Sea
tgatggaaagggtaaatatcaaattgacactggtataggttttttagaccacatgctagaacaactatcaaaacattctttaattgatttaaaaattaaagcaaaaggagatactcatattgatcttcatcatactacagaagatacaggaatcgcaattggagaagctttaaaaaaagcagcaaaaaaatttgtaggaattaaaagatatgctcatacagttattccaatggatgaaacattaacgagggttgcaatagatgtttcaaacagaccttatttaatttggaaagtaaaattaaaagttgagaaacttggagaaatggacacagaattatttaaagaatggttccaagcattttcccaatctgctggtattacaatgcacgtagaaaatatttatggtgataatagccatcacattattgagtcttgttataaagcattagcaagatcattaagagctgcattagagatggatccaagaaacaaaaaaagtattccatctactaaaggctcattataa

SEQ ID NO: 280239 - DNA, 592 bp, Unknown
  Bacterial polypeptide expressing nucleotide sequence isolated from the Sargasso Sea
atgataagaaaagccaaaattttaagaaaaactaaggaaacaaatatatctgtagaagttaatttagatggtaaaggcaaatatcaagtaaagaccaaaataggttttcttgatcatatgcttgagcagctctcaaagcattcattgattgatcttaaaattgttgcaaagggtgatactcatattgatttacaccatactactgaggactccggtatagctattggtgaagcaattaaaaaagccgcaggaaatcttaaagggattagacgttatgcaagcaatacaattccaatggacgaaactttgacaagagtttctttagatatatccaataggccctatttgatttggagagtagatttaaaagttgagaaacttggtgaaatggacactgagctttttagagagtggtttcaggctttctctcagtcagcaggtattactcttcacgttgaaaacttgtatggagaaaatagtcatcataagattgagtcttgctttaaagccttagccagatctttgaaagatgcattcgaattagataaaagagttaaaaatattctgccatcaactaaaggaaagttataaa

SEQ ID NO: 280240 - DNA, 313 bp, Unknown
  Bacterial polypeptide expressing nucleotide sequence isolated from the Sargasso Sea
tatggcaagaaaagctaaaataaataggaagaccaaagaaaccaacataattgttgaagcaaatttagatggtattggatcttataaaatagataccaaaataggttttttaaatcacatgctagaacaattatctaaacattctttaattgatctaaaaatatcagctaggggtgatacacatattgatttacatcacactacagaagatacaggaattgccacaggagaatgtataaaaaaagcgctaggttcgtctaaaggaataaaaagatatgcacacgcattaattcccatggatgaaacattaact

SEQ ID NO: 280241 - DNA, 345 bp, Unknown
  Bacterial polypeptide expressing nucleotide sequence isolated from the Sargasso Sea
tatgaagaggaaagcaaaaataagtagaaaaactaaggagactagtattagtgttgatttaaatattgatggtaagggtaagtacaaagttgacacaggcataggatttttagatcatatgcttgaacaactatcaaaacattcttcaatggatatgaatattaaagctaaaggagatacgcatatagatctacatcatactacggaggacacgggtatagctattggcgagtgtttaaaaaaagcgtcaaagaaatttataggaattaaaagatatgctcatgcaatgatacctatggatgaaacattaacacgtgtagcaattgatgtttcaaatagacctta

SEQ ID NO: 280242 - DNA, 575 bp, Unknown
  Bacterial polypeptide expressing nucleotide sequence isolated from the Sargasso Sea
aatgagaaccgcatcaatagaaagaaacacaaaagaaacaaaaatactttgtaaaataaatgttgacggcattggagtatcaaaaatttcatccggaataggtttttttgatcatatgcttgaaattttttctcaccacagcctaattgatatagagctaagtgtggacggagatactcatgtagattttcatcatactgttgaggatactgcttacgctttgtctgaagccttaaacaaagccataggagataaaaaaggaattaataggtatggtttttattatattactatggatgaaagcttatcacgcacagttattgatttttctgggagaccagaacttatttggaaggtccagctcggtttagagaaaattggagaaatggacactgagctttttaaagagttttttaaagcattttctaacaatgctaaatgcaatcttcatattgaaaatttttatggaactaacaaccaccacataattgagtcatgcttcaagtcatttgcaagaagtattagattagcacttacaattgatgaaagaacaaaaaatattattccatcatcaa

SEQ ID NO: 280243 - DNA, 487 bp, Unknown
  Bacterial polypeptide expressing nucleotide sequence isolated from the Sargasso Sea
tatggctagaaaaggaaaagtatctcgtaaaacaaaagaaactagcatcaatgttgaggtaaatattgatggtaagggaaaataccaaatcgacacgggtataggctttttagatcacatgcttgaacaattatcgaagcattctttaattgacttaaaagtgaaagccaaaggagatactcacattgatctccaccacacaactgaggatacaggtattgcaatcggagaggctttaaaaaaagctgccaaaaaatttgtaggtattaaaagatatgcacatgcaatgataccaatggatgaaacattatctagggtagcagttgatgtttcaaacagaccttacttaatttggaaagtaaaattaaaggttgagaaacttggtgagatggatacagaattatttaaagaatggttccaggcattttctcaatcagcgggtattactttacatattgaaaatatttatggtgataacagtcaccat

SEQ ID NO: 280244 - DNA, 589 bp, Unknown
  Bacterial polypeptide expressing nucleotide sequence isolated from the Sargasso Sea
atgagaaaatcaaaaattaatagaaagacgagtgaaacaagtatttcagttgaaataaatcttgatggaaaaggtaaatttaagatttcaactggaataggttttcttgatcatatgttagaacaactttctaaacacagtctcatagacattaatttaaaagcaaaaggagatcttaaggttgatgatcaccatacaacggaagatacagggattgctttaggagaagcagtttctaaagctttaggaaataaaatatcaattaaacgttttggaacggcatttatacctatggatgaaaccttaactagagttagtttggatttatccaatagaccttatttaatttggaaagtaaagtttacaaataaagaagtaggaaaaatggacagtgaattatttaaagaatggtttcaggctttttctcaagctgcaggcctaaccttacatattgaaaatttatatggcgataataatcatcacataattgaaacatgttataaaggacttgctagatctttaagagatgcaatatctgttgatcctagagaaaaaggaagaattccttcaacaaaaggtaaattataaa

SEQ ID NO: 280245 - DNA, 592 bp, Unknown
  Bacterial polypeptide expressing nucleotide sequence isolated from the Sargasso Sea
atgaagcgcaaaggtaaaataagtagaaaaacgaaagagaccagcatcagtgttgatctaaatattgatggtaaaggaaaatataagatagatactggaataggttttcttaaccacatgttagaacagttatcgaagcattcttcgatagacatgaatattaaagctaaaggtgatacacatattgatttacatcacactaccgaagatacaggtattgcaataggagaagctttaaaaaaagcatctaaaaaatttgttggaataaaaagatatgcacatgcaatgattcctatggatgaaacattaaccagagtcgctatagacgtatcaaaccgaccttatttaatttggaaggttaagctcaaagttgaaaagcttggagagatggatacagagctttttaaggaatggtttcaggccttttctcaagctgcaggaattactttacacgttgaaaatatttacggtgataatagtcatcatatcatagagtcttgttttaaaggattagcaagatctttaagaaccgctttagaaatggacccaaggaataaaaaatcaattccttcaaccaaaggttccttataag

SEQ ID NO: 280246 - DNA, 592 bp, Unknown
  Bacterial polypeptide expressing nucleotide sequence isolated from the Sargasso Sea
atgaaacgtaaagccaaaataagtagaaaaacaaaagagaccaacatcagtgttgatttaaatattgatggtaagggtaagtacaaagttgacacaggtattggatttttagatcacatgcttgagcaattatcgaaacactcttcgatggacatgaatattaaagctaagggtgatacgcacattgatctccaccacacaacagaagatacgggaattgcgattggtgaatgtttaaaaaaagcgtcaaaaaaatttgttggaattaaaagatatgctcacgcgatgataccaatggatgaaacattaactagagttgcaattgatgtttcaaatagaccttatttaatttggaaagtaaaattgaaagtagaaaaattaggtgagatggatacagaattatttaaagaatggttccaagctttttcacaagctgcaggtatcactttacacgttgaaaatatttacggcgataacagtcaccacataatagagtcttgttttaaaggattagcacgatcattaagagctgctttagaaatggatccaagaaataaaactacaataccttctacaaaaggttctttataaa

SEQ ID NO: 280247 - DNA, 577 bp, Unknown
  Bacterial polypeptide expressing nucleotide sequence isolated from the Sargasso Sea
ctataacaagaaaaacaaaagagacaaaaattttgacgttgagttaaatatagacggcaaaggtcaatacaaaatagatacaggtataggtttccttgaccatatgcttgaacaactttctaagcattcatcgattgatttaaaggtaaaagcaaaaggagatacacacatagatctccatcacacaacagaagatactggaattgcaataggtgaatgtcttaaaaaagcgtcaaaaaaattcattggaattaaaagatatgctcactcaatgatacctatggatgaaactttaactagagttgcattagacgtttcaaacagaccgtatttaatttggaaagtagatttaaaagtggaaaaacttggggaaatggatacggaactattcaaagaatggtttcaagctttttctcaatctgcaggaattacattgcatattgagaatttgtatggagacaatagccaccacaaagtagagtcgtgttttaagggtttagcaagatcgcttagagctgcattagaaatagatccaaaaaataagaaagtcgtgccatctactaagggctctttataa

SEQ ID NO: 280248 - DNA, 592 bp, Unknown
  Bacterial polypeptide expressing nucleotide sequence isolated from the Sargasso Sea
atgagtagaaaagcaaaaattactagaaaaactaaagagactagtatttctgtcgcggtcaatttagatggaaaaggaaagtataaaattaaaactggaataggttttttagatcacatgttggagcaattatcaaagcactctcttatagacttagaagttaaagcaaaaggtgacacacatatagatttgcaccacactaccgaagatacaggtatagcaattggtgaagctattaaaaaagcagcaggtaatagaaaaggtataacaagatacgcatccacaatgattcctatggatgaaactctaagccgagtttcaatagatgtatcaaatagaccttatttaatctggaaagtaaatctgccggttgagaaacttggggagatggaaacagaattatttaaagagtggtttcaagctttttcacaatcagctggagttaccttacacatagaaaatatttacggtgataatagtcaccacaagattgagtcgtgttacaaaggtttagctagatcattaaaagatgctctagcgattgataatagaattaaaaactctataccttcgacaaaaggctctatttaaa

SEQ ID NO: 280249 - DNA, 592 bp, Unknown
  Bacterial polypeptide expressing nucleotide sequence isolated from the Sargasso Sea
atggctagaaaaggaaaaatatctcgaaaaactaaagaaaccagtatcagtgttgaggtaaatattgatggtaaaggacaataccaaattgatactggaataggttttttggaccatatgcttgagcaattatcaaagcattcattaatagatctaaaagtaaaagctaaaggagacacacatatagatcttcaccacaccactgaagatacaggtattgcaattggtgaagctttaaaaaaagctgctaaaaaatttgttgggattaaacgttatgctcatcgacttattcctatggatgaaacattaactagagttgcaattgatgtttcaaacagaccttatttgatttggaaagtaaaattaaaagtagaaaaacttggggagatggataccgaactatttaaagaatggtttcaagccttttctcaatctgctggaattacattacacgttgaaaatatttatggtgacaatagccaccacattatcgagtcttgttacaaaggtttagcaagatctttaagagatgctttagaaatggaccctagaagtaaaaaaagcattccatcaactaaaggctcattataag

SEQ ID NO: 280250 - DNA, 549 bp, Unknown
  Bacterial polypeptide expressing nucleotide sequence isolated from the Sargasso Sea
tatgagtagaaaagctaaaattttaagaaaaacaaaagaaacaaatatatctgtagaggtaaaccttgacggtaaaggtaagtaccaaattaagaccaaaataggttttttagatcatatgttggagcaactttctaaacattctttgatagacatgaaagttattgccaagggtgatactcacattgacttacatcacaccactgaagatagtggtattgccataggtgaggctataaaaaaggcagcaggaaatcttaaaggtattagacgtttttcaagcataactattcctatggatgaaactttaacaagagtttctatggatatttctaatagaccgtacttgatttggaaggtggatttaaaagtcgagaagttaggagaaatggataccgaattatttaaagaatggtttcaagctttttctcaagctgcaggtattactttacatattgagaatttatacggagacaatagtcaccacaaaattgagtcttgttttaaagccttggctagatctcttagagaggctttacaaatagataa

SEQ ID NO: 280251 - DNA, 379 bp, Unknown
  Bacterial polypeptide expressing nucleotide sequence isolated from the Sargasso Sea
aatgcgtgaatttacatttaaaagagatacaaaagaaacaaaaatatcaataaaagttaatcttgatggttctggagtaaataaaattgacacagggattgctttttttgatcatatgcttcaacaaataagtactcatagtttgattgatatagagttaaaatgtgatggtgacctaaaagttgatatgcaccatactgttgaagatgttggcattgctttaggtgagagtataaaaaacgcacttggtgataaaaaaggcataaaacgatttgcatactcttatgtttcttttgatgaaacattaacaagatcagttttagatttgtgtaaccgcccctattttatttggaatgtaaaaacatctttagaaaaagtc

SEQ ID NO: 280252 - DNA, 592 bp, Unknown
  Bacterial polypeptide expressing nucleotide sequence isolated from the Sargasso Sea
tatgagtagaaaagcaaaaataactagaaaaacaaaagagaccagtatttctgtcgcggtaaatctagacggcaaaggaaagtataaaattaaaactggaataggttttttagatcatatgttggaacaattatcaaaacactctctaatagacttggaagtgaaagcaaaaggtgacacacatatagatttacaccacactactgaggatacaggaatagcaattggtgaagctattaaaaaagcagcaggtaatcgaaaaggaattacgcgatatgcatctacaatgattcctatggatgaaactttaagcagagtttctatagatgtatcaaatagaccttatttaatctggaaagtaaatctgccggttgaaaaacttggtgagatggacacagaattgtttaaagagtggttccaagctttttcacaatcagctggagttactttacacatagaaaatatttacggtgaaaatagtcaccacaagattgagtcgtgttacaaaggtttagctagatcattaaaagatgctttagcgattgataaaagaattaaaaactcaataccttcgacaaaagggtctatttaa

SEQ ID NO: 280253 - DNA, 592 bp, Unknown
  Bacterial polypeptide expressing nucleotide sequence isolated from the Sargasso Sea
atggctagaaaaggaaaaatatctcgaaaaactaaagaaaccaatatcagtgttgaggtaaatattgatggtaaaggaaaataccaaattgatactggaataggttttttggaccatatgcttgagcaattatcaaagcattcattaatagatctaaaagtaaaagctaaaggagatacacacatagatcttcaccacacaaccgaagatacaggtattgcaattggtgaagctttaaaaaaagctgctaaaaaatttgttgggattaaacgttatgctcacagacttattcctatggatgaaacattaactagagttgcaattgatgtttcaaacagaccttatttgatttggaaagtaaaattaaaagtagaaaaacttggggagatggataccgaactatttaaagaatggtttcaagccttttctcaatctgctggaattacattacacgttgaaaatatttatggtgacaatagccaccacattattgagtcttgttacaaaggtttagcaagatctttaagagatgctttagagatggaccctagaagtaaaaaaagcattccatctaccaaaggctcattataag

SEQ ID NO: 280254 - DNA, 592 bp, Unknown
  Bacterial polypeptide expressing nucleotide sequence isolated from the Sargasso Sea
tatggctagaaaaggaaaagtatcccgaaaaacaaaagaaaccaatatcaatgttgaagtaaatattgacggaaaaggtaagtaccaaattgaaaccggcataggttttctagaccacatgcttgaacaattatcaaagcattctttaatagatttaaaagttaaagctaaaggggatactcatattgatcttcaccacacaactgaagacacaggtattgcaattggagaagctttaaaaaaagctgctaaaaaatttgttggaataaaaagatatgcgcacacggttattccaatggatgaaacattaacaagagttgcgatcgatgtttcgaacagaccttatttaatttggaaagtaaaattaaaagttgagaaacttggagaaatggatacagaactttttaaagaatggttccaagctttttctcaatccgcaggtattacaatgcacgtagaaaatatttatggtgataatagccatcatataattgaatcttgttataaagcattagcaagatcgttaagagttgcattagagatggatccaagaaataagaaaagtattccatcaactaaaggctcattataa

SEQ ID NO: 280255 - DNA, 592 bp, Unknown
  Bacterial polypeptide expressing nucleotide sequence isolated from the Sargasso Sea
tatgagtagaaaagcaaaaattacaagaaaaacaaaagagactagtatttctgtcgcggttaatctagacggaaaaggaaagtataaaattaaaactggaataggttttttagaccacatgttggagcaactatcaaagcactctcttatagacttagatgttaaagcaaaaggtgacacgcatatagatttacaccacactactgaagatactggtatagcaattggtgaagctattaaaaaagcagcaggcaatcgaaaaggaattacacgatatgcatctacaatgatacctatggatgaaactctaagccgagtttcaatagatgtatcgaatagaccttatttaatctggaaagtaaatctaccggttgagaaacttggcgagatggacacagaattattcaaagagtggtttcaagcattttcacaatcagctggagttactttacacatagaaaatatttacggtgaaaatagtcaccacaagattgagtcgtgttacaaaggtttagctagatcattaaaagatgctttagcgattgataaaagaattaaaaactcaataccttcgacaaaaggctctatttaa

SEQ ID NO: 280256 - DNA, 563 bp, Unknown
  Bacterial polypeptide expressing nucleotide sequence isolated from the Sargasso Sea
tatgagaacagcagagtataaaagagacaccaaagaaacctccatttctgtcgatattaatatcgacggaacaggtaagtacgacattaagactggcataggatttcttgaccacatgcttgaacaactatcaaagcactcactaattgatatgaagataaaagcaaccggagatattcacattgactatcaccatacgactgaggatacaggcattgcaattggtgaatgtttatcaaaagcattaggtaatcgccaaggtattacaagatatgctcactcatacattcccatggatgagacattatcaagagttgcacttgatctatcaaatagaccttatttaatttggaaagtacaattcagtgctccaaagataacttcttctcaaggtgattttgatactgagttatttaaagaatggtttcaagcttttgcacaagcaagtgggacaacattgcatgtagaaaatatttacggagaaaataaccatcatataatagaatcttgctttaaggctttagcaagaagtttaagaaatgctgttgcaattaataagcgag

SEQ ID NO: 280257 - DNA, 466 bp, Unknown
  Bacterial polypeptide expressing nucleotide sequence isolated from the Sargasso Sea
atggctagaaaaggaaaagtatctcgaaaaacaaaagaaactagtattaatgttgaagtaaatattgacggcaagggtaagtaccaaattgacaccggtataggtttcttagatcacatgcttgagcagttatcaaagcattcattgattgatttaaaagttaaagctaaaggggatacacacattgatcttcaccacacaacagaagatactggaattgctattggagaggctctaaaaaaagctgctaaaaaatttgtagggataaaaagatacgctcatacagttatcccaatggatgaaacattaacaagggttgccatagatgtttcaaacagaccttatttgatttggaaggtaaaattgaaagttgaaaaacttggagaaatggatactgaattatttaaagaatggttccaagctttctcccaatccgctggaattacaatgcatgttgaaaatattt

SEQ ID NO: 280258 - DNA, 469 bp, Unknown
  Bacterial polypeptide expressing nucleotide sequence isolated from the Sargasso Sea
tatgaagcgtaaaggcaaaattagtcgaaaaaccaaagagaccagcattaatgttgatttgaatattgatggaaaaggtaaatataaaattgatacgggcataggttttttaaatcacatgctagaacagttatctaaacattcctctattgacatgattattaaagctaaaggcgatactcatatagatcttcaccacactactgaagatactggtattgcgataggtgaggctctaaagaaagctttgaaaaaatctgttggtatcagaagatatgctcatgcaatgatacctatggatgagactttatcacgtgtagctcttgatatttctaatagaccgtacttgatttggaatgttaatcttaaagtagaaaaacttggtgaaatggatactgaactttttaaagaatggtttcaggcattttcacaagctgctggaattactttacacgttgagaatatttat

SEQ ID NO: 280259 - DNA, 571 bp, Unknown
  Bacterial polypeptide expressing nucleotide sequence isolated from the Sargasso Sea
gttcgaaaaactaatgaaaccgatataagtatacaattaaatatagatggtattggaaagtcagaaatagatacgggaatcagtttttttgatcatatgttagatcagttagcaaaacattctttaatggatttaaaaattaaagcgaaaggtgatatagatattgattatcatcatacagttgaagatgtaggaatatgcttaggtgaaacattaaagaggtgccttggagataaaaaaggaattaatagatatgcttcagttttattaccaatggatgatgcattagcacaagtagctgttgatttttctggacggccttatttattttgggaagtaaattttcctacctcaaaagtaggaaattttgatacggagttattttctgaatttttccaatcttttactatgaatgctggaattactttacacattaaaatggttcatgggattaacagtcatcatattggagaagcaatatttaaaggggttgctcaatcaattaaaactgctctttcaattgatccaagaaagcctagaataataccctctactaaaggatctttgtagt

SEQ ID NO: 280260 - DNA, 316 bp, Unknown
  Bacterial polypeptide expressing nucleotide sequence isolated from the Sargasso Sea
tatgaagagaaaagctaaaatcgcaagaaaaacaaaagaaacttcaattagtgttgagttaaatattgatggcaaaggtaaatataaaatagatactggaattggttttttaaatcatatgttagagcaattatcaaaacattcctctatagatatgaatgttaaggcaaaaggggacacccacatagacttacatcacacaactgaggatactggaatagctataggagaatgtttaaaaaaggcttcaaagaattttgttgggataaaaagatatgctcacgctcttttaccaatggatgagacacttactaga

SEQ ID NO: 280261 - DNA, 487 bp, Unknown
  Bacterial polypeptide expressing nucleotide sequence isolated from the Sargasso Sea
tatgaagaggaaagcaaaaataagaagaaaaactaaagaaaccaacatcaatgttgatttaaatattgatggaaaaggtaaatataaaatagaaactggaataggttttttaaatcatatgcttgagcaattatcaaagcattcatctatagatattaatcttaaagctaaaggtgatactcatattgatcttcatcatacaacagaagataccggcattgcaattggcgaatgtttaaaaaaagcatctaaaaaatttgttggaataaaaagatatgctcatgccatgataccaatggatgaaacattaacaagagttgcaatagatgtttcaaatagaccttatttaatttggaaagttaaattaaaagtagaaaaattaggtgagatggatactgaattattcaaagaatggtttcaagccttttcgcaagctgctggaattactttgcatgttgaaaatatttatggtgataacagccaccac

SEQ ID NO: 280262 - DNA, 352 bp, Unknown
  Bacterial polypeptide expressing nucleotide sequence isolated from the Sargasso Sea
catgcgcgaagcaaaagtcgccagaaaaacaaaggaaacggacatcgaggttttagtaaacatcgatgggaccggtgtgtacgacgtcgataccgggatcggcttcctcgatcatatgctcgagcagctgtcgcggcacagcctgatggatcttaccgtccgggccaagggcgatctgcacatcgactatcaccacaccaccgaggacaccggtatcgcgatcggcgaagcgatccaccaggcgatgggcgagcgccgcggtatcgtgcgctatgcatccgccaccattccgatggacgaaacgctgacgcgggcatcgattgacatttcggaacgtccgtacctgatctgg

SEQ ID NO: 280263 - DNA, 366 bp, Unknown
  Bacterial polypeptide expressing nucleotide sequence isolated from the Sargasso Sea
ctgggatactttttttagatcatatgattcatcaaatatccagtcacggtttatttgacttaaaaataaaggcaattggagatacccatattgatgatcatcatactaatgaagatattggtatcgcattaggcaaagcattttcaaaagccttgggagaaagaaaagggataaacagatttggacacttctttgcaccactagatgaagcattagttcaaatcaccttagactgttctggcagaccacatctatcttatgatcttcaattaaaagctcctaaaataggtaattatgataccgaactggtcagagaattttttatagcatttgttaataacagtcggcattactttgcatattaat

SEQ ID NO: 280264 - DNA, 436 bp, Unknown
  Bacterial polypeptide expressing nucleotide sequence isolated from the Sargasso Sea
aatgagagaagcaaaagtaaatagaggcacttcagaaactgaagtgaatgttgaattaaatctagatggaactggaaagactgatctttctacaggtttgccttttctagagcacatgcttgaccagattggtcgacatggcatgatcgacctaaaagttacagcaaaaggcgatttacatatcgatgatcaccacactatcgaagatataggtataactttaggcgaagctttaaataaggccgtaggagacaaaaaggggattaaaagatatggccattcttatgtgccacttgatgaggctctttctagagtagttttagacttctcaggaagacctggattacacatgaaagtagattttgttaaggatactgttggaggcatagacgtgaatatgtttgagcatttcttccagtctttatgtaatcatgct

SEQ ID NO: 280265 - DNA, 592 bp, Unknown
  Bacterial polypeptide expressing nucleotide sequence isolated from the Sargasso Sea
atgaagcgtaaagcaaaaataagtagaaagacaaaagaaaccaacatcaatgttgaacttaacatagatggaaaaggtaaatacaaagttgacacaggcataggatttttagatcacatgcttgaacaactatcaaagcattcttcaatggatatgaatattaaagccaagggtgatacacatattgatcttcatcacactacagaggatacaggtattgcaattggtgaatgtttaaaaaaagcatctaaaaagtttgttggtataaaaagatatgcacacgcaatgataccaatggatgaaacgcttactcgtgttgcaatcgatgtatcaaatagaccttacttgatttggaaagtgaaattaaaagttgagaagcttggagaaatggacacagagcttttcaaagagtggtttcaagctttttcacaatcagcaggaattactttacacgttgaaaatatttatggtgataacagtcaccacataatagagtcttgttttaaaggtttagcaagatctttaagagctgcactggaaatggattcaaggaacaaaactactattccttctaccaaaggctctttataaa

SEQ ID NO: 280266 - DNA, 592 bp, Unknown
  Bacterial polypeptide expressing nucleotide sequence isolated from the Sargasso Sea
tatggctagaaaaggaaaagtatctcgaaaaacaaaagaaacaagcattaatgttgaagttaatattgatggaaaaggaaagtatcaaattgacactggtataggttttttagatcacatgcttgagcagttatcaaagcattctttaatagatttaaaagttaaagcaaaaggagatactcatatcgatcttcaccacacaacagaggatacaggtattgcaataggtgaagctttaaaaaaagctgctaaaaaatttgtaggaataaaaagatatgcgcatacagttattccgatggatgaaacattaacaagggttgctatcgatgtttcaaacagaccttatttaatttggaaagtaaaattgaaagtcgagaagcttggtgaaatggatactgaattatttaaagaatggtttcaagcgttctctcaatctgctggtattacaatgcacgtagaaaatatttatggtgataatagtcatcacattattgagtcttgctataaagcattagcaagatcattaagggctgcattagagatggatccaagaaacaaaaagagtattccatccactaaaggctcattataa

SEQ ID NO: 280267 - DNA, 508 bp, Unknown
  Bacterial polypeptide expressing nucleotide sequence isolated from the Sargasso Sea
tatgaaacgtaaagccaaaataagtagaaaaacaaaagagactaacatcagtgttgatttaaatattgatggtaagggtaagtacaaagttgacacaggtataggttttttagatcacatgcttgagcaattatcaaaacactcatcaatggatatgaatattaaagctaaaggcgacacgcatatagatcttcatcacacaacagaagatacaggaattgcaattggtgaatgtttgaaaaaagcatctaaaaaatttgttggaattaaaagatatgctcatgcaatgataccgatggatgaaacattaactagagttgcaattgatgtatcaaacagaccttatttaatttggaaagtaaaacttaaagtagaaaaattaggtgagatggacacagaattatttaaagaatggttccaagctttttcgcaagcagcaggaattactttacatattgaaaatatctatggtgataacagtcaccacataatcgaatcttgctttaaa

SEQ ID NO: 280268 - DNA, 567 bp, Unknown
  Bacterial polypeptide expressing nucleotide sequence isolated from the Sargasso Sea
gaaaaaccaaagagacgaatatatctgtcgaagtaaacttagacggaaagggaaagtatcaaattaagactaaaataggttttttagatcacatgttggaacagctttcaaaacactctttaatagatatcaatattaatgcaaaaggagacacacatatagatctgcaccacacaacagaggataccggaattgctttaggtgaggccattaaaaaagccgcaggaaaaatgaaaggaattaaaaggtacgccaccacatatataccaatggatgaaactctaacacgtgtttccatggacatatcaaatagaccttacttgatttggaatgtggatctaaaagttgagaaacttggtgaaatggatactgaactctttaaagaatggttccaggctttttcacaatccgcaggcattacgttacatgtggaaaatatttatggtgataatagtcatcacaagattgaatcttgctttaaagccctagcgagatctcttaaagaggcattggagattgataaaagaattaaaaaatcaataccatctacaaagggctctatataaa

SEQ ID NO: 280269 - DNA, 526 bp, Unknown
  Bacterial polypeptide expressing nucleotide sequence isolated from the Sargasso Sea
atgaaaagaaaagcaaaaatagctagaaaaacaaaagaaaccaatatcagtgttgaccttaatattgatggcaaaggtaagtacaaagttgacacaggaataggtttcttagatcacatgctcgagcagttatccaaacactcatcaatggatttaactgttaaagctaaaggtgacacacacatcgatcttcaccacacaaccgaagatactggaattgctatcggagaatgcttaaagaaagcttcaaaaaaatttgtaggtattaaaagatatgctcacattttattaccgatggatgaaacactgacaagagttgcaatagatgtttcaaacagaccttacttgatttggaatgtaaaattaaaagttgaaaaacttggtgaaatggacactgaattatttaaagaatggttccaagcattctcgcaagctgcaggaattacattgcacgttgaaaatatttacggtgataatagtcaccacattatagagtcttgctataaaggactagccagaacttaag

SEQ ID NO: 280270 - DNA, 592 bp, Unknown
  Bacterial polypeptide expressing nucleotide sequence isolated from the Sargasso Sea
tatgagtagaaaagcaaaaattactaggaaaacaaaagagaccagtatttctgtcgcggttaatcttgacggaaaaggtaagtataaaattaaaactggaataggttttttagaccacatgttagagcaattatcaaagcactctcttatagacttagatgttaaagctaaaggtgacacgcatatagatttacatcacactactgaagacacaggtatagctattggtgaagctattaaaaaagcagcaggtaaccgaaaaggaattacaagatatgcatcaacaatgatacctatggatgaaactctaagccgagtttcaatagatgtatcgaatagaccttatttaatttggaaagtaaacctgccggttgagaaacttggcgagatggatacagaattattcaaagagtggtttcaagctttttcacaatcagctggagttactttacatatagaaaatatttacggtgaaaatagtcaccacaagattgagtcgtgttacaaaggtttagctagatcattaaaagatgctttagcgatagataagagaattaaaaactcaataccttcgacaaaaggctctatttaa

SEQ ID NO: 280271 - DNA, 430 bp, Unknown
  Bacterial polypeptide expressing nucleotide sequence isolated from the Sargasso Sea
atgaaacgtaaagccaaaataagtagaaaaacaaaagagactaacatcagtgttgatttaaacattgatggtaagggtaagtacaaagttgacacaggcataggatttttagatcacatgcttgagcaattatcaaaacactcttcaatggatatgaatattaaagctaaaggtgatacgcacattgatcttcaccacacaactgaagatacaggaattgcaattggtgaatgtttaaaaaaagcatcaaaaaagtttgttggtataaaaagatatgcacatgcgatgataccgatggatgaaacgttaactagagttgcaattgatgtttcaaaccgaccttatttaatttggaaagtaaaattgaaagtagaaaaattaggtgagatggacacggaactatttaaagaatggttccaggctttttcac

SEQ ID NO: 280272 - DNA, 574 bp, Unknown
  Bacterial polypeptide expressing nucleotide sequence isolated from the Sargasso Sea
atgagaagttcatctgtagaaagaaacacaaaagagactaaaatattttgcaaaactaatattgatggtaccggtgaatcaaaaatctccacgggaataggtttttttgatcacatgcttgaaattttttctcatcatagtttaatcgatgttgagcttaaagtagatggtgacatacacgttgattttcatcacactgttgaagactctgcctacgctttgtcagaagctatcaataagtctatcggagataaaagaggtataagcagatatggttttttttatatcaccatggacgaaagtttatctcgtacagttattgatttttctggaagaccggaacttgtttggaacgtagaacttggtttagaaaaaataggtgaaatggacacagagctttttaaagagttttttaaagcctttaccaataatgcaaaatgtaatttacacattgaaaacttttatggaacgaataatcaccatattatagagtcatgctttaagtcttttgcaagaagcattagatctgcactcgcaattgatgaaagagcaaaaaacagaatcccatcttcaa

SEQ ID NO: 280273 - DNA, 592 bp, Unknown
  Bacterial polypeptide expressing nucleotide sequence isolated from the Sargasso Sea
atgaagcgtaaagcaaaaataactagaaagaccaaagaaactagtatcaacgttgatttaaatattgatggtaaaggtaaatataaagttgatactggaataggttttttaaatcacatgcttgagcaattatcaaaacattcttcaatagatatgaatattaaagcaaaaggtgacacacatatcgatttgcatcacactacagaagatacaggtattgctattggagaatgtattaaaaaagcatcaaaaaaatttattggcattaaaagatacgctcatgcaatgataccaatggatgaaacattaacccgtgttgcaattgatgtttcaaatagaccctacctaatttggaaggtaaaacttaaagtagaaaaacttggagaaatggacacagaactatttaaagaatggtttcaagcgttttcacaatctgcaggaattacattacatgtagaaaatatttatggtgataacagccaccatataattgaatcttgctttaaaggactagcaagatctttaagaacagcattggaaatggacccgaggaataaaaaaacaattccttctacaaaaggttctttataag

SEQ ID NO: 280274 - DNA, 541 bp, Unknown
  Bacterial polypeptide expressing nucleotide sequence isolated from the Sargasso Sea
gtttctgtaaatttggatggaaaaggtaaatataaaatcaaaactggaataggttttctagaccacatgttagagcaactttctaagcactctttaatagatttggaagtaaatgcgaagggcgatacacatattgatttacaccacactacagaggatacaggcatagctatcggcgaagctataaagaaggctgctggtgcccgtaaaggtataagaagatatgcatcaacaatgataccaatggatgaaacattaagtagagtatcaattgatgtatctaaccgtccatatttaatctggaaagttaatttaaaagtagaaaaattaggtgaaatggatacagaattatttaaagaatggttccaggctttttcgcaatctgccggtgttactttacacgtagaaaatatttatggtgaaaatagtcatcacaaaattgagtcttgttacaaaggtttagctagatcattaaaagatgctctagaagttgataaaagaataaaaaactcaataccttcgactaagggttctatttaaa

SEQ ID NO: 280275 - DNA, 592 bp, Unknown
  Bacterial polypeptide expressing nucleotide sequence isolated from the Sargasso Sea
aatgactagaaaaggaaaagtatctagaaaaactaaagaaactagtattagcgttgatgttaatattgacggaaaaggaaagtaccaaattgacactggtataggtttcttagatcacatgcttgagcaattatcaaagcattctctaattgatctaaaagttaaagcaaaaggagatactcatattgaccttcatcacacaactgaagacacaggaattgctattggggaagctttgaaaaaagcagctaaaaaatttgtagggataaaaagatatgcacattcaataataccaatggatgaaacattgtctcgtgtagcggttgatgtttcaaacagaccttatctgatatggaaagtaaaactaaaggtagaaaagcttggagagatggatactgaattatttaaagagtggtttcaggcattttcacaatcagctggtattacattacatattgaaaatatttatggagataatagtcatcatattatcgaatcttgttataaaggcctcgcaagatctttaagagcagcactagagatggatcctagaaataagaagggcatcccatccactaaaggctcattataa

SEQ ID NO: 280276 - DNA, 460 bp, Unknown
  Bacterial polypeptide expressing nucleotide sequence isolated from the Sargasso Sea
tatggcaagaaaagctaagataaacagaaaaaccaaagagaccagtatagttgttgaggcaaatttggatgggaaggggtcttataaaatagacactaaaataggtttcctaaatcatatgcttgaacaagtatctaagcattctttaattgatctaaaagtattggcaaagggtgacacacacattgatttgcatcacactacagaagataccggtattgctattggagaatgtataaaaaaagctctcaaatcctcaaaaggaataaaaagatttgcccatgctttgatacctatggacgaaacattgactagagtttctatagatgtgtccaatagaccttatttaatttggaaagttaaattgaaagtagaaaaattaggagaaatggatactgagttattaaaagaatggtttcaagctttttcacaggcatctggtattacgcttcatattgaa

SEQ ID NO: 280277 - DNA, 484 bp, Unknown
  Bacterial polypeptide expressing nucleotide sequence isolated from the Sargasso Sea
atgagtagaaaagctaaaatattgagaaaaacaaaagaaacaaatatttccgttgaggtaaatttagatggaaaaggtaaatatcaaataaagaccaaaataggtttcttagatcatatgctagagcaacttgctaaacactctcttattgatatgaagataaacgcaaaaggagacacacatatagaccttcaccacactactgaagatacgggaatagctattggtgaagctataaaaaaagcagccgggaatcgaaaaggaataaaaagatatgcaacaacaaatattcctatggatgaaactttaacccgtgtttctttagatatttcaaatagaccttacttaatttggaatgtagatctaaaagttgaaaaactaggtgagatggatactgaactttttaaagaatggtttcaggcctttgcacaatctgcaggtataacactacacgttgaaaatatttatggagaaaaccagtcat

SEQ ID NO: 280278 - DNA, 593 bp, Unknown
  Bacterial polypeptide expressing nucleotide sequence isolated from the Sargasso Sea
tatgaaacgtaaagccaaaataagtagaaaaacaaaagagactaatattagcgttgatttaaatattgatggtaagggtaagtacaaagttgacacaggtataggatttttagatcacatgcttgaacaattatcgaaacactcttcgatggatatgaatattaaagctaaaggtgatacacatattgatcttcaccacacaactgaagatacaggaatcgcgattggtgaatgtttaaaaaaagcgtccaaaaagtttgttggtataaaaagatatgcacacgcaatgataccaatggatgaaacattaactagagttgcaattgatgtttcaaacagaccttatttaatttggaaagtaaaattaaaagttgaaaagttaggtgagatggatactgaattatttaaagaatggttccaagccttttcacaagctgcaggaattactttacacattgaaaatatttacggtgataacagtcaccacataatcgaatcttgctttaaaggattagcgagatcattacgagctgctttagaaatggatccaagaaataaaactacaataccttctacaaaaggttctttataaa

SEQ ID NO: 280279 - DNA, 467 bp, Unknown
  Bacterial polypeptide expressing nucleotide sequence isolated from the Sargasso Sea
cagtcatggtttgtttgatttaaaaataaaagcaattggagatactcatattgatgatcatcattcaaatgaagatgtaggaatcgcattaggcaaagcattttcaaaagccttgggagaaagaaaaggaataagcagatttggacatttctttgccccattagatgaagcattagttcaagtcactttagactgctctggtagacctcatctatcttatgatcttcaattaaaagctcctaaaatagggaattatgatactgaactagtaagagagttttttattgcctttgtaaataacagcggtattactctccatattaatcaaatacgaggaagtaattcacatcacatagttgaggcgtgctttaaagctttttcaagagcaatgcgaatggctaccgaaatagatccaagaagatctgattcaattccaagcagtaaaggagttttagaaaaacaataaa

SEQ ID NO: 280280 - DNA, 592 bp, Unknown
  Bacterial polypeptide expressing nucleotide sequence isolated from the Sargasso Sea
tatgaaacgtaaagccaaaataagtagaaaaacaaaagagaccaacatcagtgttgatttaaatattgatggtaagggtaagtataaagttgacacaggtataggttttttagatcacatgcttgaacaattatcaaaacactcttcgatggatatgaatattaaagctaaaggtgatacgcacattgatcttcaccacacaaccgaagatacgggaattgcaattggtgaatgtttaaaaaaagcatctaaaaaatttgttggcataaaaagatatgctcattcaatgataccaatggatgaaacattaactagagttgcaattgatgtttcaaacagaccttatttaatttggaaagtgaaattgaaagtagaaaaattaggtgagatggacacggaactatttaaagaatggtttcaagctttttcacaagctgcaggaattaccttgcacattgaaaacatttatggcgataacagtcaccacataattgagtcttgctttaaaggattagcaagatcattacgtgctgctttagaaatggatccaagaaataaaaccacaataccttctacaaaaggttctttataa

SEQ ID NO: 280281 - DNA, 592 bp, Unknown
  Bacterial polypeptide expressing nucleotide sequence isolated from the Sargasso Sea
atgaagaggaaagcaaaaataagtagaaaaactaaagagactagtattgctgttgatttaaatattgacggtaaaggtaagtataaaattgacacaggcataggatttttagatcatatgcttgagcaattatcaaagcactcttctatggatatgaatattaaagctaagggagatactcatattgacttacatcacaccacggaagatacagggatagctattggtgaatgtttgaaaaaagcttcaaagaaatttataggaattaaaagatatgctcatgcaatgataccaatggatgaaacattaacacgtgtagcaattgatgtttcaaacagaccttatttaatttggaaagttaagcttaaagtggaaaaacttggtgaaatggatacggaactattcaaagaatggtttcaagcattttctcaagctgcaggaattactttgcacgttgaaaatatttatggtgataacagccaccacataatcgagtcttgttttaaaggattagcaagatctttaagagttgcattggagatggatccaaggaataaaaatacaattccttctacaaaaggttctttataat

SEQ ID NO: 280282 - DNA, 592 bp, Unknown
  Bacterial polypeptide expressing nucleotide sequence isolated from the Sargasso Sea
atgaagaggaaagcaaaaataagtagaaaaaccaaagagacaagcatcagtgttgatttaaacattgatggaaaaggtaagtacaaagttgacacaggtataggatttttgaatcacatgcttgaacaactatccaagcactcttcgatggatatgaatatcaaagccaagggagatacccacattgatttgcatcacacaacagaagatacaggaattgctattggtgagtgtttaaaaaaagcttcaaaaaaatttgttggaattaaaagatacgctcatgcaatgattcctatggacgaaacattaactagagttgctatagatgtttcgaacaggccatatttaatttggaaagttaaccttaaagtagaaaaacttggtgaaatggatacagaactgttcaaagaatggttccaagctttttcgcaagcagcaggaattactttacatgttgaaaatatttatggtgataacagccatcacataatagaatcttgttttaaaggattagcaagatcattaagagctgcattagagatggatccacggaacaaaaatacaattccttctacaaaaggttctttataaa

SEQ ID NO: 280283 - DNA, 382 bp, Unknown
  Bacterial polypeptide expressing nucleotide sequence isolated from the Sargasso Sea
aatgagtaaacaaaatataaataaaaactctgatcagttagctcgattaggcgctgttactcgccaaactccagaaacagaaatattggttgaagtaaacttagatggaacaggtatttatgatattgaaacaggtattggatttctagatcatatgttggaacaactatcacgtcatagtttaatagatcttaaggttcgtgcctctggagatttacatattgattttcatcatactactgaagatagcggctatgctgttggtgaggctatcagtcaagctttaggtgagcggcgaggaattcgacgctatggttttgcattagttcctatggatgaaaccctcacaagagtcgctttagatgcgtctaaccgaccttat

SEQ ID NO: 280284 - DNA, 592 bp, Unknown
  Bacterial polypeptide expressing nucleotide sequence isolated from the Sargasso Sea
tatgagacgtaaaggtaaaattagtagaaaaactaaagagacaagtattagtgttgatttaaatattgacggcaaaggtaaatacaaaattgacacaggaataggttttttaaatcacatgcttgaacaattgtctaagcattcatcaatagatatgaatataaaagccaaaggcgatactcatattgatttacatcatacaactgaagatacaggcatagctattggcgaggctttaaaaaaagctctaaaaaaatctgttggaattagaagatatgctcatgcgatgatcccaatggatgaaactctatcacgtgtggctatcgatatttcaaatagaccttatttaatttggaaagttaatttaaaggttgagaaacttggagagatggacactgaactttttaaagaatggtttcaggcattttcacaagctgctggtattactttacatgttgaaaatatttatggagacaatagtcaccacattattgagtcttgctataaaggattagcaagatcattaagaaccgcattagaaatagatcctaggaatagaaaaacgatcccgtctactaagggttctttataa

SEQ ID NO: 280285 - DNA, 448 bp, Unknown
  Bacterial polypeptide expressing nucleotide sequence isolated from the Sargasso Sea
tatgaagcgaaaagcaaaaataagtagaaaaactaaagaaaccaacatcaatgttgatttaaatattgatggcaaaggtaaatataaaattgaaactggaattggttttttaaatcatatgcttgaacaattatctaagcactcttctatggatataagtcttaaagcaaaaggcgatactcatatagaccttcaccacacgactgaagatacaggaattgctattggtgaatgtttaaaaaaagcttctagaaagtttgttggtataaaaagatatgctcatgcattaattccaatggatgaaactttaactagagtcgcacttgatgtgtcgaatagaccttatttaatttggaaagttaagcttaaagttgaaaaacttggtgagatggatactgaattattcaaagaatggtttcaagcattttcacaagctgctggaattact

SEQ ID NO: 280286 - DNA, 511 bp, Unknown
  Bacterial polypeptide expressing nucleotide sequence isolated from the Sargasso Sea
tataaaatcgatactggtataggttttttagatcatatgcttgaacaactttcaaaacattcatctattgatttaaaggtaaaagcaaaaggcgatacgcacatagatcttcaccacacaacagaagataccggaattgctattggagaatgtcttaaaaaagcatcgaaaaaattcattggaattaaaaggtatgctcatgcaatgatacccatggatgaaactttaacaagagttgcgttagatgtttcaaacagaccttatttaatttggaaggtagatttaaaagtagagaaactcggagaaatggatacagaactatttaaagaatggtttcaagctttttcacaagctgcaggagttacactgcatattgagaatttgtatggtgacaacagtcaccacaaagtagagtcgtgtttcaaaggtttagcaagatcacttagagctgcactggaaatagatccaaaaaataaaaaggttgtgccatcaactaagggctctttataaa

SEQ ID NO: 280287 - DNA, 592 bp, Unknown
  Bacterial polypeptide expressing nucleotide sequence isolated from the Sargasso Sea
atgaaacgtaaagctaaaataagccgaaaaacaaaagagacatctattagtgttgaagtaaacattgatggaaaaggtaaatataaaattgatactggtattggatttttaaatcacatgcttgagcaattatccaaacactctttgattgatctaagtgttaaagcaaaaggtgatacacatattgatctacaccataccaccgaagatgtaggtattgctattggtgagtgtataaaaaaagcatctaataaattcaaagggattaaaagatatgcacacgcaatgataccaatggatgaaactctttccagagttgcaatagatgtatcaaatagaccatacttaatctggaaagtaaaattaaaagttgagaagttgggagagatggatactgaattatttaaagaatggtttcaggcattttcccagtcagctggtgtcacacttcacatggaaaatatatatggcgataacagtcaccatataattgagtcatgctttaaaggattagctagaactttaagaagcgctttagaaatagatccaagaacaaaaaacgttataccatctactaaaggctcattataaa

SEQ ID NO: 280288 - DNA, 589 bp, Unknown
  Bacterial polypeptide expressing nucleotide sequence isolated from the Sargasso Sea
tatgagaattgcagaaaccaacagacaaactaaagagaccaaaatcctgtgcaaagttaatttagatggaattggaaccaataacataaatactggaataggtttttttgaccatatgttggaaattttttctcaccatagcttggtagatcttgaactaagcgcttcaggcgatacacatgttgattttcatcatacagttgaagattcaggatatgcaattgctcaatcaattacaaaagccttaggtgaaaaaaaaggcatcagacgctttgggtttttttatactccaatggacgaatgcctttctaggtgcgtggtagatttttctggaaggcctgaactacaatggaaagttgatttagggttgaaaaaaattggcgaaatggatactgagctattccacgaattttttaaagcatttgtaaatgaatcaaagtgtaatttacatattgaaaacctatatggcgagaacaatcatcacataattgaatcatgcttcaaatcatttgctaaaagcattagggttgcaatagaaatagacagtagaatcaaaaatattattccttcctcaaaaggcacgctataa

SEQ ID NO: 280289 - DNA, 592 bp, Unknown
  Bacterial polypeptide expressing nucleotide sequence isolated from the Sargasso Sea
tatgaagcgaaaagcaaaaataaacagaaagaccaaagaaactagtatcagtgttgatttaaatattgatggcaagggcaagtacaaagttgatacaggtataggatttttaaatcatatgcttgagcaattatcaaaacactcctctatggatatgaatataaaagccaaaggagatactcatatcgatcttcatcataccacagaagacacgggtatagctatcggtgagtgcctaaaaaaagcgtcaaaaaaatttgtaggaattaaaagatatgcacatgcaatgataccaatggatgaaacattaaccagagttgcaatagatgtttcaaacaggccatatctgatttggaaagttaatcttaaagtagaaaagcttggtgaaatggatactgaattattcaaagaatggtttcaagcattttcacaagctgccggaattactttgcatgttgaaaatatttatggtgataacagccaccatataatcgagtcttgttttaaaggattagcgagatcattaagagctgcattggagatggacccaaggaataaaaatacaattccttctacaaaaggttctttataa

SEQ ID NO: 280290 - DNA, 380 bp, Unknown
  Bacterial polypeptide expressing nucleotide sequence isolated from the Sargasso Sea
tatgaaaagaaaagcaaaaatagctagaaaaactaaagaaaccaatatcagtgttgaccttaatattgatggaaaaggtaagtacaaagttgacacaggaataggtttcttagatcacatgctcgagcagttatctaaacattcatcaatggatttagctgttaaagccaaaggtgacactcacattgatcttcaccatacaactgaagacactggaattgctataggagaatgcttaaaaaaagcatcaaaaaaatttgtaggaattaaaagatatgctcacattttattaccgatggatgaaacactgacaagagttgcaattgatgtttcaaacagaccttatttgatatggaatgtaaaactaaaagttgagaaac

SEQ ID NO: 280291 - DNA, 622 bp, Unknown
  Bacterial polypeptide expressing nucleotide sequence isolated from the Sargasso Sea
atattttatatatcactgatattaggccaatttatgagaaccgcatcagtacaaagaaacacaaaagagaccaaaatagcatgtaaaataaatgttgatggaacagggatatcaaaaattacttctggaataggtttttttgatcacatgcttgaaatcttctctcatcacagcctaatagatattgagcttattgtagatggtgacacacatgttgattttcatcacactgttgaggataccgcttatgcactttctgagtctatcaataaagccataggagataaaaaaggaataaatagatatggttttttttatataaccatggatgaaagcctatctcggacagtaattgatttttctggaaggccggagcttgtatggaaggttgaactaggcttggagaaaattggagagatggacaccgagctttttaaagagttttttaaagcatttacaaataattcaaaatgcaatctccatattgaaaatttttatggaactaacaatcatcacataatagagtcatgctttaagtcatttgcaagaagtgttagagctgcgctaacaattgacgaaagaacaaagagcataatcccatcatctaagggtgtgctataac

SEQ ID NO: 280292 - DNA, 592 bp, Unknown
  Bacterial polypeptide expressing nucleotide sequence isolated from the Sargasso Sea
tatgaaacgtaaagccaaaataagtagaaaaacaaaagagactaacatcagtgttgatttaaacattgatggtaagggtaagtacaaagttgacacaggcataggatttttagatcacatgcttgagcaactatcgaaacactcttcgatggacatgaatattaaagctaaaggtgatacgcacattgatcttcaccacacaactgaagatacgggaattgcaattggcgaatgtttaaaaaaagcatcaaaaaagtttgtcggtattaaaagatatgctcatgcaatgattccaatggatgaaacattaactagagttgcaattgatgtatcaaacagaccttatttaatttggaaagtaaaattgaaagtagaaaaattaggtgagatggatacagaactatttaaagagtggttccaagccttttcacaagctgcaggaattactttgcacattgaaaatatttatggtgataacagtcaccacataatcgagtcttgctttaaaggattagctagatcattacgagctgctttagaaatggatccaagaaataaaactacaataccttcgacaaaaggttctttataa

SEQ ID NO: 280293 - DNA, 586 bp, Unknown
  Bacterial polypeptide expressing nucleotide sequence isolated from the Sargasso Sea
cgtcgagcgcaacacgaaggagactcagatttccgcatccgtcgatcttgacgggacggggaaatacgatgtttcgactggaattggcttcctagatcatatgatggaacagctgtcgcgccacagcttgatcgacctgacgttgcgcgcgcagggcgatctgcatatcgattttcaccacaccactgaggataccggctatgccgtcggcgaagcggtgagtcgtgcgctcggcgatcgcgctgggatcgtgcgctacggcagtgcactgatcccgatggacgagaccttgacccgggtcgcgctcgactgttccaatcggccgtatctcgtgtggaatgtcggcttctcgcgctccaaactcggcgagatggacaccgagctgtttcatgaatggttcaaggccttcgcgcaatccgccgggctgaccctgcatgtcgatacactctacggcgagaacaatcaccatattgtcgagtcctgctacaagggattggcgcgggcgctgatggccgctatcgctatcgatccgcgaaaggccgacgcagttccgtcgaccaagggcgttctcggcggttcgctttga

SEQ ID NO: 280294 - DNA, 513 bp, Unknown
  Bacterial polypeptide expressing nucleotide sequence isolated from the Sargasso Sea
tatgaagaggaaagcgaaaattagtagaaaaactaaagagaccagcattagcgttgatttaaacattgatggcaagggtaagtacaaagttgatacaggtataggattcttagatcacatgcttgaacaattatcaaaacactcttctatggatatgaatattaaagctaaaggagatatgcatatcgatttacatcacactacagaagatacaggtatagctattggtgagtgtttaaaaaaagcatctaagaaatttttgggaattaaaagatatgctcatgcaatgattcctatggatgaaacattaactagagttgcaattgatgtttcaaatagaccttatttaatttggaaagttaagcttaaagtggaaaaacttggtgagatggatacagaattgtttaaagaatggtttcaagcattttcacaggctgctggaattactttgcacgttgaaaatatttatggtgataacagccaccacataattgaatcttgttttaaaggact

SEQ ID NO: 280295 - DNA, 592 bp, Unknown
  Bacterial polypeptide expressing nucleotide sequence isolated from the Sargasso Sea
tatggctagaaaaggtaaagtatctcgaaaaactaaagaaaccaacattagtgttgaagtcaatattgatggcaagggtcagtacaaaattgacactggaattggttttttagatcatatgttggagcaattatcaaagcattctttaatagatttaaaagttaaagctaaaggagatacacatattgatcttcaccacactaccgaagacacaggtattgcaattggtgaagctttaaaaaaagctgccaaaaaatttatcgggattaagcgttatgctcacagagttattccaatggatgaaactttaacaagagtagcgattgatgtttcgaatagaccttatttgatttggaaagtaaaattgaaagttgagaaacttggagagatggatacggaattattcaaagagtggttccaagctttttcacaatctgcaggtattactttacacgttgaaaatatttatggggacaatagtcaccacattattgagtcttgctacaaaggtttagcgagatctttaagagatgctttagagatggatcctagaaataaaaaaagtattccatcaactaaaggctcattataa

SEQ ID NO: 280296 - DNA, 532 bp, Unknown
  Bacterial polypeptide expressing nucleotide sequence isolated from the Sargasso Sea
aatatagatggtaaaggcaaatataaaattgatactgggataggtttcctaaatcatatgcttgaacaattatctaagcattcatcgattgatatgaatattaaggcaaaaggagatactcatattgatcttcatcatacgactgaagataccggaatagcaattggagaggcattaaaaaaagctttgaaaaaatctattggcattaggagatatgcacacgctatgatacctatggatgaaactttatcacgtgttgcaattgatatatcaaacagaccatatttaatttggaaagttaatcttaaggtagaaaaacttggtgaaatggatacagaattgtttaaagaatggtttcaagcattttcacaagctgcaggaattaccttacatgttgaaaatatttatggtgacaatagtcaccacattattgaatcttgctataaaggattagcaaggtcgttaagaactgcattagaaatagatcctaggaataaaaaaacaattccttctacaaaaggttctttataaa

SEQ ID NO: 280297 - DNA, 592 bp, Unknown
  Bacterial polypeptide expressing nucleotide sequence isolated from the Sargasso Sea
tatgagtagaaaagctaaaattataagaaaaaccaaagagacgaatatatctgttgaagtaaatttagacggaaaaggtaaatatcaaatcaagaccaaaataggttttttagatcacatgttagagcaactttcaaagcattctctaattgatataaaagttgttgctaagggagacacacacattgattttcatcacactaccgaagacacaggtatagccataggcgaagccattaaaaaagccgctggaaatcttaaaggcattaagcgtttttcaagcacaacgattccaatggatgaaactttaacaagagtctcgatggatatttctaatagaccgtatttgatttggaaagtagacttgaaagttgaaaagcttggagaaatggataccgagctttttaaagagtggttccaggcattttcccaggcagcagggataactttgcacgttgaaaacatctacggggataacagccaccataaaatcgagtcttgttttaaagccttagcaaaatcattaagagaggctttagaaattgacaaaagagtaaaaaatattcttccttcgacaaaaggaaaactttaa

SEQ ID NO: 280298 - DNA, 463 bp, Unknown
  Bacterial polypeptide expressing nucleotide sequence isolated from the Sargasso Sea
tatggctagaaaaggaaaaatatctcgaaaaactaaagaaaccagtatcagtgttgaggtaaatattgatggtaaaggaaaataccaaattgatactggaataggttttttggaccatatgcttgagcaattatcaaagcattcattaatagatctaaaagtaaaagctaaaggagacacacacatagaccttcaccacaccactgaagatacaggtattgcaattggtgaagctttaaaaaaagctgctaaaaaatttgttgggattaaacgttatgctcatcgacttattcctatggatgaaacattaactagagttgcaattgatgtttcaaacagaccttatttgatttggaaagtaaaattaaaagtagaaaaacttggggagatggataccgaactatttaaagaatggtttcaagctttttcacaatctgctggaattacattacacgtgaaaata

SEQ ID NO: 280299 - DNA, 532 bp, Unknown
  Bacterial polypeptide expressing nucleotide sequence isolated from the Sargasso Sea
tatgaagcgtaaaggcaaaataagtagaaaaactaaggagacaagtatcagtgttgatttaaatatcgatggtaaaggaaaatataaaattgacacaggcattggtttcttaaatcatatgctagaacaactttcaaaacattcatctattgatatgaatatcaaagctaagggtgatactcatatagactttcaccatacaacagaagacactgggattgcgattggggaggctttaaaaaaagctttgaaaaaatctgtcggtataagaagatatgctcatgcaatgattcctatggatgaaacattaacaagagtagccattgatgtttcaaacagaccttacttgatttggaaggttacactaaaagtagagaaacttggtgaaatggatacagaactttttaaagaatggtttcaagctttttctcaagctgctggaattactctccatgttgaaaatatttatggtgataatagtcaccacattattgagtcttgctttaaaaggatagcaagatctttaagaact

SEQ ID NO: 280300 - DNA, 409 bp, Unknown
  Bacterial polypeptide expressing nucleotide sequence isolated from the Sargasso Sea
atgaaaagaaaagcaaaaatagctagaaaaacaaaagaaactaatatcagtgttgaccttaatattgatggaaaaggtaagtacaaagttgacacaggaataggttttctagatcacatgcttgagcagttatctaaacactcatcaatggatttaactgttaaagctaaaggtgacacacacattgatcttcaccacacaactgaagacactggaattgctattggagaatgcttgaagaaagcttcaaaaaaatttgtaggtattaaaagatatgctcacattctgttaccaatggatgaaacattaacaagagttgcaatagatgtttctaacagaccttatttgatttggaatgtgaaattaaaagttgaaaaacttggtgaaatggacacagaattatttaaag

SEQ ID NO: 280301 - DNA, 592 bp, Unknown
  Bacterial polypeptide expressing nucleotide sequence isolated from the Sargasso Sea
atgaaacgtaaagccaaaataagtagaaaaacaaaagagacaaacatcagtgttgatttaaatattgatggtaagggtaagtataaagttgacacaggtataggttttttagatcacatgcttgagcaattatccaaacactcatcaatggatatgaacattaaagctaaaggtgatacgcacattgatcttcaccacacaactgaagatacaggaattgcaattggtgaatgtttaaaaaaagcatctaaaaaatttgttggtataaaaagatatgcacatgcgatgattccgatggatgaaacattaactagagttgcaattgatgtatcaaacagaccttatttaatttggaaagtaaaactgaaagtagaaaaattaggtgagatggacacggaactgtttaaagaatggttccaagctttttcacaagctgcaggaattactttgcacgttgaaaacatttatggcgataacagtcaccacattatcgagtcctgctttaaaggattagctagatcattaagagctgctttagaaatggatccaagaaataaaactacaataccttctacaaaaggttctttataaa

SEQ ID NO: 280302 - DNA, 355 bp, Unknown
  Bacterial polypeptide expressing nucleotide sequence isolated from the Sargasso Sea
ttggggagaaagaaaaggaataagcagatttggacatttctttgctccattagatgaagcattagttcaagtcactttagactgctctggcagaccgcatctatcttatgatcttcaattaaaagcccctagaataggaaattatgatactgaactagtaagagagttttttattgcctttgtaaataacagcggtattactctgcatattaatcaaatgcgaggaagtaattcacatcatatagttgaggcgtgctttaaagctttttcaagagcaatgagaatggctaccgagatagatccaagaagatctgattcaattccaagcagtaaaggaatgttagaaaaacaataa

SEQ ID NO: 280303 - DNA, 592 bp, Unknown
  Bacterial polypeptide expressing nucleotide sequence isolated from the Sargasso Sea
tatggctagaaaaggaaaaatatctcgaaaaacaaaagaaacaagtatcagtgttgaagttaatattgatggtaaaggaaagtaccaaattgacactggcataggttttttggatcatatgcttgagcaattatcaaagcattctttaattgatttaaaagttaaagctaaaggagatacacatattgatcttcatcacactactgaagatacaggtattgcaattggtgaagctttaaaaaaagctgcgaaaaaatttgttggaattaaacgttatgctcatcgacttatccctatggatgaaacgttaactagagttgcaattgatgtttccaatagaccttatttgatttggaaggtaaaattgaaagttgaaaaactcggagaaatggatactgaattattcaaagaatggttccaagctttttcacaatctgctggtattactttgcacgttgaaaatatttatggggacaatagtcaccacattattgagtcttgttataagggcttagcaagatctttaagagatgctttagagatggattctagaagtaaaaaaagcatcccatcaactaaaggctcattataa

SEQ ID NO: 280304 - DNA, 572 bp, Unknown
  Bacterial polypeptide expressing nucleotide sequence isolated from the Sargasso Sea
tgaaagaaacacaaaagagactaaaatattttgcaaaataaatattgatggcactgggcaatcaaaaatatcttccggaataggtttttttgatcatatgcttgaaatcttttcccaccatagcttgatcgacttagagctaaaagtagatggtgatactcatgttgattttcatcatactgttgaagatacagcttacgccttgtcagaagctatcaataaatctattggagacaaaaaaggaataaatagatatggttttttttatatcactatggatgaaagcctttcacgaacagtgattgatttttctggaagaccagaactgatttggaaagttgagcttggtttggaaaagataggcgaaatggatacagagctttttaaagagttttttaaagcatttaccaacaatgtgaaatgcaatttacacatcgaaaacttttatggaaccaacaaccaccatatcatcgagtcatgctttaagtcttttgcaagaagcattagaaccgctcttacaattgatgaaagaacaaaaaacataataccatcatcaaaaggcattctataat

SEQ ID NO: 280305 - DNA, 470 bp, Unknown
  Bacterial polypeptide expressing nucleotide sequence isolated from the Sargasso Sea
tatgaaacgtaaagccaaaataagtagaaaaacaaaagagactaacatcagtgttgatttaaacattgatggtaagggtaagtacaaagttgacacaggtataggatttttagatcacatgcttgagcagttatctaaacactcttcgatagatatgaatattaaggccaaaggtgatacacacattgatcttcaccatacaactgaagatacgggaattgcaattggtgaatgtttaaaaaaagcatcaaaaaaatttgttggtataaaaagatatgcgcatgcaatgataccaatggatgaaacattaactagagttgcaattgatgtttcaaacagaccttatttaatttggaaagtaaaactgaaagtagaaaaattaggtgagatggacacggaactatttaaagaatggtttcaagctttttcacaggctgcaggaattactttacatgttgaaaatatttatg

SEQ ID NO: 280306 - DNA, 595 bp, Unknown
  Bacterial polypeptide expressing nucleotide sequence isolated from the Sargasso Sea
atgcgcgaaggaagaatcacccgcgaaactaaagaaacgtcaattgacgtgcgtataaacctggacggaaccggggtttatgatatttcaacggggatagggtttttagatcatatgcttgagcaacttgcccggcatagtcttatggatttatatgttcgagcagagggtgatttgcatattgattttcatcacacaacggaagatacgggaatagcgatcggccaggcgattgataaagggttaggcaaccgcgccgggatcacacgttttggttccgcttatataccaatggacgaaacgctttcccgaatagctctagacatttcagcgcgtccctatttaatttggcgagtcgagttttctaaaccgaaacttggagaaatggatacagaattgtttaaggaatggtttcaggcgtttgcacaagcagcagggatcactttgcatgtcgaaaatctttacggagaaaacaatcatcatattgttgagtcttgttttaagggtttagcgcgctcattgcgcacggctataaaaattgatgcgcgtgtttctgacctggttccctctactaaaggctcgctcggcggttagc

SEQ ID NO: 280307 - DNA, 516 bp, Unknown
  Bacterial polypeptide expressing nucleotide sequence isolated from the Sargasso Sea
gaaagtataaaattaaaaccggtataggtttcttagaccacatgttggagcaattatcaaagcactctctcatagacttagatgttaaagcgaagggtgacacgcatatagatttacaccacaccaccgaggacacaggtatagcaattggagaagctattaaaaaagcagcaggtaatcgaaaaggaattacacgatacgcatcaacaatgatccctatggatgaaactctaagtcgagtttcaattgatgtatcaaacagaccttatttaatttggaaagttaatttgccagttgagaaacttggagagatggatactgaattatttaaagaatggttccaagctttttcacaatcagctggaattactttacacatagaaaatatctacggcgaaaatagccatcataaaattgagtcatgttacaaaggtttagctagatcattaaaagatgctttagcgattgataaaagaattaaaaactcaataccttcgacaaaaggctctatttaaa

SEQ ID NO: 280308 - DNA, 580 bp, Unknown
  Bacterial polypeptide expressing nucleotide sequence isolated from the Sargasso Sea
agcgaagataaatagaaaaacaaaagaaactaatatttctgtagaagcgaatatagatgggaaaggctcctataaaatagatacaagaataggtttcctaaatcatatgcttgagcaattatctaagcactcgctaatcgatttaaaagtattagcaaaaggagacacgcatatagatttgcaccacacaacggaagatacaggaattgctataggtgagtgtataaaaaaagctatccaatcttcaaaaggaataaaaagatttgcacatgctttaatacctatggatgaaacgttaacaagagttgctgtggacgtatcaaatagaccatatttaatttggaaagttaaattgaaagtagaaaaattaggagagatggatactgaactttttaaagaatggttccaagctttttctcaagccgcaggtgttacacttcatgttgaaaatatttatggtgataatagtcaccatattattgagtcctgttacaagggattagcgcgttcattaagagaggctttagaagtagacaaacgaattaaaaacaaaatcccttcaacaaagggaactttataa

SEQ ID NO: 280309 - DNA, 463 bp, Unknown
  Bacterial polypeptide expressing nucleotide sequence isolated from the Sargasso Sea
atgaaacgtaaagccaaaataagtagaaaaacaaaagagaccaacatcagcgttgatttaaacattgatggcaagggtaagtacaaagttgacacaggtataggatttttagatcacatgcttgaacaattatcaaaacactcttcgatggatatgaacattaaagctaaaggtgatacgcatattgatcttcaccacacaactgaagatacaggaattgcaattggtgaatgtttgaaaaaagcatctaaaaaatttgttggtattaaaagatatgctcatgcaatgataccaatggatgaaacattaactagagttgcaattgatgtttcaaacagaccttatttaatttggaaagtaaaattgaaagtagaaaaattaggtgagatggatacagaactatttaaagaatggttccaagctttttcacaggctgcaggaattactttgcacgttgaaaata

SEQ ID NO: 280310 - DNA, 538 bp, Unknown
  Bacterial polypeptide expressing nucleotide sequence isolated from the Sargasso Sea
atgaagcgaaaagcaaaaataagcagaaagaccaaagaaactagtatcagtgttgatttaaatattgatggcaatggcaagtacaaagttgatacaggtataggatttttaaatcatatgcttgagcaattatcaaaacactcctctatggatatgaatataaaagccaaaggagatactcatatcgatcttcatcataccacagaagacacgggtatagctgtcggtgagtgcttaaaaaaagcttcaaagaaatttataggaattaaaagatatgcacatgcaatgataccaatggatgaaacattaaccagagttgcaatagatgtttcaaacaggccatatctgatctggaaagttaatcttaaagtggaaaagcttggtgaaatggatactgaactattcaaagaatggtttcaagcattttcacaagctgctggaattactttgcatgttgaaaatatttatggtgataacagccaccatataattgagtcttgctttaaaggattagcgagatcactaagagctgcattgg

SEQ ID NO: 280311 - DNA, 575 bp, Unknown
  Bacterial polypeptide expressing nucleotide sequence isolated from the Sargasso Sea
agtatctcgaaaaacaaaagaaaccagcatcaatgttgaagtaaatattgaaggtaaaggtaagtaccaaattgacactggtataggatttttagatcatatgcttgagcagttgtcaaagcattctttaattgatttaaaagttaaagcaaaaggagatactcatattgatcttcatcacacaacagaagatactggtattgctataggtgaggctttaaaaaaagctgcaaaaaaatttgtaggcataaaaagatacgctcacacagttattccaatggatgaaacgttaacaagggttgcaattgatgtatcaaacagaccttatttaatttggaaagtaaaattgaaagttgagaaacttggtgaaatggacacagagttatttaaagaatggttccaggctttctcacaatctgctggtattacaatgcatgttgaaaatatttatggtgacaatagtcatcacataattgaatcttgttataaagcgttagcaagatcattaagagctgcattagagatggatccgagaaacaagaaaagcattccatccactaaaggctcattataag

SEQ ID NO: 280312 - DNA, 517 bp, Unknown
  Bacterial polypeptide expressing nucleotide sequence isolated from the Sargasso Sea
atggctagaaaaggaaaagtatctcgaaaaactaaagaaacaagtattaatgttgaagttaatattgatggtaaaggtaagtaccaaattgatactggtataggttttctagatcacatgcttgaacaattatcaaagcattctttaattgatttaaaagttaaagctaagggagatactcatatagatcttcaccacacaacagaagacacaggtattgctataggtgaagctttaaagaaagctgctaaaaaatttgtaggaattaaaagatattcacacacagttattccaatggatgaaacattaacaagggttgctattgatgtttcaaacagaccttatttgatatggaaagtaaaattaaaagttgaaaaacttggagagatggatacagaattatttaaagaatggttccaggctttctctcaatctgcaggtattacactacacgttgaaaacatttatggtgataatagtcaccacataattgagtcttgttataaagctttagcaa

SEQ ID NO: 280313 - DNA, 375 bp, Unknown
  Bacterial polypeptide expressing nucleotide sequence isolated from the Sargasso Sea
tatgaagcgtaaaggtaaaataaacagaaaaactaaagagactagcattagtgttgatttaaatatcgatggtaagggaaactacaagattgacacaggaataggttttttagaccatatgcttgaacagttatcaaagcactcatcaattgacatgaatataaaagccaaaggtgatactcatattgatttacatcatacaactgaggacacagggatagctataggtgaagcattgaaaaaagcttccaaaaaatttatgggcatcaaaaggtatgctcatgccataataccaatggacgaaacattaactagagttgcgatagatatatccaataggccttatttaatttggaaggtaaaacttaaagtaga

SEQ ID NO: 280314 - DNA, 385 bp, Unknown
  Bacterial polypeptide expressing nucleotide sequence isolated from the Sargasso Sea
atgaaacgtaaagccaaaataagtagaaaaacaaaagagactaacatcagtgttgatttaaacattgatggtaagggtaaatacaaagttgacacaggtataggatttttagatcacatgcttgagcaattatcaaaacactcttcaatggatatgaatattaaagctaaaggtgatacgcacattgatctccaccacacaacagaagatacgggaattgcgattggtgaatgtttaaaaaaagcgtcaaaaaaatttgttggaattaaaagatatgctcacgcgatgataccaatggatgaaacattaactagagttgcaattgatgtttcaaatagaccttatttaatttggaaagtaaaattgaaagtagaaaaattaggtg

SEQ ID NO: 280315 - DNA, 592 bp, Unknown
  Bacterial polypeptide expressing nucleotide sequence isolated from the Sargasso Sea
atgaagaggaaagcaaaaataagcagaaaaactaaagagactagcattagtgttgatttaaacattgatggcaaaggtaagtacaaagttgacacaggcataggatttttaaatcacatgcttgaacaattatcaaagcactcttctatagatatgaatattaaagctaagggagatacacatattgatttacaccacactacggaagatacaggcatagttattggtgaatgtttgaaaaaagcttcaaagaaatttatcggaattaaaagatacgcacatgcaatgatacctatggatgaaacattaacgcgtgtagcaattgatgtttcaaacagaccttatttaatttggaaagttaagctcaaagtagaaaaacttggcgaaatggatacagaattatttaaagaatggtttcaagcattttcacaggctgctggcattactttgcatgttgaaaatatttatggagataatagtcaccacattatcgaatcttgttttaaaggattagcaagatctttaagagttgcattggagatggatccaaggaataaaaatacaattccttctacaaaaggttctttataat

SEQ ID NO: 280316 - DNA, 592 bp, Unknown
  Bacterial polypeptide expressing nucleotide sequence isolated from the Sargasso Sea
tatgaagcgaaaagcaaaaataagcagaaaaactaaagaaaccaacatcaatgttgatttaaatattgatggcaaaggtaaatataaaatagagactggtataggttttttaaatcatatgcttgagcaattatcaaagcattcatcaatagatattaatcttaaagctaaaggtgatactcatatcgatcttcatcacacaacagaagatactggcattgcaattggtgaatgtttaaaaaaagcatctaaaaaatttgttggaataaaaaggtacgctcatgccatgataccaatggatgaaacattaacaagagttgcattagatgtttcaaatagaccttatttaatttggaaagttaaattaaaagtagaaaagttaggagagatggatactgaattattcaaagaatggtttcaagccttttcgcaagctgctggaattactttgcatgttgaaaacatttatggtgataacagccaccacataattgagtcttgctttaaaggattagcaagatcactaagaactgcattagaaatggatccaaggaataaaaaatacattccttctacaaaaggttctttataa

SEQ ID NO: 280317 - DNA, 589 bp, Unknown
  Bacterial polypeptide expressing nucleotide sequence isolated from the Sargasso Sea
atgagaagcgcatctacagaaagaaacactaaagagacaaaaatagcctgtaaaataaatattgatggaacaggggtgtcaaaaattaataccggaataggtttttttgatcacatgcttgagatattctctcatcacagcttaatggatgttgaactaagcgttgatggagatacacacgttgattttcaccacactgtcgaagatactgcgtatgccctatctgatgctatcaataaggcaataggagataaaaaaggaataaacagatacggcttcttttatataactatggacgaaagcctctctcgaacagtcattgatttttctggaagacctgagcttgtctggaaagttgagttaggactggagaaaattggagagatggatactgagctttttaaagaattttttaaagcatttaccaataatgcaaaatgtaatcttcatattgaaaatttttacggaaccaataatcatcacatcatagaatcttgctttaagtcgtttgcgagaagtgttcggattgccctaacaattgatgaaagaataaaaaatattataccatcatctaaaggcgtactgtagt

SEQ ID NO: 280318 - DNA, 490 bp, Unknown
  Bacterial polypeptide expressing nucleotide sequence isolated from the Sargasso Sea
tatgagaaaaaattctacagaaagaaacactaaagaaactaagatttcttgcagcgttgatctagacgggattggtgattataaaatttcaaccggcattggtttttttgaccatatgttggaaatattttctcaccacagtttaattgatttagtagtaaacgtcaggggagacactcacgttgacctgcaccacacagtagaggatacatcgtatgctttggcttcaagcattacaagtgcgcttggtgataaaaaaggcataaatcgatatggttttttttacataccaatggatgaatgcctgtctagatgtgtaattgatttctcaggaaggccagagcttgtatggaatgtaagccttggaattaaaaaactaggggaaatggatacagagctttttcatgaattttttaaatcctttgcaaacgaagctaagtgcaatttgcacattgaaaacctatatggaaaaaaacaccatcatattgtc

SEQ ID NO: 280319 - DNA, 581 bp, Unknown
  Bacterial polypeptide expressing nucleotide sequence isolated from the Sargasso Sea
tatgaagcgaaaagctaatattacgagaaaaacaaaagaaacatctatcaaggtagacctaaatattgatggcaagggaaaatataaaattgatacaggaattggttttcttaatcatatgttagaacagttatcaaaacattcgtctatagacttaaatgtaaaagccaaaggagacactcatatagacttacatcacactactgaagacacaggaattgccattggtgagtgtataaaaaaagcttctaaaaattttgtaggtataaaaagatacgctcatgccctactacccatggatgagacattgacaagagtagcgatcgatatgtcaaacagaccatatttaatttggaatgtaaaattgaaggtagaaaaacttggggaaatggataccgaattgtttaaagaatggttccaagctttctcacaagctgctggcattactttacatgttgaaaatatttatggtgataatagccaccatataattgagtcttgttataaaggattagctagatcattaaggacagcacttgaattagatccaaagaacaaaaatactgtcccatctacaaaag

SEQ ID NO: 280320 - DNA, 235 bp, Unknown
  Bacterial polypeptide expressing nucleotide sequence isolated from the Sargasso Sea
gttcctttcacccggtctattgttggcggatttgacgtggatctgtttcgcgagttttttcagggctttgtaaaccacgcacaagtgactttacatgtcgataatctgaagggtgataattcacaccatcagatcgaaactgttttcaaagcttttggccgtgcgcttcgtatggcgctaactccagactctcgtatgagtgggatgataccgtcgaccaaaggatcgctttgaa

SEQ ID NO: 280321 - DNA, 355 bp, Unknown
  Bacterial polypeptide expressing nucleotide sequence isolated from the Sargasso Sea
atgaagcgaaaagcgaaaattattagaaaaactaaagagaccagtattaatgttgatttaaacattgatggcaaaggcaagtacaaagttgatacaggcataggatttttaaatcacatgcttgagcaattatcaaagcactcttctatagatatgaatattaaagccaaaggagatactcatattgatttacaccacactactgaagacacaggtatagcagttggagaatgtttaaaaaaagcatcaaaaaaatttgtaggtattaaaagatatgctcatgcaatgataccaatggatgaaacattaaccagagttgctattgacgtttcaaatagaccttatctaatttgaa

SEQ ID NO: 280322 - DNA, 490 bp, Unknown
  Bacterial polypeptide expressing nucleotide sequence isolated from the Sargasso Sea
atgaaacgtaaagccaaaataagtagaaaaacaaaagagactaacatcagtgttgatttaaacattgatggtaagggtaagtacaaagttgacacaggcataggatttttagatcacatgcttgaacaattatcaaaacactcttcaatggatatgaatattaaagctaaaggtgatacgcacattgatcttcaccacacaactgaagatactggaattgcaattggtgaatgtttgaaaaaagcatcaaaaaaatttgtcggcattaaaagatatgctcatgcaatgataccaatggatgaaacattaactagagttgcaattgatgtttcaaacagaccttatttaatttggaaagtaaaattgaaagtagaaaaattaggtgagatggatacagaactatttaaagagtggttccaagccttttcacaggctgcaggaattactttgcacgttgaaaatatttatggagataacagtcaccacatta

SEQ ID NO: 280323 - DNA, 497 bp, Unknown
  Bacterial polypeptide expressing nucleotide sequence isolated from the Sargasso Sea
aggcataggatttttagatcacatgcttgagcaattatcaaaacactcttcaatggatatgaatattaaagctaaaggtgatacgcacattgatcttcaccacacaactgaagatacaggaattgcaattggtgaatgtttgaaaaaagcatctaaaaaatttattggtattaaaagatatgctcatgcaatgataccaatggatgaaacattaactagagttgcaatcgatgtttcgaatagaccttatttaatttggaaagtaaaattgaaagtagaaaaattaggtgagatggacacggagctatttaaagaatggttccaagctttttcacaagctgcaggaattactttgcacattgaaaatatctatggtgataacagtcaccacattattgaatcttgttttaaaggattagctagatcattaagagctgctttagaaatggatccaagaaataaaactacaataccttctacaaaaggttctttataaa

SEQ ID NO: 280324 - DNA, 504 bp, Unknown
  Bacterial polypeptide expressing nucleotide sequence isolated from the Sargasso Sea
tatgaaaagaaaagctaaaataaatagaaaaaccaaagaaactaacatttcggtcgcagtcaacttagatggaaaagggaaatataaaattaaaactgggataggttttcttgatcatatgcttgagcagctagctaagcactcattaattgacttagaagttaaagccaaaggcgatacacatattgacttacaccatacaactgaagacacaggtatagctatcggggaagctattaaaaaagctgcaggtaaccgaaaaggaattacaagatatgcatcaacaatgattcccatggacgaaactttaagccgagtttcaatagatgtatcgaacagaccatacttaatttggaaagttaatttgccagtcgagaaacttggtgaaatggatacagaattattcaaagaatggttccaagctttttcccaatcagctggagttactttacacatagagaatatttacggtgaaaatagtcatcacaagattgagtcatgcta

SEQ ID NO: 280325 - DNA, 592 bp, Unknown
  Bacterial polypeptide expressing nucleotide sequence isolated from the Sargasso Sea
atggcacgaaaagctaaaataaatagaaagacaaaagaaaccagtatagctgttgaagcaaacctagatggcaagggatcttataaaatagatactaaaataggatttctaaatcatatgttagaacaattgtctaaacattcattaattgatttaaaaataattgccaaaggagacacgcatattgatttacatcatactaccgaagacactggaattgctattggagaatgtattaaaaaagcgcttggagcatcaaaaggaataaagagatatgcccacgcattaattcccatggatgaaactttaactcgagtaacaattgatgtttcaaatagaccatatttagtttggaaagtgaaattaaaagtagaaaaattaggagagatggatacagagttatttaaagagtggttccaggctttctctcaatctgcaggcatcacattacatgttgaaaatatttatggagataatagccatcacataattgaatcttgttttaaaggacttgcgagatcgctgcgcggagcaatagaagtagataaaagaattaaaaacaaagttccttcaacaaaaggcgttttgtaaa

SEQ ID NO: 280326 - DNA, 592 bp, Unknown
  Bacterial polypeptide expressing nucleotide sequence isolated from the Sargasso Sea
atgaatagaaaagcaaaaattacgagaaaaacaaaagaaacgagcatttctgtcgctgtcaatttagatggtaaaggaaaatataagattaaaactggtattggttttttagatcacatgttagagcaattatcaaaacattctttgatcgatttagaggttaaagcaaagggtgatacacatatagatttacatcatactactgaagatacaggtatcgctatcggtgaagctattaaaaaagctgccgggaatagaaaaggaattacaagatacgcatcaacaatgatccctatggatgaaactttaagcagagtatctatagacgtatcaaacagaccgtacttaatttggaaagttaatttgcctgtagaaaaattaggtgagatggacacagaattgtttaaagaatggtttcaagctttttcacaatcagctggagttactttacacatagaaaatatttacggtgaaaatagtcaccacaagattgagtcatgttacaaaggtttagctagatcattaaaagatgctttagcgattgataaaagaattaaaaactcaataccttcgacaaaaggctctatttaaa

SEQ ID NO: 280327 - DNA, 592 bp, Unknown
  Bacterial polypeptide expressing nucleotide sequence isolated from the Sargasso Sea
atgaaacgtaaagccaaaataagtagaaaaacaaaagagaccaacatcagtgttgatttaaatattgatggaaagggtaagtacaaagttgacacaggtataggatttttagatcacatgcttgagcaattatcaaaacactcttcaatggatatgaatattaaagctaaaggtgatacgcacatcgatcttcaccacacaactgaagatacaggaattgcaattggcgaatgtttaaaaaaagcatctaaaaaatttattgggattaaaagatattctcatgcaatgataccaatggatgaaacattaactagagttgcaattgatgtttcaaacagaccatatttaatttggaaagtaaaattgaaagtagaaaaattaggagagatggatacagaattatttaaagaatggttccaagctttttctcaagctgcaggaattaccttacacgttgaaaatatttacggcgataacagccaccacataatagagtcttgctttaaaggattggcacgatcattaagagcggctttagaaatggatccaagaaataaaactacaataccttctacaaaaggttctttataaa

SEQ ID NO: 280328 - DNA, 380 bp, Unknown
  Bacterial polypeptide expressing nucleotide sequence isolated from the Sargasso Sea
tatgaagcgtaaagttaaaattagtcgaaaaacaaaagagaccagtataagtgttgatctcaatattgatggtaaaggcaagtataaaattgatactggaataggatttcttaatcacatgcttgagcagttatccaagcactcgtcaatcgacatgagtataaaagctaaaggagacactcatattgatctacatcacacaactgaggatactggtattgcaatcggtgaggctttaaaaaaggcattaaaaaaatccgttggtattagaagatatgcgcatgcgatgataccaatggatgagactttatcgcgagttgcaattgacatttcgaacagaccttatttgatttggaaagtaaaattaaaagttgaaaaac

SEQ ID NO: 280329 - DNA, 409 bp, Unknown
  Bacterial polypeptide expressing nucleotide sequence isolated from the Sargasso Sea
tatgagcagaaaagcaaaaattacgagaaaaactaaagagacaagtatttctgtcgcggtcaatctagacggaaaaggaaagtataaaattaaaactggaataggttttttagatcacatgctggaacaattatctaaacactctcttattgatttagaagttaaagctaagggtgacacacatatagatttacaccacactactgaggataccggtatagcaattggagaagctattaaaaaagcggcaggtaaccgaaaaggtataacaaggtatgcatcaacaatgatacctatggatgaaacactaagccgagtttcaattgacgtatcaaatagaccttatttaatctggaaagtaaatctacaggttgagaaacttggtgagatggatacagaattatttaaa

SEQ ID NO: 280330 - DNA, 496 bp, Unknown
  Bacterial polypeptide expressing nucleotide sequence isolated from the Sargasso Sea
aatgtcatctccaaggcaatctgaaataaaaagaaaaacgaatgaaacagatatttctgtatttataaacttagatgggaaggggatttctgagattgataccgggataccattcttagatcatatgcttcatcaaatatccagtcatggtttgttcgatttaaaaataaaagcaattggagatacccatattgatgatcatcatacaaatgaagatgtaggaatcgcattaggcaaagcattttcaaaagctttgggagaaagaaaaggaataagcagatttggacatttctttgctccattagatgaagcattagttcaagtcactttagactgttctggcagaccacatctatcttatgatcttcaattaaaagctccaagaataggaaattatgatactgaactagtaaaagaattttttattgcccttgtaaatacagcggtattactctgcatattaatcaaatacaaggtagtaattcacatcacatag

SEQ ID NO: 280331 - DNA, 592 bp, Unknown
  Bacterial polypeptide expressing nucleotide sequence isolated from the Sargasso Sea
atgagcagaaaagcaaaaattaccagaaaaactaaagaaacaaacatctcagctgaagtaaacctggatggtaaaggcaaatatcaaataaagactagaattggatttttagaccacatgttagaacagttatcgaaacactctcttatagacattaaattgattgccaaaggagacacccacattgatttacaccacacaacagaggacacaggaattgttataggggaagccataaaaaaagcagcagggaaccggaaaggtatcaggaggtactcaagcacattaattccaatggacgaaactctgactagggtttcaatggatgtgtcaaatagaccgtatctcatttggaaagtagatctcaaagtagaaaaacttggagaaatggacactgagttgtttaaagaatggttccaagccttttcgcaatcagctggtattacattacatattgagaatatttatggggataatagccaccataaaattgagtcttgttttaaagctttagcaagatcattaagagatgcattagaaatagataaaagaataaaaaatattcttccttcaacaaaaggcaaattataaa

SEQ ID NO: 280332 - DNA, 595 bp, Unknown
  Bacterial polypeptide expressing nucleotide sequence isolated from the Sargasso Sea
atgtcccagtctagaactgccagtatcgaacgtaaaactcaggaaaccgtggtaagggtcaaactgaacctggatggtgaaggaacaagtgaaaccaataccggaatcggttttcttgatcatatgctggatcaattggcgtttcacgggctcatggacctcgcggtttcctgtgagggggaccttcacatcgatagccatcacaccaccgaagacattgggattgcacttggccaggccctaaaggaagccctgggtgaaaaaaaaggaattcgacgttatggccatgccttaattccgatggatgaagctctgctgcgggcggtacttgactgttctggtagacctgatttcgtcttcaacggagaattcggaaggtacaatcttggagacctggatacccagatgattcctcatttcttcaaatctctggctttcaactgcggtttaactctgcatctcagtatcctttacggcagtaacgatcatcataagtgtgaggggcttttcaaagcctttgccagggctttttcggatgcggttacgttggacccaaggaggttgggagtgagttccaccaaagggactctctgat

SEQ ID NO: 280333 - DNA, 592 bp, Unknown
  Bacterial polypeptide expressing nucleotide sequence isolated from the Sargasso Sea
atgaagagaaaagctaaaatttcaagaaagacaaaggaaacatcaattagtgttgacctaaatattgacggcaaaggtaaatataaggtcgatacaggtattggatttttaaatcatatgcttgagcaattgtctaaacattcatcaatagatttaaatttaaaggcaaaaggagatactcacattgatcttcaccatacaacagaagatacaggtattgcaattggcgaatgcttaaaaaaagcatctaaaaactttattggtatcaaaagatatgcacatgctctattaccaatggatgagaccttaacaagagttgcaatcgatgtttctaacaggccttatcttatatggaatgtaaaattaaaagttgaaaaattaggagagatggatactgaactttttaaagagtggtttcaagcattttcccaatcagctggaataactttgcatgttgaaaatatttatggtgataatagtcaccacattattgagtcttgcttcaaaggcttagcaagatcactgagatctgcattagaaatagatccaagaaataaaaaaacaataccatctaccaaaggttctttataaa

SEQ ID NO: 280334 - DNA, 468 bp, Unknown
  Bacterial polypeptide expressing nucleotide sequence isolated from the Sargasso Sea
tatgaagcgaaaagcatcaataacaagaaaaacaaaagagacaaaaatcgacgttgaattaaatattgacggtaaaggtcaatacaaaatcgatactggaataggttttcttgatcatatgcttgaacaactttctaaacattcatcaattgatttaaaagttaaagcaaaaggcgatacacacatagatcttcaccacacaacagaagatactggaattgcaataggtgaatgtcttaaaaaagcatcaaaaaagtttattggaataaaaagatatgctcacgcaatgataccaatggatgaaactttgacaagagttgcattagacgtttcaaaccgaccgtatttaatttggaaagtggatttgaaagtagaaaaacttggagaaatggacacagaactttttaaggaatggtttcaagctttttcacaatctgcaggaattacattacatattgagaatttata

SEQ ID NO: 280335 - DNA, 592 bp, Unknown
  Bacterial polypeptide expressing nucleotide sequence isolated from the Sargasso Sea
tatgaaaagaaaagcgaaaattattagaaaaacaaaagaaaccagtatttctgtcgcggtcaatttagacggcaaaggaaagtataagataaaaacaggaataggttttttggatcacatgttagaacaactatctaagcactctttaatagacttagaagttaaagcaaaaggagatactcatattgatttacaccacactactgaagatactggtattgctattggagaggctataaaaaaagctgcaggaagtcgaaaaggaattataagatatgcttcaacaatgataccaatggacgaaacccttagtcgagtttcaattgatatctctaataggccttacttaatttggaaagtaaacttagcagttgaaaaattaggtgagatggacacagagctttttaaagaatggtttcaagccttttcacaatctgccggtataacactacacattgaaaatatttacggtgataatagtcaccacaaagttgagtcttgttacaagggattagctagatcattaaaagatgctctagcgatagatgaaagaattaaaaactctataccttcgacaaaaggctctatttaa

SEQ ID NO: 280336 - DNA, 592 bp, Unknown
  Bacterial polypeptide expressing nucleotide sequence isolated from the Sargasso Sea
atgaagcgtagaggcaaaataagcaggaaaactaaagagactagtattagtgttgatataaacattgatggtaaaggaaaatataagattgatactggaataggttttttaaatcacatgcttgaacaattatctaagcactcatctatcgacatgaacatcaaagcaaaaggtgacactcacattgatcttcaccacacaactgaagactcaggtattgcaatcggtgaagctttaaagaaagctttgaaaaaatcagttggtattagaaggtatgcacatgccatgataccaatggacgagacattatcgcgagttgcattagatatttctaatagaccttatttaatatggaaagtaaatcttaaagtagaaaagcttggtgaaatggatacagaattatttaaagagtggtttcaggcgttttcacaagcagctggaattaccttacacattgaaaatatttacggtgataatagtcaccacattattgaatcttgttttaaaggattagcaagatcattaagaaccgcattagaaattgatccaaggaacaaaaaatcaattccttcgaccaaaggttctttataag

SEQ ID NO: 280337 - DNA, 563 bp, Unknown
  Bacterial polypeptide expressing nucleotide sequence isolated from the Sargasso Sea
aaccaaagaaacatctatcagtgtagatttaaatattgatggaaaaggtaagtacaaggttgacacaggtataggttttttaaatcatatgcttgagcaattatcaaagcattcatcgatagatttaatattaaaagcaaaaggagatactcatattgatcttcaccacacaaccgaagatacaggaattgcaattggcgaatgcttaaaaaaagcatcaaaaaactttattggcattaaaagatatgcgcatgctttattgccaatggatgagaccttgactagagtcgcaatagatgtttctaacaggccttatcttatatggaatgtaaaattaaaagttgagaaattaggagagatggatactgaactttttaaagaatggttccaagctttttcccagtcagctggtattactttgcacgttgaaaatatttatggtgataatagccaccatataattgagtcatgttttaaaggtctagcacgatcactaagatctgctttagaaatagatccgaggaataaaaaaacaataccatctactaaaggttctttataaa

SEQ ID NO: 280338 - DNA, 427 bp, Unknown
  Bacterial polypeptide expressing nucleotide sequence isolated from the Sargasso Sea
atggcaagaaaagctaaaataaacagaaagactaaggaaaccaacatacttgttgaaacaaatcttgatggtaaaggatcttacaaaatagacaccaaaataggtttcttaaatcacatgttggagcaattatctaagcattctttaattgatttaaaagtatcagctaaaggtgatacgcatattgatttacatcacaccacagaagatacaggaattgctattggtgaatctattaaaaaagcacttggttcatcaaaaggaataaaaagatatgctcatgcactaattccaatggacgaaacattaactcgagtaacaatggatgtatcaaatagaccgtatttaatttggaaagtaaaactaaaagtagaaaaattgggagaaatggatacagagctatttaaagaatggttccaagctttct

SEQ ID NO: 280339 - DNA, 592 bp, Unknown
  Bacterial polypeptide expressing nucleotide sequence isolated from the Sargasso Sea
tatgtctagaaaaggaaaagtatctcgaaaaactaaagaaacaagcataaatgttgaggtcaatattgatggtaaaggtaaataccaaattgacacgggcataggcttcttggatcatatgcttgaacagttatctaaacattcacttatcgatttaaaagttaatgcaaaaggagatacacacattgatcttcatcacactactgaagatactggaatagctattggtgaagctttaaaaaaagctgctaaaaaatttgtgggtataaaaagatatgcacatgcgttgataccaatggatgaaacattatcacgtgtagcagttgatgtttcgaacagaccttacctgatatggaaagtaaaattaaaggtagagaaactcggagagatggatactgaattatttaaagaatggtttcaggcattttcacaatcagctggaattaccttgcatattgaaaacatttatggcgacaatagccaccatattattgagtcttgctataaaggcctagcaagatctctaagagctgcattggagatggatcccagaaataagaagagcattccatccactaaaggctcattataa

SEQ ID NO: 280340 - DNA, 592 bp, Unknown
  Bacterial polypeptide expressing nucleotide sequence isolated from the Sargasso Sea
atggctagaaaaggaaaagtatctcgaaaaacaaaagaaaccagcatcaatgttgaagtaaatattgatggcaaaggtaaataccaaattgatactggtattggctttttggatcacatgcttgaacaattatcaaagcattctttgattgatttaaaagttaaagcaaaaggagatactcatatcgatcttcaccacacaacagaagatacaggtattgctattggtgaagctttaaaaaaagcagctaaaaaatttgtaggaataaaaagatatgcacactcagttattccaatggacgaaacattaacaagagtttcaatagatgtttcaaacagaccttatttgatttggaaagtaaaattaaaagttgagaaacttggtgagatggacactgaactatttaaagaatggtttcaggcattttctcaatctgcaggtattacaatgcatgttgaaaatatttatggggacaatagccaccacataattgaatcttgttataaagcactagcaagatcattaagagctgcattagagatggatccaagaagcaagaaaagtattccatccactaaaggctcattataag

SEQ ID NO: 280341 - DNA, 592 bp, Unknown
  Bacterial polypeptide expressing nucleotide sequence isolated from the Sargasso Sea
tatgagtagaaaagctaaaattttaagaaaaactaaagaaacaaatatctctgttgaagtaaatttagacggaaaagggaaatatcaaattaagaccaatataggttttttagatcatatgttggagcagctctccaagcattctttaattgatatgaaagtaattgccaaaggagatactcatattgatttgcatcacacaactgaagattcaggtattgctatcggggaagctttaaaaaaagcagctgggaatctaaaaggcattaagaggttttcaagcacaataattccaatggatgaaactctaacaagagtttcaatagatatttctaatagaccatatttgatttggaaagtggatctaaaagttgaaaagttgggtgaaatggacacagaactttttaaagagtggttccaagctttttctcaagcggcaggaataactttgcatgttgaaaatatttatggtgaaaatagtcaccacaaaattgagtcttgttttaaagctttggcaaaatctctaagagaggctttagaaatagataagagaattaaaaatattcttccttctaccaaaggcaaactgtaa

SEQ ID NO: 280342 - DNA, 592 bp, Unknown
  Bacterial polypeptide expressing nucleotide sequence isolated from the Sargasso Sea
tatgaaaagaaaagctaaaatctccagaaaaaccaaagaaaccaatatttctgtatcagtcaatttagatggtaaggggaagtacaaaattaaaacaggcgttggttttttagatcacatgttagaacaactatctaaacactctttaatagatttagaagtcaatgctaaaggagatacgcatattgatttgcaccatactactgaagatactggtattgctataggcgaagccataaaaaaggctgcaggtaaccgcaaaggcattacaagatatgcttctacaatgataccaatggacgaaacgctaagccgagtttcaattgatatatccaacagaccctatttaatttggaaagtagatttacctgtagaaaaattaggggaaatggatactgaattatttaaagaatggttccaagcattttctcaatcagcaggaataactttacatgttgaaaatatatatggtgacaatagccatcacaaaattgagtcttgttataaaggtttagctagatcattaaaagatgctttagcgatagacaaaagaattaaaaattcaataccttcgacaaaaggctctatttaa

SEQ ID NO: 280343 - DNA, 592 bp, Unknown
  Bacterial polypeptide expressing nucleotide sequence isolated from the Sargasso Sea
atgaaaagaaaagcaaaaatagctcgaaaaacaaaagaaactaatattagtgtcgaccttaatattgatggaaaaggaaaatacaaagttgacacaggtataggttttttagatcatatgcttgagcagctatcaaagcactcgtctatggatttaaccgttaaagcaaaaggtgacacacacatagatcttcaccacacaactgaagatacaggaattgccattggagaatgcttgaagaaagcttcaaaaaaatttgtaggcattaaaagatatgcacatattttactaccaatggatgaaacattaacaagagttgcaatagatgtttcaaacagaccttatttgatatggaatgtaaaattaaaagttgaaaaacttggagagatggacacagaactatttaaagaatggtttcaagcattttctcaagctgcaggaattacactgcacgtcgaaaacatttatggtgataatagtcaccacattattgagtcttgctataaaggcttagcaagaactttaagagctgcgttagaattggatccaaggaataaaagtacaattccttcgacaaaaggctctttataaa

SEQ ID NO: 280344 - DNA, 592 bp, Unknown
  Bacterial polypeptide expressing nucleotide sequence isolated from the Sargasso Sea
tatgaaaagaaaagcaaaaattacaagaaaaacaaaagaaaccagtatttctgttgtggtgaatttagatggtaaaggaaaatataaagttaaaactggaataggtttcttagatcacatgttagagcaactatctaagcactctttgatagatcttgaagtaaaagctaaaggtgatacgcatattgatcttcaccatactaccgaggatacaggtatagctattggcgaagctattaaaaaagctgcaggaaatcgaagaggaattacaaggtacgcttcaacaatgataccgatggacgaaacattaagccgtgtctccattgatgtatctaatagaccttatttgatttggaaagttgacttggccgtagagaaactaggtgagatggatacggaactatttaaagaatggtttcaagcattttcacaatcagcaggagttactttgcatgttgagaatatttacggtgataatagtcaccacaaagttgagtcgtgttacaaaggtttagctagatcattgaaagatgctttagcgatagataaaagaattaaaaactcaataccttcgacaaaaggctctatttaa

SEQ ID NO: 280345 - DNA, 592 bp, Unknown
  Bacterial polypeptide expressing nucleotide sequence isolated from the Sargasso Sea
atgagtagaaaagctaagattcaaagaaaaaccaaagagacgaatatttccgtagaagtaaatttagacggaaaaggaaaatatcaaataaagaccaaaataggttttttagatcatatgctagagcaactttcaaagcattcactcatagatatgaagatcagtgctaaaggcgatacacatatagatttgcaccacacaaccgaagacactggaatagccataggcgaagctataaaaaaagcagctggaaatttaaaaggaataaaaagatattcaactacgcacattcctatggatgaaactctaacacgtgtttctctggatgtatcaaatagaccttatctgatttggaatgttgatttaaaagttgaaaaacttggtgaaatggatacagaacttttcaaagaatggtttcaagctttttcacaatccgcaggtattactttacatgtagaaaatgtttatggcgacaatagtcatcacaagatcgagtcttgttttaaagccctagcaagatctcttaaagaggcactggaaattgataaaagaattaaaaattcaataccatctacaaaaggttctatttaaa

SEQ ID NO: 280346 - DNA, 592 bp, Unknown
  Bacterial polypeptide expressing nucleotide sequence isolated from the Sargasso Sea
tatgagcagaaaagctaaaattttaagaaaaaccaaagaaacaaatatcgcggccgaagttaacttggatggtaaaggcaaatatcaaatagatacaaaaataggttttctagatcatatgttagaacagttatcaaaacattctatcatagacattaaattaatagcaaaaggggacactcatattgatttacatcacactacagaagattcaggaattgtacttggtgaggcaattaaaaaagccgcaggaaaccgaaaaggtatcaaaagatatgcaagtgcacttattccaatggatgaaactttgactagggtttctatggatatatcaaacaggccttatcttatttggaaggtaggtcttaaagtggaaaaacttggagaaatggatacagagctttttaaagaatggtttcaggcattttcacaatcagctggtatcacgctgcatgttgaaaatatttacggagataatagtcaccacataatagagtcatgttttaaagcattagctatatccttgagagatgcattagaggttgataaaagaattaaaaatatccttccttcaacaaaaggaaaactgtaa

SEQ ID NO: 280347 - DNA, 592 bp, Unknown
  Bacterial polypeptide expressing nucleotide sequence isolated from the Sargasso Sea
atgaagcgaaaagcaaaattaagcagaaaaactaaagaaaccaatatcaatgtagatttaaatattgatggtaagggtaaatacaaaattgaaacgggtataggatttttaaatcatatgcttgaacaattatctaaacattcatcaatggatataaatcttaaagctaaaggtgatactcatatagaccttcatcacactacagaagatacaggaattgctattggagaatgtttaaaaaaagcttctaaaaagtttgtaggaattaaaagatatgctcatgcaatgataccaatggatgaaacattaacacgagttgcaattgatgtttcaaacagaccttatttaatttggaaagttaagcttaaagtagaaaagcttggtgaaatggatactgaactattcaaagaatggttccaggcattttcacaagctgctggaataactttacatgttgaaaatatttatggtgataacagccaccacataattgagtcttgctttaaaggtctagcaagatctttaagagctgcattagaaatggatccaaggaataaaaatacaattccttctacaaaaggttctttataag

SEQ ID NO: 280348 - DNA, 589 bp, Unknown
  Bacterial polypeptide expressing nucleotide sequence isolated from the Sargasso Sea
atggataggatagcaaaagttaaaagagaaactaatgaagttaaagttgatgttgaattaaatatcgacggtactggggattattcaatagatactggaatacctttttttgaccatatgcttgagcagctatcaaaacatggatatttcgatttaaaaattaaagctgtgggggatactgaaattgactttcaccatactgtagaagatgtaggaattactttaggccaagcttttgatgatgctttgggggataaaaaatcgattcaaagatatgggttcagttcaattccttttgatgaaactctgtcatcatctgtaatagatttatgtaataggcccttttttgtcttcaatgttgagctaccttcgtctaaagtaggagagtttgatgtcgaacttactaaagaattcttccagtcttttgcgaataacatcaaagctaatcttcatatagagctaaaatatggtgggaacaaccatcatattattgagtcgatttttaagtctgttgctaaatcacttgattcagcaaccttgattgacccaaggtcaagctctataccatcaactaagggtaatctttagt

SEQ ID NO: 280349 - DNA, 373 bp, Unknown
  Bacterial polypeptide expressing nucleotide sequence isolated from the Sargasso Sea
atgaccgaatcaaatagaacagcgaccatcgagagagacacctccgagacacaaattcaattaaagttggacttagatggaacgggagtttctaaaatagaaacgggcatccctttttttgaacatatgctgacccaaatctctaagcatgggatgttagatttagagattgttgctcagggagatattgaagtagatgcacaccacacggtagaagatgtgggcatagtctttggccaggctctagctaaagcggctggcgataagtctggaatttttcgttacggtcacgcctatgtgcctttggatgaggcgttgtccagagtggttgtcgatcttatcgggacgaccaggtctcttctacgaagttgag

SEQ ID NO: 280350 - DNA, 442 bp, Unknown
  Bacterial polypeptide expressing nucleotide sequence isolated from the Sargasso Sea
atgtcatttctaaggcaatctgaaataaaaagaaaaacgaatgaaaccgatatttctgtatttataaacttagatggcaatggtatttctgagattgataccgggataccattcttagatcatatgcttcatcaaatatcgagtcatggtttgttcgatttaaaaataaaagccattggagatactcatattgatgatcatcatacaaatgaagatgtaggaatcgcattaggcaaagcattttcaaaagccttgggggaaagaaaaggaataagcagatttggacatttctttgccccattagatgaagcattagttcaagtcactttagactgctctggtagaccgcacctatcttatgatcttcaattaaaagcccctagaataggaaattatgatactgaactagtaagagaattttttattgcctttgtaaataaca

SEQ ID NO: 280351 - DNA, 397 bp, Unknown
  Bacterial polypeptide expressing nucleotide sequence isolated from the Sargasso Sea
tatgagaacagcagagtataaaagagacacgaaagaaacctctatctctgtcgatattaatatcgacggaacaggtaagtacgatatcaagactggcataggatttcttgaccacatgcttgaacaactgtcaaagcactcactgattgatatgaagataaaagcaacaggagatactcacattgattatcaccatacaactgaggatacaggcattgcaattggcgaatgtttatcaaaagcattaggtaatcgacaaggtattacacgttatgcgcactcatatattccaatggatgaaacattatcaagagttgcgcttgatctatcaaatagaccttatttaatttggaaagtaaaatttagtgctccaaagataacattcttctcaaggtga

SEQ ID NO: 280352 - DNA, 607 bp, Unknown
  Bacterial polypeptide expressing nucleotide sequence isolated from the Sargasso Sea
aatgtcatctctaaggcaatctgaaataaaaagaaaaacgaatgaaacagatatttctgtatttataaacttagatggcaatggtatttctgagatcgataccgggataccattcttagatcatatgcttcatcaaatatcgagtcatggtttgttcgatttaaaaataaaagcaattggagatactcatattgatgatcatcatacaaatgaagatgtaggaatcgcactaggcaaagcattttcaaaagccttgggagaaagaaaaggaataagcagatttggacatttctttgccccattagatgaagcattagttcaagtcactttagactgctctggtagaccccatctatcttatgatcttcaattaaaagcccctagaataggaaattatgatactgaactagtaagagaattttttattgcctttgtaaataacagcggtattacactgcatattaaccaaatacgaggaagtaattcacatcacatagttgaggcgtgctttaaatctttttcaagagcaatgagaatggctaccgagatagatccaagaagatctaattcaattccaagcagtaaaggaatgttagaaaaacaataa

SEQ ID NO: 280353 - DNA, 592 bp, Unknown
  Bacterial polypeptide expressing nucleotide sequence isolated from the Sargasso Sea
tatgaagcgtaaagcaaaaatatcaagaaaaacaaaagaaacttctattaatgttgatctaaatattgatggaaaaggaaaatataatattgaaacaggtattggttttttaaatcatatgcttgaacaattatcaaaacattcctcaatggatttaacacttaaagcaaaaggcgatactcacattgatcttcatcacacaactgaggataccggtattgcaattggtgaatgcttaaagaaagcctcaaaaaaatttgtaggaataaaaaggtatgcgcatgcgttaataccaatggatgagacattaacaagagtagctatagatgtatcaaatagaccttatttaatttggaacgtaaaacttaaagttgagaaacttggagaaatggataccgaactgtttaaggaatggttccaagcattttcccaggctgctggcattactttgcacgttgaaaatatatatggagacaatagtcaccacataattgagtcttgttttaaaggtttagctagatcattaagagctgctttagaaatggatccaagaaataaaaacacaataccttctacaaaaggttctttataa

SEQ ID NO: 280354 - DNA, 592 bp, Unknown
  Bacterial polypeptide expressing nucleotide sequence isolated from the Sargasso Sea
tatgaaaagaaaagcaaaaatagctagaaaaacaaaagaaaccaatatcagtgttgaccttaatattgatggcaaaggtaagtacaaagttgacacaggaataggattcttggatcacatgctcgagcagttatctaaacactcatccatggatttaactgtcaaagctaaaggtgacacacacattgaccttcaccacacaactgaagacactggaattgctattggagaatgcttaaagaaagcatcaaaaaaatttataggtattaaaagatatgctcatattttgttaccaatggatgaaacattaacaagagttgcaatagatgtttcaaatagaccttatttgatttggaatgtgaaattaaaagttgaaaaacttggagagatggacacagaattattcaaagaatggttccaagcattctcgcaagctgcaggaattacattgcacgttgaaaatatttatggtgacaatagtcaccacatcatagagtcttgctataaaggtctggcaaggactttaagagctgcattggaattagatccaaggaataaaagtacaattccttctactaaaggctctttataa

SEQ ID NO: 280355 - DNA, 592 bp, Unknown
  Bacterial polypeptide expressing nucleotide sequence isolated from the Sargasso Sea
atgaaacgtaaagccaaaataagtagaaaaacaaaagagactaacatcagtgttgatttaaacattgatggtaagggtaagtacaaagttgacacaggtataggatttttagatcacatgcttgaacaattatcaaaacactcttccatggatatgaatattaaagctaaaggtgatacgcacattgatcttcaccatacaactgaagatacaggaattgcaattggtgaatgtttaaaaaaagcatctaaaaaatttgttggtataaaaagatatgcgcatgcaatgataccaatggatgaaacattaactagagttgcaatcgatgtttcaaatagaccttatttaatttggaaagtaaaattgaaagtagaaaaactaggtgagatggatacggaactatttaaagaatggtttcaagctttttcacaagctgcaggagttactttgcacgtagaaaatatttatggcgataacagtcaccacataatagaatcttgctttaaaggattagcacgatcactaagagctgctttagaaatggatccaagaaataaaactacaataccttctacaaaaggttctttataaa

SEQ ID NO: 280356 - DNA, 592 bp, Unknown
  Bacterial polypeptide expressing nucleotide sequence isolated from the Sargasso Sea
tatgaagagaaaagcaaaaataagtagaaaaactaaagagactagtattgctgttgatttaaacattgacggcaaaggtaagtataaaattgacacaggtataggatttttagatcatatgctcgagcaattatcaaagcattcttctatggatatgaatattaaagccaagggagatacacatatagatttacaccatactacagaagatacagggatagctattggtgagtgtttgaaaaaagcttcaaagaaatttattggaattaaaagatatgcacatgcaatgatacctatggatgaaacattaacacgtgttgcaattgatgtttcaaatagaccttatttaatctggaaggttaatcttaaagtagaaaagcttggtgaaatggatacagaattatttaaagaatggttccaagcattttcacaagctgctggtattactttgcacgttgaaaatatttatggtgacaatagccaccatattattgagtcttgctttaaaggtttggcaagatcattgagagctgcgttggagatggatccaagaaataaaaagagtattccatcaactaaaggctcattataa

SEQ ID NO: 280357 - DNA, 601 bp, Unknown
  Bacterial polypeptide expressing nucleotide sequence isolated from the Sargasso Sea
atgagaaaagcatcaataaatagaactacaaaagaaacatcaatttcggtggatattaatcttgacggccaaggtcaatatgagataagcaccggtattggttttcttgaccatatgctagagcaattagcaaagcactcgctgatagatatgaaggttattgccaggggtgacacgcatattgattatcatcatacaactgaagatacaggaattgctataggtgaatgtattgcgaaagctctatctgatcgaaagggaatatctcgatatgcacatttttatattccaatggatgaaacattgtctagagtatctctagatttatcaaatcgtccttatttaatatggaatgttgaattttctgctgcaaaaataacatcatcacaaggagattttgatacggaattatttaaagaatggtttcaagcattttcacaggcaagtggaactaccctgcatgttgaaaatttatatggagtaaataatcatcatattattgagtcttgttttaaagctctggctagaagtttaagaaaagctgtttctattgatgatagacaatctaatgttgttccttcaactaaaggtcaactctagg

SEQ ID NO: 280358 - DNA, 592 bp, Unknown
  Bacterial polypeptide expressing nucleotide sequence isolated from the Sargasso Sea
tatgaaacgtaaagctaaaataagcagaaaaacaaaagagaccaacatcagtgttgatttaaatattgatggtaagggtaagtacaaagttgacacaggtataggatttttagatcacatgcttgagcaattatcaaaacattcttcaatggatatgaatattaaagctaaaggtgatacgcacattgatcttcaccacacaactgaagatactggaattgcaattggtgaatgtttgaaaaaagcatcaaaaaaatttgttggcattaaaagatatgcacatgccatgataccaatggatgaaacattaactagagttgcaattgatgtatcaaatagaccttatttaatttggaaagtaaaattgaaagtagaaaaattaggtgagatggatacagaattatttaaagaatggttccaagctttttcacaagccgcaggaattactttgcatgttgaaaatatttatggcgataacagccaccacataatagaatcttgctttaaaggattagcacgatcattaagagctgctttagaaatggatccaagaaataaaactacaataccttctacaaaaggttctttataa

SEQ ID NO: 280359 - DNA, 592 bp, Unknown
  Bacterial polypeptide expressing nucleotide sequence isolated from the Sargasso Sea
tatgaagcgaaaagcatcaataacaagaaaaacaaaggaaacaaaaattgacgttgaattaaatattgacggtaaaggtcaatacaaaatcgatactggaataggttttcttgatcatatgcttgaacaactttctaaacattcatctattgatttaaaggttaaagcaaaaggcgatacacacatagatctccatcacacaacagaagatactggtattgccattggcgaatgtcttaaaaaagcatcaaaaaaattcattggaattaaaagatatgctcacgcaatgataccaatggatgaaactttaactagagttgcattagatgtttcaaacagaccgtacttaatttggaaagtggatttgaaagtagaaaaacttggagaaatggacacagaactttttaaggaatggtttcaagctttttcacaatctgcaggaattacattacatattgagaatttatatggagacaatagtcaccacaaagtagagtcgtgttttaaaggtttagcaagatcgcttagagctgcattggaaatagatccaaaaaataaaaaagtaattccatctactaagggttctttataa

SEQ ID NO: 280360 - DNA, 564 bp, Unknown
  Bacterial polypeptide expressing nucleotide sequence isolated from the Sargasso Sea
tatgaagcgtaaaggcaaaattagtagaaaaactaaagagacaagtatcagtgttgatttaaatattgatggaaaaggtaaatacaaaattgacacaggtattggttttttaaatcatatgcttgaacaattatctaagcattcatcaattgatatgaacatcaaagctaaaggtgatactcacatcgatttacatcatacaactgaggatactggaattgctattggggaagctttaaaaaaagcatctaaaaaatttgttggtataaaaagatatgcacacgcaatgataccaatggatgaaacattaacaagagttgctatagacgtttccaatagaccatatttgatttggaaggttaagcttaaagttgaaaaattgggtgagatggatacagaactatttaaagagtggttccaggctttttcacaagccgcaggaattacattacacgttgaaaacatttatggtgataatagtcatcacattattgagtcttgtttcaaaggcttagcacgatctttaagaactgcatggaaatggatccaagaaataaaaaatca

SEQ ID NO: 280361 - DNA, 472 bp, Unknown
  Bacterial polypeptide expressing nucleotide sequence isolated from the Sargasso Sea
catgctggatcaattggcgtttcacgggctcgtggacctcgaggtttcctgtgagggtgaccttcgcatcgacagtcatcacacgaccgaagacattgggattgcactcggtcaggccctgaaggaagccctgggagaaaaaaaaggaattcgtcgttatggccatgcctacatcccgatggatgaagctctgctgcgggtggttcttgactgttctggaagacctgatttcgtcttcaacggagaattcggaaggtacaatcttggagacctggatacccagatgattccccatttcttcaaatctctggctttcaactgcggtttaactctgcatctcagtatcctttacggcagtaacgatcatcacaagtgtgaggggcttttcaaagcctttgccagggctctttcggatgcggttacgttggacccaaggaggatgggagtgagttccaccaaagggactctctga

SEQ ID NO: 280362 - DNA, 601 bp, Unknown
  Bacterial polypeptide expressing nucleotide sequence isolated from the Sargasso Sea
tatgagaacagcagagtataaaagagacacgaaagaaacctctatctctgtcgatattaatatcgacggaacaggaaagtacgatatcaagactggcataggatttcttgaccacatgcttgaacagctatcaaagcactcactgattgatatgaagataaaagcaacaggagatactcacattgattatcaccatacaactgaggatacaggcattgcaattggtgaatgtttatcaaaagctttaggtaatcgacaaggtattacacgttatgcgcactcatatattcccatggatgaaacgttatcaagagttgcgcttgatttatcaaatagaccttatttaatttggaaagtaaaatttagtgctccaaagataacatcttctcaaggtgactttgatactgaattatttaaagaatggttccaagcttttgcacaagcaagtggaacaacattacatgtggaaaatatttatggagaaaacaaccatcatataattgaatcttgctttaaggctttggcaagaagtttaagaaatgctgttgcgattaacgagcgagagggaatgaacattccttctaccaaaggacaactttaa

SEQ ID NO: 280363 - DNA, 592 bp, Unknown
  Bacterial polypeptide expressing nucleotide sequence isolated from the Sargasso Sea
tatgccgagaaaagctaaaataaacagaaagacaaaagaaaccattataacggtagaatcaaatattgatggaacaggttcatataaaatagataccaaaataggttttttaaatcatatgttagagcagttatctaaacactctttaatagatttaaaaatttctgccaaaggagacacacatattgatctgcatcacactactgaagacacgggaatagctattggtgaatgtgttaaaaaggcagttggctctgcaaaaggtataagaaggtacgcgcatgcattaattccaatggatgaaactttaactagagtaacgattgatgtttcaaaccgaccatatctaatttggaaagtaaaattaaaagtagaaaaattaggagaaatggatacagaattatttaaagaatggtttcaggctttttcccaagctgctggtattactctgcatgttgaaaatatatatggagataatagccatcatataattgaatcttgctttaaaggacttgctagagcattacgtgaggctttagaggtagataaaagaattaaaaataaaataccttctacaaaaggtaaattataa

SEQ ID NO: 280364 - DNA, 358 bp, Unknown
  Bacterial polypeptide expressing nucleotide sequence isolated from the Sargasso Sea
tatgaaaagaaaagctaaaataagcagaaaaactaaagaaactaacatttcagtcgcagttaatttagacggaaaaggaaagtataaaattaaaactggaattggttttctagatcatatgcttgagcaactagctaagcactcattaattgatctagaagttaaagccaaaggtgatacgcatatcgacctacaccatacaactgaagacactggtatagctattggtgaagctattaaaaaagctgctggcaatagaaaaggaattactagatacgcatcaactatgataccaatggatgaaactcttagtcgagtctcaattgatgtatcgaatagaccttatttaatttggaaa

SEQ ID NO: 280365 - DNA, 592 bp, Unknown
  Bacterial polypeptide expressing nucleotide sequence isolated from the Sargasso Sea
tatgaagcgtaaaggcaaaataagcaggaaaacaaaagaaacaagcattagtgttgatttaaatattgacggtaaaggtaaatacaaaattgacacaggaataggtttcctaaaccacatgcttgaacaactatctaagcattcttcaatagacatgagtataaaagctaaaggtgatactcatattgatctacaccacacaactgaagatacaggaattgctattggtgaagctttaaaaaaagctttgaaaaaatccgttggaattagaagatatgctcacgcgatgatcccaatggacgaaactttatcacgtgtagcaattgatatttcaaatagaccttatttaatttggaaagttaatttaaaagtcgaaaaacttggagagatggatacagaactttttaaagaatggtttcaagcattttctcaagctgctggaattactctacacgttgaaaatatttatggtgataatagtcatcacattatcgaatcttgctacaaaggattagcaaggtcgctaagaactgcattagaaatagatccgaggaataaaaaaacgattccttccacaaaaggttctttataa

SEQ ID NO: 280366 - DNA, 589 bp, Unknown
  Bacterial polypeptide expressing nucleotide sequence isolated from the Sargasso Sea
atgagaacttcatctgtggaaagaaacacaaaagagactaaaatattttgcaaaacaaacattgatggcactggtgaatcaaaaatctctacaggaataggtttttttgatcacatgcttgaaattttttctcatcacagcttagttgatgttgagcttagtgtagatggtgacacacatgtagattttcatcacacagttgaagattcagcttatgctttgtcagaagcaattaacagatctattggaaataaaagaggaataagtagatatggttttttttatattactatggatgaaagtttgtctcgaacagttattgatttttctggaagacccgagcttgtttggaaggtagagcttggtttagagaaaataggcaaaatggacacagagctttttaaagagttttttaaagcatttgctaataatgcgaaatgtaatttgcacattgaaaacttttatggaacaaacaatcatcacataatcgagtcatgctttaagtcttttgcaagaagtgttagatctgcgctcacaattgatgaaagaacaaaaaacataatcccatcttcaaaaggtattctataat

SEQ ID NO: 280367 - DNA, 268 bp, Unknown
  Bacterial polypeptide expressing nucleotide sequence isolated from the Sargasso Sea
gactgctcgggtcggcccggtcttgaatacaatgctaattacccacgtgcaagaattggtgaatttgatgttgaccttatttttgaatttttccaagggtttgttaatcacgcaatgatgactttacatattgataatattagaggacgtaactcacatcatattgccgagacaatatttaaagcatttggtcgttcccttagagttgcagtcgagatcgacccggtcatgaaagatgtactaccatcaactaaaggctcgctctaaa

SEQ ID NO: 280368 - DNA, 349 bp, Unknown
  Bacterial polypeptide expressing nucleotide sequence isolated from the Sargasso Sea
tatgagatcaatagacttagaaagaaatactaaagagacgcaaataaagctttctcttaatttagatggtagtggttctgcagatttatccgtggaattacctttttttgctcatatgctagatcaactcgtcagacatggtgactttgatttacagctaaatgctataggcgatcttgagatcgacgcacatcacactgttgaggatattggaataattctaggcgaagcctttaactctgctttaggcgataaaaaaggcatcaaaaggtttggctctgcttacgcacccctagatgaatctttatcaagagttgttgttgatttctctgggagaccaggattattt

SEQ ID NO: 280369 - DNA, 487 bp, Unknown
  Bacterial polypeptide expressing nucleotide sequence isolated from the Sargasso Sea
tttctagatcatatgcttgagcaactttcaaaacattcctcaattgatataaatttaaaagcaaaaggagatacgcatatagatttacatcatacgacagaagatactggtattgcagttggagagtgtttaaaaaaagcttcaaataaatttataggaataaaacgttatgctcatgcaatgatacccatggatgaaacattaactagagttgcggtggatgtatctaatagaccttatttgatttggaaagtagatttaaaagtagaaaaacttggagaaatggacactgagttatttaaagaatggtttcaggctttttcgcaggcagcaggaataactttgcatattgaaaatttgtatggagagaacagccaccataaaattgaatcgtgttttaagggattggccagatctttgagaagtgctttagaaatagacccaagaaacaaaaaggtaataccttctacaaaaggttcattataaa

SEQ ID NO: 280370 - DNA, 592 bp, Unknown
  Bacterial polypeptide expressing nucleotide sequence isolated from the Sargasso Sea
tatgaagagaaaagccaaaataagtagaaaaacaaaagagacaagtattagtgttgatttaaatatcgatgggaaaggtaaatataaaattgacacaggaatcggtttcttgaaccacatgcttgagcaattatcaaaacactcttcaatggatttaaatgtaaaagccaaaggcgatactcatattgatttacatcacactacagaagatacaggaatagcaattggtgagtgtttaaaaaaagcttctaagaagtttataggcattaaaagatatgctcacatcttgttaccaatggatgaaactttaactcgagttgcaatagatgtctcaaatagaccttatttaatttggaatgttaagcttaaagtagagaaacttggagagatggatactgagttatttaaagaatggttccaagctttttcccaagctgcaggaataactttacacgttgaaaatatttatggtgataacagccatcacataatagaatcttgctataaaggtttagcaagaactttaagagctgcattagaaatggatcctaaaaataaaaatacaattccgtcaactaaaggctcattataa

SEQ ID NO: 280371 - DNA, 601 bp, Unknown
  Bacterial polypeptide expressing nucleotide sequence isolated from the Sargasso Sea
tatgagaactgcaaattataaaagagagacaaaagaaacttccattaacgttgaaattaatattgatggcacaggttcgtataatgtgaaaactggaataggttttcttgaccacatgttggaacaattttcaaagcattcgttaatcgatatgaacattaaggctacaggtgatacacatattgattaccaccacacaacagaagacactggtattgcaataggggaatgcctgtcaaaagcgttaggtaatagacaaggcattaatcgttacgctcactcttacataccaatggatgaaacactttcaagagttgctcttgatctttcaaatcgtccttacttaatatggaatgtaaaatttagtgctcctaaaattacttcttcacaaggtgattttgatacagagctttttaaagaatggtttcaggcatttgcgcaggcaagtggaacgaccctacatgttgagaatatttatggagaaaataatcaccacatcattgagtcatgctttaaagcacttgcacgaagcttaagattagcagttcaagtaaatgaacgtgagggcaacatagtaccttctacaaaaggtcaactataa

SEQ ID NO: 280372 - DNA, 592 bp, Unknown
  Bacterial polypeptide expressing nucleotide sequence isolated from the Sargasso Sea
tatgaaacgtaaagccaaaataagtagaaaaacaaaagagactaatattagcgttgatttaaatattgatggtaagggtaagtacaaagttgacacaggtataggatttttagatcacatgcttgagcaattatcgaaacattcttcgatggatatgaatattaaagctaaaggtgatacgcacattgatcttcaccacacaactgaagatacaggaattgcaattggtgaatgtttaaaaaaagcatctaaaaagtttgttggtataaaaagatatgcaaatgcaatgataccgatggacgaaacattaactagagttgcaattgatgtttcaaacagaccttatttaatttggaaagtaaaattaaaagttgaaaagttaggtgagatggatactgaattatttaaagaatggtttcaagccttttcgcaagctgcaggaattactttacacattgaaaatatttacggtgataacagtcatcacataatcgaatcatgctttaaaggattagcaagatctttacgtgctgctttagaaatggatccaagaaataaaactacaataccttctacaaaaggttctttataa

SEQ ID NO: 280373 - DNA, 592 bp, Unknown
  Bacterial polypeptide expressing nucleotide sequence isolated from the Sargasso Sea
atgactagaaaaggaaaaataactagaaaaactaaagaaaccagcatcaatgttgaagttaatattgacggcaagggtaaatatcaaattgatactggcataggttttttagatcatatgcttgagcaattatcgaagcattcacttattgatcttaaagttaaggccaaaggagatacacatattgatcttcaccatacaacagaagatacaggtattgctattggagaagcattaaaaaaagctgcaaaaaaatttgttggcattaaacgttatgcacatagagttattccaatggatgaaacattaacaagagtagcaattgatgtttcaaacagaccttatttgatttggaaagtaaaattaaaagtagaaaagcttggcgagatggacacagaattgtttaaagaatggtttcaagctttttcccaatcagctggaattacaatgcatgttgaaaatatttatggtgataatagtcaccacattattgagtcttgttataaagctttagcaagatcattaagagaagcgttagagatggatcctaggaacaagaagagtataccatcaactaaaggctcattataag

SEQ ID NO: 280374 - DNA, 592 bp, Unknown
  Bacterial polypeptide expressing nucleotide sequence isolated from the Sargasso Sea
atgaagcgtaaaggtaaaataagcagaaaaactaaagagactagcatcagtgtagatttaaatattgatggtaagggaaaatataaaattgatactgggattggttttttaaaccacatgctagaacagctttcaaaacattcatctatagatatgaatattaaagctaaaggcgacacgcatatcgacttgcatcatactactgaagatacaggtattgcaattggtgaggcattgaaaaaagcttcaaaaaaatttattggaattagaagatatgcacatgcaatgatcccaatggatgaaacactaacaagagtagctattgatgtttcaaatagaccttatttaatttggaaagtaaagcttaaagtagaaaagcttggagaaatggatacagaattatttaaagaatggtttcaggctttttctcaagcagctggaattactttacacgttgaaaatatttatggtgacaatagccatcacattattgagtcttgtttcaaaggtttagcaagatctttaagaactgcattggaaatggacccaaggaataaaaaaacaattccttctaccaaaggttctttataat

SEQ ID NO: 280375 - DNA, 592 bp, Unknown
  Bacterial polypeptide expressing nucleotide sequence isolated from the Sargasso Sea
tatgaaaagaaaagcaaaaatagcgagaaaaacaaaagaaaccaatattagtgtagaccttaatattgatggtaaaggtaagtacaaagttgacacaggaataggttttttagatcacatgctcgaacagttatctaagcactcatcgatggatttaactgttaaagccaaaggtgacacacacattgatcttcaccatacaacagaagacactggaattgctattggagaatgtttaaagaaagcttcaaaaaaatttgtaggcattaaaagatatgctcacatcttactgccgatggatgaaacattaacaagagttgcaatcgatgtttcaaatagaccttatttgatatggaatgtaaaattaaaagttgaaaaacttggtgaaatggatacagaattatttaaagaatggttccaagcattttcacaagcagctggaataacattgcacgtagaaaatatttacggtgataatagccatcacatcatagagtcttgttacaaaggcctagcaaggactttaagagctgcgctagaattggatccaaggaataaaagcacaattccttctaccaaaggctctttatag

SEQ ID NO: 280376 - DNA, 391 bp, Unknown
  Bacterial polypeptide expressing nucleotide sequence isolated from the Sargasso Sea
atgaaaagaaaagcaaaaataacaagaaaaactaaagaaacaagcatctctgtagctgtggatttagatggtaagggtaaatataagattaaaactggaataggttttttagaccacatgttagagcaattatcaaaacactctctaatagatttaaaagttgaagcaaagggcgatacacatattgatttacatcatactaccgaggacaccggtatagcgattggtgaggctattaaaaaagccgcagggaatagaaaaggtatcacgcgatatgcgtcctcaatgataccaatggacgaaacccttagtcgagtttcaatcgatgtatcaaacagaccttatttaatatggaaagtaaatctacctgttgaaaaacttggtgagatgg

SEQ ID NO: 280377 - DNA, 589 bp, Unknown
  Bacterial polypeptide expressing nucleotide sequence isolated from the Sargasso Sea
tatgagaacttcatctgtcgaaagaaacacaaaagagactaggatatattgtaaaacaaacgttgatggcactggtgaatctaaaatttctacaggaataggtttttttgatcacatgcttgaaattttttctcatcacagcttaattgatgttgagcttagtgtagatggcgatacacatgttgattttcatcacactgttgaagattcagcttacgctttgtcagaggcgatcaataaatctattggaaacaaaacaggaataagtagatatggttttttttatatcactatggacgaaagtttgtcccgaacagttattgatttttccggaagacccgaacttgtttggaaggtagagcttggtttagaaaaaataggtgaaatggatacagagctttttaaagagttttttaaagcatttgctaataatgcaaaatgtaatttgcacattgaaaacttctatggaacaaacaaccatcacataatcgagtcatgttttaagtcttttgcaagaagcgttagatctgcgcttacaattgataaaagaacaaaaaacataatcccatcttcaaaaggcattctataa

SEQ ID NO: 280378 - DNA, 592 bp, Unknown
  Bacterial polypeptide expressing nucleotide sequence isolated from the Sargasso Sea
tatgaaaagaaaagcaaaaatagctagaaaaacaaaagaaacaaatatcagtgtcgatttaaacattgatggaaaaggtaagtacaaagttgacacaggaataggttttttagatcacatgcttgagcagttatccaaacattcatcaatggatttaactgttaaagctaaaggtgacacacacattgatcttcaccacactactgaagatactggaattgctattggagaatgcttaaaaaaagcttcaaaaaaatttgtaggtattaaaagatatgctcatattttgttaccaatggatgaaacattaacaagagttgcaatagatgtttctaacagaccttatttgatttggaatgtgaaattaaaagttgaaaaacttggtgagatggacacagaattatttaaagaatggttccaagcattttcacaagctgctggaattactttgcatgttgaaaatatttacggtgataatagtcatcacattatagagtcttgttacaaaggactagctagaactttaagagctgcactagaattagatccaagaaacaaaagtacaataccatctaccaaagggtctctataa

SEQ ID NO: 280379 - DNA, 592 bp, Unknown
  Bacterial polypeptide expressing nucleotide sequence isolated from the Sargasso Sea
atgaaacgtaaagctaacatatctagaaaaactaaagaaacatcaattagtgtggatcttaatattgatggaaaaggtcaatataagatagataccgggatcggttttttgaaccatatgttagaacaactttctaaacactcttctatagatatgaaaataaaagctaaaggagacactcatatagatcttcatcacacaacagaagatactggaatagctatcggagaatgtttaaaaaaagcatcaaagaaatttattggtataaagagatatgcgcatgccatgatacctatggatgagacattaactagagttgcaattgatgtatcaaatagaccttatttaatttggaaagttaaactcaaagtagagaaacttggtgaaatggatacagaactatttaaagaatggttccaagctttttcacaagctgctggaattacattacacgtagaaaatatatatggggataatagtcaccatataatcgaatcttgctttaaaggacttgccagatcacttagagcagcccttgaaatagacccaaagaataaaaaaactataccgtctactaaaggttctttataac

SEQ ID NO: 280380 - DNA, 592 bp, Unknown
  Bacterial polypeptide expressing nucleotide sequence isolated from the Sargasso Sea
tatgaagcgtaaaggcaaaattagtagaaaaacgaaagaaactagcattagtgttgatttgaatattgatggcaagggaaaatataaaattgatactggaataggttttttaaatcatatgctagaacaactatccaaacattcatctattgatatgaatattaaagctaaaggtgatactcatattgatcttcatcatacaacagaagacacaggtatagccattggcgaagcattgaaaaaagctttaaaaaaatctattggtataagaagatacgctcatgcaatgatacctatggatgagactttatctcgagttgctattgatatttcaaatcgaccgtatttaatttggaaagttaatcttaaagttgaaaaacttggagaaatggatacggaattatttaaggaatggtttcaagcttttgcacaagctgctgggattactttacatgttgaaaacatttatggtgataatagtcatcacattattgagtcttgctttaaaggattagctagatcattaagaaccgccttagaaatagatcctaggaataaaaagacaattccatcgaccaagggttctttataa

SEQ ID NO: 280381 - DNA, 440 bp, Unknown
  Bacterial polypeptide expressing nucleotide sequence isolated from the Sargasso Sea
agcaacaggagatacttacattgactatcaccatacgactgaggatacaggaattgcaattggtgaatgtttatcaaaagcattgggtaatcgacaaggtattacacgttatgcgcactcatatattccaatggatgagactttatcaagagttgcgcttgatttatcaaatagaccttatctaatttggaaagtacaatttagtactccaaagataacttcttctcaaggtgattttgatactgaattatttaaagaatggttccaagcttttgcacaagcaagcggtacaacattacatgtagaaaatatttatggagaaaataaccatcatataattgaatcttgcttcaaggctttggcaagaagtttaagaaatgctgttgcgattaacgagcgagagggaatgaatattccttctaccaaaggacaactttaac

SEQ ID NO: 280382 - DNA, 613 bp, Unknown
  Bacterial polypeptide expressing nucleotide sequence isolated from the Sargasso Sea
tatgtcaggcaagagaaaagcaaaagtaactagaaccacaaccgaaacaaaaatctgggcagaggttaatttagatggttcaggtaattataaaatcacgacaggaataggcttcctcgatcatatgcttgagcagctctctaagcattcgcttatagatattaagcttgaagctgaaggtgatcttcatattgacgctcatcataccacagaggattccggttatgttatcggcgaagcaattggaaaggctttaggctcgcgagtgggtataaatcgatttgcccatgccgagatcccaatggatgaatcgctctccagtgtaacgctcgatgtttccggcagaccttttctcgaatggaaagttgtgatgcctaactcgcgccttggtgagatggatactgaactgtttaaagagtggtttagagcatttgctcaggcagcaggaataaccattcatgtaagaaatgcttatggtgaaaattcccaccatattattgagtcgtgtttcaaggccttgggtcgatcactaagggaagcagtagagatagacaaaagaaacgattctgccatcccatctaccaaagggtctattggcggcagggagggatga

SEQ ID NO: 280383 - DNA, 380 bp, Unknown
  Bacterial polypeptide expressing nucleotide sequence isolated from the Sargasso Sea
tatgaagaggaaagcaaaaataagtagaaaaactaaagagactagtattgctgttgatttaaatattgacggtaaaggtaagtataaaattgacacaggcataggatttttagatcatatgcttgagcaattatcaaaacattcttctatggatatgaatattagagctaagggagatactcatattgacttacatcacaccacggaagatacagggatagctattggtgaatgtttgaaaaaagcttcaaagaaatttataggaattaaaagatatgctcatgcaatgataccaatggatgaaacattaacacgtgtagcaattgatgtttcaaacagaccttatttaatttggaaagttaagcttaaagtgggaaaaa

SEQ ID NO: 280384 - DNA, 592 bp, Unknown
  Bacterial polypeptide expressing nucleotide sequence isolated from the Sargasso Sea
tatgaagcgtaaaggcaaaattagtagaaaaactaaagagaccagcattagtgttgatcttaatattgatggtaaaggaaaatataagattgatactggaataggattccttaatcacatgcttgaacagttatcaaaacattcgtcaatcgatatgaacattaaagctaagggtgatactcacattgatcttcaccacacaacggaagacacaggaattgcaattggtgaggcattaaaaaaggctttaaaaaaatctgtcggcataagaagatatgctcatgcaatgattcctatggatgaaactttatcacgtgttgcaatagatatttcaaatagaccatatttaatttggaaagttaagttaaaagtagaaaaacttggagaaatggatacagaattatttaaagaatggtttcaagctttttcacaagcagcaggaattactttacacgttgaaaatatttatggtgacaatagtcaccacattatcgagtcttgttttaaagggttagcaagatctttaagaactgcattagaaatggacccgaggaataaaaaatcaattccttctacaaaaggttctttataa

SEQ ID NO: 280385 - DNA, 592 bp, Unknown
  Bacterial polypeptide expressing nucleotide sequence isolated from the Sargasso Sea
tatgaagcgaaaagcaaaaataagtagaaaaacaaaagagaccagcattagtgttgatttaaatattgatggtaagggcaaatacaaagttgatacaggtataggatttttaaatcatatgcttgagcaattatcaaaacactcctctatggacatgaatataaaagcaaaaggagatactcatattgatctacaccacacaacagaagatacaggtatagctatcggtgagtgcttaaaaaaagcttcaaagaaatttataggaattaaaagatatgcgcatgcaatgataccaatggatgaaacattaaccagagttgcaatagatgtttccaacaggccatatctgatctggaaagttaatcttaaagtggaaaagcttggtgaaatggatactgaattattcaaagaatggttccaagcattttcacaagccgctggtattactttacatgttgaaaatatttatggtgataacagccaccacattattgagtcttgctttaaaggtttagcgagatcattaagagctgcattggagatggacccaaggaataaaaatacaattccttctacaaaaggttctttataa

SEQ ID NO: 280386 - DNA, 550 bp, Unknown
  Bacterial polypeptide expressing nucleotide sequence isolated from the Sargasso Sea
atgaagagaaaagctaaaatttcaagaaaaactaaagaaacatcaataagtgttgatttaaatattgatggcaaaggtacatataaagttgatacaggtataggatttttaaatcacatgcttgagcaattatcaaaacactcatcaatagatttaacactaaaggcaaaaggagatactcacattgatcttcaccacacaactgaagatacaggtattgctataggagaatgtttaaaaaaagcatctaaaaattttgttggaattaaaagatatgctcacgctttattaccaatggatgaaactttaactagagtggctatcgatgtttctaacagaccttatcttatatggaatgttaaactaaaagttgagaaattaggggaaatggatactgaactgtttaaagaatggtttcaagctttttcacaatcagctggcattactttacatgttgaaaatatttatggtgataatagccaccatataattgagtcatgttttaaaggtctagcaagatcacttagatctgctttagaaattgatccaa

SEQ ID NO: 280387 - DNA, 595 bp, Unknown
  Bacterial polypeptide expressing nucleotide sequence isolated from the Sargasso Sea
aatgcccaagtcaagaactgccattatcgaacgtaaaacacgggaaaccctggtaaaggtcaaactgaacctggatggtgaaggaacaagtgaaaccaataccggaatcggttttcttgatcatatgctggatcaattggcgtttcacgggctcatggaccttgcggtttcctgtgagggagaccttcacatcgacagtcatcacaccaccgaagacattgggattgcactcggccaggccctcaaagaatccctgggtgaaaaaaagggaattcgacgttatggccatgcctacatcccgatggatgaagctctgctgcgggcggtacttgactgttctggcaggcctgattttgtcttcaacggagaattcggaaggtacaatcttggagacctggatacccagatgattccccatttcttcaagtccctggctttcaactgcggtttaactctgcatctcagtatcctctacggcagtaacgatcatcataagtgtgaggggcttttcaaagcctttgccagggctttttcagatgcggttacgttggacccaaggaggatgggagtgagttccaccaaagggactctctga

SEQ ID NO: 280388 - DNA, 592 bp, Unknown
  Bacterial polypeptide expressing nucleotide sequence isolated from the Sargasso Sea
tatgaagcgaaaagcatcaataactagaaaaacaaaagagacaaaaattgacgtcgagttaaatatagacggtaaaggtcaatataaaatagataccggcataggtttccttgatcatatgcttgaacaactttctaaacattcatccattgatttaaaggttaaggcaaaaggagatacacacatagatctccatcacacaacagaagatactggtattgcaataggtgaatgtcttaaaaaagcatcaaaaaaattcattggaataaaaaggtacgctcacgcaatgataccaatggatgaaactttaacaagagttgcattagacgtttcaaacagaccatatttaatttggaaggtagatttaaaagtagaaaaacttggagaaatggatacggaattgttcaaagagtggtttcaagccttttcacaatctgctggaattacattgcatattgagaatttatatggcgacaacagtcaccacaaagtagagtcgtgttttaaaggtttagcaagatcgcttagagctgcattagaaatagatccaaaaaataaaaaagtcgtgccatctactaagggctctttataa

SEQ ID NO: 280389 - DNA, 589 bp, Unknown
  Bacterial polypeptide expressing nucleotide sequence isolated from the Sargasso Sea
aatgagaaaacaaagcttaaaaagatctacaaaagagacaattattaattgttcagttaatattgatggcactggaaaaaactcaatttctacaaaaattggcttttttgatcacatgttggaaattttttctaatcatagcttaattgatctaaaattaaatgcaaagggtgatgtgggagtcgatcttcatcacacagttgaagattgtggtttagttctaggagagtcaattaacaaagcattaaaagataaaaaaggcataagaagatatggttttttttacgttcctatggacgagtgccttactagatctgtaatagatttttctggaagatcagaattggtttggagtgtgaaacttggtttaaaaaaattaggagaaatggacaccgaattatttgaagagttttttaaatcatttgcaaaagcatcaaattccaatcttcatataacaaacatttatggaaaaaataatcaccatattatcgaatcttgctttaaggcatttgcaagaagtgtacgaatggctattgaaatagacaaaaaaataaaaaacaaaataccttcttcaaaaggtatattataa

SEQ ID NO: 280390 - DNA, 460 bp, Unknown
  Bacterial polypeptide expressing nucleotide sequence isolated from the Sargasso Sea
tatgaagcgtaaaggtaaaataagcaggaaaacaaaagaaacaagtattagtgttgatttaaatattgatggcaaaggtaaatacaaaattgacacaggaataggttttttaaatcacatgcttgaacaactatcaaagcattcttcaatagacatgaatataaaagctaaaggcgatactcatattgatttacaccacacaactgaagatacaggaattgctattggtgaagcgttaaaaaaagctttaaaaaaatctgttggaattagaaggtatgctcatgctatgattccaatggatgaaactttatcacgtgtagcaattgatatttcaaatagaccttatttaatttggaaagtaaatctaaaagttgaaaagcttggagaaatggacacggaactttttaaagaatggtttcaagcgttttctcatgctgctggaattactcttacatgttga

SEQ ID NO: 280391 - DNA, 550 bp, Unknown
  Bacterial polypeptide expressing nucleotide sequence isolated from the Sargasso Sea
agcattagtgttgatttaaacattgatggcaagggcaagtataaaattaatactggaataggatttttagatcacatgctggaacaattatccaagcactcctctatggacatgaaaattaaagctaaaggagatacacacattgatcttcaccatacaacagaagatacaggtatagctattggtgaatgtttaaaaaaagcttcaaaaaaatttttaggaattaaaaggtatgctcatgcaatgataccaatggatgaaacattaaccagagttgcagttgatgtttcaaacagaccatatttaatttggaaagtaaaacttaaagtagaaaaacttggagaaatggatactgaactattcaaagaatggttccaagcattttcacaagctgcaggaattactttacacgttgaaaatatttatggtgataacagccaccatataattgagtcttgctttaaaggactggcaagatcactaagagctgcattagagatggattcaaggaataaaaatacaattccttctacaaaaggttctttgtaat

SEQ ID NO: 280392 - DNA, 592 bp, Unknown
  Bacterial polypeptide expressing nucleotide sequence isolated from the Sargasso Sea
tatgagtagaaaagctaaaattcaaagaaaaactaaagaaacaaatatttctgttgaggtaaatttagatggaaagggcaaatatcagataaagaccaaaataggttttttagatcacatgctggaacaactttccaaacattcgttaatagatatgaaaataaatgctaagggagatacacacatagacttgcaccatacaacagaagacaccggtatagcaattggtgaagcaattagaaaagctgctggaaatctgaaaggagttaaaagatatgcgactacttacattcctatggatgaaactcttactcgtatctctttagatatatcaaataggccttacttaatttggaatgtggaattaaaagtagaaaaacttggtgagatggacacagaattatttaaagaatggtttcaagcattttctcaatcagcgggagtaactttacacgtagaaaatatttatggtgataacagtcaccacaagattgagtcttgttataaaggtttagcaagatcacttaaagatgctttggcgatagataaaagaattaaaaattcaataccatcgacaaaaggctctatttaa

SEQ ID NO: 280393 - DNA, 592 bp, Unknown
  Bacterial polypeptide expressing nucleotide sequence isolated from the Sargasso Sea
tatgaaacgtaaagccaaaataagtagaaaaactaaagagactaatatcagtgttgatttaaacattgatggtaagggtaagtataaagttgacacaggtataggttttttagatcacatgcttgaacaattatcaaaacactcttcgatggatatgaatattaaagctaaaggcgacacgcacatagatcttcatcacacaactgaagatacaggaattgcaattggtgaatgtttgaaaaaagcatctaaaaaatttgttggtattaaaagatacgctcatgcgatgatacctatggatgaaacattaactagagttgcgattgatgtatcaaacagaccttatttaatttggaaagtaaaattgaaagtagaaaaattaggtgagatggacacagaactgttcaaagaatggttccaagcattttcacaagctgcaggaattactttgcacattgaaaatatctatggtgataatagtcaccacataatagaatcttgcttcaaaggattagcaagatcattacgtgctgctttagaaatggatccaagaaataaaactacaataccttctacaaaaggttctttataa

SEQ ID NO: 280394 - DNA, 592 bp, Unknown
  Bacterial polypeptide expressing nucleotide sequence isolated from the Sargasso Sea
atgaagaggaaagcaaaaattgttagaaaaacaaaagaaaccaatatcaacgttgatttgaatattgatggaaaaggtaaatataaaatagaaactggaataggttttttaaatcatatgcttgagcaattatcaaagcattcatctatagatattaatcttaaagctaaaggtgatacgcatattgatcttcatcacacaactgaagatactggtattgcaattggcgaatgtttaaaaaaagcatctaaaaaatttgttggaataaaaagatatgctcatgccatgataccaatggatgaaacattaacaagagttgcaatagatgtttcaaatagaccttatttaatttggaaagttaaattaaaagtagaaaagttaggagagatggatactgaattattcaaagaatggtttcaagccttttcacaagctgctggagttactttgcatgttgaaaatatttatggtgataacagccaccacataattgagtcttgctttaaaggattagcaagatcactaagagctgcattagaaatggatccaaggaataaaaatacaattccttctacaaaaggttctttataaa

SEQ ID NO: 280395 - DNA, 592 bp, Unknown
  Bacterial polypeptide expressing nucleotide sequence isolated from the Sargasso Sea
atgaaacgtaaagccaaaataagtagaaaaacaaaagagaccaacataagcgttgatttaaacattgatggtaagggtaagtacaaagttgacacaggcataggatttttagatcacatgcttgagcaattatcaaaacactcttcaatggatatgaatattaaagctaaaggtgatacacacattgatcttcaccacacaactgaagatacgggaattgcaattggtgaatgtttaaaaaaagcatctaaaaaatttgttggtataaaaagatatgcccacgctatgataccaatggatgaaacattaactagagttgcaatcgatgtatcaaacagaccatatttaatttggaaagtaaaattgaaagtagaaaaattaggtgagatggatacggaactatttaaagaatggttccaagctttttcacaagctgcaggaattactttacatgttgaaaatatttacggcgataacagccaccacataatcgaatcttgctttaaaggattagcacgatcattaagagctgctttagaaatggacccaagaaataaaactacaataccttctacaaaaggttcattataaa

SEQ ID NO: 280396 - DNA, 373 bp, Unknown
  Bacterial polypeptide expressing nucleotide sequence isolated from the Sargasso Sea
tatgagcagaaaagctaaaattttaagaaaaactaaagaaacaaacatcgcagccgacgttaatttagatggtaaaggaaaataccaaataaagacaaaaattggctttttagatcatatgctagaacaattatcgaaacattctctcattgacattaaattaattgcaaaaggggatactcatattgatttacatcacaccacagaggattcaggtattgtacttggtgaagcaataaaaaaagccgcaggaaaccgaaaaggtatacgaagatacgcaagtgctgttattccaatggatgaaactttgaccagggtttcgattgatatttccaatagaccttacctaatatggaaagttgatcttaaggta

SEQ ID NO: 280397 - DNA, 592 bp, Unknown
  Bacterial polypeptide expressing nucleotide sequence isolated from the Sargasso Sea
tatggctagaaaaggaaaagtttctcgaaaaacaaaagaaaccagtatcaatgttgaattgaacatcgatggtaaaggtaaataccagatcgatactggaataggttttttagatcacatgcttgagcaactatcaaagcattctctaatcgacctgaaagtaaaagcaaaaggagacactcatattgatcttcaccacacgacagaagatacaggaattgcaattggcgaagctttaaaaaaagctgcaaaaaaatttgtaggcatcaaaagatatgcacacagagtaattccaatggatgaaacgttaactagagttgcaatagatgtttcaaacaggccatatttaatttggaaagtaaaattaaaggttgagaaacttggtgagatggatacagaactgtttaaagaatggttccaggcattttcacaagccgcaggtattacaatgcatgtcgaaaatatttatggtgataacagtcaccacatcattgaatcttgctataaagcattagcaagatcattaagagaggcactagagatggaccctagaagcaaaaaaagtattccatccactaaaggctcattataa

SEQ ID NO: 280398 - DNA, 592 bp, Unknown
  Bacterial polypeptide expressing nucleotide sequence isolated from the Sargasso Sea
atgagtagaaaagcaaaaataactaggaaaacaaaagagaccagtatttctgtcgcggttaatctggacggcaaaggaaagtataaaattaaaactggaataggctttttagaccatatgttggagcaattatcaaaacactctctaatagacttagaggtgaaagcaaaaggcgacacacatatagatttacaccacactactgaggatacaggtatagcaattggtgaggctattaaaaaagctgcaggtaatagaaaaggaattacaagatacgcttcaacaatgattcctatggatgaaactttaagcagagtttctatagatgtatcaaatagaccttatttaatctggaaagttaatttacctgtagaaaaattaggtgagatggatacagaactatttaaagagtggtttcaagctttttcacaatcagctggagttactcttcatatcgaaaatatttacggtgaaaacagtcaccacaaaattgagtcatgttacaaaggtttagctagatcattaaaagatgctttagcgatagataaaagaattaaaaactctataccttcgacaaaaggctctatttaaa

SEQ ID NO: 280399 - DNA, 592 bp, Unknown
  Bacterial polypeptide expressing nucleotide sequence isolated from the Sargasso Sea
atgaagcgaaaagcaaaaataagtagaaaaactaaagaaaccaacatcaatgttgatttaaatattgatggtaaaggtaaatataaaattgaaactggaatcggttttttaaatcatatgcttgaacaattatctaagcactcatctatggatataaatcttaaagctaaaggtgacactcatatagatcttcatcatacaacagaagatactggaattgctattggagaatgtttaaaaaaggcatcaaaaaaatttgtaggtattaaaagatacgcacacgcattaattccaatggatgaaacattaactagagttgcgcttgatgtatctaacaggccgtatttaatttggaaagttaaactaaaagttgaaaaacttggtgaaatggatacggaactatttaaagaatggtttcaggcattttcacaagctgctgggattactttacacgttgaaaatatttatggtgataacagccatcacataattgagtcttgttttaaaggtttggcaagatcattaagggctgcattggaaatggatccaaggaataaaaatacaattccttctacaaaaggttctttataag

SEQ ID NO: 280400 - DNA, 592 bp, Unknown
  Bacterial polypeptide expressing nucleotide sequence isolated from the Sargasso Sea
atgagcaggaaagcaaaaattattaggaaaacaaaagagaccaacatttctgtcgcggtcaatatagacggaaaaggaaagtataaaattaaaactggaattggtttcttagatcacatgttggaacaattatcgaagcattctcttatagatttagaagttaaagcacaaggcgatacacatatagatttacaccacactacagaggacacaggcatagcaattggagaagctattaaaaaagcagcaggtaatcgaaaaggaattacacgatatgcttcaacaatgattccgatggatgaaactttaagccgagtttcaattgatatatcgaatagaccatatttaatctggaaagttagtttgccagtcgagaaacttggtgagatggacacagaattatttaaagagtggtttcaagctttttcacaatcagctggaattacccttcacatcgaaaatatttacggtgaaaacagccaccacaaaatcgagtcatgttacaaaggtttagctagatcattaaaagatgctttagcgattgataaaagaattaaaaactcagtaccatcgacaaaaggctctatttaat

SEQ ID NO: 280401 - DNA, 592 bp, Unknown
  Bacterial polypeptide expressing nucleotide sequence isolated from the Sargasso Sea
tatgaagcgaaaagcatcaataacaagaaaaacaaaagaaacaaaaattgacgttgaattaaatatagacggcaaaggtcaatacaaaatagatactggaataggttttcttgatcatatgcttgaacaactttctaaacattcatcgattgatttaaaggttaaagcaaaaggagatacacacatagatctccatcacacaacagaagatactggtattgctattggtgaatgtcttaaaaaagcatcaaaaaaattcattggaattaaaagatatgctcacgcaatgataccaatggatgaaactttaactagagttgcattagacgtttcaaacagaccgtacttaatttggaaagtagatttgaaagtagaaaaacttggagaaatggacacagaactttttaaggaatggtttcaagctttttcacaatctgcaggaattacattacatattgagaatttatatggagacaatagtcaccacaaagtagagtcgtgttttaaaggtttagcaagatcacttagagctgcgttagaaatagatccaaaaaataaaaaagtcgtgccatctactaagggctctttataa

SEQ ID NO: 280402 - DNA, 592 bp, Unknown
  Bacterial polypeptide expressing nucleotide sequence isolated from the Sargasso Sea
catgaagaaaagacaggcaaaaattgaaagaaaaactaacgaaactgacataacagttgaaatcaacgtggatggcattggtgagtcatcgctttcgacaggtatgcctttttttgaacatatgctcgagcaagttgcaaagcatggtggtgttgatctaaaaattgacgccaaaggtgatttgtctgtagatgctcatcatacggtagaggacgttggtatatgtttggggcaagcaatccaaaaagctcttggcgacaagaaaggtataaatagatatggccatgcctatgttccacttgatgaagcactatcgcgagtggttatagatttttctgggagaccaggccttgaatttgctgcgaaatttccaagacagaatataaataattttgacgttgacttaattcatgaattttttcaaggcttttgcaatcatgcaatggcaaccttacatattgacaacattaaaggctcaaacgggcatcatattgctgaaactatttttaaggcttttggtagagccataatgactgccaaagaggttaaaaattacagcgcgcaaatgccatcaacaaaaggcgttctttaa

SEQ ID NO: 280403 - DNA, 460 bp, Unknown
  Bacterial polypeptide expressing nucleotide sequence isolated from the Sargasso Sea
gctaagcatggctgtttcgatatagatctaaaggcaactggcgatttagaagtcgatgctcatcacacagtagaagatataggtataactatgggagaagcttttaatcaagctctcggggataaaaaaggaataacgaggtatggtcatgcatatgcacctcttgatgaagccttatcaagagtagtgatagacttttcaggacgtccaggtcttttatgggatgtcaatttcacaaaacaaacaatcaatgacttcgatttgcaactgctaagagaattttttcagggttttactaataagtctttggcaacgattcatattgataatttaaaaggtgaaaatgctcatcatcaagctgaaacaatatttaaagcgttcgctttggctttaaaacagtcttgctcaattgacgaacaaaaattagatcaaattccctcaactaaggggagtttatagt

SEQ ID NO: 280404 - DNA, 589 bp, Unknown
  Bacterial polypeptide expressing nucleotide sequence isolated from the Sargasso Sea
aatgagaaaagcttcaataaataggaataccaaggaaacctctattaaagttaatattaaccttgatggaactggtaaagcgagcgttacaaccggtattgggtttttggatcacatgatggagcaaatagctaagcattcacttattgatattgatttaaaagctaaaggtgatctccatatagatttacaccataccacagaagacagcggtattgcttttggagaagctttaaaaaaagcattgggtgataaaaaagggattaaaagatatgcaagtgctaccattcctatggatgaaacattaagtagagtttctttggatttatcaaatcgtccttatttagtatggaatgtaaaacttactgtagaaaaacttggcgaaatggatacagagctttttaaagaatggtttcatgcattctcgcaaagtgccgggattacattacacgttgaaaatatttatggtgacaattctcatcataaaattgagtcttgttataaaggtttagcaagagctttgagagaggctgttcaagttgatcaaagagctaaaaatattataccatcgacaaaaggtactatttaa

SEQ ID NO: 280405 - DNA, 537 bp, Unknown
  Bacterial polypeptide expressing nucleotide sequence isolated from the Sargasso Sea
aatgtcatctctaaggcaatctgaaataaaaagaaaaacgaatgagacagatatttctgtatttataaacttagatgggaatggaatttctgagattgataccgggataccattcttagatcatatgcttcatcaaatatccagtcatggtttgttcgatttaaaaataaaagcaattggagatacccatattgatgatcaccatacaaatgaagatgtaggaatcgcattaggcaaagcattttcaaaagccttgggagaaagaaaaggaataagcagatttggacatttctttgccccattagatgaagctttagttcaagtcactttagactgctctggtagaccgcatctatcttatgatcttcaattaaaagctcctaggataggaaattatgatactgaactagtaagagagttttttattgcctttgtaaataacagcggtattactctgcatataaatcaaatacgaggcagtaattcacatcacatagttgaggcgtgctttaaagctttttcaagagcaatgagaat

SEQ ID NO: 280406 - DNA, 601 bp, Unknown
  Bacterial polypeptide expressing nucleotide sequence isolated from the Sargasso Sea
gatgaccgaatcaaatagaacagcgagcatcgagagagacacctccgagacacaaattcgattaaagttggacctagatggaacgggagtttctaaaatagaaacgggcatccctttttttgaacatatgctgacccaaatctctaagcatgggatgttggatttagagattgtcgctcagggagatattgaagtagatgcgcaccacacggtagaagatgtaggcatagtctttggccaggctctagctaaagcggctggcgataagtctggaatttttcgttacggtcatgcctatgtgcctttggatgaggctttgtccagagtggttgttgacctatcgggacgaccaggtctcttctacgaagttgagtacgtgaggtccagagtgggtgactttgatcttgatctgctcagggaattttttcaggggttggttaaccacgggatgttaacccttcatttggacaatttaaaaggcgctaatgctcatcaccaagcggaaacgctgtttaaaggatttggcagggccttgagaatggccttatctgttgatgagaaaaacagaggacacataccgtccacgaaaggtactttgtag

SEQ ID NO: 280407 - DNA, 523 bp, Unknown
  Bacterial polypeptide expressing nucleotide sequence isolated from the Sargasso Sea
gatggttctggaaaaaataaaattgatactggtatcgctttttttgatcacatgctacagcaaataagcacacacagcttaatagatttagaattaaattgtgatggtgatttaaaagtagacatgcaccacactgtagaagatgttggaattgccctaggtgaaagtataaaaaatgcacttggtgataaaaaagggataacaagatttgcacattcttatgtatctttcgatgaaacattaacaagaacagttatagatttatgtaatcgtccgtattttatttggaatgttaaaacatcattagaaaaagttggtgaaatggaccaagaactcttttcagaattttttaaatctatagtgactgaatcaagaatgaattgtcacatcgaaacattatatggacaaaacaatcaccatattattgaaagttgttttaaatcttttgcgatatctctaaagaaagccatatcaatcgacccaaaaaaaaaagatattccgagttcaaaaggtaaactttgaa

SEQ ID NO: 280408 - DNA, 586 bp, Unknown
  Bacterial polypeptide expressing nucleotide sequence isolated from the Sargasso Sea
atgcgccaatttacatttaatagagatacaaaagaaacaaggatatcaattaaaattaaccttgatggttctgggaaaaataaaattgaaacgggaattgctttttttgatcacatgctgcaacaaataagcacccacagtttaatagacttagaattaagatgtgatggtgatttaaaagtagacatgcatcacactgtagaagacgtaggaattgccctaggtgaaagtataaaaaatgcacttggtgataaaaaagggataacaagatttgcacactcttatgtatcttttgatgaaacattaacaagatcagttatagatttatgtaatcgtccatattttatttggaatgttaaaacatcattagaaaaagttggtgaaatggaccaagaacttttttcagagttttttaaatctatagtgactgaatcaagaatgaattgtcatattgaaacattatatggtgaaaataatcaccatattattgaaagttgctttaagtcttttgcgatatctctgaaaaaagcgatatcaatcgaccctaagaaaaaagatattccgagttcaaaaggaaagctttgaa

SEQ ID NO: 280409 - DNA, 589 bp, Unknown
  Bacterial polypeptide expressing nucleotide sequence isolated from the Sargasso Sea
atgagacaagcaaaaataaacagagaaacttctgagacccaaataactatcgacttaaatctggatggatctggtaaaactgaatttgatacaggacttcctttccttgagcacatgcttgaccagataggaaggcatggaatgattgaccttagcgtaaaagccaaaggcgatttgcacatagatgatcatcacaccatcgaagatattggaattacactaggtgaagcttttaacaaagccgtaggagacaaaaaaggtataagaagatatggtcactcctacatacctctagatgaagccctctccagagttgttttagatttttccggcagaccagggcttttcatgaaagtagactttgttaaagaagaggtaggcgggatagatgtaaatatgtttgagcatttttttcaatctttctgcaatcatgctttcataactttgcatattgaaaacttttctggtgaaaatactcatcatcagattgaaactatttttaaagcttttggcagagctcttcgaatggcacttgaagttgactcgaaacaagaaaatgtgattccttctacaaagggtgcactttaaa

SEQ ID NO: 280410 - DNA, 433 bp, Unknown
  Bacterial polypeptide expressing nucleotide sequence isolated from the Sargasso Sea
atgagaaaaattgatttagaaagaaataccaaagaaacgcaaatttcactttctttaaacctagatgggagtggagaaagtaaacataaaatagatttgccatttttctctcacatgcttgaacaagtctcaaaacatggcgattttgacatcagtctttctgcatctggagatcttgaagttgacgcacaccacaccgttgaagacgttggtatttgtatgggcgatgcattcaacaaagctctcggtgaaaaaaaaggaattaagagatttggatcagcttatgctcctttggatgaggctttgtctagagtagttgtagacttttcgggtagaccaggcttgagttggaatgttgaattcacaaaagaatcaatcaatgattttgatttacagttgcttagagaattttttcaaaggttttacaaataaa

SEQ ID NO: 280411 - DNA, 562 bp, Unknown
  Bacterial polypeptide expressing nucleotide sequence isolated from the Sargasso Sea
aatgtcatctctaaggcaatctgaaataaaaagaaaaacgaatgaaacagatatttctgtatttataaacttagatggaaatggaatttctgagattgataccgagattccattcttagatcatatgcttcatcaaatatccagtcatggtttattcgatttaaaaataaaagcaattggagatacccatattgatgatcaccatacaaatgaagatgtaggaatcgcattaggcaaagcattttcaaaagccttgggagaaagaaaaggaataagtagatttggacatttctttgccccattagatgaagcattagttcaagtaactttagactgttccggcagaccacatctatcttatgatcttcaattaaatgctcctagaattggcaattatgatactgaactagtaaaagagttttttattgcctttgtaaataacagtggcattactctgcatattaatcaaataagaggtagcaattcacatcatattgttgaggcttgctttaaagctttttcacgagcaatgagaatggctacagaaatagatccaagaaga

SEQ ID NO: 280412 - DNA, 613 bp, Unknown
  Bacterial polypeptide expressing nucleotide sequence isolated from the Sargasso Sea
atgggccggcaaggaaacatccatcgcgtcaccggcgaaacagaggtccgtgtggccattggtctcgatggcagcggccagtgcgaggtgagtaccggcgtgcccttcctcgaccacatgcttcatcagctggcgagccacgggctctttgatctgacgatcagcgccactggggacacccatatcgatgatcaccacaccaacgaggatgtgggtatcgccttgggccaagcgcttgggcaagccctcgctgatcgacgcggcatccaccgctttggtcactttgtggcacccctcgatgaagccctcgtgcaggtagccctcgactgctcaggccgtccgcacgtcagctattccctgaagatccctgcgcaaaaaatcggcagctacgacaccgagctggtcaaggagttcttcgtggcggtagccaacaacgctgggctcaccctgcacatccgccaactcgatggggtgaattctcaccacatcgtcgaagcctgcttcaaagcctttgcgcgctctttgcgcatggccaccgagatcgatccacgccgcgccagtgcgatccccagcagcaaaggtgtgctcgagcaggccggcacgacgggttgag

SEQ ID NO: 280413 - DNA, 607 bp, Unknown
  Bacterial polypeptide expressing nucleotide sequence isolated from the Sargasso Sea
atgtcatctctaaggcaatctgaaataaaaagaaaaacgaatgaaacagatatttctgtatttataaacttagatgggaatggaatttctgagattgataccgggataccattcttagatcatatgcttcatcaaatatccagtcatggcttgttcgatttaaaaataaaagcaattggagatacccatattgatgatcatcatacaaatgaagatgtaggaatcgcattaggcaaagcattttcaaaagccttgggagaaagaaaaggaattagcagatttggacatttctttgccccattagatgaagcgttagttcaagtcactttagactgctctggtagaccgcatctatcttatgatcttcaattaaaggcccctagaataggaaattatgatactgaactagtaagagagttttttattgcctttgtaaataacagcggtattactctgcatattaatcaaatacgaggaagtaattcacatcacatagttgaggcgtgttttaaagctttttcaagagcaatgagaatggctaccgagatagatccaagaagatctgattcaattccaagcagtaaaggaatgttagaaaaacaataaa

SEQ ID NO: 280414 - DNA, 595 bp, Unknown
  Bacterial polypeptide expressing nucleotide sequence isolated from the Sargasso Sea
atgcgtgaagcaaaagttgcgcgaaaaaccaaggagaccgacattgcggtgtcggtaaacctggatggcaccggaaagtatgacgtggaaaccggcatcggattcctcgatcacatgatggaacagctctcccggcacagtcttatggacctgaccgtgcgggcgaagggcgatctgcacatcgactatcaccacacaaccgaagacagcggcatcgccatcggcgaagcagtgaaccaggcgctaggcgaccgccgcggcatagtgcgttttgccaccgcaacggttcccatggatgaaacgctgagccgggtgtcgatcgatatttccgaccgtccctatctgatctggatggtagaattctcaaagcccaagctgggcgagatggataccgagctgttcaaggaatggttccaggccttcgcccagaatgcgcgggtaacgctgcacgtggaaaacctgtacggcgagaacaaccaccatattgttgaaagctgcttcaaggcgctagcgcgggctttgcgcgccgcctccgataccgatccgcgcgcggcggattccgtgccgtcgaccaagggcacgctgggcggctgac

SEQ ID NO: 280415 - DNA, 589 bp, Unknown
  Bacterial polypeptide expressing nucleotide sequence isolated from the Sargasso Sea
gatgagaaacgctagcatagaaagaaataccaaagaaacgcaaattagtattagtcttgaattagacggttcaggaaaaagttcccaagatgtaaagctacctttttttgcgcacatgttagatcaagtggctaagcatggttgtttcgatattgatctaaaggcaactggtgatttagaagtcgatgctcatcacacggtagaagatataggaataactatgggagaagcttttagccaagctctcggggataaaaaaggaataacaaggtatggtcatgcatatgcacctcttgatgaagctttatcaagagtagtgatagacttttcaggacgtcccggtcttttatgggatgtcaatttcacaaaacaaacaatcaatgacttcgatttgcaattgctaagagaattttttcagggtttcactaataagtctttggcaacgattcatattgataatttaaaaggtgaaaatgctcatcatcaagctgaaacaatatttaaagcattcgctttggctttaaagcagtcttgctcaattgacgaacaaaaatcagatcaaattccctcaactaaggggagtttatag

SEQ ID NO: 280416 - DNA, 607 bp, Unknown
  Bacterial polypeptide expressing nucleotide sequence isolated from the Sargasso Sea
atgtcatctctaaggcaatctgaaataaaaagaaaaacgaatgaaacagatatttctgtatttataaacttagatggaaatggaatttctgagattgatacagggataccattcttagatcatatgcttcatcaaatatccagtcatggtttgttcgatttaaaaataaaagcaattggagatacccatattgatgatcatcatacaaatgaagatgtaggaatcgcattaggcaaagcattttcaaaagccttgggagaaagaaaaggaataagcagatttggacatttctttgcaccattagatgaagcattagttcaagtcactttagactgctctggtagaccgcatctatcttatgatcttcaattaaaagcccctaggataggaaattatgatactgaactagtaagagagttttttattgcctttgtaaataacagcggtattacgctgcatattaatcaaatacgaggaagtaattcacatcacatagttgaggcgtgctttaaagctttttcaagagcaatgagaatggctaccgaaatagatccaagaagatctgattcaattccaagcagtaaaggaatgttagaaaaacaataaa

SEQ ID NO: 280417 - DNA, 550 bp, Unknown
  Bacterial polypeptide expressing nucleotide sequence isolated from the Sargasso Sea
aacaaaaatatcaataaaaattaacctagacggctcaggggtaaataaaattgatactggaattgctttttttgatcatatgattcaacaaataagtacccacagtttgatagacttagagttaaaatgcgatggagatctaaaagttgatatgcaccatactgttgaagatgttggcattgctttaggcgagagtataaaaaacgcccttggtgataaaaaaggtataacacgatttgcacactcttatgtttcttttgatgaaacattaacaagatcagttattgatttttgtaatcgcccgtattttatttggaatgttaaaacatcattagaaaaagttggtgaaatggaccaagagttattttcggaattttttaaatctatagttactgagtcaagaatgaattgccatatcgaaacgttatatggaaaaaataatcaccatatcattgagagctgttttaaatcatttgcgttatccttgaaaaaagcaatatctgttgatcccagaaaaacaagtattccgagttctaaagggaaactttga

SEQ ID NO: 280418 - DNA, 514 bp, Unknown
  Bacterial polypeptide expressing nucleotide sequence isolated from the Sargasso Sea
aagaccgacctttctacaggtttaccttttctagagcatatgcttgaccagattggcaggcatggcatgatcgacctaaaagttaaagcaaaaggcgatttacatatcgatgatcatcacactatcgaagatataggtataactctaggcgaagctttaaataaggctgtaggagataaaaagggaattaaaagatatggtcattcttacgtgccacttgatgaagctctttcaagagtagttttagacttttcaggaagacccggattacatatgaaagtagattttgttaaggatactgttggaggcatagacgtgaatatgtttgagcatttttttcagtctttatgcaatcatgcttttttaactctacatatagaaaattttacaggagacaatactcatcatcagattgaaacaatttttaaagcatttggaagagctttgcgcatggctttagagattgattcaagacaaggcaatgaaattccttctactaaaggttctttataac

SEQ ID NO: 280419 - DNA, 477 bp, Unknown
  Bacterial polypeptide expressing nucleotide sequence isolated from the Sargasso Sea
acatgctcgaccagatcgcccgtcatggtctgatcgacctcgatatcgagtgcaagggcgatctgcatatcgacgaccaccacaccgtcgaggacgtcggcattaccctcggccaggccttcaccaaggccattggcgacaagaagggcatgactcgttacggccattcctatgtgccgctggacgaagcgctgtcgcgcgtggtgatcgacttctccggtcgcccgggcctgcagatgcacgtgccgttcacccgtgcggtggtcggcaacttcgatgtcgatctgttccaggagttcttccagggcttcgtcaaccacgcgctggtgtcgctacacatcgacaatctgcgtgggcacaacacccaccaccagatcgagactgtgttcaaggccttcggccgcgcgctgcgcatggccgtggaactggacccgcgcatggccgggcagatgccgtcgaccaagggctgcctgtaaa

SEQ ID NO: 280420 - DNA, 595 bp, Unknown
  Bacterial polypeptide expressing nucleotide sequence isolated from the Sargasso Sea
attgaatagaaaagcagaagtagagcgcgtcacaaacgaaacaaatataaagatcagcgtagaccttgatggcaatggaaaattgacagctaacacaggattgccttttttagagcacatgttggagcaggtagcgaaacacggttgcattgacctttcggttaaggcagaaggtgacttggaaatagatgcccaccatacggtagaagaccttggaataacattgggacaggccgttaacgaggctgttgggaggaaaacatctataaggcgttatggacattcttatgtcccgctagatgaggcactatcacgagtagtgatcgatctttcagggagaccaggtctctcttataacgtgagttttcctagatctcacgtcgttggagatttcgatgttgatttgtttttcgagttttttcaaggcttcgtaaatcacctacaatgtactctccatatagattgcctaagaggacacaactctcatcacattattgagaccatctttaagtctcttgggcggtccctgaggatggcgatagaattagatccgagaatgaaagatcagcttcccagcaccaaaggcaccctctag

SEQ ID NO: 280421 - DNA, 607 bp, Unknown; identical to SEQ ID NO: 280416
  Bacterial polypeptide expressing nucleotide sequence isolated from the Sargasso Sea

SEQ ID NO: 280422 - DNA, 586 bp, Unknown
  Bacterial polypeptide expressing nucleotide sequence isolated from the Sargasso Sea
aatgtcatctctaaggcaatctgaaataaaaagaaaaacgaatgaaacagatatttctgtatttataaacttagatggaaatggaatttctgagattgatactgggataccattcttagatcatatgcttcatcaaatatccagtcatggtttgttcgatttaaaaataaaagcaattggagatacgcatattgatgatcaccatacaaatgaagatgtaggaatcgcattaggcaaagcattttcaaaagccttgggagaaagaaaaggaataagtagatttggacatttctttgccccattagatgaagcattagttcaagtgactttagactgttccggcagaccacatctatcttatgatcttcaattaaatgctcctagaattggcaattatgatactgaactagtaaaagagttctttattgcctttgtaaataacagtggcattactctgcatattaatcaaataagaggtagcaattcacatcatattgttgaggcttgctttaaagctttttcacgagcaatgagaatggctaccgaaatagatctaagaagatctgattcaatcccaagcagtaaa

SEQ ID NO: 280423 - DNA, 442 bp, Unknown
  Bacterial polypeptide expressing nucleotide sequence isolated from the Sargasso Sea
catgcgcagtggaaccgtgcatcgggtcaccggtgaaaccaatgtgaaggtgcgcctcgatctcgatggcagcgggagctgccaggcctcaaccggagtgccgtttctcgatcacatgctgcatcagatcagcagtcacggtctgctggatctggagattcaggctgttggtgatacccatatcgacgaccatcacaccaatgaggatgtgggcattgccgttggtcaggccctggctcaggccctgggagaccgtcgcggcattcatcgtttcggccatttcgtcgcgcctttggatgaggccctggtgcaggtggcgctcgattgctccggtcgaccgcatctcagctacagcctggagatcccatcccagaagatcggcacgtatgacaccgagctcgtgaaggagttcttcgtggccgtggtgaaaacagcggcatga

SEQ ID NO: 280424 - DNA, 607 bp, Unknown
  Bacterial polypeptide expressing nucleotide sequence isolated from the Sargasso Sea
aatgtcatctctaaggcaatctgaaataaaaagaaaaacgaatgaaacagatatttctgtatttataaacttagatggaaatggaatttctgagattgataccgggataccattcttagatcatatgcttcatcaaatatccagtcatggtttgttcgatttaaaaataaaagcaattggagatacccatattgatgatcatcatacaaatgaagatgtaggaatcgcattaggcaaagcattttcaaaagccttgggagaaagaaaaggaataagcagatttggacatttctttgccccattagatgaagcattagttcaagtcactttagactgctctggtagaccgcatctatcttatgatcttcaattaaaagcccctagaataggaaattatgatactgaactagtaagagagttttttattgcctttgtaaataacagcggtattactctgcatattaatcaaatacgaggaagtaattcacatcacatagttgaggcgtgctttaaagctttttcaagagcaatgagaatggctaccgaaatagatccaagaagatctgattcaattccaagcagtaaaggaatgttagaaaaacaataa

SEQ ID NO: 280425 - DNA, 589 bp, Unknown
  Bacterial polypeptide expressing nucleotide sequence isolated from the Sargasso Sea
catgagaaaaattcaggaaagtagaaaaaccaaggaaacagacattaccctttctttaaatcttgatggctcaggtaatagtaatctctctgcaaatttaccttttttggaacatatgcttgatcaaactactcgttattcctcaatagatcttgacttaaatgcaaaaggtgatcttgaaatagatgctcatcatactgtagaagatattggaattacactgggtgctgcattcgataaggctcttggtgataagaaaggaattcatagatttggctatgcttatatccctcttgatgaagctttgtcacgagttgttatagatttttcaggtcgaccaggtcttatatataatgcaacctacccaagagcaagagtaggagaatttgatgttgaacttttgagtgaattttttcatggctttagtaatcatgctaaagctactattcatattgataatattagaggaaagaatgctcaccatatagcggagacaatattcaaagcattcggtaaagctttaaaaatggccatctcttttgacaaaaaaaatataaataagataccatcgactaaagaatttctttga

SEQ ID NO: 280426 - DNA, 610 bp, Unknown
  Bacterial polypeptide expressing nucleotide sequence isolated from the Sargasso Sea
atgaccgaaatttcatcagttgactcgcgctccactcgtgtcgagcgcaacacgaaagagacgcaaattgagattttcctcaatctagatggttctggaaaacttgattcccaaacttcgctgccatttcttgatcatatgcttgaccaaatagctagacatggcctgatggatattgctatcaaggcgaagggtgacttggaaatagatgcccatcatactgtcgaggatattggaataacccttggtcaggcttttaatagtgccttggacaagacaggtatccgccgatacgggcacgcttatgttcccctcgatgaggctctttccagagtagtattagattgttctgggaggccaggccttgaatacaaagtggattttgtaaagggtacagtgggtgactttgacgtcgacttgtttcacgagttcttccaggggttcgttaatcatgccttggttacgctgcatatcgataatatccgaggaaagaatgcgcatcatcaaatagaaacgatatttaaggcatttgggagagcgctaagaatggccgttgaactcgacccgcgggctaaaaatgtagtgccgtctacgaagggtagtttataga

SEQ ID NO: 280427 - DNA, 601 bp, Unknown
  Bacterial polypeptide expressing nucleotide sequence isolated from the Sargasso Sea
aatgagtaaaagaacagctaaaattcaaagagatactaaagaaactcagatctcttgcgaagtaaacattgatggtatcggagaatccgagatagaaacaggcattggttttttagatcatatgcttgatagcttttctcgacattctctcatagaccttaagcttaatgctaaaggtgatttacatgttgaccaacaccacactgttgaggacactggaattgttattggactagcgattgcagatgccttaggtgatttttccggtattagaagatttggaaatattcatatgccaatggatgaaactctaactagggtttctatagatgtttcaaagagaccacacttagaatggtctgttaaattttctaaaccattattaggagaaatggatacagaacttttccatgaatggttcgctgcgtttgcacaaaatcttggtgcaaccatacatgttgagaatatctatggtgaaaacaaccatcacatagcagagtcatgttttaaaggtcttgctcgttgtataagagaagctctttctattgatccaagagagggagataggattccatcaagcaaaggaagtctcggaaactaa

SEQ ID NO: 280428 - DNA, 589 bp, Unknown
  Bacterial polypeptide expressing nucleotide sequence isolated from the Sargasso Sea
atgagaaaggtagttgtaaatagagatacttcggagacccaaatagctattgagctaaatctagacgggacaggtaaaacagagtttgataccggattaccttttcttgaacatatgcttgatcagattggcaggcatggaatgattgatcttagtattaaagctaagggcgatttgcatattgacgaccaccacaccattgaagatataggtatttcactaggagaagcttttaataaagcaataggagataaaaagggcataagaagatatggtcagtcctatatcccactagatgaagctctttcaagagttgtattagatttttcgggaagacctggattgttcatgaaagtcgattttgtgaaagaagaggtcggcggcattgatgtcaacatgttcgaacacttctttcaatcactcagcaatcatgcttttatgactcttcacattgagaacttctatggtgaaaacacgcatcaccaaattgaaaccatttttaaagcttttggaagggcattaaggatggctctggaaatagattcaaaacaggccgatattatcccttcaacaaaaggagctttgtagg

SEQ ID NO: 280429 - DNA, 475 bp, Unknown
  Bacterial polypeptide expressing nucleotide sequence isolated from the Sargasso Sea
tatgctcgaccagataggaaggcatggtatggttgatttaacagttaatgccaaaggtgacttgcatatagatgatcaccatactattgaagacataggcatcaccttaggtgaggcattgaataaagctgtaggagataaaaagggaattaagaggtatggacactcttatgtgccgcttgatgaggccctttcaagagtagtattagatttttctggaagaccagggctgcacatgaaagtagattttgttaaagatacagttggaggtatagatgtgaatatgtttgagcacttcttccagtccttatgcaatcatgcttttttgactttacacatagaaaatttttctggagacaacacccatcatcagatagagacaatttttaaagcatttggaagagctctacgcatggctttagagattgatccaaggcaagataatgagataccttctactaaaggttctttataa

SEQ ID NO: 280430 - DNA, 589 bp, Unknown
  Bacterial polypeptide expressing nucleotide sequence isolated from the Sargasso Sea
atgagaaaagtaacgataaatagagatacctctgaaactcagatctccatagatttgaatctagacggtacaggtcaaaccgaatttgatactggtttgcctttcctcgagcacatgctcgaccaaattggtagacatggaatgatagacctagtcatcaaggctaaaggtgacttacatattgacgatcatcacacaattgaagacattggtatttctttaggtgaggccttcaataaagctgttggcgataaaaagggcataaagagatatggtcactcatatgttccattagatgaagctctatctagagtcgtcttagatttttctggaagaccaggactacatatgaaagtagattttgtgaaagaggaagttggcggtatagatgtgaatatgtttgaacacttttttcaatctttctgtaatcatgccttcatcacgctgcatatagaaaatttttctggagaaaatactcatcatcaaattgaaactatatttaaggcctttggaagagctttaagaatggcattagagatagatactaaacaagaaaatattattccttctacaaaaggagcattgtagg

SEQ ID NO: 280431 - DNA, 601 bp, Unknown
  Bacterial polypeptide expressing nucleotide sequence isolated from the Sargasso Sea
atgcgtaaagcaaaagttcagagaaatacaaaagagacaaaaatttctgctactgtcaatttggacggaacaggaagatctaaaattgagacaggcataggctttcttgatcatatggttgaacaaatttcacgccacggtttaatagaccttgacttgaaagcaaaaggagatttacatattgacgatcaccatacaacggaagattcaggatatgtcttaggagatgctatagctaaggctttaggagaaagaaagggaattagtcgatatggaaatgcgcatatacctatggatgaaaccttaacgagagttgtaattgatttatctggtcgtccttatttggtatggaaagttgctttcactcaaaaaagactaggagaaatggatactgagctttttaaggaatggttccaagctttttctcaggccttaggagcaaatattcatgtagaaaacctttatggaacaaataaccatcatataatagaatcttgttataaaggtttggctagatcgttaagagatgctgttgaattagttccaagaatatctggcaaagtgccgtctactaaaggcgttttacgaaaagacggctagt

SEQ ID NO: 280432 - DNA, 601 bp, Unknown
  Bacterial polypeptide expressing nucleotide sequence isolated from the Sargasso Sea
atgagtaaaagaacagctaaaattcaaagagatacaaaagagactcaaatctcgtgcgaggtaaatattgatggtataggagaatctgagatcgaaacaggaataggttttttagaccacatgcttgatagtttttctcgacattctcttatagacttgaaacttaatgctaagggtgatttacatgtcgaccaacatcatacagtcgaagacaccggaattgttattggattagcaattgccgatgctctgggagatttctccggtattaaaagatttggtaatattcatatgccgatggatgaaactttaactagggtttctattgatgtttcaaagcgaccacatttagaatggtctgtaaaattttctaaaccactattgggagaaatggatacagagctttttcatgaatggtttgcagcttttgcacaaaatcttggtgcaacacttcatgttgagaatatttatggagaaaataaccatcatatagcagagtcttgttttaagggtcttgcacgctgtattagagaagcactatctattgacccaagagaaggagatagggttccttcaagcaaaggaagtctcggaaattaaa

SEQ ID NO: 280433 - DNA, 595 bp, Unknown
  Bacterial polypeptide expressing nucleotide sequence isolated from the Sargasso Sea
atgtcccagtctagaactgccagtatcgaacgtaaaacccgggaaaccctggtgagggtcaaactgaacctggatggtgaagggacaagtgaaaccaataccggtatcggttttcttgatcatatgctggatcaattggcgtttcacgggcacatggacctcgcggtttcctgcgagggggaccttcacatcgacagtcatcacaccatcgaagacattggaattgcacttggccaagccctgaaagaagccctgggtgataaaaagggaattcgtcgttatggccatgcctacatcccgatggatgaagctctgttgcgtgcggtacttgactgttctggcagacctgatttcgtcttcaacggagaatttggaaggtacaatcttggagacctggatacccagatgattccccatttcttcaaatctctggctttcaactgcggtttaactctgcatctcagtgtcctctacggcagtaacgatcatcataagtgtgaggggcttttcaaagcctttgccagggctctttcggatgcggttacgttggacccaaggaggatgggagtgagttccaccaaagggactctctgat

SEQ ID NO: 280434 - DNA, 445 bp, Unknown
  Bacterial polypeptide expressing nucleotide sequence isolated from the Sargasso Sea
atggcacgtcagggagacatccatcgggttaccggtgaaaccgatgtgaaggtgcgtctggatctggatggctccggccagtgccaggccagcaccggcgtgccctttctcgaccacatgcttcatcagatcagcagccacggcctgatcgacctggagatcaatgcggtgggagacacccatatcgatgatcaccacaccaatgaggacgtgggcattgccgtggggcaggccctctcccaggccctgggcgaccgccgcggcattcaccgcttcggtcacttcgtggcgccgttggatgaggctcttgtgcaggtggccctggattgttccggacgcccccatctgagctacagcctcagcattcccagtcagaagatcggcagctacgacaccgagttggtgaaggagttcttcgtggcggtggtgaacaacagcggcctca

SEQ ID NO: 280435 - DNA, 361 bp, Unknown
  Bacterial polypeptide expressing nucleotide sequence isolated from the Sargasso Sea
agcctttataaagcaataggagataagaagggtataagaagatatggccagtcctatatcccactggatgaagctctctcaagagtagtattagatttttcaggaagaccaggattattcatgaaagtagattttgtcaaagaagaggttgggggcattgacgtcaatatgtttgaacacttctttcaatcactcagtaatcacgcttttatgactcttcacattgagaacttctatggtgaaaacacgcatcatcaaattgaaaccatttttaaagcttttggaagagcattaagaatggctctggaaatagattcaaagcaggccgatattatcccgtcaacaaaaggagctttgtagg

SEQ ID NO: 280436 - DNA, 595 bp, Unknown
  Bacterial polypeptide expressing nucleotide sequence isolated from the Sargasso Sea
tatgaaaaatcgaactgcgaaagtaaagagagagactaaagaaacacaaattattcttaatatagatttagatggacagggtaaatctagtatagatgcgggattgcctttcctagagcatatgttggaacaggttgcgagacatgggatgtttgatatcgttttgaatgcgaaaggtgaccttcatattgatgctcatcacacggttgaagatataggtattgttcttgggcaagctatcgacaatgcgcttggtgataaacttgggatatctcgatttggttctgcatatgtccctcttgatgaatcattatctagagttgttctggatttttcaggtagaccgggtttaacttataacgtctcatatccgagatcaagagtgggagattttgatattgacttactccaagaatttttccaaggatttgttaatcacgctaaagctacactgcatatagacaatataagaggcggaaactctcatcatattgcagagactatttttaaagcttttgcgaaagcacttcgaagctctgtaagtgttgatgtaagaaattcaaaacagataccatctactaaagaaaaaatttaa

SEQ ID NO: 280437 - DNA, 607 bp, Unknown
  Bacterial polypeptide expressing nucleotide sequence isolated from the Sargasso Sea
aatgtcatctctaaggcaatctgaaataaaaagaaaaacgaatgaaacagatatttctgtatttataaacttagatgggaatgggatttccgaaattgaaaccgggatacctttcttagatcatatgcttcatcaaatatccagtcatggtttattcgatttaaaaataaaagcaattggagatacccatattgatgatcatcatacaaatgaagatgtaggaattgcattaggcaaagcattttcaagagccttgggagaaagaaaaggaataagtagattcggacatttctttgccccattagatgaagcattagttcaagtgactttagactgttccggcagaccacatctatcttatgatcttcaattaaaagcccctagaattggcaattatgatactgaactagtaaaagagttttttattgcctttgtaaataacagtggtattactctgcatattaatcaaataagaggtagcaattcacatcatatagttgaggcttgctttaaagctttttcacgagcaatgagaatggctactgaaatagatcaaagaagatctgattcaattccaagcagtaaaggaatgctagaaaatcaataa

SEQ ID NO: 280438 - DNA, 478 bp, Unknown
  Bacterial polypeptide expressing nucleotide sequence isolated from the Sargasso Sea
catgctggaccagatcgcccgtcacgggctgatcgacctggatatcgtcggcaaaggcgacctgcatatcgacgaccaccacatggtggaagacgtgggcatcaccctcggccaggcgtttgccaaggctatcggcgacaaaaaaggcatccgtcgctacggccatgcttatgtcccgttggatgaagcgctgtcccgtgtggtcatcgacttctccggtcgcccgggtttgcagatgcacgtgccgtacacccgcgctaacgtgggccgtggctttgacgtcgacctgttccaggaattcttccagggctttgtcaaccacgcactggtcagcctgcacatcgacaacctgcgcggcaccaacacccaccaccagatcgaaaccgtgttcaaggctttcggccgcgcactgcgcatggccgtcgaagtcgatgagcgcatgggcgggcaaatgccgtcgaccaagggcgtcctgtaa

SEQ ID NO: 280439 - DNA, 533 bp, Unknown
  Bacterial polypeptide expressing nucleotide sequence isolated from the Sargasso Sea
ttgtctcgacggcaccggccagtgcaccctcgatacggggctgccttttctcgagcatatgctggatcagattgcccgacacggtcaggtggatctcgatatcaccgccaagggagacctgcacatcgatgcacaccacacggtggaagacatcggcattaccctcgggcaggcgttcagccaagcgattggcgacaagaagggcatcgtgcgctacgggcacgcctatgtgccgctcgatgaggcgctatcgcgggtggtgattgactgcagcggtcgcccggggctcgaatttcatgtgccctttacccgcgccaaagtcggggagtttgatgttgatctggtggtcgagttctttcagggctttgtgaaccacgccgacgtcacactgcacatcgacaacctccgcggacacaacgcgcaccaccaggccgagaccgtgttcaaggccttcggccgggcgttgcgcatggccgttgcgcccgatgcggccatggccggcaccagcccctcgaccaaaggggttttgtaag

SEQ ID NO: 280440 - DNA, 589 bp, Unknown
  Bacterial polypeptide expressing nucleotide sequence isolated from the Sargasso Sea
tatgcgaaatagcaaggttattagaaaaacaaaagaaactaatattacttgtgagataaatttagatggactgggggtctctgaaatttctacaggtattggtttttttgatcatatgcttgagttattgtctcaccacagcttaatagatattaaaatatctgttgagggagacactcatgtagattttcatcacaccgtagaagatacaggttatgcgcttgcttcagcaattcaggaggccctaggagacaaaaaaggaattaaaagatatggttttttttatgttccaatggatgaatgcttgtctcgatgtgtattagatttttctggcagaccagagttaatttggcacatagaattaggattaaaaaaaattggagaaatggatacagaactattccaagaattttttaaagcttttacaaatgaatcaaagtgtaacctacacttggaaaatctatatggaaagaataatcaccacataattgagtcttgctttaaagcttttgcaaaaagtttaagaatttcaattgagatagatgaaaaaataaaaaatattattccgtcttctaaaggcactctttaa

SEQ ID NO: 280441 - DNA, 589 bp, Unknown
  Bacterial polypeptide expressing nucleotide sequence isolated from the Sargasso Sea
catgcgtgtggcggaagtcgttcgcaataccagcgaaacgcagatccgtgtgaagctcaatctcgacggcacgggccagcagaagctggccaccggcgtgtcgttcctcgaccatatgctcgaccagatcgcgcgacacggtctggtcgatctcgaggttgaagcgcatggcgatacgcatatcgacgaccaccacacggtcgaagatgtcggcatcacgctcgggcaggccgtcgcgaaggcgatcggtgaccgcaagggcatccgccgctacggccattcgtacgtgccgctcgacgaggcgctgtcgcgcgtcgtgatcgacttctccggccggccgggcctcgaattccacgtgccgttcacgcgggcgcggatcggcacgttcgacgtcgacctgtcgatcgaattcttccgcggtttcgtgaaccacgcgggcgtcacgctgcacatcgacaacctgcgcgggatcaacgcgcaccatcagctcgagacggtgttcaaggccttcggccgtgcgctgcgcgcagcggtggagctggacgagcgtgcggcggggcagatcccgtcgacgaagggcagtctctga

SEQ ID NO: 280442 - DNA, 145 bp, Unknown
  Bacterial polypeptide expressing nucleotide sequence isolated from the Sargasso Sea
ggctacgacaacgctgccaaaattgcaaagacagcacttaaaaacaatactactttaaaacatgaaacattaaaaacaggccttatatcagaaaaagattacaataagatagttgatcccaaaaagatgatctacccagcataag

SEQ ID NO: 280443 - DNA, 317 bp, Unknown
  Bacterial polypeptide expressing nucleotide sequence isolated from the Sargasso Sea
aatgaaattaagaaaagaatttgacagtattggaccaattaatgtcccaaaagacaaatactggggagcttcaacacaaagatctaaaaaatatttcgatattggtgaatttctagtaagacctattttaataaaatctattgcaataattaaaaaagctgcagcaattgttcatagtaaagaaaaacaaattttacctaatatttctaaggcaataataaaagcttcaaacgaggtaatttcaggaaaattagaacaacattttcctctaaaagtttggcaaacaggttctggtacacaaaccaatatgaatgtta

SEQ ID NO: 280444 - DNA, 235 bp, Unknown
  Bacterial polypeptide expressing nucleotide sequence isolated from the Sargasso Sea
aatgagttacagaattgaaaaagataccattggtgaaattaaggtgccttcagacaaatattggggagctcaaactgaacggtctagaaataatttcaagataggaccttcagggtcaatgcccattgaaattatacatgcctttgcagtattgaaaaaagcagctgctatcaccaattccaagcttggagtgctggaagaaaaaaagatgaaactcatttctcaagtatgtgat

SEQ ID NO: 280445 - DNA, 797 bp, Unknown
  Bacterial polypeptide expressing nucleotide sequence isolated from the Sargasso Sea
ggatgcacttccagtgacagtaggaagtgaatttggtgcatatgttacatctttaacaaatgcaagaaatgaaattattgcatcacaaaaagaattagctcaagttgcacttggaggaactgctgttggaacaggagcaaatacaccaaaaggttatcgtaaagcagtgattactgaattagctagagtttcaaaattaccattaaaaccacaaaaagatatgcagtactcattacaaagtaaatttccggttgcaaatgcatcatctgcattgaaaaactttgcaatagaactaggtaaagtttcaaatgatatcagattgatggcatcaggtccagttgcaggcttatcagaattaggaattcctgcagtacacgcgggatcatcaatcatgccaggaaaagtaaatccatcattagcagaatgtatgaacatgatttgttttagtgttataggaaacgatactacagtttcatttgcagcgcaagcaggtcaatttgaactcaatgtgatgttaccaggaatgctaaaagcagtattagattcaacggatatgctaacaaactttttgccaatattttctgcaaatcttattgacggattaactgcaaaccaaactaaactaagagagaatattgagaatagcccagtaattgtaacactgctaacacctaagattggatatttgaaatctgcagaattattcaaagaatctctaaagtcgggaaagacaatcagagaattagtggtatcaaaaaagttaatgacagataaagaagtcacttcactgatgagtt

SEQ ID NO: 280446 - DNA, 250 bp, Unknown
  Bacterial polypeptide expressing nucleotide sequence isolated from the Sargasso Sea
atgacaaaaaactttaggattgaaaaagatagtatgggaacaatagaggttcccatggaagctttgtggggcgctcaaacacaaagatcgataataaatttttctattggagaagaattaattccaattgagttaatttattcactcaccctcataaaaaaagctgcttcaattgcgaatttcaatttaggtttaatagataaaagcaaaaaagatttaattgtagaggcatgtacagaaatacttgatg

SEQ ID NO: 280447 - DNA, 417 bp, Unknown
  Bacterial polypeptide expressing nucleotide sequence isolated from the Sargasso Sea
gtaaggttaatcccacccaatgcgaagctctaacacaagtttgcttgcatatttttgggaataatactgccatttcaatagctggcagtcagggccatttccagttgaacgtatttaacccaatgatggcattcaattttttacaatcggtaaagctcatgacagatgccgcaatttcatttgaaaaaaattgcttggatggtcttgaggcgaggcatgaaaatatcaagttaaacctcgaaagatcacttatgcttgtaaccgcactagcgccaaaaatcggctacgataaagcagcagaacttgccaaattagctcacaagaacaatacaacattgaaagaagaggcgctaaaatctggttatgtcgatgaagtggaatttgactcgcttgtagacccaaaaaaaatgatatgat

SEQ ID NO: 280448 - DNA, 331 bp, Unknown
  Bacterial polypeptide expressing nucleotide sequence isolated from the Sargasso Sea
atgaaattaagaaaagaattcgatagcattggaagtgttaatgttcctaatgataaattatggggagcatctacgcaaagatctaataagttttttaatattggtaaaattttagtaagtatttctatcgtcaaatctattgcaattattaaaagatctgcagcaatagttcatgcaaaagataaattaattgataataaaatttctaaagcaattattagagcttcagatgaggtaattaaaggtaagttagatgataatttcccattaaaagtctggcaaacaggttctggaacacaaacaaatatgaatgtaaatgaagttatgctaa

SEQ ID NO: 280449 - DNA, 379 bp, Unknown
  Bacterial polypeptide expressing nucleotide sequence isolated from the Sargasso Sea
tatggggaatgatgtttcaataacttttgcaggtgctagtggaaattttgagctaaatgtatataggcctgtaatggcgtataatattcttgagtctattaaattattgtctgatgcttcagaatcattcaccaaaaatactgtaattggtattgaaccaaatattaatagaattaatgataatctatataattctctaatgcttgtaactgcgttgaaccctaagattggatatgataaagcagcagccgtggcaaagaattcttacaaaaaaaacatatctctaaaagaatctgccatgcaattgggctacttaactggagaggaatttgataaactagttcagcctaaagatatgatatttccatctaaaaaataa

SEQ ID NO: 280450 - DNA, 326 bp, Unknown
  Bacterial polypeptide expressing nucleotide sequence isolated from the Sargasso Sea
gttaaatgtttttaagcctctattcgcttacaatattatagaatcatcaaaaatactaggtgatgcatgtttgagcttcgcaaaaaactgtattgatggtctaaaaccaaataaaaagaaaatagaaagatttttaaaagactcattaatgcttgtaactgctttaaattcaaaaattggttattacaaagcagcagaaatagctaataaagcttataaagaagacattaggcttaaagaagcatgtattcaactaaattatttatcagaaaaagagtttgataaatatgtcaatcctgaaagaatgacaaaaaatgaaggttgaa

SEQ ID NO: 280451 - DNA, 160 bp, Unknown
  Bacterial polypeptide expressing nucleotide sequence isolated from the Sargasso Sea
aatgacaaaaaactttaggattgaaaaagatagtatgggaacaatagaggttcccatccaagctttgtggggtgcccaaacacaaagatcaataataaatttttctattggagaagaattaattccaattgagttaatttattcactcaccctcataaaa

SEQ ID NO: 280452 - DNA, 784 bp, Unknown
  Bacterial polypeptide expressing nucleotide sequence isolated from the Sargasso Sea
tacactaggaagtgaatttgcagcatatgttacatctttaacaaatgcaagagatgaaattgtcgcatcacaaaaagaattagctcaagttgcactaggtggaactgcagtaggaacaggagcaaacacaccaaaaggttatcgtaatgtagtgattaccgaattagctagagtttcaaaattaccattaaaaccacaaaaagatatgcagtattcattacaaagtaaatttccagttgcaaatgcatcatcagctttgaagaattttgcaattgaattgagtaaagtttcaaatgacatcagattaatggcatcaggaccagttgcaggattatcagaattaggaattcctgcagtccacgcaggttcttcaatcatgccgggaaaagtaaatccatcattggctgaatgtatgaatatgatttgttttagtgtaataggaaatgatacaacagtttcttttgcagtacaagcaggacaatttgaactaaatgtcatgttgcctggaatgctaaaagcaatactagattcaactgatatgctaacaaactttttgccaatattttctgcaaatcttgttgatggtcttactgcaaaccaaaccaaacttagagaaaatatagaaaacagccctgtgattgtaacattgctaacacctaagattggttatttgaaatctgctgaattattcaaagaatctctcaagtctggaaagacaattagagaattagtggtatcaaagaagttaatgacagataaagaagtcactgcattgatgagttag

SEQ ID NO: 280453 - DNA, 175 bp, Unknown
  Bacterial polypeptide expressing nucleotide sequence isolated from the Sargasso Sea
tatgcttgtgactgctttggcaccaaaaattggttacgacaacgctgcaaaaatagctaaggctgccttaaaaaataagacgactttaaaaaatgaagctcttaaatcaggattaattaatgaaaaagattataataaaatagttgatccaaaaaaaatgatttacccagcataa

SEQ ID NO: 280454 - DNA, 268 bp, Unknown
  Bacterial polypeptide expressing nucleotide sequence isolated from the Sargasso Sea
aatgtcggactcggccaacggctttgcaaaatactgtataaagggtttaaaggcagataaaaaaagaataaagtttttactcaataattcattaatgctagttactgctttatctccaaagattggctatgataatgcggctaaagtagcaaaaaaagcccacgcaaatggtacgaccttaaaagaggaagctttaaaaacaggattgattagtgaaaaagaattcataaaaattgttgatcctaaaaaaatgacaagaccaagataa

SEQ ID NO: 280455 - DNA, 274 bp, Unknown
  Bacterial polypeptide expressing nucleotide sequence isolated from the Sargasso Sea
agatttattaagtgatagtacaaaaaattttgcaatttattgtataagaggattaaaggcagataagaaaaaaataaaacaacatttggataactcattaatgatggtaactgctttggcaccttatataggatatgataacgccgcaaaaattgcaaaaaatgcattaaaaaataatacaaatttgagagaagaagctattaaaacaaagttaataactgcaagagaatatgataaaattgtagatccaaaaaaaatgatcaatccaagctaa

SEQ ID NO: 280456 - DNA, 298 bp, Unknown
  Bacterial polypeptide expressing nucleotide sequence isolated from the Sargasso Sea
atgaccaaaaactttaggattgaaaaagatagtatgggaacaatagaggttcccatggaagctttgtggggtgctcaaacacaaagatcgataataaatttttctattggagaagaattaattccaattgagttaatttattcactgaccctcataaaaaaagctgcttcaattgcgaatttcaatttaggtttaatagataaaaggaaaaaagatttgattgtagaggcatgtacggaaatacttgatgggcttcacgattcacagtttccattaaaggtttggcaaaccaggtagt

SEQ ID NO: 280457 - DNA, 381 bp, Unknown
  Bacterial polypeptide expressing nucleotide sequence isolated from the Sargasso Sea
tatgaaatatagaattgaaaaagacacaatgggtgaagttaaagttcctcatgacgcactttggggagctcaaacacagcgtgctttagaaaattttaagatcagtggaatcaaatttgcattcccatttggtagaagcttcatagaagctataggaattattaaatttgctgcagcttcatctaaccaaaaactaaaattacttgatgcaaggaaagctcaggcaataaagattgctgcaaaggaggttatgtcaggcaaacatgataatcaattcccacttgatgtatttcaaacaggctcaggtacaagtaccaacatgaatgcaaatgaggtaaattctaatttagcctcaaagagagctcggattaaatcaatgct

SEQ ID NO: 280458 - DNA, 145 bp, Unknown
  Bacterial polypeptide expressing nucleotide sequence isolated from the Sargasso Sea
gatgggaaaatttagaattgaaaatgacagtattggcgaaataagagtacctactgataaatattggggtgcacagacacagagatctataattaattttccgataggctgggaaaagcaacctgaagcgataattaaggctctt

SEQ ID NO: 280459 - DNA, 893 bp, Unknown
  Bacterial polypeptide expressing nucleotide sequence isolated from the Sargasso Sea
ctcggacgcacttataaagaaatgaaaaatacagacaaatcaaaagaatggtttaaggaagctgctaaatatttaaatacctattatggtcaactttcatttatggagattaatcctaaagaaaaatttactttaccaactcaagaaaaagaagatgaaaaatttaaaaaggaattctataaaaacccattgatacaaaatataaaattacttaaagagctagacagagctgaatattctaaacattttcttaaacatttagcttctataaatatagaaaaaggaagtgagatactggcaggtgagcttgctatagaaattggcagatatgattatgctatccaaattgctaaaaaagcctcatatgaaaaaagattttttgatcagttgaattatccaataattcaaactccagatattgttaacaaaaaagctatgcctaaatctgaacttgttttatctgttataaggcaagaaagcgaatttgattctgatgccactagttatgtaggtgcaagaggtttaatgcaattaatgacttacacagcaaaactagtagctaaacaagcaaaactttcatattcaaaaagtaaactaaaaaatcctgattataatattaaattgggatcttactatttagcaggattacttgagcaatatgaaggttcatatccttttgcattagcggcttataacgcaggacctaaaagagttaaatattggaaaaaaattaatggagatccgcaaaaaggaaaaattagttatgttgattggattgagttaataaaatttaaagaaacaagaaattatgttcagcgtgttttagaaaatattaatgtctataaatatatgatttatggaaaacctgtaatcatttataatttttttgaaga

SEQ ID NO: 280460 - DNA, 310 bp, Unknown
  Bacterial polypeptide expressing nucleotide sequence isolated from the Sargasso Sea
atgaaatatagaaaagaattcgatagtataggcagtataaatgttccttcagataaatactggggtgcatcgacccaaagatcaaaaaaatactttgatattggtgattttcttgtaagacctgttttgattaaatctattgcaattgtcaaaaaatcagcagcaatagtaaattttagaaataaaagcatagaaaaaaaaatatgttcagcaatcgttagagcatcaaatgaaattattcagggtaaacttgctgataattttcctttaaaagtatggcaaacaggttctggaacacaaacaaatatga

SEQ ID NO: 280461 - DNA, 159 bp, Unknown
  Bacterial polypeptide expressing nucleotide sequence isolated from the Sargasso Sea
tatctccaaagattggctacgataacgcagcaaagattgctaagaatgcattaaaaaacaaaactactctaaaagctgaagcactgaaatcagggttaattaatgagagagaatacaataaaattgttgatcctaataaaatgataaaaccagactaac

SEQ ID NO: 280462 - DNA, 133 bp, Unknown
  Bacterial polypeptide expressing nucleotide sequence isolated from the Sargasso Sea
aatgccaggaaaagtcaatccaacacaatgtgaagcaatttcaatggtttgtgcacaaataattggaaatgacatggctgtgagttttgcaggggctaaaggtcactttgagttaaatgtttttaagccccta

SEQ ID NO: 280463 - DNA, 357 bp, Unknown
  Bacterial polypeptide expressing nucleotide sequence isolated from the Sargasso Sea
ttgaatatgcagtttccatggcgaattctagcggtactttacaaatgaatgaatataagcctcttattggatttaatatacttacaagtttaaaattacttaaaaatgcaatagacaacttcagaataaaattagttgatgggatggaacctaatcaaaaaaaaatgaagttaaatttagaaaattcactaatgttagttacagccatagtgccaaaaattggttatgaaaaagcagccgaaattgcaaaccttgctttcaaagaatcaataaatttaaaagaggcaacgcttaaattaggttatctaaacgaggatgaatttaatgaggcaatggatattaattcaatgatttaat

SEQ ID NO: 280464 - DNA, 79 bp, Unknown
  Bacterial polypeptide expressing nucleotide sequence isolated from the Sargasso Sea
tgatgaaattgctaatgatatcagatttttaggttctggaccaagagcaggatatgggggaattaatcttaccagctaa

SEQ ID NO: 280465 - DNA, 235 bp, Unknown
  Bacterial polypeptide expressing nucleotide sequence isolated from the Sargasso Sea
ctgtattaaaggattgaaggcagacaaaaaaacaatcaaaaattatttagataactctttaatgcttgtaactgcattatctccaaaagtgggttacgacaacgcagcaaaaattgcaaaaaaggctcacaaaaatggaacaactttaaaagaagaggcaataaaatctggattaataaaagaaaaagaatatgacaaaattgttaatcctaaaaatatgattgcaccaaaataa

SEQ ID NO: 280466 - DNA, 151 bp, Unknown
  Bacterial polypeptide expressing nucleotide sequence isolated from the Sargasso Sea
aaaaattggctatgataatgctgctaaaattgcaaagagagcattaaaaaataatactaaattaaaagatgaaactttaaagaccggtcttattacagaaaacgagtatgacagaatagttaatcctatcaatatgacttatccaaaataa

SEQ ID NO: 280467 - DNA, 844 bp, Unknown
  Bacterial polypeptide expressing nucleotide sequence isolated from the Sargasso Sea
actggtcgaactcatttgatggatgccatgcccgttgattttgcagaagaactttatgcatggtcaagtcaactaaagtcttcaaaagaaatgctattaatcattgaaaaaaaattacttgagctaccacaaggtggaacagctgttgggagtgggatcaatgctcacaaaaatttttcgaaatattttgcccaggaaatgacaaaacttttgggaaagggcaaaaaatgcgttcctagcaaaaacttttatcacgaattgagcgcacaagattgttccgttcagttatctggagaactcaaaaatctagccttagtacttatgaaaatatccaatgatctcagatggatgaatagtggtccattagctggactttctgagattgagttaaaggctcttcaaccaggaagtagtatcatgcctggtaaagtcaatccagtcattcctgaagcagtcgcaatggcatccgctgatgttattgggaatgacgtatcaataacagttgctgctcaatctggtaattttcaacttaatgttatgttaccagtgatagcttataaccttcttaaaagtattaatcttttatcaggcgcaatgaatgttctatcaaaaaatactattagcagctttaaagtaaacaagaaaaatcttgaagtgtcattatctaaaaatccaattcttgttactgcattaaatccaataattggatatgaaaagtctgcatttattgttaaaaaagcttataaagaaaacagaccaataattgatgttgcagctgaggagactgacataccaaaagctaaactggctaaattactcgatccatcaaagctagcaaagggcg

SEQ ID NO: 280468 - DNA, 874 bp, Unknown
  Bacterial polypeptide expressing nucleotide sequence isolated from the Sargasso Sea
tcttagcctgaacaaccttgcccttgagacaggagcaggaagccttactctcgcaggtccattatctttgagcaacaatggacagctcaattcgacagcaggtacaatcacgctttcctcaggcgggagtgcagcatccggagcaacagtttcaattccaggcagcacacttgtcctgcagagcggactctcgctcagtggctcaacactgaaggccagcggcacaaccttcaccacaaacaataacacgattgcgcttaacggcagtatccttgaggtacagggaacacaggaccttaccggtgtggttccagacaattcaagcacactgcgccttggagcgaatgcaactatcaatgacagctcggccctctctgttggcacgcttgaccttgcaaactttgcacttactctggatgaccagatggcaggcctgactgtgggacaggcggttacactggatgctgctacagaacagataatcagcggagctgctgatttgtctctgggcggtggtatcactgtaagtaacggaatcctctcctcaacaggaggtactctctctgcttcaagcttcagtgcaggtgcagcagcaaaagttaacatactgggcggaaccttgatactgcctgcgggaggaacggcagtcagcggagctgcaatcacaacatctaatgcggcaatctcactgacgggaaccctggtagttgcagacacattgacaagtaccggtacaaacctctctctgactggagatgcgatactttcaagcacggcgcctctttcattggctactctgtcaacaaatggtaaagacttcaagctagccaacgctacaacggatcttaccctgacagacagcttcacgctttca

SEQ ID NO: 280469 - DNA, 304 bp, Unknown
  Bacterial polypeptide expressing nucleotide sequence isolated from the Sargasso Sea
atgaaaacgagaaaagaatatgatagcatcggaggaatagatgttcctgtggataagtattgggggccatcgactcaaagatcaaacaaatattttgatattggtgaaattttagttgaaccaatcgtaatcaaaactattgcaatcattaaaaaagcaattgctaaagtaaatgccgaaaatggggatttaaacaaaaaaataagcaacgcaataattaaagcttcgaatgaggtaatatctggaaaattaaaagataattttccattaaaagtttggcaaactggttctggaacacaaacaa

SEQ ID NO: 280470 - DNA, 175 bp, Unknown
  Bacterial polypeptide expressing nucleotide sequence isolated from the Sargasso Sea
atgttagttactgcactagcacctcatattggctatgacaatgctgcaaagattgctaaatcagctttaaaaaaaggaaccactttaagagaggaagctttaaaaactaatttaattagtaaaaaagattttgacataattgtagatcctaaaaaaatgatttacccaaaataag

SEQ ID NO: 280471 - DNA, 949 bp, Unknown
  Bacterial polypeptide expressing nucleotide sequence isolated from the Sargasso Sea
taccggagtggttccaacacttcaagcacactgcgccttggcgccaatgcaaatatcgacagcagttcagcactctctgttgggacacttgaccttgcaaactttgcactcactctggatgaccagatggcaggactgactgtgggacaggcggttacactggatgctgcaacagaacagataataagcggggatgcggatttgtctctcagcggaggtatcactgtaagcaacggaatcctctcctcaacaggaggtactctctctgcttcaggcttcagtgcaggtgcagcagcaaaagttaacatactgggcggaaccttgatactgcctgcgggaggaacggcagtcagcggagctgcaatcacaacatctaatgctggaatctcactgacgggaaccctggcggttgcagacacattgacaagtaccagtacaaacctatctctaactggagatgcgatactttcaagcacggcgccgatatccctggctactctttcaacaaacggtaaagacttcaagcttgccaacgcgaccacggatctgaccctggcaaacaacttcacgctttcatccgggaagctgagtacccagggtggtgatcttatctttgcgggcagtgcgaatatttctgataatgcttctcttgatgcaacggtaactaccggaacagcaggaaaacttgaattcaagcagggcggaactgcgtcaggaaccataaacgcaggtaacggaactttcaaactcggtgcagactataaagttgacggtaccctgataacaggcaacggtaccacatgggatttagggacttcaaagcttgacctgtctgcaggatcactggttcttggcggtaacgttgttctggataatgtaatcactaataaccagacaagatttgagctggctgaagatgcaacagttaccaggaatgcaggcttcactc

SEQ ID NO: 280472 - DNA, 253 bp, Unknown
  Bacterial polypeptide expressing nucleotide sequence isolated from the Sargasso Sea
aaaaattttgctctatattgtgtcaaaggaataaaagctaataaaaagaaaatccaagaacatctagataattcacttatgctagtaactgctttagctccacatattggttatgataatgctgcaacgatagcaaaaactgcacttaaaaataataccactttaaaatatgaaactttaaagacaggattaataaacgaaaaagaatataataaaattgttgatcctaaaaagatgatctatccagcataac

SEQ ID NO: 280473 - DNA, 706 bp, Unknown
  Bacterial polypeptide expressing nucleotide sequence isolated from the Sargasso Sea
gatgcctatatcggattttacagaatttttaaaaaattcagatgaatatcaaaatctttacaattccatcaacaaaactaaatctaatattcaaattcaaacaattgacgaatcagttgcatttttatgctcttcaatagcatctgactaccaaagaccaacattaattatttgtccatcagcatttcatgcaataaatcttcaagaaaacctttctgcatggacatcctcaaatatcttgcgtttcccagaagtagaaaatcttccttacgaaagaattatttctgacaaggaaacctccatgagtagaatagacacaattactaaaattaccaattcaaatcacttccctctagttgtaagttctgtatcagcaatttgccaacaaacaatcgaatcatctacattaattctatcctcaaaagaattgatgagaaatcaaaaaattactatggaagagcttacaagatttctccaacaaacaggctacgaatttgagtctacagttacagaccaaggaacatttagtagaagaggagggattttggacattttccctgtaggatctgataatccctacagaatagagttttggggaaacgaaatagacagcatcagacgttttgatcccgaaacacaaaaatcaattagtgaaatcaatgaatttcaactttttcctgcaaatgaaatttctcctttcttttct

SEQ ID NO: 280474 - DNA, 571 bp, Unknown
  Bacterial polypeptide expressing nucleotide sequence isolated from the Sargasso Sea
ggtgcgcagcttaaaactctagcagtcagtctgctaaagattgtaaatgatctgcgctggatgaattcaggtccgaacggaggacttgctgaaattcagcttgcagctcttcagccgggatcatcaattatgcctggaaaggtgaaccctgtgatagaagaatcaatggccatggtctgtgcgcaggtcataggatacgatacttcaataagtgtgggcggattatcaggtaattttgaattaaacgtgatgctgccgatggttgctcacagtctgttggagtcaatccgtcttctggcaaatgcttctcataaccttgctgaaaggtcggtatcaagaatcgaggtgcgagaagatcatatcaactccctcacaggaaagaatcctatcctggtaacaactcttaacccactgataggatacgacctggcagcaaaaatcgccaaaaaagcgtttgcagaaaatcggccactcaagtctgttgcaatggaaatgtgtgatctttctgaagaagaactagacaaggcgctagacccgtcgaagatgacaaagggaggatttgttgattgat

SEQ ID NO: 280475 - DNA, 226 bp, Unknown
  Bacterial polypeptide expressing nucleotide sequence isolated from the Sargasso Sea
aatgacaaaaaactttaggattgaaaaagatagtatgggaactatagaggttcccatagaagctttgtggggtgctcaaacacaaagatcgataataaatttttctattggagaagaattaattccaattgagttaatttattcactcacccttataaaaaaagctgcttcaattgcaaatttcaatttaggtttaatagataaaagaaaaaaagatttgattgta

SEQ ID NO: 280476 - DNA, 928 bp, Unknown
  Bacterial polypeptide expressing nucleotide sequence isolated from the Sargasso Sea
aaaaaaattaatgccagcattaaatttactcattgaaactttagagaaaaaagctgaatcagtggagggtattacaaagacaggcaggacgcatcttatggatgcaatgccggtggatatgtctgatgaattaaatgcttggaatacacaactcaaatgttccagagaatctattgcagttgttttagaaaaacttttacttctcccgcaaggaggaactgcggttggatcaggaataaatgcacataaaaggttttcaaaagaattctctaaggagctttcaaagcttacaggttttaaaactaagccaagcaaagatttctttagaaacctgagtgcacaagatttatctgtgcaactatctggagaacttaaaaatctggctacaatccttttaaaaatatctaatgatcttaggtggatgaatagtggacccttatctggaatctctgaaattgaactccaagctcttcaacctggcagcagcataatgcctgggaaagtaaaccctgtaatccctgaggccgtagcaatggccgcagcagatgttattggtaacgatgtttctataacagttgcagctcaatcaggaaacttccaacttaatgtaatgttgcctgtaatagcttattgcaacttgaaaagtgtaaatatacttgctggtagcatgaatgttcttgctaaaaaagctataaagactttcaaggtaaatcataaaaaaattgatgaatcactttcaagaaatcctatcttggtaactgctttgaatccggttattggctatcaaaaagctgcagctattgctaagagagcttataaagaatcaaggcctgtaatcgatattgctcacgaggaaactggaatttctatatcaagactcaaaaaactgctagacccttcgaaattagctaagggtggtatcaagtca

SEQ ID NO: 280477 - DNA, 808 bp, Unknown
  Bacterial polypeptide expressing nucleotide sequence isolated from the Sargasso Sea
gaaataaaaaaattagttgttaaatataattcagagttacgtaaaatatgttttgcacattgtcctgaaagagttttgcctggtaatatcatttttgaaataaaaaacagtccaagaattgtaggggggtctaataaaaaagatagtaaagaagttaaaaagttttatagtacatttgtaaatggtgaaattattgaaacaagttcaaacatagctgaaatgtgtaaattgacagaaaactcgtttagagacgttaacatagcttttgctaatgagctttcaattatatgtgataaaaataacatgaacgtaaacgaagtaataaaaatagcaaatttacatcctagagtgaatgttttaaatccaggaataggcgttggaggacactgtataccagttgatccatggtttttaattcatgattttcaaaatgaaacaaaattattacaatctgcacgtcttgttaacactaataaaactgaatacgtaatcaaagctattattagagagatacacgcatttagtaaaaaaatgaataaaaaaccaataatttcctttttgggtttgagttacaagccaaatacaggtgacattagagaatctcctgctataaatatcattaaagagattaaattacatataaatcaatattttatagtcgacccttttgtagataaatttttaggtaaaaaactgactattttagatgaagctattaataactctgatttgataataaaattagtagctcacgattgttttttagacttagaaaaaaataaaatcagttataacataatagacttca

SEQ ID NO: 280478 - DNA, 149 bp, Unknown
  Bacterial polypeptide expressing nucleotide sequence isolated from the Sargasso Sea
aattggttatgataatgcagcaaaaattgcaaaacgtgctttaaaaaataaaacaacattaagacatgaaactttaaagactggattaataaatgagaaagaatacgataaagttattaatccaagaaaaatgatttatccttcataat

SEQ ID NO: 280479 - DNA, 856 bp, Unknown
  Bacterial polypeptide expressing nucleotide sequence isolated from the Sargasso Sea
aagaactcatcttatggatgcaatgcctatagattttgcagatgaattatctgcatggtcgagtcaattaaagaattctctaaacagtcttaaacttattgaggctaggcttttagagctaccccaaggtggaactgccgttggaacagggattaatgctcacaaaagatttgccaaactctttgctcaagaaatcactaagttatctgggaacaaatataaaagtgttgcaagtaacaacttctttcatgagctaagttctcaagataccgctgttcaattatctggtgaattaaaaaacttagcagttggtttgatgaagatttctaatgatttgcgatggatgaacagcggacctttagctggactatcagagatagagttacaggctttacaaccaggaagcagcattatgccaggtaaggtaaatccagtaattccagaggctgtaaccatggtctctgccgatgttataggaaatgatgtaagcattactgtagcagcacaagcaggaaactatcagttaaacgtaatgcttcccgtcgtggcctataacttgcttaaaagtattaatctcctctcaggcgcttgcgatgttcttgcaaataaagcaatcaaaaccttcaaggtgaacaaaaagaatttagaatcgtccttggcaaaaaatccaatacttgtcactgcccttaatccaattattggttacaaaaaagctgctgaaatcgccaaaaaagcttatgaagagaatagaccaatcattgatgttgcagctgaggagacaaaactgtccgttgcaagattaaagaaattattagatcctgcaaagctatcaaagggtggaattcatgaaagttga

SEQ ID NO: 280480 - DNA, 643 bp, Unknown
  Bacterial polypeptide expressing nucleotide sequence isolated from the Sargasso Sea
tttgggaaagggcaataaatgtgttcctagcaaaaacttttatcatgaattgagtgcacaagattgttccgttcagttatctggagaacttaaaaatctagccttaattcttatgaaaatatcaaatgatcttagatggatgaatagtggtccgttagcaggactttctgagattgagttaaaagctcttcaacccgggagtagtatcatgcctggtaaagttaacccagttattcctgaagcagttgcaatggcatcagctgatgttattgggaatgatgtatcaataacagttgctgctcaatctggcaattttcaacttaatgttatgttaccagttgtagcttacaaccttcttaaaagtattaatcttttatcaggcgcaatgaatgttctatcaaaaaatgctattagcagctttaaagtaaacaagaaaaatctggaagtatcattatcaaaaaatcccattcttgtaactgcattaaatccaataattggatatgaaaaggctgcatttattgctaaaaaagcttataaagaaaacagacaaataattgatgttgctgctgaggagactgacataccaaaagcaaaactcgctaagttactcgatccatcaaagttagctaagggcggaatataa

SEQ ID NO: 280481 - DNA, 160 bp, Unknown
  Bacterial polypeptide expressing nucleotide sequence isolated from the Sargasso Sea
tctttcaccaaaaataggttatgacaacgcagcaaaaattgcaaaaaaagcttataaaaatggaacaacgttaaaagaagaggcaataaattctggattgataacagaaaaagaatatacaaaaatcgtagatccaaaaaaaatgataagtccttattaa

SEQ ID NO: 280482 - DNA, 445 bp, Unknown
  Bacterial polypeptide expressing nucleotide sequence isolated from the Sargasso Sea
ttgcaccagcaggcgggaggcggcggtgcacacttccccctggttgtagaagatggcgccgacggcgcttctggcggcggcgtccagatccggtgcatccgccagcacgatgttgggactcttgccgccgcactccataaaggcgcgtttcagattggatttcccggagcactgcaccagatgcttgccgatcttggtggagccggtgaaggtgatgcagtcgacgtccatgtgcatggccagcgcctcgcccacggtgtgaccaaagcccggcagcacgttgaagacaccgtcggggatgcccgcctccttcgccagacccgcgatgcgcagggcggtgaggggggatttctcggagggtttgaggatcaccgagttgccggtggcgagcgccgggcccagcttccagcaggccatcaccagggggaagttccagggcacgatg

SEQ ID NO: 280483 - DNA, 427 bp, Unknown
  Bacterial polypeptide expressing nucleotide sequence isolated from the Sargasso Sea
gaatccggtgattgaggaatccacggccatggtctgcgctcaggtgattggttacgattctgcgatcagtgtgggcggactttcaggaaactttgaactgaacgtgatgttgccgatggtcgccaatagtctgctggaatcgatcagattattggctgcggcttgtaggaacctggctcaacgttcggtctcaaggatcattgtccgggaagaatacatccagtccctggtcggacgtaacccgatactggtgaccacactcaaccccttgatcggttatgacctggcggcaaagatcgccaaaaccgccttcgcagaaaaccggcctcttttggaagtcgcgaaggaactttgcgatctaccggaagatgaactgataaaagccctggatccggcgaaaatgacccagggcggtctgatggaataa

SEQ ID NO: 280484 - DNA, 490 bp, Unknown
  Bacterial polypeptide expressing nucleotide sequence isolated from the Sargasso Sea
ggacttggagaaattatgttagcagcactacaaccaggatcttccataatgccggggaaagtaaatccggtaatagaagagtcaatggcaatggtttgcgctcaagtaataggatacgatactgcaatcagtattggaggtttgtcaggaaattttgaattaaatgttatgttacccatggtttcacatagtttactagaatctattagattgctttctaatgcttctaaaaatttagctttccgttcagtttctaaaattatagttcgagaagatcatatacaatctttgatagataaaaatccaatattagtaactgctcttaatcctttaatcggatatgatttggcatccaaaattgcaaaaaaagcttacaaagaaaacagatcattaaaagaagtagctttggagatgtgtgacttgtccgaatcagaattggataaggctctaaacccctcaaaaatggtaaaaggaggatttctaaaatgat

SEQ ID NO: 280485 - DNA, 347 bp, Unknown
  Bacterial polypeptide expressing nucleotide sequence isolated from the Sargasso Sea
aatgacagatcaatttagaactgaaaaagactcaatgggagagtttcaagttccaataaatgctaaatatggagcctctacagcaagagcagtagaaaatttcccaatatcaaaccttagattttccagatcctttattaaagcattaggtgaaattaaaaaagcttgtgcaaaagtaaatcaaaataataaattattagataagaattttgcagattctattattgatgcagcacaacaggtaattgatggtgatcatgacaaagattttgttgtggatatatttcaaactggatcaggcacctcaacaaatatgaatgctaatgaaataatttcaaaaattgctt

SEQ ID NO: 280486 - DNA, 472 bp, Unknown
  Bacterial polypeptide expressing nucleotide sequence isolated from the Sargasso Sea
ggattaggagatttgaagatccctgctttgcaaccaggatcatcaataatgccaggaaaagtaaatcctgtaatacctgaaatgatgatgcaggtatcagctcaagttattggaaacgatacaactattacgttttcatcagcgaatggaaattttgagctcaacacaatgcttcctgtaatggcttacaatctacttgaaagcattgctttactcactactggagtgagtgtgtttggggaaaaactaattaaagacttagaagcaaatactcaaaagctaaatgaagatactcaaaaaaactcaatcctagttacagcacttgtgccaaagcttgggtatgacgttgctgctgaagtagctaaagaagctatggaaaatggattaacaataaaagatgtattgcttggtaaggaattaatgtcagagggtgatattgatgatcttttggatatagagaagcttatctagt

SEQ ID NO: 280487 - DNA, 373 bp, Unknown
  Bacterial polypeptide expressing nucleotide sequence isolated from the Sargasso Sea
gggaaatgatttttctactacgatagctggagctaacggtcatcttgaacttaacgtttttaagcctcttattgcaaataatattattgaatcatcaagaattcttggagatgcatgtttaagtttctctgaaaaatgtataaacgggataaagccaaacaaaaaacaaataaaaaaatttgtaagtaactcattaatgcttgttactgcattaaacacaaagataggatattacaaagctgctgaaattgcgagtaaggcatatgaagaagacactacattaagacaagcagcaatagatttaaaatatttgagtggtaaagagtttgatgaaatagtcgatcctaaaaaaatgactaataatggaggttaa

SEQ ID NO: 280488 - DNA, 369 bp, Unknown
  Bacterial polypeptide expressing nucleotide sequence isolated from the Sargasso Sea
tatgaaattcagaacagagtcagatacattaggaaaggttcaaattcccagcgaatctttgtggggtcctcaaactcaaagatcaataaataactttaaaattggtaaacctggatcgatgccaatcgagattgtttatgcttatgcaatattaaagaaagcttgttctaaatctaatcatgaattaggggttatagaaaaggataagatgattctaattaataaagcttgtcaagaaattattgatggtaaatatgatgagcagtttccactagttatttggcaaactggatcaggtacacaaacaaatatgaatctaaacgaagttatcactaacatcgctcacagacttgagggaaaggatttaaa

SEQ ID NO: 280489 - DNA, 357 bp, Unknown
  Bacterial polypeptide expressing nucleotide sequence isolated from the Sargasso Sea
acaatactgctatttcaatagctggcagtcagggccatttccagttgaacgtttttaacccaatgatggcattcaattttttacagtcagtaaagctcatgacagatgcagcaatttcatttgaaaaaaattgcttggatggtcttgaggcgaggcatgaaaatatcaagttaaacctcgagagatcacttatgcttgtaaccgcactcgcaccaaaaatcggctacgataaagcggcagaacttgccaaattagctcacaagaacaatacaacattgaaagaagaggcgctaaaatctggttatgtcaatgaagtggaatttggctcgcttgtagacccaaaaaaaatgatatgat

SEQ ID NO: 280490 - DNA, 433 bp, Unknown
  Bacterial polypeptide expressing nucleotide sequence isolated from the Sargasso Sea
tatgccaggtaaggtcaatcctacacaatgtgaagcattaactatggtttgcgtgcaagcgatgggcatgcataacacaatcagtttagctggctcacaaggtcactttgaacttaatgcttataaacctgtaataggacataatattattgaattaatacatcttctatcaagtggaatggacaattttaatgataagtgtctaaaaggcattaaaccaaacttaaaaaatattaaatctggtttagataattcgttaatgcttgtaaccgcactcgctcctgaaattggttattcaaaagcagcagatttagcaaagcttgcgcataaaaagaatatttcacttatcgaagcaaataagattttaaaatatatggacagcaaaagaattaaattagtgcttgatccaaaaaaaatgatctcaccctcataa

SEQ ID NO: 280491 - DNA, 1479 bp, Unknown
  Bacterial polypeptide expressing nucleotide sequence isolated from the Sargasso Sea
aatgggaggaggcggaagcctgacactgcccaatgcactgacaatgactgcaggatctgcaattgagaccaagaccttcgacctgaccctttcaagtgcacttcagctcggcacaggttccattacttccaccggaggaactcttagttttgctggaggacttacggttggaggaacaggttcaatgtctgttttagacagtattctgagtgtaaatcagaaccttaatttcaattcagcatcattcgaaagttctgtccttgatttacaaggggcaaccacgcttacctctaacggtcttgtttcatttaaaaaagcaaacctgaacaacaaggttcttacgcttggatctgcaggaactcacttgaagttaactgactcaggcgagacactcagcctgaacaaccttgcccttgagacgggagcaggaagcctgaccctcgcgggtccattatccattagtaacaatggacagctcaattccactggaggtactatcacgctttcctcaggaggaagtgcagcatcaggagcagcagtctcaatccctaacagtacacttgtcctgcagagtgggctatcgctaaacggctcaacactaaaggccagcggtacaaccttcactacaaacaataacacgattgcacttaacgggagtatccttgaggttgaggggacacaggacctgagcggtgtggttccagacacttcaagcacactgcgccttggtgccaatgcaactattaatgacagttcattactctcagtaggtacacttgaccttgcaaactttgcactcacgttgaatgaccagatgggaggactgactgtgggacaggcagttacactggatgctgcaacagaacagataatcagcggagatgctgatttgtccctaaacagcgggatcactgtaagcaacggaatcctctcctcaacaggaggtgctctctctgcttcaagtttcagtgcaggtgcagcagcaaaagttaatgtactgggggggaccttgagcctgcctgcgggaggaacagcagtcagcggagctgcaattacaacatctggtgccacaatctcaatggctgggacacttgcagttgcagacacattgaccagtaccaacacaaacctatctctaactggagatgggatactctcaagcacggcaccgatatcactggctactctgtcaacaaacggtaaagacttcaagctggccaacgatactactgatctcacactggcaaacaacttcacgcttttatccgggaaactaagtacccagggcggagatcttatttttgcaggcagtgcgaatatctcttcgggagctacccttgatgcaagcgtaaatactggtacagcaggaaaacttgaattcaagcagggcggaacaacttcaggaaccataaacgcaggtaacggaactttccagatcggtgcagactataagttagacgggaccctcataacaggcag

SEQ ID NO: 280492 - DNA, 742 bp, Unknown
  Bacterial polypeptide expressing nucleotide sequence isolated from the Sargasso Sea
ttgtcatgtgaagaaatctcatacctacctattggcggtactgctattggtacaggaataaattctcccaaaaaattcagtaggagtgtttgtcaagagttaaacaaaatatacagtgaaatgaagataaaatttaaacctcttgaaataaaaggagagatgatgagctctcaaaatcacatactcactctgagctctgcgctcacgagatatgcgtctactttattaaaaattgcaaatgatattcgatggatgaacagtggtccgatatcgggactctcagagatttctctcaaagccctccagccaggtagcagcattatgccaggtaaagttaatcctgttctatcagaatctataatgatggctgcaacccaagtcaatggaaatcatagtactatcgtgcaagcctcaagtagtggtaacttccagctgaataccatgcttcccttgatagcacataatattattgagtcattatatcttatgataaattctacttttagcatgatagatcttattgatagctttacagtaaacgagacttctgttaacgaaaatttattaagaaaccctataattgcaacaaagcttaatcaagtaataggatacgacttagcatcgaaggttgtgaaagaagcatacagaactaatagctctatcttcgatgtcgctgaaaaaatgactactctgacgaaaacagaactcataaagatactagatccaaaaaaattgatataaa

SEQ ID NO: 280493 - DNA, 463 bp, Unknown
  Bacterial polypeptide expressing nucleotide sequence isolated from the Sargasso Sea
atgattgaaaactccctatctggagccgttatcaacaagcccacctccgaagagatagagtctcgcaaaccgaaaaagaccaatctcaaagtgagggttgagactgatacaatgggggagatagaagttcctgctgatagatactatggggcacagacagcaaggtctctgatcaacttcgatataggagaagatagaatgcccagatctgtgattcgtgcattcggaatcctaaagcaggcagctgcggagacaaatgttaagctcggagtactggaaggtgacattggaaaactgatctcggaaacatgcgaggaggtgatttctggaaatctagactcccatttccctctcaggatctggcagacgggctctgggactcagacgaacatgaacgcaaacgaggttgtcgcgaatagggcaattgagatctctggaggaaagctgggcagtaagtctccgg

SEQ ID NO: 280494 - DNA, 499 bp, Unknown
  Bacterial polypeptide expressing nucleotide sequence isolated from the Sargasso Sea
agatggatgggtagtggcccaatattctggtttaaatgaattaaaaataccggcattacaacccggatcttcaattatgcctggaaaagtaaatccagtaattcccgaaatgatgatgcaagtatctgcacaagtaatagggaacgatacagcaataacttttgcagctgcaaatggtaactttgaactcaacacaatgttgccagttatggcccataatgtattagaaagtattgcaattctttcaactagtacaaaagtttttggtgagaagctaattaaaggattagaagcaaatactgaaaagttagagggcaatatccaaaagaattcaatcttagttacagctttagtaccaaagttaggatatgacacagcagcagaagtagctaaggaagctatgtctaatgacagaactattaaagaagttttgctagaaaaagagttactttctgaagcagaaatagacgaattgttagatatcgaaaaattaatttaa

SEQ ID NO: 280495 - DNA, 151 bp, Unknown
  Bacterial polypeptide expressing nucleotide sequence isolated from the Sargasso Sea
aaaattggatacgataatgcagccaaaattgcaaagaaagcattaaaaaacaaaacaacattaaagcacgaaactttaaaaactggtctaataggtgaaaaagaatacgatagaattgtaaatccaaaaaaaatgattaacccaggttaat

SEQ ID NO: 280496 - DNA, 391 bp, Unknown
  Bacterial polypeptide expressing nucleotide sequence isolated from the Sargasso Sea
tatgatatcccgtttttttacttttgaagaacacgccaccttaatagaaggtgcttatcattttcctttggttgttctatcgcttatggtggctgtatttgcctcatttatggcgtttaatgtggcaggacaagccgcgatcaccgaagacaaacttcgacgaaataccttattaggcaccggcagcgttgcattgggaggtggtatttggtctatgcatttcttggggatgaccgcttttgatttatgtctgcccgttgactacgatcctctgattaccgggctctctgccgttcccgggattgccgctgcttgggtggcgcttcaccttttaactaagtcccgtattagcctcgctgaaataatattaggtggtgtactggtaggtgct

SEQ ID NO: 280497 - DNA, 2500 bp, Unknown
  Bacterial polypeptide expressing nucleotide sequence isolated from the Sargasso Sea
tcttgaaattggaggatcggggacattgaaacttggcgggaaccttgtcgttacagggacatttaattttaacgatggtgccaccactacttttgcaggcaataaaattgatgtctcaggcggaactcttaagctggcaggtacacactccctgaactcaatcacaaccaatgaccagactaaactgcaaattaacaactctgctaatgtctcacgtacagattctggtacaagtacggtaggcagcctgacttacattcaatccggaagctcaggcagtccttctctgtcagtcagtaacatgggactcacagtttcttcagcaacgcaggtaagtggagcttctttaattcacagcaacgggatactgacattccagtcagcgccttctttatcgaactcaagctcattgagtgtaagcaacggagaacttgttcttgcaaacggcggaacagttaatggaagttctttgcagctgagtgcctccaagttcaagtcaaccggaagtgtttcagtaacaaacggaggaacatttgtgcttaatggaacatcttcagtagttctgcagggagacacaacactgaaccaggcaggcagtgtcagctggccggatcttgatcttggcggtaagaagttgacacttggcagtacggtcggttcattcacagttcaaaaagcattaaatattgcaaatggcgaatctcttgtcagcagtggttctagtgtgattaatttgagtgatacattgactgttgctaacggaggtaaacttacatctggcataggtaatgttcaaatcagcggagcactgacactgaatggagagatcgagcagggcggaggaatcattaacctgacccagggcggaacagtgggagcaacaggtaagctggatgcaagcgattcagatggagttaattttggtagtacactgaatattgctaacggaggtaaacttacatctggcacaggtaatgttcaaatcagcggagcactgacactgaatggagagatcgagcagggcggaggaatcattaacctgacccagggcggaacagtcggagcaacaggtaagctggatgtaagcgattcagagcttaaactgggaggagcacttaatgtttccggaactctggtagcaaacgaggactccaagtggagcggatggtctggtacacttgacctgactgcaggaactcttgaggcagcaggcggaagcttaagccttacacagttcagtacaggtggaggcacaacacttaagttaagtgcagacacagaaatcaccagtaccggagactacaccttcggtacagttaacctgtcgggtaagaaacttacaatgggaggaaacggaggcctgaccctgcccaatgcattgaccatgacagcaggctctgcaattgagaccaagacttctgacctgactctctcaagtgcacttcagctaggtacaggcgccatcacttccacgggaggaactatcagccttgatggcggagcaaccctgagtaactcaggacagcttgatgtatcaggcacaaacctgaaggttaaacaggcacttaatctctcaggagggacattcaccagcaacacctcttcggtacttgacctgcagacggcagcgacatttacctcgagcagccctgtttcatttaaaaaagtaaacctgaacaacaaggtactcacacttggatctgcagggactcacttgaagttaacagactcaaatgagactcttagcctgaacaatcttgcccttgagacaggagcaggaagcctgaccctcgcaggtccattatctttgagcaacaatggacagctcaattcgacagcaggtacaatcacgctttcctcaggcggaagtgcagcatcgggagcaacagtttcaattccgggcagcacacttgtcctgcaaagcggactatcgctaagtggctcaacactgaaggccagtggcactacctttaccacaaacaataacgcggtctcactgaacggcagtatccttgaggtacaggggacacaggacctgagcggtgtggttccaaacacttcaagcacactgcgccttggagcgaatgcaactattaatgacagctcggccctctctgttggcacgcttgaccttgcaaactttgcactcactctggatgaccagatggcaggactgactgtgggacaggcggttacactggatgctgctacagagcagataatcagcggggatgctgatttgtctctgggcggtggtatcactgtaagcaacgggatcctctcctcaacaggaggtactctctctgcttcaagcttcagtgcaggtgcagcagcaaaagttaatatactgggtggaaccctgatactgcctgcgggaggaacggcagtcagcggagctgcaatcacaacatctaatgccgcaatctcactaaaaggaaccctggcagttgcagacacattgacaagtaccagtacaaacctctctctaactggagatgcg

SEQ ID NO: 280498 - DNA, 146 bp, Unknown
  Bacterial polypeptide expressing nucleotide sequence isolated from the Sargasso Sea
aatgaagaataaaaaaagaactgaatcagatagtttgggagaaaaaaaaatagactctagtaggtattggggtgctcaaacacaaagatcaaaagaaaattttcaaattggtaatgagaagatgcctatagaaataatacaagctt

SEQ ID NO: 280499 - DNA, 301 bp, Unknown
  Bacterial polypeptide expressing nucleotide sequence isolated from the Sargasso Sea
ttctgcaattcatgaatcgatttcattattatctgaagtcgctgaatcgtttacactaaatgcacttgatggattaaaagctaataagcaaaaaattaaagaaaacttagacaagtctttaatgcttgtaacagcacttgctccaaaaattggatatgaaaaggcagctgagatcgctaaaaaagctttaaaagaaaacatttctcttaaacaaagtgcaaaagctttgggacatttatcggaacaagaatttgataaaattgttaaaccagaattaatggttgcacccaaaaaagcatga

SEQ ID NO: 280500 - DNA, 220 bp, Unknown
  Bacterial polypeptide expressing nucleotide sequence isolated from the Sargasso Sea
aatgacaaaaaactttagaattgaaaaagatagtatgggaagaatagaggttcccatcgaagctttgtggggtgctcaaacacaaagatcaataataaatttttctattggagaagaattaattccaatcgagttaatttattcactcaccctcataaaaaaagctgcttcaattgcgaatttcaatttaggattaatagataaaagaaaaaaagattga

SEQ ID NO: 280501 - DNA, 943 bp, Unknown
  Bacterial polypeptide expressing nucleotide sequence isolated from the Sargasso Sea
catggatttaacaaaaaaactttacccagccctagatggattaataatagcaattgaaaataaagctgagacattaaaaggtacgataaaaacaggaagaacacatttaatggatgctatgcccatagatttttctgcagaattgaatgcatggtcaagtcaattaagatcttctaaagaaatgttgaatattcttgaaaagaaattgcttgaacttcctcaaggcggaacagcggttggaagtggaattaatgctcataaacagttttcaaaatgttttgcgcaagagatatcaaagttatctcgaagtaattataaatttattcctagtaagaatttttatcatgaacttagtgcacaagattgttcggtacaactatcgggtgagctaaaaaatcttgccttaattcttatgaaaatatctaatgatttaagatggatgaacagtggcccgcttactggattagctgagatagaactcaaagcacttcaaccaggtagcagtataatgcctggtaaagtcaatccagtaattcccgaagcagtagcaatggcatcagcagatgtaattggtaatgatgtatctataactgtggcatcacaatcaggcaattttcagttgaatgtgatgttacctgtcatagcctataatcttcttaaaagtattaatcttttatcaggagctatgaatgttttatcaaaaaaagctataagtagttttaaggttaatcatgaaaatttagcagtgtcattatcaaagaatccaattttagtaacggccttaaatccaataattgggtatgaaaaggctacctcaattgcaaagaaagcatataaagaaaataggccaattatagatgttgctgctgaagagactgatataccaaaatcaaaacttaaaagattgcttgatcctgctaagctttctaaaggcggtacttaa

SEQ ID NO: 280502 - DNA, 841 bp, Unknown
  Bacterial polypeptide expressing nucleotide sequence isolated from the Sargasso Sea
aatggatgctatgcctgttgatttttctgatgagctcttggcatggtcaagtcagctccatgcttcgcgcaaaatgttaagtgttatcgaagagagatttctggaactgccacagggtggaactgctgttggtagtggtattaatgcccataagcaattcgctaaattctttgctcaggagctcacaaaactatcaggtaataagtgtaaatgtgttcctagcggcaacttctttcatgaattaagtgcacaagatagttcagttcagctttcaggtgaactgaagaaccttgcagtcattctcatgaagattgctaacgacttaagatggatgaacagcggtcctttagcaggattatcagaaattgaattgcaggcccttcagcctggtagcagcataatgcctggcaaagtgaatccagtgatacctgaagcagtaacaatggtctctgctgatgttgtaggtaatgacgcctcaataactgtagccgctcaggcaggaaactttcagttgaatgtcatgcttccagtgatagcctacaacttactgaaaagcattaatcttttagctggagcaatgaatgttttatcaacaaaggcaatcaagacttttaaggttaacaagaaaaacctcgaagcttcattgtctagaaaccctatattggtaactgctttaaacccaatcatcgggtatgaaaaagcagcagaaattgcgaaaaaagcttacaaatctggaaggccaataatagaggtagctaatgaagaaaccgacttaagtgtagctcagttaaaaaaattattagacccctctaaattaaccaagggaggaataagcaaataa

SEQ ID NO: 280503 - DNA, 673 bp, Unknown
  Bacterial polypeptide expressing nucleotide sequence isolated from the Sargasso Sea
ttgtccaaaaggattttgtgaagagtctataaaatcaatttccgatgatactaatctaatgttctataaatcaaaaaataatttttctatcatggcctcgcatgatcgtctagctcaagtaatgagtcagataaaaatattagcaggtgcattatttaaaatttcaaatgatataaaaattctatcttctggtccaagatcaggaatatatgaactaattattcctcaaaatgaacctggaagttctatcatgccgggtaaagtgaatccaactcaatgcgaagccttatcaatggtttgcactcagataatgggtcttgaatatgcagtctcaatggcaaattctagcggcactttacagatgaatgaatataagcctcttattggatttaatattctcacaagtttaaaattacttaaaaatgtaatagaaaacttcagaataaaattagttgatgggatggaacctaatcaaaagaaaatgaagttaaatttagaaaattcactaatgttggttacagccatagtgccaaaagttggttatgaaaaagcagctgaaattgcaaaccttgccttcaaagaatcattaaatttaaaagaggcaacacttaaattaggttatttaaacgaagatgaatttgatgaagcaatgaatatcaattcaatgatttga

SEQ ID NO: 280504 - DNA, 680 bp, Unknown
  Bacterial polypeptide expressing nucleotide sequence isolated from the Sargasso Sea
aaaggctaaattttcagaattagcttgtcagcatatttcgaaattatcaggaatagatgtttatgaaacggacaatcatttcttggcacagtctagcttagatggtgcgttgacaactagcggagttttgcgaggtttagcagtgagtttacaaaaaatagctaatgatattcgcttaatgggttcaggccctcgctcaggtatttctgaattatcattgccagcagttcaaccaggctcttcaataatgcccggaaaagttaaccccgtaattcctgaagcaataatacaagcttcatcgcaagtgatagcttgtgatactgctttagttcagagcggtcaaggaggttattttgagttaaacacaatgttaccttttgcagctcataatcttctacaagcagtttctcttttatctaattcggttgaagttttcgcagctaaatgtatcgatggactagaagctacagataaaggacctgaattattgatgtcgggtttgatgttagctactaccttagctccggtaataggttacgaaaaagcagcaagaatagcaaaagaggcacataagtcgggtcaaacggtgttggaaacttcacttgatttaactgatttatctgaagaagaattaattgagatattaaatcctgaaaaaatggttaaacccagtgattaaa

SEQ ID NO: 280505 - DNA, 429 bp, Unknown
  Bacterial polypeptide expressing nucleotide sequence isolated from the Sargasso Sea
ctggtaaagtaaatccaactcagtctgaggcagttactatggtttgtgtaaaagtaattggtaatcacaacggtattactatggcaggatctcatggccattttgaattaaatgttttcaaacctttgatcattcacaatattttacaatcaattgaaataatgagtgactcatcaaaaacttttgcattgtactgcgtaaaaggaattaaggcggataaaaaaagaattaaatatttgttagataattctttaatgctcattactgcattagccccacgaattggttatgataaagcagctcaaatagctaaaacagctcatcaaaaaggcaccacattaaaacaagaagttatcaaatcaggactaataaaagagactgattatgatagaattatgaatccactaaagatgacgaaacctaaataac

SEQ ID NO: 280506 - DNA, 712 bp, Unknown
  Bacterial polypeptide expressing nucleotide sequence isolated from the Sargasso Sea
tatgaaatatagaatagaaaaagatagtttaggtgaggttaaagttccatcaaaggctctatggggcgctcaaacacaaagagctgtgaataattttccaataagtggaataaaaatggattttccatttaccaagtcatttgtttcctcattaggtctaattaaggacgcagcagcaaaggcaaatctaagattaaaattaatatcttcaaagaaatccaaggctatatccagagcagcaaaagaagtgtggcaagaaaaacatcatcacgaatttccaattgatgtatttcaaactggttctggaacaagctctaacatgaatgcaaacgaagttatttcaaatttagcaagcaaatatgcaaaacttgatgtcaatgcaaatgatgacgttaatatgagtcaaagtagcaatgatgttataccaacagctattaagataagctctcatatggatttaacaaaaaaactttatcccgcattagataaattaataattactatagagaaaaaagccatttcattgagaggaactattaaaactggtcgaactcatctcatggatgccatgcctgttgattttgcagaagagctttatacttggtcaagccaacttcagtcttcaaaagaaatgttgttaactattgaaaaaaaattacttgagctaccacaaggtggaacagctgttgggagtgggatcaatgctcacaaa

SEQ ID NO: 280507 - DNA, 343 bp, Unknown
  Bacterial polypeptide expressing nucleotide sequence isolated from the Sargasso Sea
ttgtcagataaaaagttcagaattgaaaaagatagcatgggtgagctaaatgttcccgctgattcaaaatggggcccacaaacccagcgtgcagtcgataattttcaaatcagtgattacaaaatgcccactggtttcattcgttctttggcgcttttgaaatggggactggccaatgcaaataaagatttgaacctcctctcaaaagaaaaggcatctgctatagcagattcagcaatggaaatttatcaaggcgatcatatgaaagagtttccagtggatgtctttcaaactggatctggaacaagtaccaatatgaatatgaatgaggttatatctcatc

SEQ ID NO: 280508 - DNA, 300 bp, Unknown
  Bacterial polypeptide expressing nucleotide sequence isolated from the Sargasso Sea
tcattcacaatattatacaatcaattcacttaatggcagactcaacaaaaagttttacgctgtattgtgtaaaaggaattaaagccgataaaaaaagaattaagtatcttttagatagttcactaatgttagtgacggcactatccccaaaaataggttacgacaatgctgcaaagattgcaaaaagagcattaaaaaataaaacaacattaaaatatgaagctataaaatctggtctaattaatgataaagaatatgacaaaattgttgatccaaaaaaaatgctagggcctatttaat

SEQ ID NO: 280509 - DNA, 610 bp, Unknown
  Bacterial polypeptide expressing nucleotide sequence isolated from the Sargasso Sea
ttaatctgctcccataagtatgagtctcttgcatcgcatgatgtatttattgaagtgatgtcaggtattgaaattttaactagtgcgttatttaaaatggcaaatgatatcagagtgttagcctctgggccaagaagtgggatttctgaaataatcctaccagctaatgaacccggctcatctattatgcctggaaaaattaatcctactcagtgtgaagcattatcgatggtatgtgcacatgtaattggtctaagaaattctgtaacattcgcatgtacccaaggtcatttccaattgaatgtatataatccattaattattcataatactcttgatgctattcgtttaatcggtgaagcaatggcctcgtttagagcaaattgtttgaaaggattaaaaataaataaaaaaagaataaatgagctattaaatcgttctttaatgttagtgactcccttaacaaaagtaattggttatgatcttgcatctaaagttgcactaaacgcttacaacaaaaatatttcactaatgcaatcttgtttagagttaactaatttatctgaaaaagactttaaagagtatactgatccaaagaaaatggtttagt

SEQ ID NO: 280510 - DNA, 654 bp, Unknown
  Bacterial polypeptide expressing nucleotide sequence isolated from the Sargasso Sea
aagagtctataaaattaatttccgatgaaactaatctaatgttctataaatcaaaaaataatttttctatcatggcctcgcatgatcgtcttgctcaaataatgagtcagataaaaatattagcaggtgcattatttaaaatttcaaatgatataaaaattctatcttctggaccaagatcaggaatatatgaactaattattcctcaaaatgaacctggaagttctattatgccgggtaaggtgaatccgactcaatgcgaagccttatcaatggtttgtactcagataatgggtcttgaatattcagtctcaatggcaaattctagcggcactttacagatgaatgaatataagcctcttattggatttaatattctcacaagtttaaaattacttaaaaatgtaatagaaaacttcaggataaaattagttgatgggatggaacctaataaaaagataatgacgttaaatttagaaaattcgctaatgttggttacagcaatagtgccaaaagttggttatgaaaaagcaactgaaattgcaaaccttgccttcaaagaatcattaaatttaaaagaggcaacaattaaattaggttatttaaacgaagatgaatttgatgaagcaatgaatatcaattcaatgatttgat

SEQ ID NO: 280511 - DNA, 202 bp, Unknown
  Bacterial polypeptide expressing nucleotide sequence isolated from the Sargasso Sea
aaattacttctcgataattcattaatgttggttaccgctctctctccaaagataggatacgataatgctgctaaaattgctaaattagcgcacaaaaatggtaccactctaaaagatgaagcaattaaatctggactaattaatgaaaaagaatttttaaaagtagtcaatcctttaaaaatgatcaagccaaataactaaa

SEQ ID NO: 280512 - DNA, 145 bp, Unknown
  Bacterial polypeptide expressing nucleotide sequence isolated from the Sargasso Sea
ttgatatttttcaagactggttcaggaactagtacgaatatgaatatgaatgaggttatttctgaggttgctaaaagggttcataaaaaatcaatacatcctaatgatgatgttaatatgtctcaaagctcaaatgatgtaattc

SEQ ID NO: 280513 - DNA, 556 bp, Unknown
  Bacterial polypeptide expressing nucleotide sequence isolated from the Sargasso Sea
tatgaaatatagaactgaaaaagacacaatgggagaagttaatgttcctcatgatgcgctttggggcgctcaaacccaacgagctcttgaaaactttaaaattagcggtattaaatttgccttcccatttgggagaagctttatagaagccctaggtgtcattaaatttgcagctgcagcatccaatcaaaaactgaagttacttgattcaagaaaagcaaaggcaattaaaattgcagcaaaagaagttctttcaggcaaccatgatagccaatttccacttgatatttttcaaactggttctggaacaagcactaacatgaatgcaaatgaggtgattgcaaatctggcctcaaaaaaagcccgaattaaaattaatgcaaatgatcatgtaaatatgagtcaaagtagcaatgatgttatcccaacagcaatttgtatttctgcattattagatacccaaagacagttattgccttctctaagtagccttattagagttattgacaagaaagcattatcattaaagggtcaagtcaaaactggaagaacgcac

SEQ ID NO: 280514 - DNA, 403 bp, Unknown
  Bacterial polypeptide expressing nucleotide sequence isolated from the Sargasso Sea
tactcaaatagaagcattaagtatgatatgtgcccaggttattggcaatagcactacagttgatatagctgggtctaatggacactttcaactcaatgcctataaaccagtaattgcttataacattatacaatctattaatttaatgagtgatggaattaatagttttaataagaattgtctaagaggaataaaaccaaataaaaaaaatatttcaaatcatttaaaaaactcattaatgctggtaactgctctaaataaatcaattggctatgataatgcagctaaaattgcaaaaaaagcttttattgaaaacttaacattaaaagaagctgctataaagttaggcttaataagtgaaaaagattttgataggattgttgatccaaaaaaaatgatttaa

SEQ ID NO: 280515 - DNA, 403 bp, Unknown
  Bacterial polypeptide expressing nucleotide sequence isolated from the Sargasso Sea
ttgtcagataaaaagttcagaattgaaaaagatagcatgggcgagctaaatgttcccgctgattcaaaatggggcccacaaacccagcgtgcagtcgataattttcaaatcagtgattacaaaatgcccactggttttattcgttctttggcgcttttgaaatggggactggccaatgcaaataaagatttgaatcttctctcaaaagaaaaggcatctgctatagcagattcagcaatggaaatttataaaggcgatcatatcaaagagtttccagtggatgtctttcaaactggatctggaacaagtaccaatatgaatatgaatgaggttatatctcatctagcatcttcagaatcaaacgccattcacccaaatgatgatgtaaatatggccaaagcag

SEQ ID NO: 280516 - DNA, 177 bp, Unknown
  Bacterial polypeptide expressing nucleotide sequence isolated from the Sargasso Sea
ataattctttaatgcttgttactgctttaaacaaaagtattggatatgataatgcagcaaaaattgcaaaaaaagccttcaatgaaaatctaacccttaaggaagcggccttaaaactaaaattaatttcagaaaaagatttcgataaaatagttgatccaaaaaaaatggtttaat

SEQ ID NO: 280517 - DNA, 200 bp, Unknown
  Bacterial polypeptide expressing nucleotide sequence isolated from the Sargasso Sea
tcaagaacatttagataactcattaatgttagtcacggctctaactcctcatattgggtatgataacgcagcaaaaattgcaaaaacagctttaaaaaataatacaacacttaaatatgaaactttaaaaacagggctaattaacgaaaaaaattataatcgcatagttaacccaaaaaaaatgatttacccagattaaa

SEQ ID NO: 280518 - DNA, 673 bp, Unknown
  Bacterial polypeptide expressing nucleotide sequence isolated from the Sargasso Sea
cctgcttttgcggatgaggtttcgaagcttagtggagaatcgatgcgcgaggcagagaatcattttgaagcacaatccaccgtggatgcccctgtggaaatgagcggccaattgaaaacgattgccgtcggtctgcttaaaatcgtcaatgacctgcgctggatgaattcgggtccgaatgcagggttgggagaaatccaactggccgcgcttcagcccggttcttccatcatgcccggaaaagtgaatccggtgattgaggaatccacggccatggtctgtgctcaggtgattggttacgattctgcgatcagtgtgggcggactgtcaggtaactttgaactgaacgtgatgttgccgatggtcgcccatagcctgctggaatcgatcagattattggctgcgacatctaggaacctggctcaacgttcggtctcgaggatcattgtccgggaagaacacatccagtccctggtcgggcgaaacccgatactggtgaccaccctcaaccccttgatcggttatgacctggcggcaaagatcgctaaaaccgccttcgcagaaaatcggcctcttttggaagtcgcgaaagaaatttgcgatcttcctgaagatgaactgaaaaaagctctggatccgacgaaaatgacccagggaggtctggtggaataaa

SEQ ID NO: 280519 - DNA, 341 bp, Unknown
  Bacterial polypeptide expressing nucleotide sequence isolated from the Sargasso Sea
atcacatggacattttgaattaaatgtttttaaacctttaatagctcataatattttgcaatctattgatttattatctgatagttcaaaaaattttgccatctattgtgttaatggaataaaagcaaacaaagaaaaaataaaagaatatctcgataattctttaatgcttgtgacagcacttgctcctcatattggttatgataaagcatcaaaaattgctaaatcagccttaaaaaataaaacaactctcaaggaagaagctttaaaatctaaacttattggtgagaaagagtatgataaaattgttgacccaaaaaaaatgctaagtccaagttagt

SEQ ID NO: 280520 - DNA, 556 bp, Unknown
  Bacterial polypeptide expressing nucleotide sequence isolated from the Sargasso Sea
gtcatgtcaggtattgagattttaacaagtgcattattaaaaatgcaaaatgatataagagtattggcatctggtccaagaagtggcatttctgagttaattcttccagccaatgaacctggctcatcaataatgccaggaaaaataaaccctactcaatgtgaagcattatcgatggtatgcgcgcatgtgattggccttagaaattctattacactcgcttgtacacaaggtcatttccaattaaatgtttataatccattgattatacacaatactctagattcaattaatttaattagtgaggccatgtgctcattcaataaaaattgtttgaaaggattaaaagttaataaaaaaagggttaatgaactattaaatcgctctttaatgttagtgacacctttaaccaaagttattggttacgatcttgcctctaaagtggcactaaatgcttataataaaaacatttcattaaaagagtcttgtatagaactaactgatttatctgaggaagaatttaataaatatactgatccaaataagatgatttagt

SEQ ID NO: 280521 - DNA, 772 bp, Unknown
  Bacterial polypeptide expressing nucleotide sequence isolated from the Sargasso Sea
aaccgctattaaagtgagcgcctacaaagacttaaccgagaagctttatcctgctttagaaaaattaattattgaaatagaaaaaaaagaagcagcgtttaaagggataattaaaacaggaagaactcacttaatggatgctatgcccatagaagtttctcaagaattgtctgcttggtcttctcagctcaaaaataccaaaaaaacattagtcttcttagagaaaagactcttagaaatgcccttgggtgggactgcggtaggaaccggcataaatgcacatccaagatttgctaaaacttttgcaaaagagttatctactttaataggaggtaaatgcaaagctattgcgagcgaaaacttttttcatgaattaagtgctcaagatacagcggttcaagtctcaggagagctaaagaatcttgcagtggttttgatgaaaatttcaaatgatctcaggtggatgaattctggacctcttgcaggactatcagaaatagaactgaaagcgttgcagcctggtagcagtattatgcctggtaaagttaatcctgttatacctgaagcagttgccatggcttctgccgatgttattggaaatgacgtaacgataacaattgccgcacagtcaggaaattttcaactaaacgtaatgcttcctgtcatagcttacaaccttcttaaaagtatggctttattaacaggcagcatgaaagtcttggctgataaaactattaaatcttttaaggttaataaaaaaactttagagagt

SEQ ID NO: 280522 - DNA, 301 bp, Unknown
  Bacterial polypeptide expressing nucleotide sequence isolated from the Sargasso Sea
atgaaaactagaaaagaatacgatagcataggaggaattaatgtacctgtggataagtattggggcgcatctacacaaagatcaaaaaaatattttgatataggcgaatttaaagttaggccaacattaattaagtcaattgcaataataaaaaaatcagctgcaatagttcataaaaatacaaaacaaattgattcaaaaattgcaaatgcaattattaaagcttcagatgaagtaataaaaggaaagttagatgagcattttcctttgaaagtatggcaaactggatccggaactcaaa

SEQ ID NO: 280523 - DNA, 400 bp, Unknown
  Bacterial polypeptide expressing nucleotide sequence isolated from the Sargasso Sea
aatgccaaataaaaaaagaacagaatttgatactttaggaattaaaaaaatagattcccaaaaattatggggtgctcaaacacaacgctctttagagaattttaaaattggcaatgacaaaatgccaaaagaaattatagtggcattaggtcagcagaaaaaagcggcagtcttggcaaaccataatctaggcttgttaagcaaaaaattatctagtgctataataaaggcctgtgatcaggttattaatttgaatcttattgatgaatttccattatcagtctggcaaacaggttctggcactcaaacaaatatgaatgcaaacgaagttataagtaattatgcaattaagattttaaaaggaaaaaattggatcaaaattccctatccatccaaatga

SEQ ID NO: 280524 - DNA, 400 bp, Unknown
  Bacterial polypeptide expressing nucleotide sequence isolated from the Sargasso Sea
gcagtaacaatggtttgtgttaaagtaattggtaatcacacaggtataacaattgctggttcccaaggacagtttgagcttaatgtattcaagccattgattgctcataacattttacaatcaattgatcttatttctgatagttcaaaaaattttgcaaaatattgtgttaaaggaataaaagcaaacaaggataaaataaaaaaagatttggataattcattgatgttagttaccgctctagcgccaataattggatatgataaagctgctagtatagcaaaaaaagctttgaagaataatactacacttaaaactgaaataattaaaagtggattgatgactgaaaaagaatataaaaaaattgtagatcctagaaaaatgactcagcctgcataag

SEQ ID NO: 280525 - DNA, 685 bp, Unknown
  Bacterial polypeptide expressing nucleotide sequence isolated from the Sargasso Sea
tacaggtattaattgtccaaaaggattttgtgaagagtctataaaatcaatttccgatgatactaatctaatgttctataaatcaaaaaataatttttctatcatggcctcgcatgatcgtcttgctcaagtaatgagtcagataaaaatattagcaggtgcattatttaaaatttctaatgatataaaaattctatcttctggtccaagatcaggaatatatgaactaattattcctcaaaatgaacctggaagttctattatgccgggtaaagtgaatccaactcaatgcgaagccttatcaatggtttgtactcagataatgggtcttgaatatgcagtctcaatggcaaattctagcggcactttacagatgaatgaatataagcctcttattggatttaatattctcacaagtttaaaattacttaaaaatgtaatagaaaactttagaataaaattagttgatggtatggaacctaatcaaaagagaatgaaattaaatttagaaaattcactaatgttggttacagccatagtgccaaaagttggttatgaaaaagcagctgaaattgcaaaccttgccttcaaagaatcattaaatttaaaagaggcaacaattaaattaggttatttaaacgaagatgaatttgatgaagcaatgagtatcaattcaatgatttga

SEQ ID NO: 280526 - DNA, 220 bp, Unknown
  Bacterial polypeptide expressing nucleotide sequence isolated from the Sargasso Sea
aaagcaaataaaaaaaaaatacaagaacatctggataactcgttgatgctagttacagctttagctccacatattggatacgataatgctgctaaaattgcaaaaagagcgctaaaaaacaatacaactttaaaacttgaaactttaaaaacaggattaattagcgaaagagactacaaaaaaatagttgatcctaaaaaaatgatttatcctacataga

SEQ ID NO: 280527 - DNA, 226 bp, Unknown
  Bacterial polypeptide expressing nucleotide sequence isolated from the Sargasso Sea
ccaaatcaagaacgtatcgagtataatctatataactcactaatgctcgtaacagcattaaatcctcatatcggttatgataaagcttctgaagtagcaaaaaaagcatttaaagataagagcactctgcgtgaggctatcattgagctaggttatttgactggagatgagtttgatgagtttataaatcctgccgatatgattcagcctaagaaaaaagactgag

SEQ ID NO: 280528 - DNA, 622 bp, Unknown
  Bacterial polypeptide expressing nucleotide sequence isolated from the Sargasso Sea
ctttgtaagctctttaggaataattaaggatgctgcagctagagctaataataaattgaagcttcttaccaacaagaaggccagagcaatatccaaggcttccaaggaggtatggcaagaaaaacatcatcaagagtttcctattgatgtatttcaaacaggatctggcaccagttcaaatatgaatgctaacgaggtaatagccactctagcatcaaagttttctggtgaagaagttagccctaatgatgacgttaatatgtctcaaagcagcaatgacgtggttccaacagcaataaaaatcagtgcacatatggatttaactaaaaagttatatcccagccttgaaagcctcattaattcaattgataaaaaagcaacatctgtcaggggagtaataaaaacaggaagaacacacctcatggacgcaatgcctattgattttgctgatgaattatcagcttggtctagccaactaaatacttctttaaaatcacttaaatttattgagagaagacttttagagcttcctcaaggcggaactgctgtaagaacaggaattaatgctcatactagatttgctaaactttttgctcaagaaatcactaatttatcatggaat

SEQ ID NO: 280529 - DNA, 589 bp, Unknown
  Bacterial polypeptide expressing nucleotide sequence isolated from the Sargasso Sea
catggcaaaaaaaggttaccgagaagaatcagatagtattggaatagtttacgttccccgaaaagctctatacggagcacaaacacaaagagctatagataactttcctataagtggcataagaatggattttccttttaccaaatcctttgttagctcattaggattaattaaagatgctgcagctagagctaataatacattgaagcttcttcccaataaaaaggccagatcaatatcgaaggcttctaaagaagtatggcaggaaaaacatcataaagagtttcctatcgatgtatttcaaacaggatctggaaccagttcgaatatgaatgcaaacgaggttatagctaatttagcatcagcattttctggtgaggaggttagcccgaatgatgacgtgaatatgtcccaaagcagtaatgatgtgataccaactgcgataaaaattagtgcatatatggatttatccaaaaagttatatcccaacttagaaaacctcattaatgaaattgataaaaaagcattttctcatagagggataataaaaacagggagaactcatcttatggatgcaatgcctattgat

SEQ ID NO: 280530 - DNA, 526 bp, Unknown
  Bacterial polypeptide expressing nucleotide sequence isolated from the Sargasso Sea
ggatacgctagacaaattgaagtcggtatacagcgaatcgaatcggctctggtaaatatgcaggaactcccaatgggcggcactgcagtaggtactgggataaatactcactcaaaatttgctgaaaaatttgctttagaaatatccaagcttacaggtgaatcattccgtgaagcagaaaatcattttgaggcacaggctaccgtggacgcgcctgttgaattaggtgcacagctgaaaactattgccgttagtctgatgaagattgtcaatgatcttcgctggatgaattccggtccaaacggtggacttggtgaaatacagcttgctgcacttcagccgggatcctcaatcatgccagggaaggtaaaccctgtgatagaagaatcaatggccatggtctgcgctcaggtaataggatacgatacttcgataagtataggcgggttatctggtaattttgaattaaacgtgatgctgcctatggttgcctacagcctgctggaatcaatccggctttggcaaa

SEQ ID NO: 280531 - DNA, 190 bp, Unknown
  Bacterial polypeptide expressing nucleotide sequence isolated from the Sargasso Sea
tttagataattctttaatgttagtaactgctttggcacctaaaataggatatgataatgctgcaaaaattgccaaaaaagcattgaagaataatacaaaattaaaatacgagactataaaatctggtctaataaatgaaaaagaatatgataagattgtaaatccaattaagatgactagtccaaattaa

SEQ ID NO: 280532 - DNA, 403 bp, Unknown
  Bacterial polypeptide expressing nucleotide sequence isolated from the Sargasso Sea
cttgtcagataaaaagttcagaattgaaaaagacagtatgggggagctaaatgttcccgctgattcaaaatggggtccacaaacccagcgtgcagtcgataattttcaaatcagtgattacaaaatgcccactggtttcattcgttctttggcgcttttgaaatggggactggccaatgcaaataaagatttgaatcttctctcaaaagaaaaggcatctgctatagcagattcagcaatggaaatttatcgaggcgatcacatgaaagagtttccagtcgatgtctttcaaactggatctggaacaagtaccaatatgaatatgaatgaggttatatctcatctagcatcttcagaatcaaaccccattcatccaaatgatgatgtaaatatgggccaaagc

SEQ ID NO: 280533 - DNA, 760 bp, Unknown
  Bacterial polypeptide expressing nucleotide sequence isolated from the Sargasso Sea
tctcaagctcaagtggacctttcttgtgaagaaatatcttatttacctatagggggaactgctattggaactggaatcaatgctcctaagatgttcgcaaaaaatgtttgtaatgaattaaacaaaatttataaagaactcaaaattaaatttaaacctctacttgtaaaaggtgaaatgatgagctcacaaaaccatattctaactttaagctcttctttgacaagatatgcttcttgtctaactaaaatagcgaatgatattcgctggatgaatagtggacctatttcaggactatctgaaatatctttgaaaccactccagcctggaagcagtatcatgccaggaaagattaatcctgtaatatctgaatcaatcctgatggctgctgctcatgttaatggaaaccacgttactataatgcaggcaagtagcagtggaagttttcaactgaatactatgttacctgtgatagcacataatatcatcgagtcactatacctaatgattaattgtacatttagtatgattgaactaattgatagttttagtgtcaacgaagatagagttaaagacaatctatttagaaatcctattattgctacaaaacttaatcaagtcattggatatgatttagcctctaaaatagtcaaagaggcatataaaacaaatagttctatttttgatattgcagaaaaaatgacgtctcttactaagtcagaattgattaagatactagatccaaaaaaacttatataaa

SEQ ID NO: 280534 - DNA, 254 bp, Unknown
  Bacterial polypeptide expressing nucleotide sequence isolated from the Sargasso Sea
aaaaaattttgcactctattgtgtaaaaggattaaaggcagataaaaaaagaataaaacaatatttagataattctttaatgctagttactgctttggcaccacatattggatatgacaatgcagcaaaaatagcaaaaaatgcattaaaaaataataccactttaaaagaagaggctcttaaaactaaattaattaaatctaatgaatatgataaaatagttgatccaaaaaaaatgattaatccttactaat

SEQ ID NO: 280535 - DNA, 244 bp, Unknown
  Bacterial polypeptide expressing nucleotide sequence isolated from the Sargasso Sea
ttcacaattttgtattaaaggtatcaaagctgatttaaaaaaaataagtgaggatttaaataactcgttaatgttggtcacagctctagctcctaagattggttacgataatgcagcaaaaatcgctaaatctgcacttaaaaataaaactacattaaaattcgaggcaataaaaactggccttatttcagaaaatgattttgataaaattgttgatccaagaaaaatgacttatccgggataa

SEQ ID NO: 280536 - DNA, 251 bp, Unknown
  Bacterial polypeptide expressing nucleotide sequence isolated from the Sargasso Sea
aaattttgctatttattgtgttaagggaataaaagcgaataagaagaaaatacaggaacacttagataattctttaatgcttgttacagctctagcaccgcacatcggctacgacaatgctgccaaaattgcaaagacagcacttaaaaataatactactctaaagtatgaaacattaaaaacagggctaattactgaaaaagattataaaaaaatagttgatcctaaaaagatgatctacccagcataag

SEQ ID NO: 280537 - DNA, 132 bp, Unknown
  Bacterial polypeptide expressing nucleotide sequence isolated from the Sargasso Sea
tctggaacacaaacaaacatgaatgttaatgaggtaatatcaaatagagcaattcaaatgatgggtgggaagatgggaacaaagaaaccaattcacccaaacgatcatgtaaacaaatcacagtcaacaaat

SEQ ID NO: 280538 - DNA, 832 bp, Unknown
  Bacterial polypeptide expressing nucleotide sequence isolated from the Sargasso Sea
aaggcccttgggggagcacaaactcaaagagctgttaataattttccaattagcggcataaagatggattttccatttactaaatcatttgtttcttcattaggcttaataaaagatgcagctgcaaaaacaaatttgcgcttaaaattattgtcttcaaagaagtctaaagctatttcaaaagcagcaaaagaagtttggcaagagaagcaccatcacgaatttcctatcgatgtatttcaaactggttctggcacaagctctaatatgaatgctaatgaagttattgcaaatctcgcaactaaatatgccaagcttgatatcaaaccaaatgatgacgttaatatgagtcagagcagtaatgatgttatacccacggctatcaagattagcgcacacatggatttaactaaaaagttataccctgcattagataaattgatagctgttattgaaaagaaagctaaatctttgcgaggtacaatcaaaactggtagaactcatctaatggatgcaataccaattgattttgctgaagaattatatgcgtggtcaagtcagcttaagtcttcaaaaaaaatgctcttaactcttgaaaaaaaactattagaattacctcaaggagggaccgctgttggaagcggaattaatgcacctaaacagttttcaagatattttgctcaggaaatgacaaaacttttaggaaataaaataaaatgtgttaaaagtgagaatttttatcatgaactgagtgctcaagactgctcagttcaactatctggagagcttaaaaatctttctgtaatactaatgaaaatctctaatgatctca

SEQ ID NO: 280539 - DNA, 231 bp, Unknown
  Bacterial polypeptide expressing nucleotide sequence isolated from the Sargasso Sea
taaaaggattaaaagctgataagaaaaaaattcaacattatctagataattctctaatgctggtaacagctcttgcgcccaaaataggttatgataatgcagctaaaattgcaaaaaaagcgataaagaataatacaagcttgaaagaggaagcattaaaaactggcctaattagtaaaaaagattatgatttaatagttgatcctaaaaagatgatcaaccctagttaat

SEQ ID NO: 280540 - DNA, 235 bp, Unknown
  Bacterial polypeptide expressing nucleotide sequence isolated from the Sargasso Sea
aatgaaaaaaaataaagccttcaggattgagcacgatagtttaggtgaagtaaaagtacccaaaaaagctctatggggagctcaaactcaaagagccattgaaaattttcctattagtggaataaagtttaggtttccatttggcaggtcgtttattaaagctctaggagcaattaaacattcagcagcagtagcaaatcaagatctaggtatcttaacaataaaaaaatctaat

SEQ ID NO: 280541 - DNA, 235 bp, Unknown
  Bacterial polypeptide expressing nucleotide sequence isolated from the Sargasso Sea
ttgtatctcaggactaaaagctgacaaaaatagaattaaacacttagtagagaactctttaatgctggtaactgctttatctccaagaattggctatgataatgccgcaaagattgcaaagaatgcattaaaaaataaaactactcttaaagttgaagcactgaaatcaggattaataaatgagagagaatataatataattgttgatcctaacaaaatgataaaaccagactaa

SEQ ID NO: 280542 - DNA, 315 bp, Unknown
  Bacterial polypeptide expressing nucleotide sequence isolated from the Sargasso Sea
tattcaaaccactaattgctcataatattttacaatcaatagatttgttagcagatagtactaaaaattttgctctatattgtattaaaggtttgaaagctgacagagaaaaaataagcaaatatttaaatgactctcttatgcttgtaacagcactagccccacacattggatatgataatgctgcaaaaattgctaagaaagcacataaaaataaaactaccttgaaaactgaggttttaaaaacaggattaattaatgaaaaacaatatgataaaatagttgatccaaaaaaaatgatttatccagcataac

SEQ ID NO: 280543 - DNA, 322 bp, Unknown
  Bacterial polypeptide expressing nucleotide sequence isolated from the Sargasso Sea
atgtctcaccgaatggagagagatagtcttggccctatagaggttccttctgataagtattatggagcccaaactcagagatctttagataattttaaaattgggaaccagaggtttcccagggagtttattcgtgcctatgggatactaaaaaaatctgcggccactgtaaatcatagttatggtaatcttgaggattcgatcaaaaatgctattcataaggctgcagatgaggttatagaaggcaaattagatgatcacttccctttggtagtttggcaaactggaagtgggacacagactaatatgaattttaacgaag

SEQ ID NO: 280544 - DNA, 284 bp, Unknown
  Bacterial polypeptide expressing nucleotide sequence isolated from the Sargasso Sea
catgagtgaagattatcgtatagaaaaagattcaatgggtgaagtcagggtgccagtaaaggcactttatggtgctcaaacacagcgtgctatggaaaatttccctataagtggaatttgcatcagtcgttcccttattcacgcacttggagtgatcaagcaagctgcagcaaaagttaatgcagaactgggaaatattcctaaagatgtagctcatgccattcaactcgcagcacaggaagtaattgacggcaaactcgatgatcactttcctgttgatatct

SEQ ID NO: 280545 - DNA, 655 bp, Unknown
  Bacterial polypeptide expressing nucleotide sequence isolated from the Sargasso Sea
tatgaccacctctaccgaaacacgaatcgagcaagacagcatgggcgaactggaagtccctgcagacgctttatatggcgcgcagacccagcgggcagtcaataattttccggtcagtggccagtctatgccagaggcttttatcagagcgttgatcacagtaaaaaaagccgcagctcaggctaacgtcgcattagatacgctggacagcgatacaggtgaagcgatttgtcaggcctgcgaccaattactcaacgagccgcaacttatggcacacttcccggtcgacatctttcagaccggttcaggcaccagtaccaacatgaacgccaatgaagtgattgccagggtagccagccaacaatccggcctgtctgttcaccccaacgatcacgttaattacggccagagcagtaacgatataatccccaccactattcatgtgagtgccgcccttgccttgaagcaggaactcttgccctcactcagtcacctgtatcgcgtaattggtaacaaggccagtgagctaaaagatgtctgtaaaaccggccgtacccacatgatggatgctatgcctgtgcgtatggatcagagtttatcaggctggcaggcgcaaataggtcagcagattaaagcattgaatgcccaccagccg

SEQ ID NO: 280546 - DNA, 231 bp, Unknown
  Bacterial polypeptide expressing nucleotide sequence isolated from the Sargasso Sea
ttaagggaataaaagcgaataagaagaaaatacaagaacacttagataattctttaatgcttgttacatcactagcgccccacataggctacgacaacgctgccaaaattgcaaagacagcacttaaaaacaatactactctaaaacatgaaacattaaaaacagggctaattcaggaaaaagattatgacaaaattgtcgatcctaaaaaaatgatctatccaacataag

SEQ ID NO: 280547 - DNA, 361 bp, Unknown
  Bacterial polypeptide expressing nucleotide sequence isolated from the Sargasso Sea
gggaataatttaacagtagctcaagcaggattacaagggcattttgaactgaatgcatttaaacctgtaataattttcaatgtcattaactcaataaacattctaagtgatggtatattaagtttttgtaaaaattgtctagaaggtataacaataaataaagaaaatattaataatcatgttaaaaattcacttatgcttgttactgcattgaataaatatattggttatgacaatgcagctaaaattgcaaaaaaagcctttgatgaaaatattactttaaaagaggctgctttaaaattaaaattaatttctgaaaaagagtttgataaaattgttgatccaaaaaaaatgatctaaa

SEQ ID NO: 280548 - DNA, 316 bp, Unknown
  Bacterial polypeptide expressing nucleotide sequence isolated from the Sargasso Sea
tatgaaaaataaaaaaagaactgaatcagatactttaggaaataaaaaaattgattctgacaaatattggggtgctcaaacccaaaggtctattgagaactttagaattggtaatgaaaaaatgccaacagaagtaattagggcaataggtatacaaaaaaaagcggcggctctaacaaatatgaacttaggtatattagaccaaaaaattggaaaagctataataactgcatgtgatcagattatatcattaaaacttttagatcattttcctctttctgtttggcaaactggttcaggaacacaaactaatatg

SEQ ID NO: 280549 - DNA, 532 bp, Unknown
  Bacterial polypeptide expressing nucleotide sequence isolated from the Sargasso Sea
aatgaagatatctaatgacctaagatggatgaactctggccctctagccggtctaggggaaattgaattagaagctttgcaacccggttcatcaattatgcctggtaaagtcaatccggtcatacctgagtcagcagcaatggttgcggctcaggtaataggtaatgatgcaacaattactgtgggaggtcagtcgggtaattttgaattgaatgtcatgttgccattgattgctcacaacctgctggagagcattaaattgctatccaacgtgaccgttttgttagcagataaggcgatcgcgacttttacggtgaatgaaaagcaattagcgatggcactgtctcgaaatccaattttagttacggccttgaatccaataataggctatcaaaaagcggccgatatcgcaaagaaagcgtataggcaaggtaggccagttctggatgttgcagacgaggaaactgagattgcgcgggaagagttggaaaagctgctggatccaaataatcttacttttggagggctttag

SEQ ID NO: 280550 - DNA, 322 bp, Unknown
  Bacterial polypeptide expressing nucleotide sequence isolated from the Sargasso Sea
tcattttcagctcaatacatataaaccagttatagcttttaacattattcaatcagtaaaccttcttagtgatggaataaaaagctttaattataattgcttaaagggattaaaagtaaataaagaaattattgataatcatttaaataattctttaatgcttgttaccgcattaaacaaaagtattggatacgacaatgcagcaaaaattgcaaaaaaagcctatgctgagaatttgactcttaaaaaagctgctttaaaattgaaattaatttcagaaaaagatttcgataaaattgttgacccaaaaaaaatgatttaa

SEQ ID NO: 280551 - DNA, 403 bp, Unknown
  Bacterial polypeptide expressing nucleotide sequence isolated from the Sargasso Sea
aatgattcaaaatggattagaaatcgagcaaaatgcacctattcaagaaagatccactgaacctaggaaggcttctgcaccagtaggtgaaatccgagtcgaaaaagatacgatgggagaactagaagttccggccgatcgctatttcggtgctcaaaccgctcgctctctgatcaatttcgacattggtaccgacacaatgccaccgtcggtcatcagagcatttggaatcctaaaacaagcctcagcagaaaccaatgtcgaactagggcagttagaccctcaggttggggctttgatatcgtctgcttgcgatgaggtaatctctggtgcattagacgaacattttcctcttcgagtttggcaaacgggttcaggaacgcagacgaatatgaacagcaat

SEQ ID NO: 280552 - DNA, 445 bp, Unknown
  Bacterial polypeptide expressing nucleotide sequence isolated from the Sargasso Sea
aatgaacctggaagttctattatgccgggtaaagttaatccgactcaatgcgaagccttatcgatggtttgcactcagataatgggtcttgaatatgcagtttcaatggcaaattctagcggcactttacagatgaatgaatataagcctcttattggatttaatattcttacaagtttaaaattacttaaaaatgcaatagagaacttcagaataaaattagttgatgggatggaacctaatcaaaagaaaatgaagttaaatttagaaaattcactgatgttggttacagccatagtgccaaaagttggttatgaaaaagcagctgaaattgcaaaccttgccttcaaagaatcattaaatttaaaagaggcaacacttaaattaggttatttaaacgaagatgaatttgatgaagcaatgaatatcagttcaatgatttgat

SEQ ID NO: 280553 - DNA, 205 bp, Unknown
  Bacterial polypeptide expressing nucleotide sequence isolated from the Sargasso Sea
aagaataaaagaattattagataattcattaatgttagtaacagcgcttgctccacatattggatatgacaatgcagctaaaattgcaaaaacagcacttaagaatggaacaactttaaaacacgaggctgtaagaagtggcttaattagtgaaaaggattatataaaaatagttgatccaagaaaaatggttactccaaattaa

SEQ ID NO: 280554 - DNA, 966 bp, Unknown
  Bacterial polypeptide expressing nucleotide sequence isolated from the Sargasso Sea
agcaaatctttgctacaaaacctccaaagttaagattcatccaaatgatgatgtaaatatgagccagagctctaacgatgtaattccaactgtcatgaatctggcctattacttcgattcaacaaagaaattaatgccagcattaaatttactcattgaaactttagagaaaaaagctgaatcagtgaagggaattacaaagacgggcagaacacatcttatggatgccatgccagttgatatgtctgatgaattaaatgcctggaatacacaactaaaatgctctagagaatctatggaagttgttctagaaaagcttttatttcttcctcagggaggaacagcagttggatcaggaataaatgcacacagaagattttcaaaagaatttgctaaggaactttcaaaacttactggctttaaaactaagccaagcaaagatttttttagaaacttaagtgcacaagatttatctgtccagctatccggagaacttaaaaatttagctacaatccttttaaaaatatctaatgatcttagatggatgaatagtggacctttatctggaatctctgaaattgaacttcaagctcttcaacctggaagcagcataatgcctggaaaagtaaatcctgtaattcctgaggccgtagcaatggccgcagcagatgttattggtaatgatgtttctataacagttgcagctcaatcaggaaacttccaactaaatgtgatgttaccagtaattgcctattgcaacttgaaaagcgtaaatatacttgctggtagcatgaatgttcttgctaaaaaagctattaagaccttcaaggtcaatcataaaaagattgaagaatcactctcaagaaatccgatcttggtcactgctttgaatccggtcattgggtatcagaaggctgcagaaatagccaaaatagcctatcaagaatctagaccagttattgatgt

SEQ ID NO: 280555 - DNA, 319 bp, Unknown
  Bacterial polypeptide expressing nucleotide sequence isolated from the Sargasso Sea
atgaaaaacattcgaattgaaactgacagttttggaaaattagaggtgtctaatgaaaaatactggggagcacagacgcaacgttccctgaaaaatttcaatattggacaagaaaaacaaaaactctctcttatccatggattggtagtgataaaacaagcagcagcagcagtcaacatggaagaaggtaaattagatcgaaaaattggtaacgctattgtaaaagcctgtaaaaagatcagatctggaaaatttgatgataactttcccctttctgtttggcaaacaggctctggaacacaaacaaatatgaatgtaa

SEQ ID NO: 280556 - DNA, 311 bp, Unknown
  Bacterial polypeptide expressing nucleotide sequence isolated from the Sargasso Sea
aatgacaaaaaactttaggattgaaaaagatagtatgggaacaatagaggttcccatgaaagctttgtggggcgctcaaacacaaagatcgataataaatttttctattggagaagaattaattccaattgagttaatttattcactcaccctcataaaaaaagctgcttcaattgcgaatttccatttaggtttaatagataaaaggaaaaaagatttgattgtagaggcatgttcggaaatacttgatgggcttcacgattcacagtttcccctaaaagtttggcaaacaggtagtggcacgcaaacaa

SEQ ID NO: 280557 - DNA, 454 bp, Unknown
  Bacterial polypeptide expressing nucleotide sequence isolated from the Sargasso Sea
aatgaacctgggttcctctataatgcctggcaaagtgaacccgacccaatccgaagcagttacaatggtttgcgtaaaggttattggaaatcatacaggaattacaatcgcaggatctcaaggacaatttgaactaaatgtgtttaaaccgttgatcgctcataatattttacaatcaattgatttaatttctgatagctcaaaaaattttgccaaatattgtgtaaaaggaataaaggctaacataaataaaattcaaaaagatttagataattcattaatgctagttacagcattggcaccaaagattggttatgacgaagcagcaaatattgcaaaaaaagctttaaaaaataattcgacacttaaaactgaagtgttaaagagtggactaatggacgaaaaagaatacaaaaaaattgtggatccaaaaaagatgattcaacctgaataa

SEQ ID NO: 280558 - DNA, 662 bp, Unknown
  Bacterial polypeptide expressing nucleotide sequence isolated from the Sargasso Sea
tgaagtagcaggaatatctgttagagaaacatcaaatcactttcaggcgcaatccacattggatgcagccgtggaagctagcggtactttaagagcaatcgctacaagcctccataaaattgcaaacgacatcaggttcatggcatgtggccctagagcaggaattggagaaataattctcccagaggtgcaacctggtagttctataatgccaggcaaaattaaccctgtgatttctgagtcagttatacaagttgtagcacaggtttatggtaatgatgctacagtggctgtatcagggcaaggagggtactttgaacttaatacaatgatgccagtagtagctttcaatatacttcaaagcatatccttacttgcttcttctgccaataattttgcagttcaatgtgtcgacgggattcaaagcacttcaactggccctgatatggtagaaagaggtttgatgttaggcacagcattagctccagaaattggttatgatttggctgcagatatagctaaaacggcagccagggaaggatctacaattcgagaagtggctaagataaagacggagcttacggacgacaagcttacagaattattgaatccagaagaaatgaccaagccaagcttagaagtatcgggtggcggaggttaga

SEQ ID NO: 280559 - DNA, 382 bp, Unknown
  Bacterial polypeptide expressing nucleotide sequence isolated from the Sargasso Sea
gtgtcaagtaattggaaaccataatggtattactatggcaggatcacatgggcatttcgaattaaatgtttttaaacctttaataatccataatattctacaatcaattgaaataatggctgactcctcaaaaacttttgcgcttcattgtataaagggaattaaagctgacaaaaaaaggattaaatttttattagataattcattgatgcttgtaactgctctagcccctaaaattggttatgacaaagctgcttacatagcaaaaatagcacataaaaataatacaactttgaaagaggaagttgtaaaaaataaaattttgacggagaatgaattcaataaacttatgaagccaatatcaatgacaaagccaaaataa

SEQ ID NO: 280560 - DNA, 824 bp, Unknown
  Bacterial polypeptide expressing nucleotide sequence isolated from the Sargasso Sea
gcatgtgccgcaagaagcgttgtatggcgcacaaacacagcgtgcggtgaacaactttcccatcagtcatcaacccatgccggcgcaattcatccgcgccctgatcctggccaagacagccgcggccaaggtcaacgtcgagctcaagcaaatcagcgaagggcagggcaaggctattgtcgatgtcgcccaaggcttgctggaaggcgactacatgcagcacttcccggtggatatcttccagaccggctccggcaccagttccaacatgaacgccaacgaagtgatcgcgacccttgccagccgtttgctgggcgaggcggtcaaccccaacgatcatgtgaattgcggccagagcagcaacgacatcatccccaccaccatccacgtcagtgccgcgttggtgctgcacgagcaaacgctgccggccctgctgcatctggtgcaagtcatcgagcaaaaagccgaggcggttcacccgttcatcaagaccggccgcacgcatttgatggacgccatgccggtgcgcatgagccaggtgctgaacggctgggcgcagcagctcaaggccaatatcggtcacttgcaggacctgctaccggcgctgcaagcattggctcagggcggcacggcggtcggtaccgggatcaacgcacaccccgagtttgccaggcgcttcagccagcaactgagccttttgaccggggtgaaattcacgcccggcaagaacctgttcgcgctgattggctcctcaggacaccgccgttgcagtctctggccagttgaaagccacggcggtgtcgctgatgaaggtcgccaatgac

SEQ ID NO: 280561 - DNA, 301 bp, Unknown
  Bacterial polypeptide expressing nucleotide sequence isolated from the Sargasso Sea
gatggattttcgcagtgaaatggatagcttggggagcatcaatgtttctaaagataagtattggggagcgcaaacacaacgttcattaaaaaattttaagattggtcatcaccgcttcccgcgctctgtgatttgggcgcttggtgttgtgaaaaaagcagcagcgttgaccaataatgagctgggtaaattagatgctaaggtgtgtcaactcatctgtagtgcctgtgatgaggtgatggatggcagactagatgcgcattttcctttagtagtttggcaacacaggttcgggcactca

SEQ ID NO: 280562 - DNA, 553 bp, Unknown
  Bacterial polypeptide expressing nucleotide sequence isolated from the Sargasso Sea
aatgagtcagataaaaatattagcaggtgcattatttaaaatttcaaatgatataaaaattttatcttcaggaccaagatcaggaatatatgaactaattattcctcaaaatgaaccagggagttctatcatgccgggtaaagtgaatccaactcaatgcgaagccttatcaatggtttgcactcagataatgggttttgaatatgcagtctcaatggcaaattctagcggcactttacagatgaatgaatataagcctcttattggatttaatattctcacaagtttaaaattacttaaaaatatagtagaaaacttcagaataaatttagttgatgggatggaacctaatcaaaagaaaatgaagttaaatttagaaaattcactaatgttggttacagctatagtgccaaaagttggttatgaaaaagcagctaaaattgcaaaccttgccttcaaagaatcattaaatttaaaagaggcaacccttaaattaggttatttaaatgaagatgaatttgatgaagcaatgaatatcaattcaatgatttga

SEQ ID NO: 280563 - DNA, 233 bp, Unknown
  Bacterial polypeptide expressing nucleotide sequence isolated from the Sargasso Sea
tgttaaaggaattaaagctaacaaaaagaaaatacaagaacatctggataattcattaatgttagttactgctctagctccacatattgggtatgataatgcagcaaaaattgcaaaaaaagcactcaaaaataatacaacattaaaattcgagacattgaaaacaggcttaattaacgagaaagattacaaaaaaattgttgaccctaaaaaaatgatctatccaacatagg

SEQ ID NO: 280564 - DNA, 280 bp, Unknown
  Bacterial polypeptide expressing nucleotide sequence isolated from the Sargasso Sea
ctattgacttatttggcggacagtacaaagaattttgctctttattgtgttaaagggattaaagctaataaaaataagattaaagaacacttagataattctttgatgttagtaactgctttggctccacatattggctacgataatgctgcaaaaatagctaaaacagctttgaaaaataatacaacactaaaacatgaaactttaaaaacaggattaattagtgaaaaagagtatgagaaaatagttgatcctagaaaaatgatttatcctgcataat

SEQ ID NO: 280565 - DNA, 349 bp, Unknown
  Bacterial polypeptide expressing nucleotide sequence isolated from the Sargasso Sea
aatggcaggctcgcatggacattttgaattaaatgtatttaaacctctaatagctcataatatattacaatctatagacttattggctgatagcactaaaaacttttctctttattgcataaaaggaataaaggctgacaaaattaagattaaacaatttttggataattctttaatgttggttactgctctggcacctcatataggatatgacaactctgctaaaatcgcaaaaaaagctttaaaaaataaaactacattaaaagaagaagctttaaaatcgggattaatagatgaaaaaagttataataaaattgttaatcctttaaacatgattaaaccattataa

SEQ ID NO: 280566 - DNA, 219 bp, Unknown
  Bacterial polypeptide expressing nucleotide sequence isolated from the Sargasso Sea
aagcgaataagaagaaaatacaagaacacttagataattctttaatgcttgtcacatcactagcgccccacataggctatgacaacgctgccaaaattgcaaagacagcacttaaaaacaatactactttaaaacatgaaacattaaaaacaggcctgatatcagaaaaagattacaataagatagttgatcccaaaaagatgatctacccagcataag

SEQ ID NO: 280567 - DNA, 530 bp, Unknown
  Bacterial polypeptide expressing nucleotide sequence isolated from the Sargasso Sea
aggtgcattatttaaaatttcaaatgatataaaaattctatcttctggtccaagatcaggaatatatgaattaattatccctcaaaatgaacctggaagttctatcatgccaggcaaagtaaatccgactcaatgcgaggctttatctatggtttgcactcaaataatgggtcttgaatatgcagtttccatggcaaattctagcggcactctacagatgaatgaatataagcctcttattggatttaatattcttacaagtttaaaattacttaaaaatgcaatagaaaacttcaaaataaaattagtcgatgggatggaacctaatcaaaaaaaaatgaagttaaatttagaaaattcactaatgttagttacagccattgtgccaaaagtgggttacgaaaaagcagctgaaattgcaaaccttgccttcaaagaatcattaaacttaaaagaggcaacacttaaattaggttatttaaaagaagatgaatttgatgaagcgatgaatattaattcaatgatttgat

SEQ ID NO: 280568 - DNA, 763 bp, Unknown
  Bacterial polypeptide expressing nucleotide sequence isolated from the Sargasso Sea
ttttccatttacaaaatcctttgtttcttctttaggccttattaaagatgcagctgcaaaaactaatttaaagttaaaattaattagttcaaagaaatcaaaagccatatccaaagctgcaaaagaagtttggcaagaaaaacatcatcatgaatttccaatagatgtttttcaaactggatctggtacaagctcgaatatgaatgctaacgaagttattgcaaatttagcatcaaaatattccaaaataaaaatcagccctaatgatgatgtaaatatgagtcaaagcagtaatgatgttatacctaccgcaataaaaataagtgctcatatggatttaacaaaaaaactttatcctgctttagatgcattgattatagctattgaaaataaagcaaagacattaaaagggacaataaaaactggaagaactcatttaatggatgctatgcccatagatttttcagaagaattgaaagcctggtcaagtcaattaacatcttctaaagaaatgctaaatattcttgaaaaaaaattgcttgaactgccgcaaggcggaacagctgttggcagtggtatcaatgcacataaacagtttgcaaaatgtttttcgcaagagatgtcaaaactatttggcaataagtataaatttgtatccagcaaaaacttctatcatgaactaagtgcacaagattgttcagttcaactttcaggtgagctaaagaatcttgccttaattcttatgaaaatatcaaatgatttg

SEQ ID NO: 280569 - DNA, 724 bp, Unknown
  Bacterial polypeptide expressing nucleotide sequence isolated from the Sargasso Sea
catgggtggtactgctgtaggaactggaataaatactcacccacaatttcctgcaaaatttgctgcagaaatttcaaaacttacaggggagtcattttgtgaagctgaaaatcattttgaagcacaatccactgttgatgcacctgttgaattaggtgcgcagctaaaaactcttgcagtcagtctcctaaagattgttaatgatttgcgttggatgaactctggtccgaatggtggtcttggtgaaattcagctagcagcactgcagccaggttcgtcgatcatgccaggtaaggttaaccctgtgatagaagaatcgatggccatggtctgcgctcaggtaattggatatgatgctgcaataagtgtaggtggattatcaggtaattttgaattaaacgttatgttacccatggttgctcacagtctgttggagtcaattaggcttctggcaaatgcttcccgaaaccttgcagaccggtcggtatcaagaatcgtggtgcgagaagatcatatcaactctcttataagaaaaaacccaatactggtaacaactcttaaccctctgattggctacgatctggctgcaaaaattgctaaaaaagcttttgcggaaaatcgcactctcaagtctgtagcacttgaaatgtgtgatctgtcggaagaagatttagataaggcactcgacccatcgaagatgactggagggggttttttagattaa

SEQ ID NO: 280570 - DNA, 409 bp, Unknown
  Bacterial polypeptide expressing nucleotide sequence isolated from the Sargasso Sea
caatgcgaagctgtaacaatggtatgcgcaaaagtaattggaaatcatacagggataactgtggctggttcacatggtcattttgaattaaatgtttttaaacccttaattgcttataacatattacaatcaatagatattttagcagatagtattaagaattttaccctttactgcatgaatggaattaaaccgaacaaaaaaaaaattaaagaacatttagaaaattcattaatgctagtgacagctttagcgccaaaaattggttacgataatgcatctaaaattgcaaaaaaagctctaaaaaacaacacaacgttaaaaaccgaagcattaaaatcaggattgataaacgaaaaagattataaaaaaattgtaaatccaatgaaaatgataggtccgagctagt

SEQ ID NO: 280571 - DNA, 210 bp, Unknown
  Bacterial polypeptide expressing nucleotide sequence isolated from the Sargasso Sea
aaaaaaaaataaaagattatttagataattctttaatgttagttacggcactagctcctcacataggctatgataatgcggctaaaattgcaaaaaaagcattaaaaaataatacaagattaaaagatgaagctataaaaacaggaatgatatctgaaaaagattataacaaaattgttaatccaaaaaaaatgactagcccaaattaaa

SEQ ID NO: 280572 - DNA, 232 bp, Unknown
  Bacterial polypeptide expressing nucleotide sequence isolated from the Sargasso Sea
tgttaaaggaataaaagcagatattaaaaaaattaaaaaagatctagatagttcgttaatgttggttacagccttagcaccaaaagttggttatgacaatgctgccaaaattgcaaaaactgctcttaaaaatggaacaacattaaagcatgaagcagtaaaaagtggtttaattactgaaaaagaatataaaaaaatagttgatccaaaaaaaatgattaaaccaaattaa

SEQ ID NO: 280573 - DNA, 792 bp, Unknown
  Bacterial polypeptide expressing nucleotide sequence isolated from the Sargasso Sea
aatggatttcccttttacaaaatcttttgtatcttctttaggattgataaaagatgcagctgcaaaagctaatttgagacttaaattaataccaacaaaaaaagctaaagcgatttcaaaagcttcaaaagaagtgtggcaagaaaaacaccatcatgaatttccaatagatgtttttcaaacaggctctggtacgagttcaaatatgaatgccaatgaagtaattgctaatttagcatcaaagtactccaaactaactattagtccaaatgatgacgtaaatatgagtcaaagcagcaatgatgtaattcctactgctattaaaattagtgcacatatagatctttcaaaaaaattaattccagcattgaatgatctaattaatacaattgaaaaaaaagcaaaatcagttgatggagttattaagactggtaggactcatttaatggatgcaatgccaattaacttttcagaagaattatttgcatggtcaagtcaattaagagcctcttctgaaatgatagacataatttcaaacaaatttcttatcctaccccaaggtggaactgctgttgggagtggcataaatgctcataaacaattctcgcgttatttttcacaagaaatttctaagctttatcctggaaaatacaagtttatacctagcaaaaatttttatcatgaacttagttctcaagattgctctgttcaattgtcaggagaattaaaaaatctagcagtaattttaatgaaaatatctaatgatctacgctggatgaatagtggaccatt

SEQ ID NO: 280574 - DNA, 424 bp, Unknown
  Bacterial polypeptide expressing nucleotide sequence isolated from the Sargasso Sea
gaacctggaagttctattatgccgggcaaagtgaatccaactcagtgcgaagccttatcaatggtttgtactcggataatgggtcttgaatatgcattctcaatggcaaattctaacggcactttacagatgaatgaatataagcctcttattggatttaatattctcacaagtttaaaattacttaagaatgtaatagaaaacttcagaataaaattagttgaagggatggaacctaatcaaaagagaatgaagttaaatttaaaaaattcactaatgttggttacagcaatagtgccaaaagttggttatgaaaaagcagctgatattgcaaaccttgcctttaaagaatcattaaatttaaaagaggcaacaattaaattaggttatttaaacgaagatgaatttgatgaagcaatgaata

SEQ ID NO: 280575 - DNA, 538 bp, Unknown
  Bacterial polypeptide expressing nucleotide sequence isolated from the Sargasso Sea
atgaaatatagaatagaaaaagatagcttaggtgaaattaaagttccttctaaggccctttggggagcacaaactcaaagagctgttaataatttccctataagcggcataaagatggatttcccatttactaaatcatttgtttcttcattgggcttaataaaagatgcagctgcaaaaacaaatttgcgcttaaaattattatcttcaaaaaagtctaaagccatttctaaagcagcaaaagaagtttggcaagagaagcaccatcaagaattccctatcgatgtctttcaaactggctctggcacaagctctaacatgaatgcgaatgaagttattgcaaatttagcaagtaaatatgccaagattgatatcaaaccaaatgatgacgtaaatatgtgtcagagcagtaatgatgttatacctacggctataaagattagtgcacacatggatttaactaaaaagttatatcccgcattagataaattgatagctgttatgaaaagaaagctaaatctttacgagggacaataaa

SEQ ID NO: 280576 - DNA, 931 bp, Unknown
  Bacterial polypeptide expressing nucleotide sequence isolated from the Sargasso Sea
aatggtgattgcaggtgaggttgatgagcattttccattagatgtttttcaaactggttctggaacaagtaccaatatgaacgctaatgaagttatagcaaacttagcctcaaaaaggttgggggaagttgtaagtccaaatgatgacctcaacatgagccaaagtagcaacgatactattcctacagctatatgcataagtgctttattggatatggaagaattgcttttaccaggtttagatatcctgattaaggagatggatacaaaagcaaaaaaacttaaaggtactattaaaactgggagaacacatctaatggatgcaatgcccatagactttgctcaggaaatttctggttggtctgctcagcttaaaagttgtaagaatgcaatcgttgcagcaaataaaagaatgttggaattaccacaaggtggcacagcaataggtactggtgtaaactctcacaaaaatttttccaagagcttttgtgaagcagtggagaaaatttctggtttaaaagttaaatctgcacccaatttctttcaaggtcttagctctcaagataatgcagctgaattatccagtgcattgaaaaatctttctcttgttcttatgaagatttgtaatgatttaagatggatgaacagcggaccattaacaggattatccgatattgaacttgaggctctgcagccaggtagtagtattatgcctggtaaagtaaatcctgtaattcctgaagctgtttcaatggcttgtgctgacgtgttaggaaatgatcttacgatttcagtcgctgtacagaacgggaattttcaattgaatgtgatgttaccggtgattgcatacaatctattgaagagcatcaatcttttggggaattgtatgcctctattggcaaaaaaatgcattaaatcttttcaaagttaa

SEQ ID NO: 280577 - DNA, 316 bp, Unknown
  Bacterial polypeptide expressing nucleotide sequence isolated from the Sargasso Sea
aatgaataataaaaaaagaatagaatttgatagtataggttcaaaaaaaattgataaaaataagctttggggcgcacaaacccaaaggtccttagaaaattttaaaattggtagtgaaaaaataccagttgaattgataattgcattaggccaacaaaagaaagctgctgctcaagctaatatagaacttggtgttttaaatagaaaattaggatcattaataataaacgcttgtaatgacataattaatttaaaacttattgatgagtttccattattagtatggcaaactggttctggaacccaacaaatatga

SEQ ID NO: 280578 - DNA, 325 bp, Unknown
  Bacterial polypeptide expressing nucleotide sequence isolated from the Sargasso Sea
cctggaaaagtcaatccaactcagatgtgaggctgtcactatggtatgtgcaaacgtcattggaaatcataatggaataacaatggcaggatcacatggtcattttgaacttaacgtatttaagcctttaattgctcataacattttacaatctattgatttattagcagacagtacaaaaaattttgctctttattgtgttaagggaattaaagctaataaaaaaaaaataaaagaacatctagataattcattaatgttagtaacctctttggccccacatataggttatgataatgctgcaaaaatatctaaaagagcttta

SEQ ID NO: 280579 - DNA, 331 bp, Unknown
  Bacterial polypeptide expressing nucleotide sequence isolated from the Sargasso Sea
aatgcaaggtcaatatgaattaaatgtttttaaacctgttatcgctgctaattttttgcaatcggcaagattattagccgatgcatgtatttcttttgaagaacattgtgtgaacggaattgaaccaaactataagcgcattaaagaactactcgataattctttgatgttagttacagcattaaacactaaaattggttattataaagctgcagaaattgcacaaactgcacataaaaatggaactactttaaaagaagaagccgttagattgggttatgtttcttctgaagattttgatacttgggtaaaacccgaagatatggtttaa

SEQ ID NO: 280580 - DNA, 854 bp, Unknown
  Bacterial polypeptide expressing nucleotide sequence isolated from the Sargasso Sea
gaagttatagccaacatagcaactaagtacgcaaaagttgaaattagcccaaatgatgatgtaaatatgagtcaaagcagcaatgatgttatacccacagctattaaacttagcgcttacatggatttaactaaaaaattatttccagcattagatggactaatcaaatcaattaatgataaggctgattctttaaaaggaacaatcaaaactggaagaacacatctcatggatgcaatgccaattgatttttctgaagaattaaaagcatggtctagtcaactagagtcttccaaggaaatgctaaatgttattgaaaagaaatttcttgaattatcccaaggtggcactgcggtaggaagtggcataaatgctcacaaacaatttgcaaaattatttgctcaagagattacaaaattaactaaaaacaaatataaattcacaccagcaaagaatttttatcatgaactaagtgctcaggattgttctgttcaactatctggagagttaaaaaatctggctgttattttaatgaaaatttcaaatgacttaagatggatgaatagtggtccattggctgggatatcagagattgaacttaaggctcttcaacctggaagcagcataatgccaggaaaagtaaatcctgtaattcctgaagctgttgcgatggcttcagcagatgtaattggcaatgatgtttctataacagttgccgctcaatctggaaattttcagttgaatgtaatgcttccagttattgcatacaaccttttaaaaagcattaatcttctgagtggctcaatgaatgcattatctaaaaatgctattaaaacatttaaggttaatcataa

SEQ ID NO: 280581 - DNA, 439 bp, Unknown
  Bacterial polypeptide expressing nucleotide sequence isolated from the Sargasso Sea
tatgaaatttagaattgaaaaagatactttaggtgaagtcaaggttccatctaaagctttgtggggtgcgcaaactcaaagggctgtcaataattttcctatcagtggaattaaaatgaatttcccatttactaaatcttttgtgagctctcttggcataatcaaagatgcagctgcaaaagctaatttaaaattaaaattgatttcttcaaagaaatcaaaatcaatttctaaagccgctaaagagatatggcaagaaaaacatcatcatgagtttccaattgatgtttttcaaacaggttcaggaaccagttcaaacatgaatgctaatgaagttattgctaatctagccacaaaatattcaaaaattttaatttcacctaatgatgatgtaaatatgagtcaaagcagcaatgatgttattctcactgcaataaaa

SEQ ID NO: 280582 - DNA, 286 bp, Unknown
  Bacterial polypeptide expressing nucleotide sequence isolated from the Sargasso Sea
ctacaatcaattcaaattctctctgatagcacaagaagttttgcaaaatattgtgtgtcaggactaaaagctgataagaatagaattaaatacttagtagataattctttgatgttagtaaccgccttatctccaaaaattggttatgataatgctgcaaaaattgccaaaaatgcattaaaaaataaaacaactcttaaagttgaagcaatgaaatcgggtctaataaatgagaaagaatataataaaattgttgatcctaacaaaatgattaaaccagattaac

SEQ ID NO: 280583 - DNA, 712 bp, Unknown
  Bacterial polypeptide expressing nucleotide sequence isolated from the Sargasso Sea
gcggtgggaacgggaatcaacacccctcccgaatttcctcctgcttttgcggaggaggtatccaaactgagtggagaatcgatgcgcgaggcagagaatcattttgaagcacaatccaccgttgatgcccctgtggaaatgagcggtcaattgaaaacgattgccgtcggtctgctcaaaatcgtcaatgacctgcgctggatgaactcgggtccgaatgcagggttgggagaaatccagcttgcagcgcttcagcccggttcttccatcatgccgggaaaagtgaatccggtgattgaggaatccacggccatggtctgcgctcaggtgattggttacgattctgcgatcagtgtgggcggactttcaggaaactttgaactgaacgtgatgttgccgatggtcgcccatagtctgctggaatcgatcagattattggctgcggcatctaggaacctggctcaacgttcggtctcgagaatcattgttcgggaagaacacatcaagtccctggtcgggcgtaacccgatactggtgaccaccctcaatcccttgatcggttatgacctggcggcaaagatcgccaaaaccgccttcgcagaaaaccggcctcttttggaagtcgcgaaggaaatgtgcgatcttccggaagatgaactgaaaaaagccctggatccggcgaaaatgacccagggcggtctggtagaataaa

SEQ ID NO: 280584 - DNA, 901 bp, Unknown
  Bacterial polypeptide expressing nucleotide sequence isolated from the Sargasso Sea
tatgaaatatagaattgagaaagatagtgttggtgaggttaaggtccctgctaaagcgctttggggtgctcaaactcaacgagcagtgaataattttccaattagtggtattaaaatggattttccttttactaaatcatttatatcatctttaggtttaattaaggatgctgccgcaaaagcaaatttacgtcttaaacttatatcatctaagaaagctaaggctatctctaaagcagccaaagaagtttggcaggaaaaacaccatcatgaattccctgttgatgtatttcaaactggttctggcacaagctcaaatatgaatgctaatgaagttatagcaaatttggcaactaaatatgcaaaagtaaatgttagtcccaatgatgatgtaaatatgtgccaaagtagtaatgatgtaataccaacggctatcaaaatcagcgctcatatggatttaactaaaaaattatttccatcgttagatgaattaattcaaacaattgaaaataaggctgattcagttaaaggagttatcaaaacaggacgaactcatctaatggatgctatgccaatagatttttcagaagaattaaaagcttggtctagtcaactacagtcttcaaaaggaatgctaagtatcattgaaaagaaattcctagaattgcctcaaggtggaacagcagttggaagtggaataaatgctcataaacaattttctaaatattttgctcaagagatgacaaaactttcaggtaacaaatgcattccaagtaaaaatttttatcatgaattaagtgcacaagattgctcagttcaactatctggcgagttaaaaaatttggccgtcatactttcaaaaatttcaaacgatttaaggtggatgaatagtggaccatta

SEQ ID NO: 280585 - DNA, 996 bp, Unknown
  Bacterial polypeptide expressing nucleotide sequence isolated from the Sargasso Sea
tgagtcaaagcagtaatgacgtaatacctactgcaataaaaattagcgctcatcttgatcttactaataagttattaccagcaatagataaactaataaatgttattgaaaaaaaagctgaatctttaaaaggcattataaagactggcagaactcatttaatggatgcaatgccaatagacttctcagaagaattaatggcatggtctagtcaacttaactcatcaaaagaaatactaaatattcttcaaaaaaaacttttagagttacctcagggtggaactgctgttggaactggaataaacgctcataaacaatttgctaaatactttgcaaaagaattgtcactgttattaggaaaaaaacacaagtgtgtcccaagcagcaatttttatcatgaattaagttcacaagatacatccgttcagttgtccggtgagcttaaaaaccttgctctagtattgatgaaaatatccaatgatctaagatggatgaatagtgggccactaacaggtatttcagaaattgaattaagagcacttcagcctggaagcagtataatgcctggtaaggtaaatccagttataccagaagcggttgctatggcatcggcagatgtcattggtaatgatgtgacaatttctgtggcagctcaatctggtaattttcaacttaatgttatgctacctgttattgcctataaccttctaaagagtataaatttattggcaggtgcttcaaatgcattatcaaaaaatactataagtaatttcaaagttaataaaaagaatttagaactttcattgtccaaaaatccaatattagtaacagcgttaaatccaattattggatatgaaaaagctgcatatattgcaaaaaaagcatataaagaaaacagatcgataattgatgtggcttctgaagagacagatttaacaaaagcaaaacttttgaagcttcttgatccttcaaaattagcaaagggtggtttgtaag

SEQ ID NO: 280586 - DNA, 691 bp, Unknown
  Bacterial polypeptide expressing nucleotide sequence isolated from the Sargasso Sea
atggcaaaaaaaggttacagagaagaatcagatagcattggaatagtttacgttcctcgaaaagctctatatggcgcacaaacgcaaagagccatagacaactttcctataagtggtatcaaaatggattttccttttaccaaatcctttatcagctctttaggagtaattaaggatgctgcagctagagctaataataaattgaagcttctgtccaataagaaggccagagcaatatctaaggcttctaaagaggtgtggcgagaaaaccatcatgaagaattccctatcgatgtatttcaaacaggatccggaaccagttcgaacatgaatgcaaacgaggttatagctaatttagcatcagtattttctggtgaagaggttagcccgaacgatgacgttaacatgtctcaaagcagcaatgatgtgataccaacggcaataaaaatcagcgcacatatggatttaactaaaaagttatacccaaacttagaaaaccttattaatgcaatcgataaaaaagcagtttctgttagagggataataaaaacaggaagaactcatctcatggatgcaatgcctgtagatttagctgatgaattatctgcgtggtccagtcaattaaagacttctctaaaagctctacaatttattgagactagacttttggagcttcctcaaggcggaacag

SEQ ID NO: 280587 - DNA, 895 bp, Unknown
  Bacterial polypeptide expressing nucleotide sequence isolated from the Sargasso Sea
gctggctgagaaggccaccgaattcgacggagttctgaagtccggacgaactcaccttatggacgcgacgcccgttcgtcttggtcaggagttttctgggtacgcaacacagattcggaagggcattgagcgcattcgtgtagttgcagctgagttagaggaactcgcactcggcggaacggccaccggtacgggcattaacacgcatgaggatttttcaaggcatacgattgccaagatcgccctggctactggaatctcgttttgtgaggcggatgatcattttgaggcgcagggggcgaaggacgctgcggtcaatgctgcgggcgcgctcaatacgattgctacgagcttcatgaagatcgcagacgatattcgctggttgggttcggggccgacatctggtctgcatgagatccgacttcctgcagtacagcctggctcttcaattatgccaggtaaggtgaatccggttatgtcagaggccatgatgatggtggccgctagggttatggggaatcacaccactgtcaccgtcgcaggcagccgtggaaactttgaactaaatgtcatgatgcccgtgctagctcacgcacttcttgagtccgtagatctactttcaaacatcgctcacgcgtttactgatcgatgcttgatagggatcgaagcgaatcaagagcgtgcccgtgagcttctggagcgtaatcctgcaatcgctactgccttgaacccctatatcggttacgacgaggcagccgtggtcgcgaaagagtctgcaaggcgtggagttagcgtccgagatatcgtgaccgagaagcgtcttctgcccgaagaacagattgatgaagccctcgatgttcgttcgatgactgaaccgggtcttccagaaggctga

SEQ ID NO: 280588 - DNA, 997 bp, Unknown
  Bacterial polypeptide expressing nucleotide sequence isolated from the Sargasso Sea
tcacgtcaatatgggacaaagcagtaacgatgtcattccttctgccattaatgtggatgctgtcctcacgcttaccaataatttgattccttcaatgagacatttaaaaaatagcattgaggaaaaggcaaaatcaattggggatttacccaagaacggacgcactcatctcatggatgcgatgcccattactttctcccaagaaatgagcgcttggtctgcacaaatcgaggattccataacacaatatgaactatccatgtctaagttgcagcaacttgcaattggagggactgcagttggtacgggaatcaatgctgatcctgatctctcaaaaaagtgctgcaatcatataaataaactgacaggcatggaatttagacctgccaataattcatttcaagcaatcagttcgcaagatgcgtcattgatattgtcttcttgcaataaaacattggctgttgcattgacgaaaataagcaacgatctcagatggatgaacagtggaccattggggggtataggagaaatcactcttcccgctctgcagcctggaagtagcatcatgcctggtaaagtcaatccggtgatacctgaatcggtctgtatggttgcaagccgagtattgggtaatgatctaacaatcactcatgctgctcagtcaagtaatttccaactgaatgtaatgctccccttgatcgcacacactctgtcggagtctttgagcttgctttcaaatgcatgtcttagcctcgcagataatgccataaaaggttttgaggtaaatcaagaaaatattgaatccatgttaaatcggaacccgattctagcaaccgcactgaatgccaccattggctatgaaaaaggggctcaaatcgtaaaaaaagcgtatcaggagaaaaggtcgatcattgatgttgctgttgaaatgactgatttagattccgatacacttgcagaaatattagatccactcaaactcaccaggaaccaataa

SEQ ID NO: 280589 - DNA, 806 bp, Unknown
  Bacterial polypeptide expressing nucleotide sequence isolated from the Sargasso Sea
tatgaaatatagaattgaaaaagacagtttaggagaggtaaaagttccattaaaagcattatggggcgctcaaacacaaagggccgtagataattttccaataagtggcattaaaatggactttccttttacaaaatcttttgtttcatctttaggtcttataaaagatgcagcatcaaaaactaatttgagacttaaattactatcttcaaaaaaatcaaaagctatttcaaaagcagctaaggaggtatggcaagaaaaacatcatcacgaatttccaatagatgtatttcaaactggctctggaacaagttcaaacatgaatgcaaatgaagtaatcgcaaatttagctaccaaatatgcaaaaacaaaaataagtccaaatgacgatgtaaatatgtgtcaaagtagcaatgatgtaataccgactgcaattaaaattagcgcacacatggatttaacgaaaaaattgtatccagctttggataatttgattcaagagatagaaaagaaagctagtacattaagaggagttattaaaacaggccgaacacaccttatggatgcaatgcctattgactttgccgaagaattgctggcatggtcaagtcagctagaatcatctaaaaatatgttaacacatcttgaaactaagctacttgaattacctcaaggtggaactgctataggaagtggtataaacgctcataaacaatttgcaaaatattttgctaaggagatgacattacttttaggaaaaaaacataaatgcgtaccaagtaaaaacttttatcatgaattaagtt

SEQ ID NO: 280590 - DNA, 772 bp, Unknown
  Bacterial polypeptide expressing nucleotide sequence isolated from the Sargasso Sea
atgaaatatagaatagaaaaagatagtttaggagaagttaaggtaccttcaaaagctctatggggagcacaaactcaaagagcagttaataattttcctataagtggaataaaaatggattttccttttacaaaatctttcgtttcatcattagggcttataaaagatgctgcagctaaggccaacctaagactgaagttactatcatcaaaaaaatcgaaagctatctccaaagcagcaaaggaagtctggcaagaaaaacatcacaatgagtttcctattgatgtatttcaaacaggctctggcactagttctaatatgaatgccaatgaagtaatagcatctttagcaactaagtatgcaaaggtaaaagttggtccaaatgacgatgtaaatatgagtcaaagtagtaatgatgtaatacctactgcaataaaaataagtgcgcatatggatttaacaaaaaaattatttcctaaacttgatgagcttattgaaacaattgataaaaaagctaaatcagtgagaggaactattaaaactggcagaactcacttaatggatgctatgcctattgattttgctgaagaattgaaagcgtggtcaagccaacttcaaaactcaaaaaacatgttaattattctcgaaaagaaatttcttgaattacctcagggaggaactgcagttggaagcggtattaatgctcacaagcaatttgcaaaatattttgctcaagaattgactaagctatatgggcacaaatatataccaa

SEQ ID NO: 280591 - DNA, 280 bp, Unknown
  Bacterial polypeptide expressing nucleotide sequence isolated from the Sargasso Sea
gataaacattatggctgattcttcaaaaggttttgcaaattattgtattagaggtttaagagctgataagaaaagaattaaatctcttcttgataattctttaatgctcgtaacagcactgtcgcccaagataggatatgataatgcggccaagatagcaaaaaaagctctaaaaaatggaactactttgaaggaagaagctttaaaaactggacttataaatgaaaaggaatttttaagaatcgtagatccaaaaaaaatgattggaccgggtaagtaa

SEQ ID NO: 280592 - DNA, 271 bp, Unknown
  Bacterial polypeptide expressing nucleotide sequence isolated from the Sargasso Sea
cattctctcagatagcacaaaaagttttgcaaaatattgtattgctggactaaaagctgacaaaaatagaattaaacacttgttggataactctttaatgctggtaactgccttatctccaaaaattggctacgataatgctgcaaagattgctaagaatgcattaaaaaataaaactactctaaaagcagaagcactaaaatcaggattaataaatgatagagaatacaataaaattgttgatcctaataaaatgataaaaccagactag

SEQ ID NO: 280593 - DNA, 238 bp, Unknown
  Bacterial polypeptide expressing nucleotide sequence isolated from the Sargasso Sea
tgcatactcgactcaggcgcaaacgaagcaaagattgccgagcacctcgagaactcattgatgctagtcaccgctttgaatccacacatcggatacgacaatgcagctaaaatcgccaagaatgcccatgagaaaggacttactctcagacaaagtgctatcgaactggacctggtgaatgaggagcagttcgaagaatgggtcagacctagtgatatgactggtccaagcgaataag

SEQ ID NO: 280594 - DNA, 1069 bp, Unknown
  Bacterial polypeptide expressing nucleotide sequence isolated from the Sargasso Sea
atgaatgctaatgaggtgattgcaaacttagctacaaaaaaagcccgaattaaaattaatgcaaatgatcatgtaaatatgagccaaagtagcaacgatgtcattccaacagcaatttgcatttctgctttattagatactcaaagacttttgctaccatctttagaaggcttaattaaagttattgataagaaagcattatcactaaagggtcaattaaaaactggaagaacgcatttaatggatgcaatgcctatagatttctcacaagaactatcaggatggagggctcaattaaaagctgttgagaaatccattgtttcagcttcgaaagaaatggcttatttacctcaaggaggaacagctattggaacaggagtaaatgctcataaggattttggaaaaatatttgctgctgaagtttcaaaattaactaaactcaatgttaaaacatcaacaaattacttcaaatctttaagcgctcaagattccgctgctcaattatcatctagtgtaaaaaatcttagtttagtgttaactaaaatatccaatgatttgcggtggatgaatagtggaccacttaccggtctaggagaaattgaactcgaggctttgcaaccaggaagcagcattatgcctggtaaggttaatccggtgataccggaagcagtagcaatggcttgtgctgatgtaattggaaacgatgtaacagtatccataggaagtcagtcaggaaattttcaattaaatgtaatgcttccagtaattgcatacaacttactaaaaagtattagccttatgtccaattcaatgccacttttggcaaacaaagcaatcaaaacttttaaagtcaataaaaagaatattgaagaatcaattggcatgaatccaatattggtaacagcattgaatagagaaatcggttatgaaagggctgcgtatatcgccaaaaaagcatacaaagaaaaaagacccattattgatgttgctcatgaagaaactggattgccactcaaacaattaaaggctttactaaaccccgcaaaacttacaaagggcggagtatgac

SEQ ID NO: 280595 - DNA, 617 bp, Unknown
  Bacterial polypeptide expressing nucleotide sequence isolated from the Sargasso Sea
cttgtcagataaaaagttcagaattgaaaaagatagcatgggcgagctaaatgttcccgctgattcaaaatggggcccacaaacccagcgtgcagtcgataattttcaaatcagtgattacaaaatgcccactggtttcattcgttctttggcgcttttgaaatggggactggccaatgcaaataaagatttgaatcttctctcaaaagaaaaggcatctgctatagcagattcagcaatggaaatttatcaaggcgatcatatgaaagagtttccagtggatgtctttcaaactggatctggaacaagtaccaatatgaatatgaatgaggttatatctcatctagcatcttcagaatcaaacgccattcacccaaatgatgatataaatatgggccaaagcagcaatgatgtcattccttcagcaatcaatgttgattcctctttatccgttaaaaataatcttattccatccatgaagcatctaaaaaatgcaattgatgaaaaagccaaatcaatcggtgacataccaaaaaatgggcgaacccatctcatggatgccatgccggtaactttttctcaggaaatgagtgcatggtctgctcaaattcaggatg

SEQ ID NO: 280596 - DNA, 319 bp, Unknown
  Bacterial polypeptide expressing nucleotide sequence isolated from the Sargasso Sea
aacgtttttaaacccttaattattcataatgttttgcaatctctagatattttgtccgatgctacaaaaaatttttcaaaatactgcgttaaaggtttgaaggctaataaaaaaagaatcaaagaattattagataattctttaatgcttgtgactgcactttccccaaaaattggatatgataatgcagctaaaatcgccaaacttgctcaccaaaataacacaactttgaaaactgaagctgttaaattaaaattaattagtgaaaaagaatttgataggatagttgatccaaaaaagttaactcaacctgaataaa

SEQ ID NO: 280597 - DNA, 526 bp, Unknown
  Bacterial polypeptide expressing nucleotide sequence isolated from the Sargasso Sea
gatgaaatttagaattgaaaaagatagtcttggcaaagttaatgttcctgcaaaagcattatggggcgcacaaacacaaagagctgtagataattttcctatcagtggcataaagatggattttccatttacaaaatcttttgtgtcttcattaggacttattaaagatgcagctgcaaaagctaacttaaagctaaaattaatcagttcaaaaaaatcaaaagcaatatcaaaagctgcgaaagaagtttggcaagaaaaacaccatcaccaatttccaatagatgtttttcagacaggatctggtacaagttcaaacatgaatgcaaatgaagttattgcaaatttagcatctaagcactctaaattaacaattagcccaaacgatgatgtaaatatgagtcagagcagtaatgatgttataccgactgcaataaaagttagtgcacatatggatttaacgaaaaaactcttcccagcacttgacggtttaattttagctatgaaaaaaaggctgattcattaa

SEQ ID NO: 280598 - DNA, 223 bp, Unknown
  Bacterial polypeptide expressing nucleotide sequence isolated from the Sargasso Sea
cctgaaagctgacaaaataaaaataaaagaatatttagataattcgctaatgcttgtaacctctttagcaccacacatcggttacgacaatgcagcaaaaattgcaaaaaaagctttaaagaataaaacaactctaaaagacgaggcattgagatcaggtttaattaatgagaaggaatataacaaaatagtaaatccaaaaaaaatgattaagccattataa

SEQ ID NO: 280599 - DNA, 241 bp, Unknown
  Bacterial polypeptide expressing nucleotide sequence isolated from the Sargasso Sea
atgaaaaaaaataaagccttcaggattgagcacgatagtttaggtgaagtaaaagtacccaaaaaagctctatggggagctcaaactcaaagagccattgaaaattttcctattagtggaataaagtttaggtttccatttggcaggtcgtttattaaagctctaggagcaattaaacattcagcagcagtagcaaatcaagatctaggtatcttaacaataaaaaaatctaatgctatta

SEQ ID NO: 280600 - DNA, 523 bp, Unknown
  Bacterial polypeptide expressing nucleotide sequence isolated from the Sargasso Sea
atgaaatatagaattgaaaaagacacaatgggagaaattaatgtccctcatgatgcgctttggggagctcaaactcaacgagctttagaaaattttaaaattagcggtattaaatttgcttttccttttggaagaagttttatagaagccttaggggtaattaagtttgccgctgctgcatctaatcaaaagcttaagttgcttgattcaagaaaagcaaaggcaattaaaactgcatcaaaagaagttcttttaggtaaacatgatagtcaatttccactcgatgtttttcagactggctctggaactagcaccaatatgaatgctaatgaggtgattgcaaacttagctacaaaaaaagcccgaattaaaattaatgcaaatgatcatgtaaatatgagtcaaagtagcaatgatgttattccaacggcaatttgtatatctgcattattagatactaaaagacttttgttgccatctttggaaaacttgatcaaagtcattgataaaaaagcatatctta

SEQ ID NO: 280601 - DNA, 481 bp, Unknown
  Bacterial polypeptide expressing nucleotide sequence isolated from the Sargasso Sea
tatgaaatatagaatagaaaaagatagcttgggcgaaattaaagttccttccaaggccctttggggagcacaaactcaaagagctgttaataattttccaattagtggcataaagatggattttccatttactaaatcatttgtttcttcattaggcttaataaaagatgcagctgcaaaaacaaatttgcgcttaaaattattgtcttcaaaaaagtctaaagctatttcaaaagcagcaaaagaagtttggcaagagaagcaccatcacgaatttcctatcgatgtatttcaaactggttctggcacaagctctaatatgaatgctaatgaagttattgcaaatctcgcaactaaatatgccaagcttgatattaaaccaaatgatgacgttaatatgagtcagagcagtaatgatgttatacctacggctatcaagattagcgcacatatggatttaactaaaaagttatatcctgca

SEQ ID NO: 280602 - DNA, 697 bp, Unknown
  Bacterial polypeptide expressing nucleotide sequence isolated from the Sargasso Sea
accgctgtcggtactggaataaatgctcctaataatttgggggctgatgttgcaagcgaacttcagtcatcaattggtataccttttaaagaagttgaaaatcatttcacaagacaaggttcaagagaagaagtggttcatttatcaagtgctttgaaggcacttgcagtatcgctctttaaaattgcaaatgatattagatggatgggtagtggaccagtgtctggattaggagatttgaagatccctgctttgcaaccaggatcatcaataatgccaggaaaagtaaatcctgtaattcctgaaatgatgatgcaggtatcagctcaagttattggaaacgatacaactattacgttttcatcagcgaatggaaattttgagctcaacacaatgcttcctgtaatggctcacaatctacttgaaagcattgctttactcactactggagtgagtgtgtttggggaaaaactaattaaagacttagaagcaaatactcaaaagctaaatgaagatactcaaaaaaactcaatcctagttacagcacttgtaccaaagcttgggtatgatgttgctgctgaagtagctaaagaagctatggaaagtggattaacaattaaagatgtattgcttagcaaggaattaatgtcagagggtgatattgatgatcttttggatattgagaagcttatctagt

SEQ ID NO: 280603 - DNA, 367 bp, Unknown
  Bacterial polypeptide expressing nucleotide sequence isolated from the Sargasso Sea
tatgaaatttagaatagaagaggatagccttggaaaagtgagagtaccaagaaatgcactatggggcgcacaaactcaaagagcaatagataatttcccaataagcggcatctcaatgaattttcctttcacaaatacctttatttcaatgcttggttatgtaaaagatgctgcagcaagagcaaataaaaaccttaagttattagaaacaaaaaaacagagagtcatctcgagagctgccaaagaggtatggactaataagcatggcaaagagttcccaattgacgtttttcaaactggctctggcacaagtacaaatatgaatgcaaatgaagttatagcaaacctttgctataaaacttccaaa

SEQ ID NO: 280604 - DNA, 417 bp, Unknown
  Bacterial polypeptide expressing nucleotide sequence isolated from the Sargasso Sea
gcaaggttaatccaactcaaattgaagcattatctatggtttgcttacaagtaatgggtaataacttaactacaacaatagctgggtctcaaggtcattttgaattgaatacctttaaaccagtaatgatatacaatattattcaatctttaaatttattatctgactcaataaatagttttgttgaaaaatgtcttaaaggattaaagcctaataaaaaaaatattagggaaaatttattaaattcacttatgcttataacagctttaaatgactttattggctatgataatgctgcaaaaatagcaaagaaggcttttaaagaaaatttaactttaaaagaagccgcaataaaacttaaattagtagatattaagaaatttgatgaaattttagatccaaaaaaaatgatttgat

SEQ ID NO: 280605 - DNA, 361 bp, Unknown
  Bacterial polypeptide expressing nucleotide sequence isolated from the Sargasso Sea
gcgattacgattggcggtagccagggtaattttgaattgaacgtattcaagcccatgatgattcacaatctattgcatagcgcaaaattgctagctgattcgatgcgcgcttttactagtaaatgtattactggtttgaaagcaaatgaagatgtgatcaataatcatcttgaaaattcattgatgttggtaactgcactaaataatcacataggatatgacaaggctgcaaaaatcgcgaagaatgcgcatgaaaaaggcatgactctaagggaatctgcactagagttaggcatggtgaccgatgaagagtttgatctatgggtgcgtccagagcaaatgactggtcatgaaaactaat

SEQ ID NO: 280606 - DNA, 619 bp, Unknown
  Bacterial polypeptide expressing nucleotide sequence isolated from the Sargasso Sea
ttgtcagataaaaagttcagaattgaaaaagatagcatgggtgagctaaatgttcccgctgattcaaaatggggcccacaaacccagcgtgcagtcgataattttcaaatcagtgattacaaaatgcccactggtttcattcgttctttggcgcttttgaaatggggactggccaatgcaaataaagatttgaacctcctctcaaaagaaaaggcatctgctatagcagattcagcaatggaaatttatcaaggcgatcatatgaaagagtttccagtggatgtctttcaaactggatctggaacaagtaccaatatgaatatgaatgaggttatatctcatctagcatcttcagaatcaaacgccattcacccaaatgatgatgtaaatatgggccaaagcagcaatgatgtcattccttcagcaatcaatgttgattcctctttatccgttaaaaataatcttattccatccatgaagcatctaaaaaatgcaattgatgaaaaagccaaattaatcggcgatataccaaaaaatgggcgaacccatctcatggatgccatgccggtaactttttctcaggaaatgagtgcatggtctgctcaaattcaggatgcca

SEQ ID NO: 280607 - DNA, 766 bp, Unknown
  Bacterial polypeptide expressing nucleotide sequence isolated from the Sargasso Sea
atcgtaaaaaaagcagcggcaattgttaatgcaagaaatggtgatctggataaaaaaattagcagatatatcgtcagagcatctgaagaaattataaaaggaaagcttgatgatcactttcctctaaaagtgtggcagacaggatctggaacacaaactaacatgaatgtaaatgaagtcattgcgaatagagctattcaaatgatgggtggaaaaatgggaaccaaaaaacccgtgcatccaaatgatcatgtaaataaatcacaatcaacaaatgatgtatttcctaccgcaatgcatatagcgatagcaacgaaagcaaaaaacaaattgctcccttctcttaagttgctagaaaaggagttaaatacaaaaactaaacaattcaataaaatagttaaattgggcagaacacatttacaggacgctactccattaactttgggccaagagttttcaggttatcattcgcaattaaaaaaatgtattacaagaatagaaagagctttgggtgaaatactttatttagcgcaaggtggtacggctgttggtaccggattaaatactaaaagaggttttgataaaaaaattgttagagagataaagaaaataacaaaaattcctttcaaaccagcaacaaacaaatttgccgctttagcatctcacgatcctatcgttaacttttcaggaacaatgaatactacagctgtttgtctaatgaaaattgcaaatgatattaggtttcttggctcgggaccaagagcag

SEQ ID NO: 280608 - DNA, 685 bp, Unknown
  Bacterial polypeptide expressing nucleotide sequence isolated from the Sargasso Sea
aatcaaaaaaagaattttgacaaaaaaattgttaaagaaattgctaaatttacaaaaataaaatttaaaccagctacaaataaatttgctgagcttgcagctcatgatgcaattgtaagtttttcaggttcattaaatacttgtgcagtagctttaatgaaaatatcaaatgatatccgatttttaggttctggcccaagagctggctatggagaattaattttacctgaaaacgaacccggctcatctataatgcctggaaaagtaaatccaacgcaatgtgaagcagtaactatggtttgtgtgaaagtaattggtaatcacaatggtataacaatggctgggtctcatggccattttgaactaaatgtttttaaacctttaattgctcataacatcttacaatcaattgacttaatagcagatagtacaaaaaattttgctctttattgtgttaaaggaataaaagcaaataaaaagaaaattaaagaacatcttgataattcattgatgctaataacagctcttgctccacatattggttatgataatgcagcaaaaattgcaaaaactgcacttaaaaacaacacaactttaaagcatgaaactttaaaaacaggattaattgacgaaaaaaattataataaaattgttaatccaagaaaaatgatctacccagaataac

SEQ ID NO: 280609 - DNA, 775 bp, Unknown
  Bacterial polypeptide expressing nucleotide sequence isolated from the Sargasso Sea
cagttagaagattgtattttaagaattaaaaatgctctaaaagaaatttattctttagcacagggagggactgcagtgggaaccggaattaatagcaagaaaggttttgataaaaaaatcattaaagaaattagaaaaattacgaaacttccttttaaaccaaccaaaaataaatttgctgctttggctgcacatgatgaaattgtaaatttttcgggaacgttaaatacagctgcagtttgtttaatgaaaattgcaaatgatattcgttttctaggttccgggccaagagctggatatggagagatcattttaccagctaatgaacctggatcatcaataatgccaggaaaagtaaaccctactcaatctgaggctgtaacaatggtttgtgtgaaggtaattggaaatcacaatggaattacaatggctggttcccatggtcattttgaattaaatgtttttaaaccattaatcgctcataatatattgcaatcaattgatttattagctgatagcactaaaaacttctcactctactgcataaaaggattaaaagctgacaagattaaaattaaagagtatttagataattctttaatgctagtaacgtctttggcgccacatatagggtatgataatgctgcaaaaatcgcaaagacagccttaaaaaataaaaccactcttaagtcagaagcattaaggtctgggctaatagacgaaaaaaaatatgataaaatcgttaatcctaaaaagatgataaagcctttataaa

SEQ ID NO: 280610 - DNA, 1054 bp, Unknown
  Bacterial polypeptide expressing nucleotide sequence isolated from the Sargasso Sea
attggtgattttcttgttagaccgattttaattcaatcaataggaattgttaaaaaatcagctgctattgttaatgctaggaatagagatttagacaaaaaaataagtaaatacattattaaggctgccgacgaagtgatcaaaggtaagctcaacgaacatttccctttaaaggtttggcaaactgggtcgggtactcaaacaaatatgaatgtaaatgaagtaatatctaatagagcaattcaaatgatgggcggaaaaatgggaactaaaaaacctgttcacccaaatgatcatgttaataaatctcaatcaacaaatgatgtttttccgacggcaatgcatatagccattgctttaaaaactaaaaagaaattattaccagctttaaagcttcttgagaaagaattaagtaaaaaagttactcagtttaataaaatagtaaagttaggaagaacacacttgcaagatgctacacctttaacattaggacaagaattttctggttatcattcacaattgaaaaaatgtattgagagaatagaaaaatctttagatgaaatatattacttagctcaaggaggaacagcagtaggaacaggtttaaatacaaaaaaaaattttgataaaaaaataattttagagataaaaaaaataactaaacttccatttaaacctgcaaaaaataaatttgcagctttagctgcacacgacgcaatagtaaacttttctggaacaatgaatactgcggctgtttgtttgatgaaaatagcaaatgatataagatttttaggttctggtcctagagctggctatggtgaattgatacttccagaaaacgaacctggatcgtctattatgccaggtaaaataaatccaactcaatgcgaagcagttacaatggtttgtgtaaaggtgattggaaatcataatggtattactatggctggatcacatggacatttcgaacttaatgtttttaagccacttattattcataatattttgcaatcaataaatataatgtcagactcggctagtggctttgcaaaat

SEQ ID NO: 280611 - DNA, 1033 bp, Unknown
  Bacterial polypeptide expressing nucleotide sequence isolated from the Sargasso Sea
aaaaaaggttcaaagaaaccagtgcatccaaatgatcatgtttacaaatcacaatctacaaatgatgtttttccaactgcaatgcatatttctgttgcaaaagaaacgttaagtaaattgttgccgaacttaaagattttagaaaaagaattaaatagaaaatctaaagaattcaaaaatatagtaaaaattggacgtacacatcttcaagatgcaactcctctttctttaggtcaagaattttcaggatatcatactcaagtaaaaaaaagtatcgaaagaattgaatatgccttaaaagaaattttttttctggctcaaggtggaacagcagttggaacaggaataaattctaaaaaaaactttgataaaaaaatagttaaagagatcgcaaaatatacaaaaataaaatttaaacctgctccaaataaatttgctgaacttgcagcgcatgatgcgatagttaatttttctggaactttgaatacttgtgcggtagctttaatgaaaatatctaatgatataagatttttaggatctggtcctagagctggttatggagaactaatactaccagaaaatgagcccggttcatcaattatgcctggtaaagttaatcctactcaatgtgaggcagttacaatggtttgtgtaaaagttattggaaaccacaacggcataacgatggctggatctcatggacattttgagttgaatgtttttaaacctttgatcgcacataacatattgcaatcgatagatctaatagctgacagtaccaaaaattttgctatttattgtgttaagggaataaaagcgaataagaagaaaatacaggaacacttagataattctttaatgcttgttacagctctagcgccccacatcggctatgacaatgctgccaaaattgcaaagacagcacttaaaaacaatactactttaaaacatgaaacattaaaaacaggcctgatatcagaaaaagattacaataagatagttgatcccaaaaagatgatctacccagcataag

SEQ ID NO: 280612 - DNA, 828 bp, Unknown
  Bacterial polypeptide expressing nucleotide sequence isolated from the Sargasso Sea
aaaaacaaacaaatttgagagtaaaattgctaaagcaattataaaagcttcaaatgaaattatccaaggaaagctggacgatcattttcctttgaaagtttggcaaactggttctggaacccaaacaaacatgaatgtcaatgaagtcatatccaatagagcaattgaaatattaaaaggaaaaaaaggtacaaaaaaacctgttcatccaaatgatcatgttaataaatctcaatctacaaatgatgttattccaactgctatgcatatagccattgctattgaaactagaaaaaaattattaccttctttgttaattttaaatagtgaattaaaaaaaaaaaaaaataaatttaaaaaaatagttaaaattgggagaacacatttacaagatgctactccaattactttaggacaagaattttctggttatcaatcacaattggaaaattgtattaaaagaattaaaaatgctttaaatgaaatatattttttagctcaaggaggcactgctgtaggaacgggaataaatacaatgaaaaactttgataagaaaattattaaagaaataaaaacaataactaaaattccttttaaacctacaaaaaataaatttgcagcattagcagctcatgactcaatagttaatttttctggaaccttaaataccacagctgtttgtttaatgaaaatagcaaatgatataagatttttaggatcgggcccaagggcaggatatggagagttaatactaccaagtaatgagcctggttcttctaattatgcccaggaaaaagttaatcccacacaatcggaggcagttactat

SEQ ID NO: 280613 - DNA, 880 bp, Unknown
  Bacterial polypeptide expressing nucleotide sequence isolated from the Sargasso Sea
aaaaaaaatccaatgaatttaaaaaatatagtgaaaatcggaagaactcatttgcaagatgctactccactttctcttggacaagagttttcaggatatcattttcaagttaaaaaaagtattgaaagaatagaatacgctttaaaagaaatactatttcttgctcaaggaggtactgctgttggcacaggaataaattcgaagaaaaattttgataaaaaaattgtaaaagaaattgctaaatttacaaaaatcaaattcaaaccagcaccaaacaaatttgctgaacttgcagctcatgatgcaattgtaaatttttctggtactttaaatacttgtgcagttgctttaatgaaaatatcaaatgatattagattcttaggatctggtcctagagctggttatggagaattaattttacctgaaaatgaaccaggttcatctataatgcctggaaaagtaaatccaacacaatgtgaagctgttacaatggtttgcgtaaaagtaattggaaatcataatggaataacaatggcaggatcacacggtcattttgagttaaatgtttttaaacctttaattgctcataacattttacaatcaattgacataattgctgacagtacaagaaattttgctctttattgtgttaagggaataaaagcgaataaaaaaagaataaaggagcatctagataactcattaatgctcgtaactgctttagctccacatattggatatgataatgcggctaaaatagcaaaaaatgcccttaaaaataatacaactttaaagtatgagactttaaaaacaggattaataaaagaaaaagattatacaaagatcgttaatcctaaaaaaatgatttatccagaataac

SEQ ID NO: 280614 - DNA, 885 bp, Unknown
  Bacterial polypeptide expressing nucleotide sequence isolated from the Sargasso Sea
catagttaaaattggaagaacccaccttcaagacgctacaccactctcacttggacaagagttttcaggatatcattttcaagttaagaaaagtattgaaagaatagaatatgccttaaaggaaatattatttcttgctcaaggtggtacagctgtaggcactggaataaattcaaagaaaaattttgataaaaaaattgtaaaagagattgctaaaataacaaaaatcagttttaagccggccccaaacaagtttgcagagcttgcggctcatgatgcaatcgtaaatttttctggtgctcttaatacctgtgcggtagctttaatgaaaatatctaatgatattagatttttaggatctggtccaagagcgggatacggggaattaattttacctgaaaacgaacctggttcatctattatgccagggaaagtaaatccaactcagtgcgaagcagtaactatggtttgtgtaaaagttattggaaaccacaacgggataactatggcagggtcacatggacattttgagcttaatgtttttaaacccttaattgcgcataatattttgcaatcaattgatcttatagctgacagtacaaaaaactttgctttatattgtgtaaatggaataaaggctaataagaaaaaaattcaagaacatctagataattctttgatgttagtaacagcattagcaccacatatcggttatgataatgctgcaaaaattgctaaaacagcattaaaaaacaataccacattaaaatacgaaacattaaaaacaggattaataaataaaaaagattatgaaaaaatagttgatcctaaaaaaatgatttacccagcaataacttttaattgcatcattcaaaaaaattttta

SEQ ID NO: 280615 - DNA, 820 bp, Unknown
  Bacterial polypeptide expressing nucleotide sequence isolated from the Sargasso Sea
cgcaaccccacttactttgggacaagaattttcaggatattattctcaattaagtgattgtattttaagaattgaaacatctttgaaagaaattttctatcttgcccaaggtggaacagcggttggaacaggaattaactcaaaaaaaaattttgatgtaaaaatttgtaaagaaataagtaaactaactaaaattaagttttatccagcaaaaaataaatttgctgcccttgctgctcatgacgccatagtaaatttttcagggactttaaataccacagcagtttgtttaatgaaaattgcaaatgatattcgttttttaggttcaggtcctagagctggttacggggaattaatattacctgcaaatgaaccaggttcttcaataatgccggggaaggttaatccaacacagtgtgaggctgttacaatggtttgtgtaaaagtaattggtaatcatacaggtatcactttagcaggttctcaaggacagtttgaattaaatgtttttaaacctcttatcgctcacaatattcttcagtctatagatcttttgtcagacagttctgataatttttcaaaattttgtattaaaggtatcaaggcagatttaaataaaattagtgaagatttaaataattcactaatgttaatcacagctttagctccaaaaataggttatgataatgctgccaaaattgcaaaatctgcactaaaaaataaaacaacattgaagtttgaagctgtgaagactggccttatctcagaaaaagattttgataaaattgttgatcctaaaaaaatgacttatccgggatag

SEQ ID NO: 280616 - DNA, 919 bp, Unknown
  Bacterial polypeptide expressing nucleotide sequence isolated from the Sargasso Sea
attccatctttagtactattaaataatgaacttaataaaaaagtaaaaaaatttaaaagtataattaaagttggtaggactcaccttcaggatgcaacgccaatttctttagggcaagaattctcaggatatcaatcacaattagaagattgtattgaaaggattaaaaaaggacttaacgaaatttataatttggcacaaggaggtactgctgtaggaacaggtattaacagtaaaaaaaattttgataaaaaaataataaaagaaattaaaaaaattacaaaattaccatttaagccaactaaaaataagtttgcagctttggctgcacatgacgaaattgttaatttttctggatcattaaatactctagctgtatgtttaatgaaaatagctaacgatataagatttcttggatcgggtccaagggctggctatggagaattaattttaccctctaatgaacctgggtcttcaataatgcctggaaaagttaatcctacgcagtctgaggctgtaacgatggtttgtgttaaagtgattggaaatcataatggtataacaatggctggttcacacggacattttgaattaaatgtttttaaacctttaattgctcataatatacttcagtcaattgatctactctcggatagttctaaaaattttgctatttattgtgttagaggacttaaagctgataaaaaaaaaataaaagaatatttagataattctttaatgacagtaacagctttagctccacatattggatatgataatgctgctaaaattgcaaaaaaggctttgaaaaaaaattcaacattgaaacaagaagctctagcatctggtttaattgatgataaaacttttaacttattaattgatccaaaaaagatgattatccttcataagattgaaa

SEQ ID NO: 280617 - DNA, 733 bp, Unknown
  Bacterial polypeptide expressing nucleotide sequence isolated from the Sargasso Sea
atgaaaaaaagaagagagcacgatagtattggagttattaacgttcctggggataaatattggggtgcatccactgaaaggtcaaaaaaatactttgatataggcgaatttttagtaagacctgttttaattaaatcaattgcaataattaaaaaatcagcagctgttgttcatcgaaaaaataaacaaatagaaagtaagatcgctaacgcaattataaaagctgcaaatgaagttatacaaggcaaactagatgatcattttcctcttaaagtatggcaaacaggttcgggaacacaaacaaatatgaatttaaacgaagtaatagcaaatagagctatagaaatattaggtggaaaaaaaggatcaaaaaaacctgtacatccaaatgatcatgtaaataaatctcaatcaaccaatgatgtttttccaactgcaatgcatatagctattgcattagaaaccaaaaaaaaattactaccttcattaataactttaaataaagaacttaaaaaaaaagtaagtaaatttaaaaatataattaaagttggtagaacacatttgcaagatgctactccaatttctctaggtcaagaattttctggttaccagtcacaactagaaagttgtattaaaagaattaaaaatgctttaaatgaaatttattttttagcacaaggtggaactgctgtgggtactggcataaatactaggaaaaattttgataaaaaaa

SEQ ID NO: 280618 - DNA, 889 bp, Unknown
  Bacterial polypeptide expressing nucleotide sequence isolated from the Sargasso Sea
caggagcaggcgcagcgccacgccagcctggtcaagaccgggcgcacgcacatgatggacgccacgccgatcaccttcggccaggagctgtccgccttcgtcgcccagctcggccacgccgaggctgccatccgcgcggcgctgcctgcggtgtgcgaactggcccagggcggcaccgccgtcggcaccggcctgaatgccccggccggcttcgccgaggcgatggccgccgaactggcggcgctgtccggcatgccgctgaccagcgccccgaacaagttcgccgccctcgccggccatgagccgctggtgcagctttccggcgcgctgaagaccctggccgtggccctgatgaaactggccaacgacctgcgcctgctgggttccgggccgcgcgccggtctcgccgaggtgcgcctgcccgccaacgaaccgggcagctcgatcatgcccggcaaggtcaacccgacccagtgcgaagcgctgtcgatgctcgcctgccaggtgctgggcaacgacagcaccatcagcttcgctgccagccagggtcatttgcagctcaacgtgttcaagccggtgatcatccacaacctgctgcagtcgatccgcctgctggccgacggctgccgcaacttccagcagcactgcgtcgccgacctgcagccggacgccgcgcagatggccgcccacctggagaacggcctgatgctggtcaccgcgctcaacccgcacatcggctacgacaaggccgccgagatcgccaagaaggcctacaacgaaggcagcacgctgcgccaggccgcgctgcagctcggctacctgaacgacgagcagttcgaccagtgggtacgcccacaggacatgctcggagccggctggcatgagtgag

SEQ ID NO: 280619 - DNA, 400 bp, Unknown
  Bacterial polypeptide expressing nucleotide sequence isolated from the Sargasso Sea
atgaaattaagaaaagaattcgatagtattggaacaattaatgttcctaatgataaatattggggagcatcaactcaaagatcaaaaaaatattttgatattggagaatttctagttagaccagttttaataaaatctattgcaataattaaaaaagctgcagctatagttcatagaaatgaaaaacaaattgtaccaaaaatttctaatgcaattgtaaaagcatccaatgaggtaatcagtggtaaattagacgaacactttccactaaaagtttggcaaactggctctggtactcaaactaatatgaatgtaaatgaagtaattgcaaatagagcaatcgaaattttaggtggaaaaaaggtacaaaaaagccagttcatccaaatgatcatgtaaa

SEQ ID NO: 280620 - DNA, 616 bp, Unknown
  Bacterial polypeptide expressing nucleotide sequence isolated from the Sargasso Sea
aatgaaatttagaaaagaaacagacagcatgggtaccataaatgttgcggacgacaaatattggggtgcctcaactgaaagatcaaaaaaatattttgatataggaaaaatattagtaagtaaaactttaattaatgcaatagcaataataaaacttgctgctgctaaagttcacagaaaagaaaaacaaattgatttaaaaatttgtaatgcaatacaaactgctgccaaagaaataatttcaggtaagctagatggtaatttcccgttaaaagtatggcaaactggatctggaacacaaacgaatatgaatgtaaatgaggtaatagctaatagggcaattcaaatcttgggtggaaaaaaaggctcaaaaaaaccagtccatcctaatgatcatgtgaataaatctcaatcaactaatgatgttttcccaactgctatgcatattgcgattgctttagaaacgaaaaaaaaattattaccctctctgaaaaatcttagcaaagaattaaagaaaaaaattaagaaatttaaaaacattgtcaaagtaggtagaacacatcttcaagatgcaactcctcttaccttgggacaagaattttctggatatcattct

SEQ ID NO: 280621 - DNA, 705 bp, Unknown
  Bacterial polypeptide expressing nucleotide sequence isolated from the Sargasso Sea
gcacaggcctcaatgctccggccggcttcgccgaagccatcgctgccgagctggccgcgctaactggcctgccactgaccagcgcgccgaacaaattcgctgcgctgtccggccatgaacctctcgtacacctgtccggtgccctgaaaaccctggccgtggcgctgatgaagctggccaacgacctgcgcctgcttggttcgggcccgcgtgccggcttcgccgaggtgcgcctgccggccaacgagccgggcagctcgatcatgcccggcaaggtcaacccgacccagtgcgaagcgctgtcgatgctcgcctgccaggtgctgggcaacgacgccaccatcagcttcgctgccagccagggccacctgcagctcaacgtgttcaagccggtgatcatccataacctgctgcaatcgatccgcctgctcgctgacggttgccgcaacttccagcaacactgtgtcgccgatctgcagccggatgccacgcaaatggccgcgcatctggagaatggcttgatgctggtgaccgcgctcaatccgcatatcggctacgacaaggccgccgaaatcgccaagaaggcctatgccgaaggcagcaccctgcgccaggccgctctgcagcttggctacctgaacgaagaggaattcgaccaatgggtacgaccacaggacatgctcggagccgggcggcatgactgaa

SEQ ID NO: 280622 - DNA, 682 bp, Unknown
  Bacterial polypeptide expressing nucleotide sequence isolated from the Sargasso Sea
aatgaaattaagaaaagaatttgatagtattggaacaattaatgttcctaatgataaatattggggagcatcgactcaaagatcaaaaaaatatttcgatattggtgaatttctagttaggccagttttaataagatctattgcaatcattaaaaaagctgctgctatagttcatagaaaagaaaaacagattataccaaaaatttctaatgccattgtaaaagcatccaatgaagtaatcagtggtaaattagatgaacactttccactaaaagtttggcaaactggctctggtactcaaactaatatgaatgtaaatgaagtaattgcaaatagagcaatcgaaattttaggtggaagaaaaggcacaaaaaaaccagttcatccaaatgatcatgtaaataaatctcaatctaccaatgatgtatttcctacaggaatgcatatagctatagctatggaaactaaaaataagttactaccctctcttgagcttttaaataaggaattgaaaaaaaaagtttctcaatttaaaaatattgttaaggttggaagaactcatcttcaggatgcaactccattatcattaggacaagagttttcaggatatcaatctcaattagaggattgtattgtaagaattaaaaatgctttaaatgaaatttattatttagctcaaggt

SEQ ID NO: 280623 - DNA, 472 bp, Unknown
  Bacterial polypeptide expressing nucleotide sequence isolated from the Sargasso Sea
tatgctacctgaaaacgaacccggtagctccattatgcccgggaaggttaacccaactcaatgcgaggccataacacaggtctgcgctcaagttatgggtaatgacgctgcagttgggattgcgggtagccagggccactttgaactaaatgtttataagcctatgatagcctataatgtgcttcagtcagctcaattaatgggtgatgcctgtaatgcattcacagacaatttggtagaagggcttaaagcggatgaaacacgcattgacaaattgatgagagaaagtctgatgctggtaactgccctagcgccaaaaattgggtatgacaatgctactaaagttgcgaaagaagcccataaaaatggtacaactttgaaggaagaggcaatcaaattggggtttgtggacgcagaaacattcgagaaaatcgtgcggccagaaaaaatggtgggtccatcagacgcctaa

SEQ ID NO: 280624 - DNA, 763 bp, Unknown
  Bacterial polypeptide expressing nucleotide sequence isolated from the Sargasso Sea
tatgaaaaatagaaaagaatatgacagtattggtcaaattaacgttcctgtggataagtattggggggcatctactcaaagatcaagtaaatattttgatattggagattttttagttagacccatagtcatcaaatcaattgctataataaaaaaggctgcagcaacagtaaatgaaaaaaatggtgacctaaataaaaaaatcagcaaaacaattataaaagctgcgaatgaagttatttctggaaaattaataaatcattttcctttaaaagtttggcaaacaggttctggaacacaaacaaatatgaatgttaatgaggtaattgctaatagagcaattgaaattttaggtggaaaaaaaggatcaaaaaaacctgttcacccaaatgatcacgttaataaatcgcaatcaactaacgatgtttttccgactgcaatgcatatggcaattgcaatggaagcaagagaaaaattaatacctagtcttaatttgcttaatttacaattgaagaaaaaatctaaagagtttaagaaaattgttaaaattggaagaacccatttgcaagatgctacgcctttaactctaggtcaggaattctctggctatcattttcaactaacaaaatgtattgaaaggataaaaaaatctttagaggaaatatattttttagctcaaggtggtacagctgttgggacaggactaaatacaaaaaaaggatttgataaaaaaatagtttctgaaattaaaaaaattacgaaa

SEQ ID NO: 280625 - DNA, 997 bp, Unknown
  Bacterial polypeptide expressing nucleotide sequence isolated from the Sargasso Sea
tccacttaaagtttggcaaacaggctcaggtactcaaactaatatgaatgtgaacgaggtaatatctaatagagctattgaaatcttaaaaggaaaaaaaggcacaaaaaaacctgttcatccaaatgatcacgtaaacaaatcacaatcaactaacgatgtatttccaactgcaatgcatatcgctatagcaatggaaactaaagaaaaactattaccaagtttagaattattaaataatgaattaaaaaaaaaagtaagaaagtttagtaaaattgtaaaaattggaagaacacaccttcaagatgcaacaccattatcattaggtcaagaattttcaggttatcaatctcaactagatgagtgcattaagagaattaaagtttcgctaaatgaaatatattacttagctcaaggcggaactgctgttgggactggaattaatacaaaaaaaaattttgataaaaaaatagttaatgaaattaaaaaaataactaaactgccatttaaacctgcgaaaaataagtttgcagcattagctgcacacgatgcaatagtaaactattctggaacattaaatacaacagcagtttgtttaatgaagattgccaatgatataagatttttaggatcaggacccagagctggatatggtgaattgatacttccagaaaatgaaccaggatcctctataatgcctggtaaagtaaatcctactcaatgtgaagctgtaacaatggtttgtgttaaagtaattggaaatcataacgggattaccatggccggatcacatggacattttgaacttaatgttttcaaacctctaataattcataatgtacttcaatccataaaattattatctgatagcacaaaaagtttcgggaaatattgcatttctggattaaaggcagataaaaatagaattaaagaattggtagacaattctttaatgcttgtaactgctttatcaccagtaattggttacgataatgca

SEQ ID NO: 280626 - DNA, 679 bp, Unknown
  Bacterial polypeptide expressing nucleotide sequence isolated from the Sargasso Sea
aaaaagaaattttgataaaaaaatagtaaatgaaattaagaaaattacaaaactgccatttaaaccagctaaaaataaatttgcagcattagcagcacatgatgctattgttaattactctggcacattaaacactactgcagtatgtctaatgaaaatagcaaatgacattagatttttggggtctggtcctagagctggttatggagaattgatacttccagaaaatgaaccaggttcatcaataatgcctggcaaagttaatccaactcaatgtgaggcagtcacaatggtttgtgttaaagttatcggaaatcataatggaattacaatggctggatcgcatgggcattttgaacttaatgtttttaaacctctaataatacacaatgttcttcaatcaattcagatattatctgatagtataattagttttgcaaaatattgtgtatctggattaaaagcagacaaaaagagaattaaatacttgttagataactctttaatgttagtaactgctctatctcccaaaattggttatgataatgcagcaaagatagcaaaaaatgctttaaaaaataaaacaacacttaaaactgaagctatgaaaactggtctaatcactgagaaagattattataaaattgtagacccacttaaaatgataaaacctgtttaa

SEQ ID NO: 280627 - DNA, 877 bp, Unknown
  Bacterial polypeptide expressing nucleotide sequence isolated from the Sargasso Sea
taaaaagggcgatgagttcaaggacatcatcaaaatggggcgaacgcagttgcaagacgcggtgccgatgacgctcggtcaagagtttcactcgttcgcggcgacgcttgaggcagatttgacgtttttggagcgaaacgtcgatcaaatgtacgaggtgaatctcggaggcacggcaatcgggacgtccatctgcgccgacgtgtcgttcgccgagcgcgcagtgtcggcgctgtcatcgcttactaatcttcccatgcgctcaccgcacgatttcatcgaagcgtcgagctcgacgtcgagctttttgctcttttctaacatattgaggcgcgtcgccgtgaaaatttccaaaatttgcaacgatttgcgtctcctcagcagtggaccgagatgcgggtttaacgagatcaaccttcccgccgtcgcgccgggatcgtccatcatgcccggaaaaatcaatcccgtcatccccgaggtgatgaatcaggtgtgcttccaaataatgggcaccgacgcctccatcgcgcacgcctcggaagccgcgcagttgcaactcaacgtcttcgaacccgtcatcatctacaacttattgaacaacatggagatgatggagcgcggtttgcgaacgttgcgcgaaaagtgcatcgacggcatcaccgctaatccaaaggtatgtaaaacttccgtggaaaactccatcggcatcgtgacggcgttgttacctctcatcggctacaagcgttcatcggcggtggcaaaagaggctctggagaccggtcgccctgtcgctgagatcgcggcgagatatgcggacatcgaggagattagagagttattgcaccctgcgtccatgacgcaggcgaggaagatgaac

SEQ ID NO: 280628 - DNA, 671 bp, Unknown
  Bacterial polypeptide expressing nucleotide sequence isolated from the Sargasso Sea
atttgctaaaagctttgctgaagaagttaaaaaatatactggattatcttttataacagcagaaaacaagtttgaggcactagctgctcatgatggatttgttgaaatgtcaggtatgcttaatacgttagcgaccggactatttaaaatagctaatgatatccgactacttggttctggaccacgttcagggttgggtgaattaagtttacctgaaaatgaaccaggctcttctataatgcctggtaaagttaacccaactcaatgcgaggcgatgacaatggtatgctcgcaagttatgggtaatcacacgacaattacattttcaggaagtcagggtcatatggaactaaatgtttttaaaccggtacttgcatacaacctgatacaatcaataagattgctgacagatgtatgtattagtttcgcggataattgtatctcagggatcgagccaaacaaaaaaaacataacatcgcttatggagcgctcactaatgcttgtaacagcacttacgcctaaaattggatatgacaatgcaacaattgttgctaagacagcacataaaaatgggacgacactaaaagaagaagcaatagctttaggctttgttacagaagaagagtttaataaaattgttcggcctgaagaaatgattaaaccaaaatgat

SEQ ID NO: 280629 - DNA, 505 bp, Unknown
  Bacterial polypeptide expressing nucleotide sequence isolated from the Sargasso Sea
tatgaaaaatagaaaagaatatgacagtattggtggaattaatgtgcctgtggataaatattggggagcatctacacaaagatcaagtaaatattttgatattggagattttttagttagacctatagtcattaaatcaattgctataattaaaaaagctgcggcaatcgtaaatgcaaaaaatggcgatctagacaaaaaaataagtaaaacaatcgttaaggctgcaaatgaagttatctctggaaaactaattaatcatttccccctaaaagtatggcagacaggatctggtacccaaacgaatatgaatgttaatgaggtaattgctaatagagctatagagattttaggtggaaaaaaaggatctaaaaaaccagtacatccaaatgatcatgtaaataaatctcaatcaactaatgatgtttttccaactgcaatgcatatggcaattgctatagaagcaattgaaaaattattacctcagctcttaatttgctcaatt

SEQ ID NO: 280630 - DNA, 582 bp, Unknown
  Bacterial polypeptide expressing nucleotide sequence isolated from the Sargasso Sea
atgatgcaattgttaatttttctggtactcttaatacctgcgcagtagctttaatgaaaatatctaatgatattcgtttcttaggttctggcccaagagctggctacggagaattaatcttacctgaaaatgaaccaggttcatctataatgccggggaaagttaatccaacacaatgtgaagctgtaacaatggtttgtgtcaaagtaattggaaatcataatggaataactatggcaggatctcacggtcattttgaacttaacgtttttaagcctttaattgctcataacatcttacagtcaatcgacttgattgctgacagcacaaagaattttgctctttattgtgttaaaggaataaaagctaacaaaaagaaaatacaggagcatcttgataattcgttaatgcttgttactgcactagctccacatattggatatgataatgctgcaaaaattgcaaaaactgcacttaaaaataatacaactttaaagcatgaaactttaaagacaggactaataaccgaaaaagactacaataaaattgttgatcctaaaaagatgatttacccagcatagc

SEQ ID NO: 280631 - DNA, 370 bp, Unknown
  Bacterial polypeptide expressing nucleotide sequence isolated from the Sargasso Sea
atgaaatacagaactgaatttgatagtcttggaaaaatcaaagtacctggtgataagtattggggtgcatctactcaaagatctaataaatatttcgatataggggattttcttgttaggcctatattaattgaatcaattgcgatcgtaaaaaaagctgcagccatagttaacgtaaaaaataaagacttagataaacgtataggtaaatatattgttatggcagccaatgaaataataagtggaaaacttaaagaaaattttcctttaaaggtttggcaaactggatctggaactcaaacaaatatgaatgttaacgaagtaattgcaaatagagcgatacaaatgatgggtggtaaaatgggaacca

SEQ ID NO: 280632 - DNA, 491 bp, Unknown
  Bacterial polypeptide expressing nucleotide sequence isolated from the Sargasso Sea
aatgaaatatagaactgaaatcgattctattggtaaaattaaagttcctgaggataagtattggggtgcatcaacccaaagatcaaataaatactttgatataggggattttcttgtaaggccaattctaattcaatcaatagctatagtgaaaaaagctgctgcaatagttaatactagaaatggtgacttaaataaaaaaataagtaaatatattattaaggcctctgatgaagtaataaaaggaaagcttgataaacactttcctctaaaagtgtggcaaactggttctggaacccaaacaaatatgaatgttaatgaagttattgctaatagggcaattcaaatgatgggtggaaaaatggggtcaaaaaaacctgttcacccaaatgaccatgtaaataaatcccaatcgacaaatgatgtttttccaacggcaatgcatatagcaatagctattaaaacaaaaaagaagttacttccgtcccctt

SEQ ID NO: 280633 - DNA, 479 bp, Unknown
  Bacterial polypeptide expressing nucleotide sequence isolated from the Sargasso Sea
aatgaaattaagaaaagaatttgatagcattgggagtgtcaatgtacctaatgataaattatggggagcatcaactcagagatctaataagtattttaatattggcaaaattttagtaaatatttctatcatcaaatctatagcagttataaagagatccgcagcaatagtacatgccaaggacaaattaattgataataaaatttctaaagcaattattaaagcatcagatgaggtaatcaaaggcaagttggatgataatttcccattaaaagtttggcaaacaggctccggaacgcagacaaatatgaatgttaatgaagttattgctaatcgtgcaatagaaataatgggtggaaaaaaaggttcaaaaaaaccagttcatccaaatgatcatgtgaataaatcacaatctactaatgatgtttttccaactgcaatgcatatttcgcttgcaaaagaaacattgagtaaattgt

SEQ ID NO: 280634 - DNA, 744 bp, Unknown
  Bacterial polypeptide expressing nucleotide sequence isolated from the Sargasso Sea
aaaaaagacaaaccaatttaaaaaaattgtaaagataggaagaacacatttgcaagatgctacacctttgactttaggacaagaattttctggatattattctcaattagatgattcaattaaaagaattgttcacgctttagatgaaataaattttttggcccaaggcgggactgccgttggaactggaataaatactaaaaaaaattttgataaaaaaataattaaagaaattagaaaaattacaaaaatatcatttaaaccagcaaaaaataagtttgcagctttagcaagtcatgatccgattgttaatttttcaggtactttaaacactactgctgttgctttaatgaaaatagctaatgacattagatttttaggctcaggacctagagctggttatggagaattaattcttccggcaaatgaaccaggttcatctataatgcccgggaaagtaaacccaacacagtctgaagctgtaactatggtatgtgtaaaagtaattggaaaccataatggtataacaatggccggttcacatggacactttgaattaaatgtttttaaacctttaattgctcataacatattacagtctattgatcttttatctgatagtgcaaaaaattttgccttatattgtgtcaaaggaattaaggctaataaaataaaaataaaagagcacttggataattctttaatgttggttacagctttagcgccacatataggttacgataa

SEQ ID NO: 280635 - DNA, 349 bp, Unknown
  Bacterial polypeptide expressing nucleotide sequence isolated from the Sargasso Sea
catggctggctcacacggtcattttgaattaaatgtatttaagcctttaattgcgcataatattttgcaatcaatagatcttttagctgacagctctaaaaattttgcactatattgcataaaaggacttaaagcggataaagataaaattaaatactatttagaaaattctttaatgttagttacagctttagcacctaaaattggttatgataatgctgcaaagatcgctaaatcagctctaaaaaataaaacaacacttaagactgaagctttaaaaacaggtttaataagtgaaaaagattatgataagattgttgatccaaaaaaaatgatttatccagcataa

SEQ ID NO: 280636 - DNA, 820 bp, Unknown
  Bacterial polypeptide expressing nucleotide sequence isolated from the Sargasso Sea
tcacgtaaataaatctcaatccacaaatgatgtttttcccaccgccatgcatatcgcggtcgcaaataaaactataacagaattaattcctagtcttgaacttttaaataaaaatttgaaaaaaaaagttattgaatttaataaaattattaaagttggtagaacacatcttcaagatgcaacaccaatttccttgggtcaagaattctcaggatatcaatcacaactttctgattgtattaaaagaattaaaatttgcttaaaagaaattttttatttagctcaaggaggtacagctgttggaacgggtattaatactaagaaaaattttgataaaaaaattgttaaagaaatatcaaaaattactaaacttcccttcaaaaatgcaaaaaataagtttgccgctttagcgtcacacgatccgatagttaatttctcaggatctttgaatactaccgcagtatgtcttatgaaaattgctaatgatataagatttttaggttcgggacctagagctggttattcggaattaattttaccagaaaatgaagcaggatcatcgataatgccaggaaaagtaaatccaacacaatgtgaagctataactatggtttgtacaaaagtaataggtaaccacagcggtattactatagctggatcacatggacactttgagcttaatgttttcaagccactaatggcccataatattatacaatcaatatctttattgtcagatagtacaaataattttgctaaatattgtataaaagatatcaaggccaataagaaaaaaatagaaaagcaactaaataactct

SEQ ID NO: 280637 - DNA, 469 bp, Unknown
  Bacterial polypeptide expressing nucleotide sequence isolated from the Sargasso Sea
aatggatatccggattgagcgggacagcttaggacaagttgaggtcccatctgatagatattatggagctcaaactcaaaggtcttttgataattttaaaataagtagtgagtcttttcctagggaattcatacgagcttatggtatagttaaaaaagcagctgcaactgtaaactataatcttgggaatattgaaaaatcaattttaaatgcaattcacactgcctccgatgaggtaatcgaaggaaagcttgataagcactttcctcttgtcgtttggcaaactggcagtggtactcagacaaatatgaattttaatgaggtcattgccaatagagcgattgaattaatgggtggagagcttggtagtaaagagccagtacatcctaatgatcatgtaaatatgagtcagtctactaatgacacattcccaacagcaattaatattgcagctgttgagagcgtaact

SEQ ID NO: 280638 - DNA, 921 bp, Unknown
  Bacterial polypeptide expressing nucleotide sequence isolated from the Sargasso Sea
tcaaaattacccattcatccaaatgatcatgtaaatttatctcaatcttctaatgatacttttccaactgtaatgcatattgcggctaatgaattaactgatcagaagcttataccagcgataaaaaatttaattagagaattaaatattaaaacaaagtcatattcaaaaataatcaaaattggacgaacgcatactcaagatgccacaccattaacaatgggagatgagttttctggctacctgcatcaaattcaaaacaactatgagagaatagttatagcaaaaaaagaacttaattatttagctcaaggaggtactgcggttggatcagggattaatgcgcccaaaaattttgataagattttctgcaagtatctaaataaaattacaaaaaacaaatataagccagctataaataaatttgaagcaatagcaaatcacgacactttagtgaatttttctaattctataaattctctagctatttcattatttaaaattctaaatgacttacgcttcctctcatctggaccaagagctggtttaggtgaaataaacatacctgctaatgaacctggctcatctataatgccaggaaaggttaatcctactcaaattgaagctttgagtatggtatgctgtcaagttatgggcaataatttagcagttagtcaaggaggtgcacaaggtcactttgaattaaatgcgtttaaaccgttaattatttttaacataataaattcaatcaatttactctctgatggtgtaaatagtttcaataaacattgcttaaaaaatctttcaataaacaaagataatataaaaaaacatttaaataattctttaatgttagtaactgctcttaataagcatataggatatgataatgcagcattaattgccaagagagctttcaaa

SEQ ID NO: 280639 - DNA, 788 bp, Unknown
  Bacterial polypeptide expressing nucleotide sequence isolated from the Sargasso Sea
gagtaaaaggcaagaaaaagatagtatggggcatattgatgtccccgaaaataaatactatggagcgcagactcagcgttcattgcaaaactttgaaattggcggcgaaacgtttcaaagagagttcatcagagcatatggaattttaaaaaaagcagcagcaactgtgaatttttcaaagggacgtcttgaaaaagatgttgccgatgctattttgcaatccacagaccaggttattaacggtgcccttgacgatcattttcctttggttgtttggcaaacaggatccggaactcaatctaatatgaatttcaatgaagttattgctaatagagccattgaaattctagggggtgagctcggttcaaaaagccctgtccatcctaacgaccatgtaaatatgtcccaatcaacaaacgatacatttccaaccgccatcaatattgcggcttgtgaattaaccacaaacgagctaatcccttccttaaaaaagctttataaatcccttgaacaaaagtccaaggaatttgatctgattattaaattagggcgcacccatcttcaggatgctactccgttaagtctaggtcaagaattttcaggattttcctcagcaataaagcatagcattgaaagagttgagggatccttgcagcactgctttcatttaccaatgggaggtacagctgttggaactggtattaattcattcgagggttttgccgaattagcagctgaaaatatagcctcaattacaaagctgccgtttgttactgcaccgaataaat

SEQ ID NO: 280640 - DNA, 523 bp, Unknown
  Bacterial polypeptide expressing nucleotide sequence isolated from the Sargasso Sea
tatgaaatacagaatagaattcgacagtattggcaaaataaaagttcctggtgataagtattggggtgcgtcaactgaaagatctaataaatatttcaatattggtgattttttggtcagaccattagttatccactcaatagcaattattaaaaaagctgcagcaatagtaaattctaaaaataaagatttagatccaaaattgagtaaatatattattaaagcttcagaagaagttattaaaggaaaactcgataaacatttcccattgaaagtttggcaaacaggttcgggtactcaaaccaatatgaatgtaaatgaagtaatagctaatagagctattgaaatgatgggtggtaaagttggctcgaaaaaaccaatacacccgaatgatcacgtaaataaatcacaatcaactaatgatgtttttcctacagcgatgcatatcgctattgcattaaaaactagggaaaaacttctaccatcattaaaacttttagaaaaagaattagcaaaaaaaaca

SEQ ID NO: 280641 - DNA, 502 bp, Unknown
  Bacterial polypeptide expressing nucleotide sequence isolated from the Sargasso Sea
catgaaaaaaagaaaagaaaaagatagcttaggaataattaacgtacctggggataagtattggggggcgtccacagaaagatcgaaaaaattttttgacatcggcgaagctaaagtaagaccaattttaattaaatctattgcaattataaaaaaagcagccgctatagttcataaaaaagataaaacaattaacaaaaaaattgcaaattcaataattaaagcatctcaagaaataatctcaggaaaattagaagaaaattttcccctaaaagtttggcaaactggatcaggtacacaaactaatatgaatgttaatgaagtcatatcgaatagagcaattgaaattttaggtggtaaaaagggttctaagaaccctgtgcatccaaatgatcatgttaataaatctcaatcaacaaatgatgtattccctactgcaatgcatatagctattactgttgagacaagaaaaaaactacttccttcattaattgatcttgaa

SEQ ID NO: 280642 - DNA, 976 bp, Unknown
  Bacterial polypeptide expressing nucleotide sequence isolated from the Sargasso Sea
tctgcagcagttgcaaacatgaagactaaagcaattaacagaaaacaaggaactgcaattgttaaagcatgtgataagatactcgcagggaaatttgtagatcagtttttggtggatatgataaactcaggtgcaggtacggcatttaacatgaactcaaatgaagtaattacaaatgttgcactaagagtattagggaaaaaacagggtcagtatgaattcttacatccaaatgatcacgtaaacatgtcacagtcaagtaatgatacatatccaactgcaatgcacatgtcaattctattttcctttaaagaaatgctacctgcaattgacaaattaataaaatctctaaatagaaaagcaaaacaattttcaaaatataaaaaaattgggcgtacacatctaatggatgcacttccagtgacagtaggaagtgaatttacagcatatgttacatctttgacaaacgcaagaaatgagattattgtatcacaaaaagaattggctcaagttgcacttggcggaactgctgtaggaacaggagcaaatacacctaaaggttatcgtaaagcagtgataactgaattagccagagtttcaaaattaccattaaaaccacaaaaagatatgcagtattcattacaaagtaagtttccggttgcaaatgcatcatctgctttgaaaaattttgcaattgaattgggcaaagtctcaaacgatattagattgatggcatcaggtccagttgcaggattatcagaattaggaattcctgcagtacatgcaggttcatcaataatgccaggaaaagtaaatccatcattagctgaatgtatgaacatgatttgttttagtgtgataggaaacgatacaacagtttcatttggagcacaggcaggacaatttgaactaaatgtaatgttgccagaaatgctaaaagcaatattagattcaactgatatgctaacaaactttt

SEQ ID NO: 280643 - DNA, 370 bp, Unknown
  Bacterial polypeptide expressing nucleotide sequence isolated from the Sargasso Sea
aggaaatcacaatggtataacaatggcaggatcgcatggtcatttcgaattaaatgtttttaaaccattaattatccataatattcttcaatcgattcatataatgtcagattcagcaaagagttttgggaaatattgtgtttctggtcttaaagctgacaaaaaaagaattaaagaattattggataattctttaatgttagtaacggcattagctccacatgttggatatgataacgcggcaaaaattgcaaaaaatgctttgaagaataaaacaaaattaaaagaggaagctttgaaatctggattaattactgaaaaagaatatgataaaatagttgatccaaaaaaaatgactagtccaagctaa

SEQ ID NO: 280644 - DNA, 490 bp, Unknown
  Bacterial polypeptide expressing nucleotide sequence isolated from the Sargasso Sea
cctagagctgggtatggtgaaattattttacctgctaatgaaccaggttcgtctattatgcctggaaaagtaaaccctactcaatcagaggccgttactatggtttgtgtaaaagttattggaaatcataatgggattacaatggctggctcacatgggcactttgaattaaatgtttttaaacccttaattgctcataacatcttacaatcaattgatttacttgcagatagtaccaaaaatttttcactttattgtgttaagggtattaaagctgataaaattaaaattaaaaaatttttagacaattcgcttatgctagttacagcattagctccccatataggctatgataacgccgccaaaatagcaaaaactgccttaagaaaaggaactacacttaaaaccgaagctattaaaactggattaataaatgaaaaagactaccataaaattgtcaatccaaagaaaatgatttctccaaattaga

SEQ ID NO: 280645 - DNA, 813 bp, Unknown
  Bacterial polypeptide expressing nucleotide sequence isolated from the Sargasso Sea
acttttgccggcacttgaattacttaataaagaattaaaaaaaaaagtatcggaatttaagaacattataaaagttggaagaacacatttacaagatgcaaccccgttgtctttgggccaagaattttctggatatcactcacaattagaagattgtatatcaagaataaagaatgcattgaatgaaatatactcactagctcaaggtggaacagctgtaggaactggtataaatagtaaaaaaggttttgataaaaagataattaatgaaattaaaaaaattacaaaacttccatttaaaccaacaaaaaataagtttgctgcactagctgctcatgatgagattgtgaatttttcaggaacactaaatactactgcggtatgtttaatgaagattgctaatgatatcagatttttagggtcgggccctagagctggatatggtgaactaattcttccagctaacgaacctggctcttcgataatgccaggaaaagtaaatcctacacaatctgaggctgttactatggtttgtgtaaaagttataggaaatcacaatggtataacgatggcaggttctcatggtcattttgaattaaatgtttttaagcctctaattgcccataacattttacaatcaatagatttattagcggacagttctaaaaattttggtttgtattgcatccgtggtttaaaagctgataaaaatattataaaaaattatttagataattctttaatgcttgtaacagccctagcaccaaaaattggttatgataatgccgccaaaatagctaaatcggctctaaa

SEQ ID NO: 280646 - DNA, 916 bp, Unknown
  Bacterial polypeptide expressing nucleotide sequence isolated from the Sargasso Sea
taaaaaacccgtacatcctaatgaccacgtaaataaatctcaatcaaccaatgatgtttttccaacggcaatgcatatggctgttgctataagaaccaaaggaaaattgctgccatcattaaaattgcttaataaagaactcaagaaaaaatctaagcagtttaataaaatcgtaaaagttggacgaacgcatcttcaagatgctactccaataactctaggtcaagaattttcaggatataattcacagttaagcaaatgcataaagagaatagagtatgctcttcaggaaatatacttccttgcacagggcggtacggctgttggcacaggcttaaatactagaaaaggttttgataaaaaaatagttcatgaattgaaaaaaatgaccaagttaccttttaaaccttctgaaaataaatttgctgcattggcggcccatgatgctgtcgttaatttttccggaacaatgaacacaactgctgtttgtttgatgaaaatagcaaacgatataagatttttaggatctggaccaagagctggatatggagaacttattttgcccgagaacgaaccaggttcatctataatgcccggcaaaataaacccgactcaatgtgaagctgttacaatggtatgtgtaaaagttataggaaatcacaatggaataacaatggcaggatctcatggtcactttgagttaaacgtttttaaacccttaattattcacaacatactgcagtcaatccatttgatggctgactcatcacaaagctttgccaactattgcattaaaggactaaaagcagataaacaaaaaataaaaaaatttttagataattccctgatgctagtaactgctctttctcctagagtgggatatgacaatgctgcaaagattgcaaaaaaagctcag

SEQ ID NO: 280647 - DNA, 501 bp, Unknown
  Bacterial polypeptide expressing nucleotide sequence isolated from the Sargasso Sea
tgggcagcgggcctcgctgcggcattggcgagctgattttacctgccaatgaacccggctcttccattatgcccggcaaagtcaaccccactcaaagcgaagcgatgaccatggtgtgcgcacaagtgatgggtaatgatgcaacgattggctttgctggatcacaaggaaactttgaactgaatgtcttcaaacccgtgatgatatataacttaattcaatcaatctacttaatcactgacagcacacattcattcaccacccattgccttgaaggcctggaagtgaatcacacgcaagtcgctgcttatctggataactcactcatgctagtaaccgcattaaatccggtgattggttacgacaaagcgtctgaaatcgctaaaaaagcctatcatgaaaacacctcgctcaaggaagcgtgtttagcgctagggtatttaggtgaagctgaatttgaacaagctatagaccctaaaaaaatgacagagccgacctgaa

SEQ ID NO: 280648 - DNA, 664 bp, Unknown
  Bacterial polypeptide expressing nucleotide sequence isolated from the Sargasso Sea
atgaaatttagaaaagaatttgacagccttggaagtattagtgttccctcggataaatattggggtgcgtcaactcaaagatctaaaaagtactttgatattggagattttttagttaggccggttttaattaaatcaattgcaattataaaaaaagcagcagcaattattaattataaaaataaagatattgataaaaaaattgctggagcaattgtaaaagcttctaacgaaataatacaaggaaaaatggatgataattttcctctgaaagtttggcaaacaggttctggaactcaaactaacatgaatgttaacgaagtgattgcaaatagagcaattgaaatattaggaggaaaaaaaggtacaaaaaaacctgttcaccctaatgatcatgttaatagatcgcaatccacaaatgatgtttttcctactgcaatgcatattgctatagccttacaaacgaaagatcgtttaattccctcacttaatttacttaacaatgagcttaaaaaaaaagttaggcaatttaataaaattgtaaaaattggaagaacacaccttcaagatgctactccattatctctaggccaagaattttctggataccaatctcaattagaaaaaagtattgatagaataaaatatgctttaaatgaaatta

SEQ ID NO: 280649 - DNA, 343 bp, Unknown
  Bacterial polypeptide expressing nucleotide sequence isolated from the Sargasso Sea
atcacatggggtcattttgaactcaacgtatttaagcctttaataattcataatgtacttcaatcaattcaaattctctccgatagtacaagaagtttcgcaaaatattgcatctcgggactaaaagctgataaaaatagaattaaacatttagtagataactctttgatgttggtaactgccttatctccaaagattggttacgataatgctgcaaagattgctaaaaatgcattaaaaaataaaactactttaaaagctgaagcactgaaaacaggattaataaatgagaaagagtacaataaaattgttgatcctaataaaatgataaaaccagattaac

SEQ ID NO: 280650 - DNA, 964 bp, Unknown
  Bacterial polypeptide expressing nucleotide sequence isolated from the Sargasso Sea
aatgagacccggatagaaaccgacagcatgggggaaatagaagttcctgctaatcgttattacggtgcgcaaactgcacggtcgcttatccatttcaatattggcgcagaaaccatgcctcgcgaactcatccgcggtatgggtattctgaagaaagcttctgctctggtcaatgccgagctaggtttgatgccggagaacattaaaaatctgatctcaaaagctgccgatgaagttattgaaggaaaactggatgaccatttcccgctaagagtttggcagacaggaagtggtacacaatctaacatgaatagcaatgaggtcattgccaaccggggtattgaaatggcaggaggtgtgattggttctaaagatcctgttcatcccaacgatcatgtgaatatgggtcagtcttctaatgatacatttccaacagcaatgcatattgcggccgtggagcgtattgaggaagctctgattccttctttgatcaccttggcagattctttcaaaaagaagaccacagaatttaaagacatcattaaaatagggcgtacccatttaatggatgccaccccattaacattgggccaggaattcagcggttatacaactcaattagaatatgcactggacaggataaatggctgcatgccgcgcatgcatcaaattgcgcttgggggaaccgcagttggtactgggcttaattcgcatcgtgactttcctataaaagttgccaaaaaaatagctgaaatcaccggtttcccctttgtaacagctcccaataaatttgaatcccttgcggctcatgatgctatcgttgaaactagtggcgtattaaaaacaattgcttgctcactaatgaaaattgctaacgacatacgctggctcggatccggccctcgatgcgggatcggcgaggttatattgcccgcaaacgagcccggcagttctattatgccag

SEQ ID NO: 280651 - DNA, 604 bp, Unknown
  Bacterial polypeptide expressing nucleotide sequence isolated from the Sargasso Sea
atgcatacgattgtcgattgggatcggcattctcagatgggccaaccgatgaggcaggagcacgacagcatcggagctgtcgacgtccccgctgcagctttctggggagcccagacccagcgatccctcaacaatttcgcgattggtcatcaaaagattccagcggagctgattcatgccctggcccggatcaaacagtgctgcgcggcggtgaacggtcgccatggtctgttgaacgaccaacaggtggccttgatcgaacgggcgggccaggcgatccacacaggccagcacgatgatcactttcctctgagcgtctggcagaccggcagcggcacgcagacgaacatgaacgtgaatgaggtgatcagcaacctcgctgctcagcactccggagagagcctcggctcgcaccgtcccctccatcccaacgaccacatcaaccggtcccagtccacaaatgacgttttcccggcagcgatccatgtggctgcggctttacagctgcagcaggatctgctgccagagttgaagcggttgatcgcgagtctcgatgccaaggccgatgcctggcaggacatcatcaagatcgggcggacccatc

SEQ ID NO: 280652 - DNA, 736 bp, Unknown
  Bacterial polypeptide expressing nucleotide sequence isolated from the Sargasso Sea
catgaaattaagaaaagaattcgatagcattggaaaaataaacgttccagatgataaatattggggcgcatcaactcagagatcaaaaaaatactttgatataggggaatttttagtgagaccaattctaattaaatcgattgcaattataaaaaaagcagctgcaatagttcatggaagagaaaaacaaattttaccaaatatatctaaagctataattaaggcatctaatgaagtaatatctggaaaattaaatgaacacttccctctaaaagtttggcagactggctctggaacccaaacgaatatgaatgtaaatgaagttatagcgaatagagctattgaaattttaggtggaaaaaaaggttcaaaaaaaccagttcatccaaatgatcatgtaaataaatctcaatctactaatgatgttttccctactgcaatgcatattgcaattgcaattgaaaccaaagttaagcttttaccagcacttgaattattaaataaagaattaaaaaaaaaagtctctaaattcaaaaatattgtaaaagttggaagaacacatttacaagatgcaaccccactatctttaggacaagaattttctggatatcaatcccagctagaggattgtattaagagaatcaaaagtgcgttaagtgaaatttatttgttagcgcaaggaggaactgctgtagggactggaataaacagtaaaaaaggttttgatagaaaaatt

SEQ ID NO: 280653 - DNA, 643 bp, Unknown
  Bacterial polypeptide expressing nucleotide sequence isolated from the Sargasso Sea
attgactggattgccattcaagaccgcaccgaataaatttgaaacattagcgggtcaggacagcattgtggagctttctggatcattaaaaacattggccgtatctctatttaaaatagcaaatgatattagatggctagctagcggccctagatctggaattggtgaaattataatcccttcaaatgagccaggctcatcaatcatgcctggaaaagttaaccctactcaatgtgaggcgatgaccatggtatgtacccaagttatgggtaacgatttaaccatttcaattgctggagcgagtggaaattttgaattaaatgtttacagacctgtgattgcgtataatattattcaatcaattagactcttagccgatgcatctgattcgtttcgagaaaattgtgtggatggaatcactcctaatgaagaaaaaattaaaacaaatctatacaattcgcttatgctagtgacagctttgaatccacacattggttatgataaagctgccgaagtagcaaaaaaagcacatgaaaataacacatcattaagagaagcaattattgatttaggttatatgtcaggtgaggattttgatgagttagttgatccacaaaaaatgataaaaccttcaaaaaaatag

SEQ ID NO: 280654 - DNA, 307 bp, Unknown
  Bacterial polypeptide expressing nucleotide sequence isolated from the Sargasso Sea
tttcccttaaaggtttggcaaacaggaagtggtacgcaaacaaatatgaatgttaatgaggtaatttcaaatattgcagcattaaaaacaaattcagagcttggtagtcatcaaccaatttatcctaatgatgatgtaaataaatctcagtcaactaatgatacttttcctggtgctattcaaatatcagttgttaatgaaataatcaaaaatttagttccaacgatacgagaacttactaagatccttgataaaaaaagtgagcaatggaaagatttcataaagataggaagaacccatttttaag

SEQ ID NO: 280655 - DNA, 525 bp, Unknown
  Bacterial polypeptide expressing nucleotide sequence isolated from the Sargasso Sea
tatgaaattcagagtagaatctgatagtttgggaaaagttaaagtaccatcagacaggtattggggagcctcaacagaaagatcaaataaatatttcgatattggcgattttttagttagacccattgtaattaaatccattgctatgattaaaaaatctgcagcaattgtgaatgcaaaaaatggcgatatagataaaaaaataagtaaagcaataattaaagctgcaaacgaaattatagcaggcaagcacaaagatcatttccctcttaaagtttggcaaactggctctggcactcaaactaacatgaatgttaacgaagtaatctcaaacagagctatagaaattcttggtggaaaagttggaagtaaaaaacctgtgcatccaaacgatcatgtaaataaatctcaatcaaccaatgatgtttttccgacagccatgcacatagcagtagcgattagagcaaatggaaaactattaccatcgcttaaactattaaacgttgaattaaaaaaaaaaattaa

SEQ ID NO: 280656 - DNA, 426 bp, Unknown
  Bacterial polypeptide expressing nucleotide sequence isolated from the Sargasso Sea
aaaaagtaaatcctactcaatgtgaagctgtaaccatggtatgtgtaaaagttattggaaatcataacggtataacgatggcgggatcacatggtcatttcgaattaaatgtatttaaaccattaattatccataatattttacaatcaattcatataatgtcagactcatcaaaaagctttgctaaatattgtgtttcaggattaaaagctgacaaaaaaagaattaaggatttgcttgataattcattaatgctggtaacagcacttgctccgcatgttggatatgacaatgcggctaaaattgcaaaaaaggctttaaagaataaaacaaaattaaaagatgaagctttgaagtcgggattaattagtgaaaaagaatatgataaaatagttgatccaaaaaaaatgattaaaccgaattaat

SEQ ID NO: 280657 - DNA, 814 bp, Unknown
  Bacterial polypeptide expressing nucleotide sequence isolated from the Sargasso Sea
gaatgttaatgaagtaattgcaaatcttgctaataaaaaacttactggaaaattaggaacaaatagcccagttcatccaaatgatcatgtcaataaaagtcaatcaaccaatgactcatttccatcggcgatcaatattgcaacagcagtgctcgtaaaagatagtttaattccttcaatgaaaagaattcaaactacattgaaaggtcaatcaaaaaaatggaataagataattaaagttggacgcacacacttacaagacgcgaccccactttctcttggacaagagttttcgggatatgaagcaatgataagctctaatatcaaacgagttgaacagtcatttggtagcttattaaatcttgcacaaggaggtacggctgttggatctggcctgaatacaaaaagaaattttgataaactggttgttaatgaaattagtaaaattgctaagataaaatttaaacctgcaattaataaatttcaggctttggctgcacatgatgcgatagttgagatgtcagggtcacttaatgtattaacgacagacttatttaaaattgcaaatgacataaggttattaggctcaggtccaagatcagggctaggagaattaaacctgcctgaaaatgagcctggatcatcaattatgccaggcaaggtcaatcctacacaatgtgaagcattaactatggtttgcgtgcaagcaatgggtatgcacaacacaatcagcttagctggctcacaaggtcactttgaacttaatgcttataagcctgtaataggacataatattattgaattaatacatctt

SEQ ID NO: 280658 - DNA, 997 bp, Unknown
  Bacterial polypeptide expressing nucleotide sequence isolated from the Sargasso Sea
cttgaagattcattaaaagatgctatccataaggctgcagaagaagttatagaggggaaattagatgagcactttcccttagtagtttggcaaactggaagcggtacacagaccaatatgaatttcaacgaagttatttcgaaccgtgcaattgagattcttggaggcgaacttggtagtaaggacccggtccatcctaatgatcatgtcaacatgagccaatcgaccaatgacaccttcccaactgcgattaatattgcagctgttgaaagtgtaacaaatagtcttatacctactttggagatattaaaagaagccttagataaaaaatctaaaaaatttgaagatattattaaagttgggagaacacatttgcaagatgcaacgccacttagcttaggtcaagaattttcggggtatgtttcagcaattgatcatggtattaatcgtctaagaaaggcattagatcattgcttggagcttgctgctggtggcactgctgtagggactggtatcaatactgtagaaggctttgacaaggatatagccgaggaaataaaaaaaataacaggtcaaaattttagaactgctgataataaatttgaagcgttaggcgggcaggattgtattgttgaactttctggagtacttaaagtgattgcaagctctttgtttaagattgctaatgatattcgctggctagcgtctggtccacgatctggaatcggagagatcaaactcccggctaatgaaccgggttcgtcaatcatgcctgggaaagtgaatcctacacaatgcgaggctatgacaatggtatgtacacaggtcatgggtaatgatgtttcaataacttttgcaggtgctagcggaaattttgagctgaatgtatacaggcctgtaatggcgtataacattcttgagtccatcaaattattgtctgatgcttcggaatcgtttaccaaaaataccgtagttggtattgaacctaatcttgata

SEQ ID NO: 280659 - DNA, 806 bp, Unknown
  Bacterial polypeptide expressing nucleotide sequence isolated from the Sargasso Sea
gaagttatatctaatagggcaatagaaattttaggtggaaaaaaaggatcaaaaaaaccagtacaccctaatgatcatgtaaacaaatctcaatcaactaatgatgtttttcctactgcaatgcatatggctatagcaatacgagccattgataaattaataccaagccttactttacttaatttacaattaaataaaaaagcgaaacagtttaaaaatatagttaaagttggcagaacacatttacaggatgccactcctttaactttgggacaggaattttctggatatcattctcaactaactaaatgtattgaaagaatagaaagggctttagaagaaatatattttttagcacaaggaggaaccgccgtaggaactggactaaatacaaaaaaaggttttgacaaacaaatagtcaaagaaataaaaaaaattaccaaacttccttttaaaccttctacaaacaagttcgcatctttagctgctcacgatgctatagttaatttttctggaacaatgaatactactgcagtttgcttaatgaaaattgctaacgacatcagatttttaggatctggacctagggctggttatggagagctaattttaccagaaaatgaacctggttcatctataatgcctggaaaaataaacccaactcagtgtgaagctgtaactatggtttgtgtaaaagtaattggtaaccataatggaataacgatggcaggatcgcatggtcattttgaactaaatgtttttaaaccattaattattcataatattttacaatcaattcacataat

SEQ ID NO: 280660 - DNA, 442 bp, Unknown
  Bacterial polypeptide expressing nucleotide sequence isolated from the Sargasso Sea
tatgaaaaaaagaagagaatatgacagcatggggaaaattgatgttcctgtggataaatattggggagcatcaacacaaagatctaaaaaatattttgatattggggaatttttagtaagacctattttaataaaatcaatagctataattaagaaatctgcagctatagttcacagaaaagatcgattgttaagctcacgtattgcaaatgccattattaaggcatcaaatgaagtgataggtggaaaattagaagaacattttcctttgaaagtctggcaaacaggatctggaacgcaaactaacatgaacgttaatgaagttatagcaaatagagccatagaaattttgggaggtaaaaaaggatccaaaaaccctgttcatccaaatgatcatgtaaataaatcacaatccacaaatgacgtttttccaacagcaatg

SEQ ID NO: 280661 - DNA, 505 bp, Unknown
  Bacterial polypeptide expressing nucleotide sequence isolated from the Sargasso Sea
atgacttcagaatatcgcatagaaatagattcaatgggagaagttaaagtccctaaaaaatccctatacggtgctcaaactcagagggccttaaacaattttcctattagcggaatttgtattagtcgtcccattattaaagctctaggagtaataaagcaaggatctgcaaaaattaattctcaacttgggaatattccaaaagatgttggtcatgccatccaattagccgctcaagaagtgattgatgggaaactagattctcactttccaatagatatttatcaaacgggatctggaacatcaagtaacatgaatgtaaatgaagtcatcgctaaccgagcgtctgaattagttcctgaattatctgaaaatattcacccaaatgatcatattaattttgggcaaagctcaaatgacaccttccctacagccataagaattgcaggctatatcgagtcaaaaaattcactaatccctgctctaaaatttttacgcgaaactt

SEQ ID NO: 280662 - DNA, 856 bp, Unknown
  Bacterial polypeptide expressing nucleotide sequence isolated from the Sargasso Sea
agtgtaataaaagttggcagaacgcatcttcaggatgctactcctttatcattaggtcaagagttttcaggataccagtctcaattagaagattgtattagtagaataaagaatgctttgaaagaaatttattttttagcacaaggaggaacagcagttggaactggaataaatagtaaaaaagggtttgatgttaaagtaattagtgaaataaaaaaaattactaaattgccgtttaaaccaactaaaaataaatttgcagcattagctgctcatgatgaaatagttaatttttctggcacattaaataccacagctgttagtttaatgaaaattgctaatgatatcaggtttttaggttctggacctcgagctggatatggtgaaataattcttcctaccaatgaacctggttcatcaattatgccaggtaaagttaatcctactcaatctgaagcggtaacaatggtatgtgttaaagttattggtaatcataatggtataacaatggcgggttcacatggacattttgaattaaatgttttcaaaccattaattgcacacaacatcttacaatccatagatttactagccgatagtacaaaaaactttgcactatattgtgttaaaggaattaaagcagataaaatcaagattaaaaaactcttagataattctttaatgctagtcacagccctagcacctcaaattggttacgataatgcagccaaaatagccaaatcagctttaaaaaatggaacaactttaaaggaagaagcattaaaaacaaagttaatcaatgaaaaagattttaatagaattgttgatccaaaaaaaatgatttatccaaaataga

SEQ ID NO: 280663 - DNA, 406 bp, Unknown
  Bacterial polypeptide expressing nucleotide sequence isolated from the Sargasso Sea
atgaaaacaagaaaagaatttgatagtattggcggcataaacgtgccgagtgataaatattggggtgcatcaactcaaagatcaaaaaaattttttaatatcggaaaaatacatgtaccagagtcaattataagatctattgcaatcatcaagcgaagtgcagctatagttcatgaaaaagatggattaattgcatcgaaaatttcaaaagcaataattaaagcatcaaatgaagttataagcggtaaaatgaaagaaaattttcctcttaaagtttggcaaacaggttctggaacacaaacaaatatgaatgttaatgaagttatagcaaatagagcaatagaaattttaaaaggcaaaaaaggatcaaaaaatcctgtgcacccaaatggatcatgtaaataaa

SEQ ID NO: 280664 - DNA, 421 bp, Unknown
  Bacterial polypeptide expressing nucleotide sequence isolated from the Sargasso Sea
atgaaaactagaaaagaatttgacagtattggttcaataaatgtaccggctgacaaatattggggagcctctactcaaagatctaacaaatattttgatattggtgattttttagtaagacctattgttattaaatctattgcaatgataaaaaaagcagcagcaatagttcatcaaagaaatggaagtattgataaaaaaataagcaaagcaattattaaagctgcaaacgaagtgatatcaggaaaacttatagaacattttcctctaaaagtttggcaaactggatcgggtacacaaactaatatgaatgttaatgaagtaatagctaatagagcaatagaaattcttggtggaaaaaaaggaactaaaaaacctgttcatcctaacgatcatgtaaataaatcacaatctacaaatg

SEQ ID NO: 280665 - DNA, 403 bp, Unknown
  Bacterial polypeptide expressing nucleotide sequence isolated from the Sargasso Sea
tgaggcagtgacaatggtttgtgttaaagtttttgggaatcataatggtattaccatggcagggtctcacggccattttgaactaaatgtttttaaaccgctaattgctcataatattttacaatcaattgatctgattgctgatagtacaaaaaattttgctttatattgtgttaaaggaataaaagctaataaaaagaaaatccaagaacatctagataattcacttatgctagtaactgctttagctccacacattggatatgataatgcggcaaaaattgcaaaaactgcactcaaaaataatactacattaaaatatgaaactttaaaaacaggattaataaacgaaaaaaattacaataaaatagttgacccaaaaaaaatgatctatccagcataa

SEQ ID NO: 280666 - DNA, 423 bp, Unknown
  Bacterial polypeptide expressing nucleotide sequence isolated from the Sargasso Sea
aagtaaacccaacccaatgtgaagctgtaacaatggtatgtgtgaaagtaattggaaatcataatggaattaccatggctggatcgcatggacattttgaacttaatgtttttaaacctctaataattcataatgttcttcaatcaattaaaatattatctgatagcacaaaaagttttgcaaaatattgtatatctggattaaaagctgacaaaaacagaattaaatatttagttgataattctttaatgttagtaactgccttatctcctataattggatatgataatgcagctaagattgcaaaaaatgctttaaagaataagactactcttaaaatagaagctatgagaacaggtcttatttctgagagagattatgatataattgtaaatccatataagatgataaaacctatttaat

SEQ ID NO: 280667 - DNA, 755 bp, Unknown
  Bacterial polypeptide expressing nucleotide sequence isolated from the Sargasso Sea
ataggaagaacccattttcaagatgcagttcccctttcttttgggcaagaaatatcaggatggtcagagcaacttaaagatgctgagaatgcaattattattagtctgaatgaattgtatttcttacctctgggaggaactgcagttggaacagggattaattgtccaaaaggattttgtgaagagtctataaaatcaatttccgatgatactaatctaatgttctctaaatcaaaaaataatttttctataatggcctctcatgatcgtctagctcaagtaatgagtcagataaaaatattagcaggtgcattatttaaaatttcaaatgatataaaaattctatcttctggtccaagatcaggaatatatgaactaattattcctcaaaatgaacctggaagttctatcatgccgggtaaagtgaatccaactcaatgcgaagccttatcaatggtttgcactcagataatgggtcttgaatatgcagtttcaatggcaaattctagcggcactttacagatgaatgaatataagcctcttattgggtttaatattcttacaagtttaaaattactaaaaaatgtattagaaaacttcagaataaaattagttgatgggatggaacctaatcaaaagaaaatgaagttaaatttagaaaattcactaatgttggttacagccatagtgccaaaagttggttatgaaaaagcagctgaaattgcaaaccttgccttcaaagaatcattaaattt

SEQ ID NO: 280668 - DNA, 490 bp, Unknown
  Bacterial polypeptide expressing nucleotide sequence isolated from the Sargasso Sea
tccagagctgggtatggagagctaatactaccatcaaatgagccaggttcatctatcatgccgggtaaagtaaatccaacgcagtcagaagctgttacgatggtatgcgcaaaagtaatgggtaatcattgtggcataactattgccggttctaacggacattttgagttaaatgtttttaaaccattgattgcagaaaatgttttgcaatcaatagatttattagctgatagtataaaaaatttttcatattattgcatcaaaggtttagaagcagatagaaaaaaaattaaatattatttagataattctttaatgcttgttacagcacttgctcctaaaattggatatgataacgctgcaatgattgcaaaaaaagctcttaaaaataattctaaactaaaagaagaggctttgaaaagtggtttaattagtgaaaaagattatgatattatcgtagatccgttaaagttagtaaaacctaattaag

SEQ ID NO: 280669 - DNA, 847 bp, Unknown
  Bacterial polypeptide expressing nucleotide sequence isolated from the Sargasso Sea
tttcagcgtgaacttattcgtgcttatggtatagtaaaaaaagctgcggcaaaagttaactcagatgctggaaggcttgatgtaaaaattgcagatgctattgctagtgcatctgatgaagtaattgacggtaagttagatgagcatttcccccttgttatttggcagacaggatccggcactcagtcaaatatgaattttaatgaagttatttctaatagagctatagaaatgatgggtggaaagcttggttctaaagatcccgtacatcctaatgatcatgtaaatatgagccagtctactaatgatacttttccaactgcaataaatattgcggcagtagaatctacaactcataagttaatcccagaattagaagaattaagatatagcttagattctaaatccaaagaatttgattcaataattaagcttggacgaactcatttgcaagatgctacaccacttagtttaggtcaggaattttcaggttatacctctgcaatagaacatggaatagaaagagttaagaatgctttgaaaagttgttatgagctagccattggtggtactgcggtaggaacaggaattaattcttttgaaggttatgctgaagctgctgcgaacgaaatttcatctatcactagtttgccatttaaaacagcacaaaataaatttgaagctcttggtggacaggattgcattgttgatctttcggcagcactaaaaacattatcagggtctttatttaaaattgcaaatgatattcgttggttagcaagcggtccacggtctggcataggtgagatcctgattccatcaaatgagcctgggtcctctattatgc

SEQ ID NO: 280670 - DNA, 940 bp, Unknown
  Bacterial polypeptide expressing nucleotide sequence isolated from the Sargasso Sea
attaaaaggaaaattaggctcaaaaacacccgttcatcctaatgatcatgtaaatttgtcacaatcttcaaatgatacttttcctactgtaatgcatatcgctataaatgaacttgttgatgttaagttattgccatctataaataatttaataaaagaactagaaaaaaaacaaaataaattttcaaatattattaaaattggaagaactcatttgcaagatgctaccccattaactttaggtcaagaattttctggatattctgcacaaatcaaaaataatttaaaaagaattcttcatgctaaattagaattaaattatattgctcaaggaggaacagctgtagggactgggataaatgcaccaaaaaattttgatattatcttttgtaaatttttaaacaaactaacactaaataaatataaaccaaataaaaataagtttgaggcaatagctgctcatgactcgatagtaaatttttctgctagtttaaacaccttagcagtatccattcttaaaataatcaatgatattagattattagcttcaggtccaagatcaagcttaggtgaattaaacttacctgagaatgagcctggctcatctataatgcctggaaaaatcaatcctacacaaatagaagcattaagcatggtatgtgcgcaggtaattggaaataatacatctataagttttgctggctcacaaggtaattttgaattgaatacttttaagcctttaattgcatttaatacattacaatcaataaacttattaagtgatggtattaatagctttaataataattgccttaagggcattaaaccaaatttacataatattaaaaaccatcttaataattcattgatgttagtaactgccctaaataaagacattggatatgatcaagcagctaaaatagcaaaaaaagctacaaag

SEQ ID NO: 280671 - DNA, 538 bp, Unknown
  Bacterial polypeptide expressing nucleotide sequence isolated from the Sargasso Sea
atgaaattaagaaaagaatttgacagtattggcagcataaatgttccggatgataaatattggggagcatctactcaaagatcaaataaatattttaatataggtaaaattctagttaatatttcaatcattaaatcaattgcaattattaagagagctgcagctatcgtgcatgcaaaagataaattgattgatagtaaaatctctaaagcaattattaaagcatcagatgaggtggttaaaggtaaactagacaaaaattttcctttaaaagtttggcagacaggatctgggacacaaactaatatgaatgtaaatgaagttatcgctaatagagcaattgaaattttagggggtaagaaaggaactaaaaagcctgttcatccaaatgaccatgttaataaatctcaatccacaaatgatgtttttcctacggcaatgcatatctctatagctaaagaaactataaataaaatgctaccaagtctaaaaattttagaaaaggaattaaaaagaaagtctaatcaattaaaaacat

SEQ ID NO: 280672 - DNA, 626 bp, Unknown
  Bacterial polypeptide expressing nucleotide sequence isolated from the Sargasso Sea
gcaggacatcatcaagatcgggcggacccatctgcaggacgcagtaccgctgcgacttagcgatgaagtcagcgcctggcgcgagcgactcagcgacggcgtccattggctgaccacagcccatcaagaccttctggctctgccactcggaggcacagccgtcggcagtggtttaaacacgccggaccgatttgcccacgaggtttgtgctgaactcgccagccgaacgggatccgactttcagccggcggacaacctgtttgccgtgatggcgggccatgacgccctggtgcagaccatggctcagctgcggcgccttgccgtgacgctgctcaccatcgccaatgacatccgcctgctggcctgcggccccagggctgggctgggagaactgctgttgcccgccaatgaaccgggcagctcgatcatgcctggcaaggtgaatcccacccagtgcgaggcgatggcgatggtctgcacccaggtgatcggcatggatgcagccgtggcggcggctggtgctggggggcatctgcagatgaacgtctataagcccctgatcggcttcaacctgatcgagggcatccgtctactgcaagacgcctgccgctgtttccggctgaatc

SEQ ID NO: 280673 - DNA, 864 bp, Unknown
  Bacterial polypeptide expressing nucleotide sequence isolated from the Sargasso Sea
catgaatgtaaatgaggtgatagctaacagagcaatacaaatgatgggtggtaagcttgggtctaaaaaaccaattcatccaaatgaccatgtaaataaatcacaatctaccaatgatgtttttcctacggccatgcatatagctattgctattaaagcaagagaaaaacttttaccttcattaaaattattagagaaagaattggctaaaaagtctaaagagtttaaaaatattgttaaagttggcagaacccatttacaagatgctacaccaatcactttaggtcaagagttttcaggttatcattcacaactaaaaaaatgtgtttcaagaattgaagccgcattaaaggaagtttattatttagcacagggaggaactgcagttggaactggtcttaatacaagaaaaaactttgataaaaaaattattaagcaaattagtaaaattactaaaataccttttaagccagctacaaataaatttgctgccttagcagcccacgatgagattgttaatttttctggcaccttaaatactacagcggtttgtctaatgaaaatagccaatgacataagatttcttggatctggaccaagagcaggatatggagaacttatacttccttcaaatgaaccaggttcttctataatgcctggtaaggttaacccaactcaatctgaagcggtgactatggtttgtgtaaaagtaattggtaatcataatggtatcactatggctggttctcatggccatttcgaaattaatgtttttaaaccattgatcattcataatatattacaatcaattgaaattatgagtgactcagcgagaactttttcactttactgcgtaaaaggaat

SEQ ID NO: 280674 - DNA, 1003 bp, Unknown
  Bacterial polypeptide expressing nucleotide sequence isolated from the Sargasso Sea
tcaaagatgaaatacagattagaatttgacagtattggaaaaataaaggtacctggtgataagtattggggagcatcaactgagagatcaaacaaatattttaatattggtgattttttagtcagaccattagttatccacgcgatagcaatagtaaaaaaggctgcagctgttgttaatgctaaaaacaaagatttagagcctagattaagtagatatataattagagcatctgaggaagttataagtgggaaacacgataaacattttcctttaaaagtgtggcaaacaggatctggcactcaaactaatatgaatgttaatgaagtaattgccaatagagcgatacaaatgatgggtgggaaaatggggactaaaaaacctattcatccaaatgatcatgtaaataaatcacaatcaacaaacgatgtttttcctacagcaatgcatattgcgattgctttaaaatctaaggaaaaacttttaccctctttaaaacttttagaaagagaattggctaaaaaatctaaagaatttgcaaaaattgtaaaagttggaagaacacatttacaagatgctactcctttaacattaggacaagaattttctggttatcatgctcagcttaaaaaatgtattttaagaatagagtcagctttaaaagaaatttattatttagcgcaagggggaactgctgttggtacaggtttaaacacaagaaaaaattttgacaaaaagattgttaaagaaattagcaaaattacaaaattgccatttaaaccctctactaataaatttgcttcacttgcagctcatgatgaaatagtgaatttttctggaactttaaatactacagcagtttgcttaatgaaaattgcaaatgacataagatttttgggctctggtccaagagcaggatacggtgaacttattttaccaacaaatgaacctgggtcatctataatgccaggaaaaattaatccgactcaatctgaggcggtac

SEQ ID NO: 280675 - DNA, 583 bp, Unknown
  Bacterial polypeptide expressing nucleotide sequence isolated from the Sargasso Sea
cacgatgctatagttaacttctcaggaacaatgaatacaactgctgtttgtttaatgaaaatcgcaaatgatattagatttttaggatcaggtccaagagctggatatggagaattaattttaccagaaaacgaacctggatcatcaataatgcctggtaaagtaaatccaactcaatgcgaagctgtaactatggtatgtgtaaaagtaattggaaatcacaatggaataacaatggcaggatcacatggccattttgaactaaatgtttttaaaccattaattattcataatattttacaatcaattcacataatgtctgactctgctaaaagttttgcgaagtattgtatttctggcctgaaagctgacaaaaaaagaattaaagaattattagataattctttgatgttggttacagctttaacaccaaggattggatatgataatgcagccaaaatagctaaacgagctttaaaaaataaaactactttaaaagtcgaggctataaaatctgggttgattaatgaaaaagaatataacaaattagtagatccaaaaaaaatggtctaccccacttgag

SEQ ID NO: 280676 - DNA, 639 bp, Unknown
  Bacterial polypeptide expressing nucleotide sequence isolated from the Sargasso Sea
aatggttagtaaaaaaagaatagaatttgatagtttaggttccaaaaaaattgataaaaataaactctggggtgcacaaactcaaagatcattagaaaattttataattggcaatgaaaaaataccgtcagaattgattgtcgcgttgggtcaacagaagaaagcagctgcagaagctaatatggaactgggtgttataaataaaaaattgggatcattaatatcaaaagcatgcgatgatattattaatttaaaacttattgaagagtttccattatcagtatggcaaacagggtctggaactcaaactaatatgaatgcaaatgaagtaattagtaattatattatcaaaaaattaaaaggaagaattggaagtaaaaaacctattcatccaaatgatcatgtaaatttatctcaatcatcaaatgatacttttccaacaattatgcatgttgcaattaatgagttatcaataaaagatttgattccaaatctaaaagatttaataaaagaatttcaaaaaaagaaaaaaatatttcaaaatataattaaaataggaagaactcatactcaagatgcaacaccaattactttaggcgatgagttttctgcgttttgtactcaattgcaagcttgttt

SEQ ID NO: 280677 - DNA, 630 bp, Unknown
  Bacterial polypeptide expressing nucleotide sequence isolated from the Sargasso Sea
gatgaattatagagttgaaaaagatagtataggagaaattaatgtgccttcagataaatattggggtgcacaaacccaaagatcattggagaactttaagataggagagcaaaaaatgcctaaagaaataataaaagcatttgctgttttaaagaaggcagcagcactcacaaatgcagattgtggtgttctttctgctgaaaaagcaagcttaatttcctcagtatgtgatgagttaatgaatggagaccttgatgatcaatttcctcttgttgtatggcagacaggctctggtacacaatctaatatgaatgtcaatgaagtggttgccaataggggtcatgtaaaacagggagggagtttaagtgatgaaaataaattcttacaccctaatgatgatataaataaatcacaatcatcaaatgatacttttcccacagcaatgcatatagcttcttacaaaatgatagttgaaacaactatccctaaaattaaaaagcttagagatacacttgatttaaaagctaaagcttttatgagtgttgtaaaaattggtagaactcattttatggatgcaacacctttaaccttaggtcaggaaatttcaggttatgtatctcagttagatca

SEQ ID NO: 280678 - DNA, 883 bp, Unknown
  Bacterial polypeptide expressing nucleotide sequence isolated from the Sargasso Sea
ggaaaacaaaaaaaagcatgtgctttagctaataatcattttggtttaataaataagaaattaacaaatgctattacaaaagcctgtgataaaattatcaatctagatctaattgatgagtttccactatcagtttggcaaactggatctgggacacagaccaatatgaatgccaatgaagttataagtaactatgctataaaaacactcaaaggaagggttggatccaaatttcctattcatccaaatgatcatgtaaacttatctcagtcatcaaatgatacttttccaacaattatgcacatagctgctaatgaattaatagataataagttaattccagctttaaaaaaattgatagatgaactttattataaatcaaataaatattctaaaaccataaaaattggtcgtactcacacgcaagatgcaactcccttaaccgttggtgatgagttttctggttatttgcatcaaatcaaaaataattatgatagaataaaattagctaaaaaagaacttagttatttagcacaaggtggaaccgcagttggatcaggattgaatgctccaaaaaattttgataaaattttttgtaaatatttaaataaatttaccaaaaataattatagacctgcaaaaaataaatttgaagccattgcaagccatgactcattagtcaatttttctaattgtttaagtacacttgcagtatctttattaaaaattcttaacgatttaagatttttatcttctggtccaagatctggtttgggggaaattaatattcctgcaaatgaacctggctcttctataatgcctggtaaaataaacccaacgcagattgaggctctaagtatgatttgctgtcaggtcatgggaa

SEQ ID NO: 280679 - DNA, 535 bp, Unknown
  Bacterial polypeptide expressing nucleotide sequence isolated from the Sargasso Sea
aatgaaatacagaacagaatttgacagtattggtaaaattaaagtgcctggtgataagtactggggagcgtccacagaaagatcaaataaatattttaatattggggattttttagtcagaccattagttattcattcaatcgcaattattaaaaaggctgccgcaatagttaacaaaaataataaagatttagatccaaaactaagtaagtttatagttaaggctgcggaagaagttataaaaggtaagctagatagacatttccctttaaaagtttggcaaactggatctggtactcaaacaaatatgaatgttaatgaagttatagcaaatagagctatagaaatgatgggtggtaaattaggctcaaaaaaaccggtgcacccaaacgaccacgttaataaatctcagtcaactaatgatgtatttccgacagcgatgcatatttcaattgctttaaaagcaaaagagaaacttttaccatcattaaaattattagaaaatgaatttaaaaaagaaatcaaaagaatttaa

SEQ ID NO: 280680 - DNA, 766 bp, Unknown
  Bacterial polypeptide expressing nucleotide sequence isolated from the Sargasso Sea
tgcattgaaagaattgaaaaagcattgtcagagatatattttttagctcaaggtggaacagctgttgggactggtattaatactagaaaaggttttgataaaaagattgtaaaagaaattaaaaaaataacgaaacttccttttaaaccatctaagaataaatttgcttcgttagcttcgcatgatccaattgtaaatttttcaggtacgatgaatacaacggctgtatgtttgatgaagattgctaatgacatcagattattaggctcaggaccaagagctggttatggagaacttattttacctgaaaatgaaccaggttcgtctattatgccaggaaaagtaaatcccactcaatgtgaagcagtcaatatggtttgtgtaaaagttattggaaatcataatggaattaccatggctggatcacacggtcactttgaattaaatgttttcaaacctttaattgcgcataatattttacaatctataaatataatgtctgactcttcaagaacttttgctaaatattgtattcaagatattaaagcagataaaaaaagaataaattctttactagaaaattctttaatgcttgtaaccgctttgtctccaaagattggatatgataatgctgcaaaaatagcaaaaagagcacataaaaatggcacaacacttaaagaggaagctgtaaaatatggtttaatcactgaaaaagaatttttgaaatttgtcaatccaaagaaaatgacaaaacttaatttttaat

SEQ ID NO: 280681 - DNA, 891 bp, Unknown
  Bacterial polypeptide expressing nucleotide sequence isolated from the Sargasso Sea
gcaaaaaacttgggagaatcagacaaaaccctatctcctaatgatgatgttaatctttcacagtcatcaaatgatagctttcctactgcaataaatatagctgctatgaagataatctctgataatacattagttaatctaaagattttaagagatagtttaaataaaaagtctaaagagtttaacaaaattgttaagatcggaagaactcaccttatggatgctactcctattactttagggcaagagttttcaggttatgtagctcaaattgataatgggattaaatctattaacaatgcaatggaccacttatctgagttaccaattgggggaactgctgttgggactgagttaaacactccaaagggttattcaaaaaaagttattgaatatatctcaaaatattcaggttttaaatttaaagaatctcctaataaatttgaaggtattgcatcacatgattgtattgtggagatgcatggtgctcttaagactgtcgctacttcaatatataaaatatcaaatgatataaggctgatgggatctggaccaagatctggattaggtgaactaatattacctgctaatgagcctggaagctctattatgccaggaaaagtgaatcctacacaatgtgaagcaatttcgatggtttgtgctcaaataataggtaatgatatggctgtaagttttgcaggggctaatggtcactttgagttaaatgtttttaaacctctttttgcatacaatattatagagtcatcaaaaatactaggtgatgcatgtttaagtttctcaaaaaactgtattgatggtctaaaaccaaataaaaagaaaatagaaagattcttaaaagattctctaatgctttgtactgctttaaattca

SEQ ID NO: 280682 - DNA, 719 bp, Unknown
  Bacterial polypeptide expressing nucleotide sequence isolated from the Sargasso Sea
tatgaaaacaagaaaagaatatgatagtattggatcaatcaatgttcctgtggataagtattggggagcctctactcaaagatccagcaaatattttaatataggagaatttttagtaagtccgattgtaattaaatcaattgctataattaaaaaagctgcagcaatagttaatacaaaaaatggtgatctagataaaaaaataggcaaagtaatagtcaaagcagcaaatgaggttatttctggaaaattaaaagatcattttcctttaaaagtttggcaaacaggttcgggtactcaaacaaacatgaatgttaacgaagtaattgcaaacagagccatagaagttttaagaggaaaaaaaggaacaaaaaaaccagtacatccaaatgatcatgtaaataaatctcagtcaacaaatgatgtttttccaactgcaatgcatatggcaatagctatgaaagcaaaagaagaactaataccaagtcttgagctacttaatttaaagctaaaaaaaaaatcaaaagaatttaataaaatagttaaagttggcagaactcatttacaggatgcaactcctataactttaggtcaagagttttctggttataactctcaactaacaaaatccatagaaagaataaaaagggctttagaagaaatatattttttagctcaagggggcacagcagttggaacaggacttaatacaaaaaaag

SEQ ID NO: 280683 - DNA, 636 bp, Unknown
  Bacterial polypeptide expressing nucleotide sequence isolated from the Sargasso Sea
gatgaaatacagaatagaaatcgacagtatcggaaaaataaaggttcctggtgataagtattggggagcatcaacggaaagatcaaataagtattttaatattggtgattttttagttaggccattagttatccactcaatcgcaattataaaaaaagcggccgcaattgttaacgcaaaaaataaagatttagacaccaaattaagtaaatatataataaaagcctcagaggaagttattaaagggaaacacgataaacattttcctctaaaagtatggcaaacaggttcgggaacccaaacaaatatgaatgttaatgaggttattgctaacagagctatacaaatgatgggtgggaaaatgggttcaaaaaaacccattcatcctaatgaccatgtaaataaatcgcaatcaacaaatgacgtatttcctaccgcaatgcatattgcaattgcattaaaatctagagaaaaactgttgccatcacttaaacttttaaacaaagaattagaaaaaaaatcaaaggaatttagtaaaattgtaaaagttggaagaacacatttgcaagatgctactccattgacattggggcaagaattttctggttatcattcgcaattaaataaatgtatttt

SEQ ID NO: 280684 - DNA, 867 bp, Unknown
  Bacterial polypeptide expressing nucleotide sequence isolated from the Sargasso Sea
aaaaaaggaactaaaaagcctatacacccaaatgatcatgtaaataaatctcaatctacaaatgatgttttccctacagcaatgcacatgtctatagctataagggcaactggaaaattaatacctagtcttactatgttaaatttacaattaaaaaaaaaagctaaggaatttaataaaattgttaaagttggaagaacacacttacaagatgctactcctttaactctaggccaagaattttctggatatcactctcaattatcaaaatgtattgaaagaataaaaggagctttggaagaaatatattttttagcacaaggtggtacggctgttggaactggtctaaatacaaaaaaaggttttgataaaaaagtagtagctgaaattaaaaaaattacaaaacttccatttaaaccatctacaaataaatttgcttctttggctgcacatgatgctattgttaatttctctggaacaatgaatactacagcagtttgtttaatgaaaattgcaaatgatattagatttttaggttcaggtccaagagctggatatggagaattaattttacctgaaaatgaaccaggttcatcaataatgccgggaaaagtaaatcctacacaatgcgaagctgtaactatggtatgtgtaaaagttataggcaatcataatggaataacaatggcaggttctcatggacattttgaactaaatgtttttaaaccactaatcatacataatattttacaatcaattcatattatgtcggactcttctaaaagttttgctaagtattgtgttgctggattaaaagcagataaaaaaagaatacaagaacttttagataattctttaatgttagta

SEQ ID NO: 280685 - DNA, 439 bp, Unknown
  Bacterial polypeptide expressing nucleotide sequence isolated from the Sargasso Sea
atgaaaaaaagaaaagaatttgacagtattggatatattgatgtcccaagtgataaatattggggtgcttcaacgcaaagatcaaaaaaatattttgatattggtgaaatcttagttaaacctattttaattcaatctattgggataataaaaaaatccgccgcaattgttcatagaaaagataaacaaataccagttaaaatcgctaatgcgattattaaagcttcaaatgaggttataaatggaaaattgattaatcattttcctcttaaagtatggcaaacaggatcgggtacccaaacaaatatgaatgttaacgaggtcattgctaatagagcaatagaaatccttaagggtaaaaaaggttcaaaaaagcctgtacatccgaacgatcatgttaataaatcccaatcaaccaatgatgttttccaactgcaat

SEQ ID NO: 280686 - DNA, 358 bp, Unknown
  Bacterial polypeptide expressing nucleotide sequence isolated from the Sargasso Sea
atgaaaaaaagaaaagaatacgacagtattggagtaattaatgtacctggggataagtactggggagcctctactcaaagatcaaaaaaatactttgatattggtgaatttttagtaaggccagttttaattaaatccttaggtataataaaaaagtctgcagcaattgtgcataaaaatgatggacaattagagtcaaaaataagcaatgcaattataaaatcttcaaacgaagtaataaaaggtaagctaaacgatcattttcctttaaaagtatggcagacaggttctgggactcaaacaaatatgaatgtgaatgaagttattgcaaatagagcaatgaaattatgggtgaaaa

SEQ ID NO: 280687 - DNA, 340 bp, Unknown
  Bacterial polypeptide expressing nucleotide sequence isolated from the Sargasso Sea
cacggtcattttgaattaaatgtttttaaacctttaattatacataatattttacaatcaattaatattatgtcggactcatcaaaagcttttgccaaatattgtattaaaggtctaaaagctgataaaaaaagaattaaatatcttttaaataattctttaatgttagttactgcgctttcaccaaaaattggttacgataacgctgcaaaaatagcaaaattagcacaccaaaaaggaactacattgaaagaagaggcagtcaaatcaggattaatttcagaaaaagaattttcaaaaatcgtcaatccaataaaaatgattaaaccaaataagtaat

SEQ ID NO: 280688 - DNA, 631 bp, Unknown
  Bacterial polypeptide expressing nucleotide sequence isolated from the Sargasso Sea
aattccgttccttaccgctccaataaattcgaagctctagccactcatgatgcattagtaaatttttcaagttcaataagaggaatggctgcatccatctttaaaatatccaatgatattagattccttgcatcaggaccaagatgtggttttggagaactaagcttaccagaaaatgagcctggaagttctattatgcctggtaaagttaatccaacacaaatagaagctttaactatggtttgttcacaaataatagggaatgacgttgcagtaggatttgcgggaagtcaaggtcattttgaacttaatgtctttaaacctctaatcgcttacaatgttttgcaatcattgcagttattaggtgacgctacttcaagttttacgattagatgcttaaaaaatatcttacctaatgagaggaaaatatcaaatttaatgtggggaagccttatgttagttactgctttaactcctaaaataggatatgacgctgctactaaaattgctaaatcagctcacctaaatgggacaacacttgaagttgaagcaataaaatctggtttaattgataaagaaacatttactgagatagtaagacctgaaaaaatgataaacccgagcgactgat

SEQ ID NO: 280689 - DNA, 970 bp, Unknown
  Bacterial polypeptide expressing nucleotide sequence isolated from the Sargasso Sea
aagaaaagaatttgacagtataggagccattaatgttccagcagataaatactggggtgcatctactgaaagatccaataagttttttgatataggaaagattcttgtaaattcttcaataattaactctatagcaattattaaaagatctgctgcaatagttcataaaaaagatggtttaatacccagaaatataagtaatgcaattgtaaaagcgtcaaatgaaattattgctggaaaacttaaaaataattttccattaaaagtctggcaaacaggttcgggaactcaaacaaacatgaatgtaaatgaagttattgcgaatagagctattgaaatactaaaggggaaaaaaggaagcaaaaaaccagttcatcctaatgaccatgttaataagtcccaatccactaatgatgtttttccaactgcaatgcatatatctgttgcgatagaaacgttaaacaagttactgccaaatttaaaattattagaaagttcattaaaaaaaaaatcaaatgaatttaaaaaaattgtaaagattggaagaactcaccttcaagatgctactcctcttactttgggacaagagttttcaggatattatgagcagttaaaaaaaagtattgaaagaattaattttagcttaaaagatattttatttttagcacaaggaggtactgcggttggaactggcctcaattctaataaaaactttgataaaaaaattacgagagaaataagcaaatattgtaaaatacattttaaacctgctccaaacaaattttctgaattagcggcgcatgatgcaatagtaagtttttctggatcattaaatgcttgcgctgttgctttaatgaaaatttcaaatgatattagatttcttggctctggtccaagagctggttacggtgaacttgtattgcctgaaaatgaacctggctcatcgattatgcctggaaaagtaaatcca

SEQ ID NO: 280690 - DNA, 610 bp, Unknown
  Bacterial polypeptide expressing nucleotide sequence isolated from the Sargasso Sea
aatgaaaaataaaaaaagaatagaatttgatagtttaggttctaaaaaaattgataaagaaaaactttggggtgcacaaacccaaagatctttagagaactttaaaattggtagtgaaaagataccagatgaattaattgttgctttaggtcagcaaaagaaagctgcggctcaagctaatatagaacttggtgttttgaacaaaaaattaggaaaatcaattataagcgcatgcaatgatataattaatttgaaacttattgaggagtttcctttagtagtgtggcaaactgggtctggcactcaaacaaatatgaatgcaaatgaagtagttagtaattatattatcaaaaaattaggagggaatattggaagtaaagaacccatccacccaaatgatcatgtgaatttatcacaatcatcaaatgatacttttccgacaattatgcatattgcaataaatgaattatcaatgataaatttaattccaaatcttaaaaacctaataaaggaatttcaaaaaaagaaaaaaatatttcaaaatatcattaaaatagaaagaactcatacccaagatgcaacaccaattactttaggtgatgaattttct

SEQ ID NO: 280691 - DNA, 433 bp, Unknown
  Bacterial polypeptide expressing nucleotide sequence isolated from the Sargasso Sea
aatgaaaaacattcgaattgaaactgatagttttggaaaattagaagtatcaaacgaaaaatattggggagctcaaacgcaacgttctctaaaaaatttcaatattggtgaagagaaacaaaagctatccataatttatggactggtagcgataaaacaagcagcagcgattgttaacatagacgagggtaaattagacaaaaaaatcggtaacgctattgtaaaagcctgtaaaaagatcagatctggaaaattcgatgataattttcctctatcagtttggcaaaccgggtcaggaacacaaacaaacatgaacgtgaatgaagtgatagcaaatgtagctataaaagatcttaatggaaaaattggatcaaaaaatcctgttcacccccacgatcatgtaaatatgtctcaaagttcaaatgacacatac

SEQ ID NO: 280692 - DNA, 752 bp, Unknown
  Bacterial polypeptide expressing nucleotide sequence isolated from the Sargasso Sea
aataaagaatgctttaaatgaaatatattttttggcacaaggtggaacggcagttggaactggaataaatacaagaaaaaattttgataaaaaaatagtaaatgagataagaaaaattactaaacttccatttaaaccagcaaaaaataaatttgcggctcttgcggcacatgatgcaattgtaaatttttctggaacattaaatacaactgcagtttgtttaatgaaaattgctaatgatattcgctttcttggatctggtccaagagcaggatatggagaattaatacttccagaaaatgaaccaggttcttcaattatgccaggtaaagtaaatccaacacaatgtgaagcggtaacaatggtttgtgtaaaagttattggaaaccacaatggaattacaatggctggctctcatggacactttgaactaaacgtttttaaaccactaattattcataatattctccaatcaattaaaatcttgtcagacagcaccaatagctttgcaaaatattgcatatctggattaaaagctgacaaaaatagaataaaacaattgttagacaattcattaatgcttgtgactgctttatctccaaaaattggatatgataatgcagcaaagatagcaaaaaaagcactaaaaaataaaactactttaaaaattgaagctttaaaatctggcctaataaatgaaaaagattatgataaaattgtagatccaaaaaaaatgattaatccaaattaac

SEQ ID NO: 280693 - DNA, 844 bp, Unknown
  Bacterial polypeptide expressing nucleotide sequence isolated from the Sargasso Sea
aaaaaagatttgattgtagaggcatgtacggaaatacttgatgggcttcacgattcacagtttccattaaaggtttggcaaacaggtagtggcacgcaaacaaatatgaatgttaatgaggtaatttcaaatattgcagctttaaaaactaattcagagcttggtagtcatcaaccaattcatccaaatgatgatgtaaataaatctcagtcaactaatgacacttttcctgctgctattcaaatatctgttgttaatgaaataatcaaaaatttagtgccaacgatcagagaacttataaaagtccttgataaaaaaagtgaagaatggaaagaccttataaagataggaagaacccattttcaagatgcagttccccttacttttgggcaagaaatatcaggatggtcagagcaacttaaagatgctgagaatgcaattattatgagtctgaatgaattgtatttcttacctctgggaggaactgcggttggtacaggtattaattgtccaaaaggattttgtgaagagtctataaaatcaatttccgatgatactaatctaatgttctataaatcaaaaaataatttttctatcatggcctcgcatgatcgtcttgctcaagtaatgagtcagataaaaatattagcaggtgcattatttaaaatttctaatgatataaaaattctatcttctggtccaagatcaggaatatatgaactaattattcctcaaaatgaacctggaagttctattatgccgggtaaagtgaatccaactcaatgcgaagccttatcaatggtttgtactcagataatgggtcttgaatatgcagtctcaatgg

SEQ ID NO: 280694 - DNA, 385 bp, Unknown
  Bacterial polypeptide expressing nucleotide sequence isolated from the Sargasso Sea
tgtgtaaaagttattggaaaccataatggtattactatggcaggatcacatggacattttgaattgaatgtatttaaaccattaattattcataatattttacaatcaattcacataatgtcagactcatcaaaaagctttgctaaatattgtgtgtccggtttaaaagctgataagaaaagaattaaacagttgctagacaattcattaatgttagtaacagcacttgctccacatgttggatatgacaatgccgcaaaaattgcaaaaaaagctttaaaaaataaaacaaaattaaaagttgaagctttaaaatccggattaattagtgaaaaagaatatgataaaatagttgatccaaaaaaaatggttagtccaagttaat

SEQ ID NO: 280695 - DNA, 627 bp, Unknown
  Bacterial polypeptide expressing nucleotide sequence isolated from the Sargasso Sea
aatgaaattaagaaaagaatttgacagtatcggttctataaatgtcccaaatgatatgtattggggagcttctacccagcgatcaaaaaaatattttgacataggagaatttctagttagaccaattttgataaaatcaatagctacaatcaaaaaagctgcagcaacagtccatggtagagaaaaaatgattttacctaaaatctctaaatctataattaaagcctccaacgaagtcatatctggtaagttagataaacactttcctctcaaagtttggcaaacaggatcaggcacacaaactaatatgaatgtaaatgaagttatagctaatagagctatagaaattttaggtgggaaaaaagggactaagaagcctgtgcatcctaatgaccacgtaaataagtctcaatcaactaatgatgtatttcctacagctatgcatatagcaattgcgatagaaacaaaaaaaaaattattaccatcattagaattattaaataaagaattgaaaaaaaaagtttcacaatttaggaacatcataaaagttggaagaacccacctacaagatgctacccccttatcacttggccaagaattttcaggttatcaagctcagctagagaa

SEQ ID NO: 280696 - DNA, 448 bp, Unknown
  Bacterial polypeptide expressing nucleotide sequence isolated from the Sargasso Sea
aatgaaacaaagaaaagaatttgatagtattggaaagattagtgtcccagcagataaatattggggagcttctactgaaaggtcaaaaaaatactttgatattggaaaaattttagtaaagccagttttgattaaatcaatagcgataatcaaaaaatctgcagcaattgttcataaaaaagataagcaaatagaaagaaaaattgctaatgcaataataaaggctgctaatgaaattatacaaggtaaactaaatgatcattttcctcttaaagtttggcaaactggctcgggaacacaaacaaacatgaatgtaaatgaggtaatagcaaatagagctatagaaatattaagaggtaaaaaaggaacaaaaaaacctgttcatccaaatgaccatgtaaataaatcacaatcaactaatgatgtatttccaacagctatgcatata

SEQ ID NO: 280697 - DNA, 432 bp, Unknown
  Bacterial polypeptide expressing nucleotide sequence isolated from the Sargasso Sea
aatgaaaaataaaaaaagaatagaatttgatagtttaggctcaaaaaaaattgataaaaataagctttggggtgctcagacgcagagatctctggagaattttaaaattggcagtgaaaagataccagttgaattaatagttgctttagggcaacaaaagaaggctgcagctgaagctaatattgaacttggtgtcctaaatagaaaattaggaaaattaattattaaagcatgcaatgatataattaatttaaaacttatcgaagaatttcctttggtagtatggcaaactggatcaggtactcaaacaaatatgaatgctaatgaagttataagtaattatataattaaaaaattaggaggaaaaattggaagtaaagaaccagtccatccaaatgatcatgttaatttatctcaatcatcaaatgatac

SEQ ID NO: 280698 - DNA, 724 bp, Unknown
  Bacterial polypeptide expressing nucleotide sequence isolated from the Sargasso Sea
aatttagctcagggcggtaccgcagttggaactggtctgaatacaaaaaagggctttgataaaaaaattgttaaagaaattagtaaaattacaaagattccatttaaaccagccaagaataaatttgctgcgctagcagcgcatgacgaaattgtaaatttttcaggaacattgaacacaactgcagtttgtttaatgaaaattgctaatgatattagatttttaggttcaggtcctagagcgggttatggagaattaattcttcctgcaaatgaaccaggttcatcaattatgcctggtaaagtaaacccaactcaatctgaggcggtaacaatggtctgtgtaaaagtaattggtaaccacaatggtatcactatggctggttctcatgggcattttgaattaaacgtttttaaacctttaattatccataatattttacaatctattgaaattatgagtgactcatcaaaaacttttgcgttgtattgtgtcaaaggaataaaggcagacaaaaaaagaataaaatatttattagataattctttaatgttggttacggctctagcaccaaaaattggatacgatcaagcagctaatatagctaaaagagcttataaaaatggaactactttaaaacaggaagttattaaaactggattaataaaagaaggagaatacagaaaaattatggatcctgttaagatgactaaaccaaaataat

SEQ ID NO: 280699 - DNA, 497 bp, Unknown
  Bacterial polypeptide expressing nucleotide sequence isolated from the Sargasso Sea
tggtccacgttgtggtctgggggaattgaaccttcctgagaatgaacctggtagctcaattatgcctgggaaagtgaaccctactcagattgaagctctgacaatggtgtgtgctcaaataatgggaaacgatagtgcagtaggttttgcaggaagccaaggccattttgaattaaatgtgtttaagcctatgatagcttataatgttttgcaatcactacaactcttaggggattctgctgatagcttcactaaaaggtgtcttaaggggctaacgccaaatgagtcccgcatttctgatttaatgtggggtagtctaatgttagtcacggcattagcccctaaaattggatatgataacgcagctaaaattgctaaagaagcgcataaaaatggtacaacattggaacaagaggccatcaaaacaggcatggtagacaaagaaacttttctaaaaattgtaaaaccagaaacaatgataatgcctagcaaataaa

SEQ ID NO: 280700 - DNA, 889 bp, Unknown
  Bacterial polypeptide expressing nucleotide sequence isolated from the Sargasso Sea
ggctctattaatgtgcctgtggataagtattggggagcatccactcaaagatcaaaaaaatactttgatattggagatgtcttggttaggccaaaactaataaaatctattgcaataattaaaaaagcagcagctataacaaactataaaaacaaagatattaattctaaaatttataaatcaattattagagcttcaagtgaggtaattaatggaaaattagatagtcactttccacttaaagtttggcaaactggttctggcactcaaacaaatatgaatgtaaatgaagttatatctaatagggctattgaaatattaaaaggaaaaaaaggaacaaaaaaacctgtacacccaaacgatcatgtaaataaatcacaatctactaatgatgtatttcctactgcaatgcatattgctatagcaatggaaactagagagaaacttttaccaagtttagaacttttaaataaagaattaaaaaaaaaagtaagagaatttaataaaatagttaaaattggaagaacacaccttcaagatgcaacgcctttatcattgggtcaagaattttcaggataccagtcacaattacaagattgtatcaaaagaatagagatatcacttaatgaaatttattacctcgcacaaggtggtactgctgttggtactggaataaatacaaaaaaaaattttgataagaaaatagttaatgaaataaaaaaaataacaaaattaccatttaaaccagctacaaataagtttgctgctttagctgcacatgacgcgattgtaaattattcaggcactcttaacactactgcagtatgtttaatgaagattgcaaacgatataagatttttaggttcaggtccaagggcaggatatggag

SEQ ID NO: 280701 - DNA, 796 bp, Unknown
  Bacterial polypeptide expressing nucleotide sequence isolated from the Sargasso Sea
attaaaaaagcctgtgcaatagtgaatgaaaaaaacaaactacttgaaaaagatatggcaaaagcaatagttgaaagcgcacagcaggttattgatggtaagcatgatcaagattttgtattagatatttttcaaactggatcagggacctcaacaaatatgaatgcaaatgaagtaattgcacgtttggcatcagataaaagtggaaatgaaatacatccaaacgaccatgtaaatatgagtcaatcttcaaatgatgttatcccaacagctacaaatattgctgctgttttagatgtaacagagggtttattacctgaactcaaaggcttaatcacattacttgaggagaaaggaaaggcctgggcaaaggtttacaagaatggcagaactcacttaatggatgcaactccagtgacactaggccaagaatttactggttatgcatctttagtttccgagagaatggaagatgttgaaaactccttagtaaatgtaagaaagcttgcaattggaggaacagcagttggtacaggaataaatgcacctgatggctttggatctaatgtagctaaggaactagaaaaatctttaaatacatcttttgaagaagtagaagaccactttacaagacaaggctctagagatgagatagttcaattatcagggtctttaaagtctttagctgtttctttatttaagatcgcaaatgatattagatggatgggaagtggaccaatttctggattaaatgagttaaaaattcctgctttacagcctggttcttcaattatgc

SEQ ID NO: 280702 - DNA, 424 bp, Unknown
  Bacterial polypeptide expressing nucleotide sequence isolated from the Sargasso Sea
atggaatttgattcgttgggaaaagtcaaggtgccagctgacaaatactggggagcctcaactcaaagatctaacaaatattttgatattggagattttttagttagaccaatagttattaaatcaattgccatgattaaaaaagcggccgcaatagtaaatgcaaaaaatggtgatattgataaaagaataagcaaggcaattatcagagcggctaatgaagttatttcaggaaaacacatgaatcattttcccttaaaagtttggcaaaccggttctggaactcaaaccaacatgaatgtaaatgaggtaatatcaaatagatctattgaacttcttggtggtaaaataggaagtaaaaaaccggtgcaccctaatgatcatgttaataagtctcaatcaacaaatgacgtattccaacagc

SEQ ID NO: 280703 - DNA, 694 bp, Unknown
  Bacterial polypeptide expressing nucleotide sequence isolated from the Sargasso Sea
atgaaaaatagaaaagaatatgatagtatcggagaaattaatgtgcctgtggataagtattggggggcatctactcaaagatcaagtaaatatttcgacattggagactttttagttagaccaatagtaattaaatcaatcgcaataattaaaaaggctgcagcaattgtaaatgcaaaaaatggcgatttagataaaaaaattagtaaaacaattgttaaagcgtcaaatgaagttatttctggaaaattgatgaatcattttcccctaaaagtatggcaaacaggatcggggactcaaacaaacatgaatgttaatgaagttattgctaatagagcaatagaaattttaagaggaaaaaaaggatctaaaaaacctgttcatccaaatgatcacgtaaataagtctcaatcaactaatgatgtttttccaactgcaatgcatatggcaatagcaataagtacaactgaaaatttaatacccagtctaaatttgcttaatttacaattaaaaaaaaaatcgaaagaatttaaaaaaatcattaaaattggaagaactcatttacaagacgcaacaccattgactttgggtcaagaattttcgggttatcattttcaattaacaaaatgtattgaaagaataaaaaaagctcttgaagagatatattttttagccccaaggtggtactgcagta

SEQ ID NO: 280704 - DNA, 745 bp, Unknown
  Bacterial polypeptide expressing nucleotide sequence isolated from the Sargasso Sea
aatagccttaaaagagatttattcacttgcacaaggtgggactgcggtaggaaccggaataaatagtaaaaagaattttgatagaaagataattaatgaaattaaaaaaatcacaaaacttccattcaaacccacaaaaaataaatttgcggctcttgctgcacatgacgaaattgttaatttctcaggcacgttaaatacaaccgcagttagcttaatgaaaattgctaacgatattagatttcttggttctggtccaagggcgggttatggagaactaatactaccagcaaatgaaccaggttcatcaattatgcctggaaaagttaacccaactcaatccgaagctgtaacaatggtatgtgtaaaagtaataggtaaccataacgggataacaatggcaggatcacatggacattttgaattaaatgtatttaagcctttgatcgctcataatattttacaatctattaatcttttatctgacagcataaataatttctcactttattgtattaggggattaaaagctgataagaccaaaataaaagaatatttagataattccttaatgttggttactgcactcgcaccacacattggttatgataattcagctaaaattgccaaattagctctaaaaaacaaaacgactcttaagcacgaggcgttaaaatcagggcttatcagtgaaaaggattacaataaaattgtagacccaaaaaagatgatttatcctgcatag

SEQ ID NO: 280705 - DNA, 667 bp, Unknown
  Bacterial polypeptide expressing nucleotide sequence isolated from the Sargasso Sea
gcgatagttaaagcctgtgatgagctgttggcacttgatgatgtgatgcagcattttcccgttgatatatttcagactggttcaggcaccagcacaaacatgaacgccaacgaggtcattgctcgcttagcctctcgttattctagcgaagaggttcacccgaatgatcatgtaaattacgggcaaagttcaaatgatgtgatccctaccaccattcatgttagcgcggccattgcattgtcaaacgagcttataccggccgttgaacgtttagttcgtaccatcgaagtcaaagcaaagtcggtagcgcaatactgcaagaccggacgcactcacctcatggatgcgatgcctgtaggcatggatcaaagcttactggcttgggcttctcagcttaagcagcaggttaaaaccctgcgcgctgtgcagccagctattcaaacccttgcccaaggaggcactgccgtgggaacaggtgtaaacgcccatgcggattttgctacgacattttcagatgcgctaggggagctgaccgacattgcgtttaagcccgctgaaaatttctttgcattgattggctctcaagacacagcagtgacgctttccggtgcgacaaaaagtctggctgtcacccttatgaaaattgctaatgacttgcgctggatga

SEQ ID NO: 280706 - DNA, 507 bp, Unknown
  Bacterial polypeptide expressing nucleotide sequence isolated from the Sargasso Sea
gatttttaggttcaggccctcgagctggctatggagaacttattttgccagaaaatgaaccaggctcttctataatgcctggaaaagtaaatccaactcagtgtgaagctgtaacaatggtatgtgtaaaagtaataggaaatcacaatggtataacaatggcaggatcacatggtcattttgaattaaatgtttttaaaccattaatcatccataatattctgcaatcaattcatataatgtcagattcagcgaagagttttgcaaaatattgtgtttctggtcttaaagctgacaaaaaaagaattaaagaattattggataattctttaatgttagtaacggcattagctccacatgttggatatgacaacgcagcaaaaattgcaaaaaatgctttgaagaataaaacaaaattaaaagaggaagctttgaaatctggattaattactgaaaaagaatatgataaaattgttgatccaaaaaaaatgattaatccaagttaac

SEQ ID NO: 280707 - DNA, 708 bp, Unknown
  Bacterial polypeptide expressing nucleotide sequence isolated from the Sargasso Sea
ggaggaacactgggtagtaaagatcctgttcaccataatgatcatgttaacatgggtcaatcaacaaatgatacttttccaacagctataaatatttcagctgtagaatctgttgtgcataatttacttccaaaacttgaagccttaagagatgggttagactccaaagcaaaagctttttctaaaataataaagttgggaagaacacatttgcaggatgcaacccctttaagtcttgggcaggaattctcaggatatgtgactgccattgattatggatgtaatagaattaataacgcaattaaaagttgttatagtttagcgatgggcggaactgctgtagggacaggaattaatactattgatgggtttggaaaaaaagctgctgaagaaattgcaagcataacaaagttaccatttcaaacagctgaaaataaatttgaagctttgggcgcccaagattcaatagtagaactttcgggagcattaaaaactatatcagtatcgctatttaaaattgcaaatgatattcgatggctagcaagtgggccaagatctggattaggtgaaatcattctccctgctaatgaaccaggatcttccataatgcctggaaaagtgaatccaacacagtgtgaagcgatgactatggtatgtactcaagttatggggaatgatacaacaatttcatctgcaggagctagcgga

SEQ ID NO: 280708 - DNA, 543 bp, Unknown
  Bacterial polypeptide expressing nucleotide sequence isolated from the Sargasso Sea
ccgcttcaatatataaaatatcaaatgatataaggctgatgggatctggaccaagatctggattaggtgaactaatattacctgctaatgagccaggaagctccataatgccaggaaaagtcaatccaacacaatgtgaagcaatttcaatggtctgtgcacaaataattggaaatgatatggctgtgagttttgcaggcgctaatggtcactttgagttaaatgtttttaagcctctattcgcttacaatattatagaatcatcaaaaatattaggtgatgcatgtttgagcttcgcaaaaaactgtattgatggtctaaaacctaataaaaagaaaatagaaagatttttaaaagattcattaatgcttgtaactgctttaaattcaaaaattggttattacaaagcagcagaaatagctaataaagcatacaaagaagacattacccttaaagaagcatgtattgaactaaattatttatcatcaaaagagtttgatatatatgtcaatcccgaaagaatgacaaacaatgaaggttgaa

SEQ ID NO: 280709 - DNA, 781 bp, Unknown
  Bacterial polypeptide expressing nucleotide sequence isolated from the Sargasso Sea
aatgaaattaagaaaagaattcgatagcattggaatcgtcaatgttcccaatgataaattatggggagcatctacccaaagatcaaataaattttttaacattggcaaaattttagtaaatatttccattatcaaatctattgcgatcattaaaagatctgcagcaatagttcatgcaaaagacaaattaattgataacaaaatatctaaagcaataattagagcttcagatgaggtaattaaaggtaagttagatgataatttcccattgaaagtatggcaaacaggttctggaacacaaacaaatatgaatgtaaatgaagttattgcaaatcgtgcgatagaaatgatgggtggaaaaaaaggatcaaagaaacctgttcatccaaatgatcatgtaaacaaatcacaatctacaaatgatgtttttccaactgcaatgcatatttcgattgcaaaagaaacattaagtaaattgttaccaaacttaaagattttagaaaaagaattaaatagaaaatctaaaaaatttaaaaatatagtaaaaattggtcgaacacatcttcaagatgcaactcctctttccttaggtcaagaattttcaggatatcatgtgcaagttagaaaaagtatcgaaagaattgaatatgccttaaaggaaattttatttcttgctcaaggtgggacagcagttgggacagggataaattctaggaaaaactttgacaaaaaagtagttaaagaaattgctaaatttacaaaaattaaatttaagcctgca

SEQ ID NO: 280710 - DNA, 391 bp, Unknown
  Bacterial polypeptide expressing nucleotide sequence isolated from the Sargasso Sea
atgaaatttagaaaagaatatgacagtattggctctattaatgtgcctgtggataagtattggggagcatccactcaaagatcaaaaaaatactttgatattggagatgtcttggttaggccaaaactaataaaatctattgcaataattaaaaaagcagcagctataacaaactataaaaacaaagatattaattctaaaatttataaatcaattattagagcttcaagtgaggtaattaatggaaaattagatagtcactttccacttaaagtttggcaaactggttctggcactcaaacaaatatgaatgtaaatgaagttatatctaatagggctattgaaatattaaaaggaaaaaaaggaacaaaaaaacctgtacacccaaacg

SEQ ID NO: 280711 - DNA, 541 bp, Unknown
  Bacterial polypeptide expressing nucleotide sequence isolated from the Sargasso Sea
gctgtttgcctaatgaagatcgctaatgatataagatttcttggctcaggaccacgtgcgggatatggagagttgatattaccttctaatgaacctggttcttcaataatgccaggaaaagtgaacccaacgcagtctgaagcggttactatggtttgtgtaaaagttataggtaaccacaatggaataactatggcaggctctcatggtcattttgaattaaatgtttttaaacctttgattatacataatattcttcagtctattgagataatggcggactcatctaaaacgtttgcactttattgcataaagggaattaaagcagataaaaaaagaatcaaaaatttactggataattccttaatgattgttacagcactagctcctaaaataggttatgacaatgctgctaaaattgctaaagcagcacataaaaatggaactacgttaaaagaagaagttttgaaaactaatcttatttcagaaaaagagtatgataagattatggatccaattaaaatgactaagcctaaataag

SEQ ID NO: 280712 - DNA, 797 bp, Unknown
  Bacterial polypeptide expressing nucleotide sequence isolated from the Sargasso Sea
tatgaaatttagaaaagaattcgatagtattggttctattaaggttccttcagataaatattggggtgcatcgacacaaaggtcaaaaaaatatttcgatatcggagatttcctaataagaccagttttgattaaatctatcgcaataattaaaaaagcagccgcaataacaaattttaaaaataaagatttagataaaaaaatatctaatgcaataattaaagcttcaaatgaggttattaatggaaagttaaaagataattttcctttaaaagtatggcaaacaggttctggaactcaaacaaacatgaatgttaatgaggtaatttcaaatagagcaattgaaatattaggagggaaaaaaggtacaaaaaaacctgtacatccaaatgatcatgtaaataaaagccaatctactaatgatgtttttcctaccgcaatgcatatagcgatagctttaaaaacaaaagaaatactaataccttcactaaatctactgaatcatgagttaaagagaaaagttacaaaatttaaaagtattataaaaatcggtagaacacatcttcaagacgctacaccattatcattaggtcaagaattttctggatatcaatctcaattggaaaaatgtattgaaagaatagatacctcattaaatgaaatatattttctagctcaaggtgggacagctgttggaactggaataaatacaagaaaaaattttgacaaaaaaatcgtcaatgaaattagaaaaatttctaaattaccatttaaacccgcaaaaaataagtttgcag

SEQ ID NO: 280713 - DNA, 981 bp, Unknown
  Bacterial polypeptide expressing nucleotide sequence isolated from the Sargasso Sea
gtacgagcttctaatgaagttatggcaggaaaattagataatcatttcccacttaaagtttggcaaactggttctggcactcaaacaaatatgaatgtgaatgaagttatttcaaatagagccattgaaatgcttaaagggaaaatgggtacaaaaaaacctgttcatccaaatgatcatgtcaacaaatctcaatcaacaaatgatgtatttcctacagcaatgcatattgctattgctatagaaactagagaaaaactattaccaagcttaacattgttaaataaggaattaaaaaagaaagtaaaagaatttaaaaaaataattaaaatagggagaacacatttgcaagatgcaactcctctatcattaggtcaagaattttctggctaccaatctcaactagatgaatgcattaaaagaattgaagtttcactaaatgaagtttattatttagcacaaggtggtacagcggtaggtacaggtattaatacaaaaaagaattttgataagaaaatagtaaatgaaataaaaaaaataactaagttaccttttaagccagctaaaaataagtttgctgcacttgctgctcatgatgtgatagtaaattattcaggtacattaaacacaactgcagtatgtttaatgaaaatagcaaatgatattagatttttaggttctggaccgagagctggatatggagaattgatactgccagagaatgaacctgggtcatcaattatgcctggtaaagtaaatccaactcaatgtgaggctgtgacaatggtatgtgtgaaagtaattggtaaccataatggaattacaatggctggttcacatggtcactttgaacttaatgttttcaaaccttttataattcataatgtacttcaatcaatccaaattctctcagatagcacaaaaagctttgcaaaatattgtatcgctggactaaaagccgacaaaaatagaataaaacac

SEQ ID NO: 280714 - DNA, 444 bp, Unknown
  Bacterial polypeptide expressing nucleotide sequence isolated from the Sargasso Sea
aatgaaatttagaaaagaatttgacagtattggaaaaattaatgtaccaaatgataaatattggggagcatctactcaaagatcaaaaaaatattttgatattggtgaattcttagttagaccagttctaataaaatctattgcaataataaaaaaagctgcagcagttgtgcatgttagaaaaaaacaaattttaccacatatttctagagctattatcaaagcttcaaatgaagttatttctggtaagctagataaacatttccccttaaaggtatggcaaacaggttctggtactcaaagtaatatgaatgtaaatgaagtaattgcaaatagagctatagaaattttaggtggaaaaaaaggaacaaaaaaaccagtccatccaaatgaccatgtaaataaatctcaatctactaacgatgtatttcctactgcaatgca

SEQ ID NO: 280715 - DNA, 415 bp, Unknown
  Bacterial polypeptide expressing nucleotide sequence isolated from the Sargasso Sea
atgaaatacagaactgaatttgatagcctaggtaaaattaaagtgcctggtgataagtattggggagcttcaactcaaagatctaataaatattttgatataggcgattttttagtaagacctatattaattcaatctatcgccattgtaaaaaaagctgcagctatagttaatgtaaaaaataaagatttagacaaaaagataagtaaacacataataaaagcagcggatgaaataattaaaggcaaacataaagatcactttcctttaaaggtttggcaaactggttcgggaactcaaacaaatatgaatgttaacgaagtaatagctaacagagcaattcagatgatgggcggtaaaatgggaaccaaaaagccagttcatccaaacgatcatgtaaacaaatctcaatcaa

SEQ ID NO: 280716 - DNA, 508 bp, Unknown
  Bacterial polypeptide expressing nucleotide sequence isolated from the Sargasso Sea
atgagtaactttagaattgaaaaagatactttaggaaaggtaaaagttccaaaagaaaaattttggggtgcgcaaacacaaagaagcctagaaaatttcaatataggaaatgataaaatgccgaaagaattaatttattcgtttgcaattcaaaaaaaagcagctgcaatcagcaacattgcattaggaaatttaaattcaagattaggaaagcaaattattaaagtttgtgacgaaatcatctcaggaaaacttgatgatcaatttcctctatcggtatggcaaactggctctggaacccaaacaaacatgaatttaaatgaggtgatagcaaataaagcaaataaaaatctagggaaaagtttaggtttgtatgatcccatacatccaaatgatcactgcaacttaggacaatcctctaatgactcgtttccaactgcgatgcatatttcattggtgaaagtgataaaagaaatcctagaacctgaggtttcaaaattcattaaat

SEQ ID NO: 280717 - DNA, 879 bp, Unknown
  Bacterial polypeptide expressing nucleotide sequence isolated from the Sargasso Sea
gtttggcaaacaggttctggaacccagactaatatgaatgtgaacgaagttatttctaatagggctattgagttaggtggaggggaaattggcacaaaaacaccagtacatccaaatgatcatgtgaaccgcagtcagtcttctaatgatgtttttccttcagcaatgcatattgctaccgttgatggccttgccaatcagttgaaaccttccttaaagacgttaaggtctactctaaatggcaaggcaaataaatttgcagaaataattaaaatcggacgaacgcatttacaagacgcaacacctatcacgatgcaacaagaattttctggctatgttgcacagcttgacgaaggtttgcgacgtctcgatttagctctccaacccttgtataacatagccttgggtgggacagctgttggaacaggactaaataccaaggcaggattcgcagaacgcgtggcctccaagatcgcagaattaacgaatgctccttttgtgacggcgcccaataaatttgaggccttggcagctcatgacactttagttgaaatacacggacacctaaaaaccattgcggtcagcctaatgcatattgctaacgatattcgatggttggcctcaggcccccgctgtggaataggtgagattcgcataccagagaatgagccgggctcttctataatgcctggtaaagttaatcccactcagtgtgaagctttgactatggtgtgtgtacaagttatgggcaacgatgccgccgtgggttttgctggttctcaaggaaattttcaattgaatgtttataagcctgtaatgatatacaacgtgatgcactctattcgcttgctaacagatgcatgtacgagtttcaatgat

SEQ ID NO: 280718 - DNA, 406 bp, Unknown
  Bacterial polypeptide expressing nucleotide sequence isolated from the Sargasso Sea
tcagaggctatgacaatggtggccgtacaggtaataggcaatgacaccgcgatcaatgtgggtggttcttcgggaaactttgaactcaatgtgtttaagccagtaatgatttataatttattgcaatcgattcgcttgttagcggattcatgcagatcgttcaaccaccactgtgttgttgggatcgaaccgaatgaaacacaaattaaacaacatcttaatgcatctctcatgttagttacagccctcaatccgcatattgggtacgacaacgctgccaaagtagctaaaaaagcatatcaggaaaatacgactcttaaagaatctgctgtggctttaggtttactgacagttgatgagtttgatgaaaaagtaagaccggaagaaatgacaggacccaaataag

SEQ ID NO: 280719 - DNA, 493 bp, Unknown
  Bacterial polypeptide expressing nucleotide sequence isolated from the Sargasso Sea
tttggcatctgggcctagatcaggtttaggagaattggcgcttccagttaatgaaccggggtcatcaataatgcctggaaaagtaaatccaactcaaattgaagcattaagtatggtgtgcacacaagtagttggaaatagtgcaacagtagatcttgctggttcaaatggtcattttcaactaaatgcctataaaccagttattgcatttaatataattcaatcaattaatctaattagtgatggaatgaaaagttttaataacaattgtttaaaaggaataaaagctaataaaaaaatgattgataaccatttaaataattctttaatgcttgttactgcattaaataaaactataggatatgataacgcagcaaaaattgctaaaaaggcatttgatgaaaatttgacgttaaaggaagcagctttaaaattaaagttaatttcagaaaaagattttaataaaatagttgatccaaaaaaaatggtttaa

SEQ ID NO: 280720 - DNA, 385 bp, Unknown
  Bacterial polypeptide expressing nucleotide sequence isolated from the Sargasso Sea
ttgtgtaaaagttattggaaaccataatggtataacaatggctggatcacatggtcattttgaattgaatgtttttaaacctttgatcgcacataacattttgcaatcgattgatctaattgccgatagcactaaaaattttgctatttattgtgttaggggaataaaagcaaataagaagaaaatacaagaacacttagataattctttaatgcttgttacatcactagcgccccacataggctatgacaacgctgccaaaattgcaaagacagcacttaaaaacaatactactctaaaacatgaaacattaaaaacagggctaatcacagaaaaagattacaaaaaaatagttgatcctaaaaagatgatctatccagagtaa

SEQ ID NO: 280721 - DNA, 352 bp, Unknown
  Bacterial polypeptide expressing nucleotide sequence isolated from the Sargasso Sea
atgaaattaagaaaagaatttgatagtataggttcaataaatgttccaaataataaatattggggagcatccactcaaagatcaaaaaaatattttgatattggtgagtttttagtcaggccaatattaatcaaatctatttcaataattaaaaaagctgcagctaaagttcatgcaagagataaacaaatcccaacaaatgtatcaaaagcaataatacgagcagcaaacgaagttataacaggtaaattaaatgaccattttccccttaaagtttggcaaactggctctggcacccaaactaatatgaatgtgaatgaagtaattgctaatagagcgatgaaattttagg

SEQ ID NO: 280722 - DNA, 598 bp, Unknown
  Bacterial polypeptide expressing nucleotide sequence isolated from the Sargasso Sea
gatgagtaaaaaaaaccgaatcgaacaagatagtattggcaaaatagcggtttctaatgaaaatttttggggcgcgcagacacaaaggtcactaaaaaatttcaagatcggcaaccatattatgccaattgaaattataagagcattagcaattataaaactatcgtgcgccaaggttaattctaaacaaaaaatattaagtaataagttatcagctgcgattgtaggcgcttctaaattagtcttgtcaggtaaatacgacaggcacttcccattatcagtatggcaaacaggatctggcacccaaacaaatatgaatgtgaatgaagtaattgcaaaccttgctaataaaaaccttactggaaaattaggaacaaatagtccggttcatccaaatgatcatgtcaataaaagccaatcaactaatgactcatttccatctgcgatcaatattgcgacagcaatgctcgtaaaagatagtttgattccttcaatgaaaagactacagactactttaaagagtcattcaaaaaaatgggataaaataataaaagttggacgtacacacttacaagatgcaactccactttcacttgga

SEQ ID NO: 280723 - DNA, 510 bp, Unknown
  Bacterial polypeptide expressing nucleotide sequence isolated from the Sargasso Sea
ataagattcttggctcaggtccaagagctggatatggagaatttatacttccagcaaatgaacctggttcttcaattatgccaggcaaggttaatccaactcagtcagaagcagtaacaatggtatgtgtaaaagtaattggaaatcataatggtatcactatcgctgggtcacaaggtcagtttgagttaaacgtttttaagcccttaatagctcataatatacttcaatcgattgatctgctagctgatagctcaaataatttttcaaaattttgtgtaaaaggaattaaagcaaatttaaataaaataaaaaaagatttggacaactcattaatgctagttacagctttggcaccaaaaattggctacgatcaagctgctaaaattgcaaagaaggcacttaagaacggaacaactttaaaatacgaggcagtaaaaagtgggttaattagggaaaaagaatattataaaatagttgatccaaaaaaaatgattaatccaagataaa

SEQ ID NO: 280724 - DNA, 926 bp, Unknown
  Bacterial polypeptide expressing nucleotide sequence isolated from the Sargasso Sea
aaagttaatgcagaactgggtaatattccaaaggatgttggtcatgcaattcagctcgcagcacaggaagtaattgacggtagactagacgatcactttcctattgatatttaccagaccggttcaggtacatccagtaacatgaacgcaaacgaagtaattgcaacgcgtgcaatgcagttggtccaggaattatcagtcaatgttcatcccaatgatcacattaattttggccaaagttctaatgacacattcccaactgcaataaggattgcaggatacttagaggcaaaaaatgacttgataccatcactcaaatttttacgcgaaacatttttaaaaaaaggggcagactattcacacgttgtcaaaaccggtcgcactcatcttatggatgcaatgccgctaacattcgagcaggagtttagcggttacgctagacaaatcgcattaggcataaagcgaattgaaacgacacttgcaaatatggcggaactccccatgggtggtactgctgtaggaactggaataaatactcatccaaaatttcctgcaaaatttgcagcagtagtttcaagacttacaggggaagcattttgtgaagcagaaaatcattttgaagcacagtcttccgtggatgctcctgttgaattaggtgcacagctaaaaaccttggcagtcagtctgctaaagattgtaaatgatcttcgctggatgaattctggtccgaacggaggacttggtgaaattcaactaacagctcttcagccaggatcatcgatcatgcccggtaaggtgaaccctgtgattgaagaaatcatggccatggtctgcgcgcaggtgataggatacgatgcctcaataagtgttggtggattatccggtatttttgaattgaatgtgatgttgccgatggttgctcacag

SEQ ID NO: 280725 - DNA, 471 bp, Unknown
  Bacterial polypeptide expressing nucleotide sequence isolated from the Sargasso Sea
aattaattttaccagaaaatgagccgggttcatcaataatgcctggtaaagtaaatcctactcaatgtgaggcagttactatggtttgtgtaaaagttataggtaaccacaatggaataacaatggctggttcacatggtcattttgaattaaatgtttttaaacctttaattgctcataatattctgcaatcaattgatttaattgctgatagtacaaaaaattttgccttatattgcgtcaaaggtattaaagctaataagaaaaagatccaagaacacttagataattcattaatgcttgtaactgcgcttgcaccacatattgggtatgacaaggctgctaaaattgcaaaaacagcactaaaaaacaatacaactcttaaacacgaaactttaaaaacaggcttgataagtgaatcagactataaaagaatagttgatcctaaaaaaatgatttacccagcataat

SEQ ID NO: 280726 - DNA, 363 bp, Unknown
  Bacterial polypeptide expressing nucleotide sequence isolated from the Sargasso Sea
aatgaaatatagaacagaatttgattctataggaaaaattaaagtacctggtgataagtattggggtgcatctactcaaagatcaaataaatactttgatattggagattttcttgtaaggcccattttaattagatctattgcaatagttaaaaaagctgcagcgattgtgaatactaagaataaggatttggataaaaaattaagtaagtacatagttagagcatctgatgaaattattaaaggcaagctagacgagcacttccctcttaaagtatggcaaaccgggtccggtactcaaacaaatatgaatgttaatgaagtaataagtaaccgcgccatacagttgatgggtggcaagat

SEQ ID NO: 280727 - DNA, 640 bp, Unknown
  Bacterial polypeptide expressing nucleotide sequence isolated from the Sargasso Sea
ggaatttctaaaataacaagaatagacttcaagacggcttctaacaaatttgaggcattagctgcaaatgaccctatagtcgaattttctggttcattgaaaaccgctgcctcaagtctctttaagatcgccaacgatgttaggtttttaggttccggccctagatgtggtctcggtgaactaagcctccccgagaatgaaccaggtagttctataatgccagggaaggtaaatccaactcaagccgaagccacaacaatggtctgcatccagataatgggtaatgatgccgcaatagggtttgctggaagccaggggcactttgagttaaatgtttataaaccactattgagttataacacacttcaatcacttcaattacttggtgatgcatgttattcttttgcaaaaaattgtgtaaaagggttaaaagcaaatgaggttcaaattaaaaagcacctagataatagtttaatgctcgtaaccgctttggcaccaaaaatcggttatgataatgcgaccaaaattgcaaaaaatgcgcataaaaataatacaactctcagaaccgaggctattaaatcaggattaattgatgacaaggaatttgctaaaattgtaaatcccaaaaatatgatttagt

SEQ ID NO: 280728 - DNA, 641 bp, Unknown
  Bacterial polypeptide expressing nucleotide sequence isolated from the Sargasso Sea
taagtttacaaaaattaagtttagacctgcagtaaataagtttgctgaacttgccgcacatgactccattgtaaatttttcaggaactttaaatacatgtgcagtagctttaatgaaaatatctaacgatattagatttttaggatctggtcctagagctggatacggcgaacttattctgccagaaaatgaacctggctcatcaattatgcctggaaaagtaaacccaactcaatgtgaagctgtaacaatggtttgtgtaaaagtgatcggaaaccacaatggtataacaattgcaggctctcatggacacttcgaattaaacgtttttaaacctttaattgcacataatattttacaatctatagatctaattgcagacagtacaaaaaattttgctatttattgtgttaaaggtataaaagccaatagaaaaaaaattcaagaacatctagataattcactaatgttagttacagcattagctccacacattggttatgataacgctgctaagattgcaaaaaaagcacttaaaaacaatacaacattaaaaaatgaaacattaaaaacagggttaataaaggaaaaagactataatagaattgttgatcctaaaaaaatgatttatccaacataag

SEQ ID NO: 280729 - DNA, 351 bp, Unknown
  Bacterial polypeptide expressing nucleotide sequence isolated from the Sargasso Sea
tatgaaaaatagaaaagaatatgacagtattggtgaaattaatgtccctgtggataaatattggggagcatccacacaaagatcgagcaaatattttgatataggagattttttagttagacctatagtcattaaatcaattgctataataaaaaaagctgcagcaatagtgaatgcaaaaaatggtgatctagataaaaaaataagcaaaataattattagagccgcaaatgaagttatttctgggaaattaataactcattttcctttaaaagtttggcagacaggatcgggcactcaaacaaacatgaatgtaaatgaggtcattgctaatagagcaatagaaatttt

SEQ ID NO: 280730 - DNA, 736 bp, Unknown
  Bacterial polypeptide expressing nucleotide sequence isolated from the Sargasso Sea
gatgaaatttattatttagcacaaggtggaacatctgtggggacaggaataaatacaaaaaaaaattttgataaaaatattattaatgaaataaaaaaaataacaaaactaccatttaaacctgcaaaaaataaatttgccgctctagcagctcatgatgcaattgttaacttttcaggtactttaaatactgcttctgtatgcttaatgaaaattgctaatgatataagatttttaggttctggtccaagagctggttatggagagttattattacctgaaaacgaacctggatcatctataatgccaggaaaagtaaatccaactcaatgtgaagctgtaactatggtttgtgttaaagtaattggaaatcacaatggaattacaatggctggatcacacggacactttgagttaaatgtttttaaaccattaattatacataacatacttcaatcaattaatattctatctgacagtacgaaaagctttgccagatattgtataagtggattaaaagccaacaaaataaaaataaaagaacatctcgataattcattaatgctagtaactgccttatccccaattattggttacgataaggccgccagtattgcaaaaaaagctttaaaaaataaaacaactttgaaaattgaaactattaaatcaggtttaataaaagaaaaagaatatgacaaaattgttgaccctaaaaaaatgatcaagcccttctaaa

SEQ ID NO: 280731 - DNA, 489 bp, Unknown
  Bacterial polypeptide expressing nucleotide sequence isolated from the Sargasso Sea
caagagcaggttacggagaacttattctgccagaaaatgaaccgggttcatcaattatgccaggaaaagtaaaccctacccagtgcgaagctgtaactatggtatgtgttaaagttattggaaaccataatggaattacaatggcagggtcacatggtcattttgaattaaatgtttttaaaccattaattatccataatattttacaatctattcaaataatgtcagactctgcaaaaagttttgcaaattattgtgtttcaggtctgaaggctgacaaaataagaattaaagaattattagataattcattaatgctagtaactgctctcgcaccaaaagttggatacgataatgctgcaaaaattgcaaaaaaagccttaaaaaataaaactacattaaaattagaagctttaaaaagtggattaattagtgaaaaagattacgataggattgttgatccaaaaaaaatgatttatccaaagtaat

SEQ ID NO: 280732 - DNA, 880 bp, Unknown
  Bacterial polypeptide expressing nucleotide sequence isolated from the Sargasso Sea
atgaaaaacagaaaagaatatgacagtattggtggaattaatgtgcctgtggataagtattggggagcatctacacaaagatcaagcaaatattttgatataggggattttttagttagaccaattgtaattaaatcaattgctataattaaaaaagccgcagcaacagtaaatgcaaaaaatggtgatctagatagaaaaataagcaaaacaatcgttagagccgctaatgaagttatttctggaaaattaataagtcattttcctcttaaagtttggcaaactggatctggcacacaaacaaatatgaacgttaatgaagttattgcaaatagagcaatagaaattttaggtggaaaaaaaggatccaaaaaacccgtgcatccaaatgaccatgtgaataaatctcaatcaaccaatgatgttttccctactgcaatgcatatggcaatagcaataaaagcaactgaggaattgattccaagtctaaacttacttaatttacaattaaataaaaaatcaaaagaatttaaaaaaattgttaaagttggtagaacccatttacaagatgctactcctttaactttgggtcaagaattttctggttataatttccaattaacaaaatgtattgaaagaataaaaaaagctttagaagagatatattttttagctcagggcggtactgccgtgggaactggactaaacactagaaaaggttttgacaaaaaaatagtgtctgagataaaaaaaattactaaacttccttttaaaccttctccaaacaaatttgcttcgttagcagctcacgatgctatagttaatttttcaggaacaatgaatacaactgcagtttgcttgatgaaaattgcaaacggat

SEQ ID NO: 280733 - DNA, 679 bp, Unknown
  Bacterial polypeptide expressing nucleotide sequence isolated from the Sargasso Sea
actgcaatgcatatagcaattgcgttagaaacaaaaaaaaaattattgccctctctgtctttattaaactttgaactgaaaaaaaaagttaaaaaattcaaaaacattataaaagtaggtagaactcatttgcaagacgctactccattatcgcttggccaggaattttctggatatcaatctcaattagaaacttgtataaaaagaattaatcatgccttaaatgaaatttattttttagcccaaggtggaacagctgttgggacaggtattaacacaaaaaaaaattttgataaaaaaattgttagagaaataagaaaaattacaaaaattccttttaaaccagctaaaaataaatttgcagcattagcagcacacgacgcaatagtaaatttttctggaacattaaatactacggctgtttgtttaatgaaaatagcaaatgatatcagattcttaggatctggaccaagagctggttatggagaattaatattgccttcaaatgaaccaggctcttcaattatgcctggcaaggtaaatcctacgcagtctgaagcagttactatggtttgcgtaaaagttataggtaaccataatggaattacaatggcaggttctcatggtcatttcgaattaaatgattttaaaccattaattgctcataacattttgcaat

SEQ ID NO: 280734 - DNA, 481 bp, Unknown
  Bacterial polypeptide expressing nucleotide sequence isolated from the Sargasso Sea
atgaaatacagaacagaatttgacagtatcggaaaaattaaagttcctggtgataagtattggggagcatctacagaaagatctaataagtattttaatatcggagattttttagttaggcctctagtgatccattctatagcaataattaaaaaagctgctgcgatagttaacacaaaaaataaagacttggatccaaaaatcagtaaatatataattaaagcagctgacgaggttataaaaggcaaacatgataaccactttcccttaaaagtttggcaaacaggttcgggtactcaaactaatatgaatgtaaacgaagttattgcaaatagagctattcaaatgatgggtggtaaattaggaactaaaaaacctgttcatcctaatgatcatgttaataaatctcaatctactaatgatgttttccctacagctatgcatatcgctattgcaataaaagccaaagaaaaactatgcc

SEQ ID NO: 280735 - DNA, 946 bp, Unknown
  Bacterial polypeptide expressing nucleotide sequence isolated from the Sargasso Sea
ctgggtgataagtattgggggtgcatctactcaaagatcaaataaatactttgatattggtgactttctagtaagaccaattttgattcaatcaataggagtgataaaaaaagctgccgctatagttaataccaaaaataaagatctaaataaaaaaattagtaaattcattattaaagcagctgacgaagttattaaaggcaagcttgatgatcattttccattaaaagtttggcaaacaggatctggcacccaaactaacatgaatgttaacgaggtaatatcaaatagagcaatacaattaatgggtggtaaaatggggacaaaaaaacctgttcatccaaatgatcatgtcaataaatcacagtctacaaatgatgtttttcctacagctatgcatattgctattgcgattaaaacaaaaaaaaagctgttaccgtcactaaaattacttgaaaaggagttaggtaaaaaagtaaatgaattcaataaaatagttaagttaggtagaactcatctgcaagatgcaactccattgactttaggtcaggaattttctggttaccattctcagcttaaaaaatgtattgagagaattgaaaaagcattaaatgaaatttattatttagctcaaggaggtacagctgttggaactggtttaaatacaagaagaaatttcgacaaaaaagtaatcaaagagataaaacaaataacgaaactgccatttaaacctgcaaaaaataaatttgctgcattagccgcgcatgatgcaatagtaaatttttctggaactatgaatactgcagcagtttgtttgatgaaaattgcaaatgatataagatttttaggatctggacccagagcagggtatggtgaattgatattgcctgagaaacgaaccggatcttctataatgccaggtaaggtaaaatccaacccagtgtga

SEQ ID NO: 280736 - DNA, 672 bp, Unknown
  Bacterial polypeptide expressing nucleotide sequence isolated from the Sargasso Sea
tatgaaatacagaatagagtttgacagtattggaaaaattaaggttcctggtgataagtattggggggcttcaacagaaagatctaataagtattttaatattggagattttttagttaggcctcttgtaattcaatctattgcaattattaaaaaagctgcagctattgtgaatgtaagaaatagagacttagatcctaaattgggtagatatattattaaagctgctgaagaggtaataaaaggaaaacataatgatcattttcctttaaaagtttggcagacaggttcgggaacccaaactaatatgaatgtaaatgaagtgatatctaatagagcaattcagatgatgggtggaaaattaggttcaaaaaaaccaattcatccaaatgatcatgtaaacaaatctcaatctactaatgatgtttttccgactgcaatgcatattacgattgctttgaaggccaaagaaaaactcttgccatctttaaaattgttagaaaaagaattattcaaaaaatcgaaagaatttaaaaatatagttaaagttggcagaactcatttacaagatgcaactcctttaactttaggacaagaattttcaggttatcacgcgcaacttaaaaaatgtattgaaagaatagaaaatgcgcttaaagagatttattattt

SEQ ID NO: 280737 - DNA, 874 bp, Unknown
  Bacterial polypeptide expressing nucleotide sequence isolated from the Sargasso Sea
tatgaatgttaacgaggtgatagctaatagagcaatcaaaatgatgggtggaaaaatgggatcaaaaaaacctgttcatcctaacgaccatgtaaataaatctcaatccacaaatgatgttttcccaacagctatgcatatagcaatagctataaaagcccgagaaaaacttttgccttcattaaaaattttagaaaaacaactaaataaaaaagtaagggaatttaaaaaaattgtaaaaattggaagaactcatcttcaagatgctacacctttaactttaggacaagagttttctggataccatgctcaattaaaaaaatgtattttacgaatagaattatcactgaaagaaatttataatttagctcaaggcggtacagcagtgggcactggattaaataccagaaaaaattttgataaaaaaattgttaaagaaattagtaagattacaagaattcccttcaaagctgcatcaaataaattcgctgcattagctgcccatgacgaaattgtaaatttttcaggcgctttaaatactacggcagtttgtttgatgaaaattgcaaacgatataagatttctgggatctggtcctagagcaggatatgctgagcttatactgccatctaatgaaccaggttcatcaataatgcctggtaaagtaaacccaacacaaactgaagctgtgacaatggtgtgtgtgaaagtaattggtaatcataatggtatcactatggcagggtcgcacggtcattttgaattaaatgtattcaaacctttgatagcccacaacattttacaatcaatcgagattatgagtgactcagccaaaacttttgcattatattgtgtaaaaggaattaaagctgac

SEQ ID NO: 280738 - DNA, 661 bp, Unknown
  Bacterial polypeptide expressing nucleotide sequence isolated from the Sargasso Sea
aatgtcccaccgaacggagagagatagtcttggccctgtagaggttccttccgataagtattatggggcccaaactcaaagatctttagataattttaaaattggaagccagaggtttcccagagagttcattcgtgcctacgggatactaaaaaaatctgcagcatctgtaaatcatcgttacggtaaacttgaagattctataaaagatgctattcatagggcttccgatgaggtaatagaggggaaattagatgatcactttcctctagtagtgtggcaaactggaagtggtacacagaccaatatgaatcttaatgaagttatatcgaaccgtgcaatcgagattcttggaggcgaactaggtagtaaggatccagtccaccctaacgaccatgtaaacatgagtcagtcaacgaatgacactttcccgactgcgattaatattgcagctgttgaaagtgtaacaaatagccttatccccaacatggagatattaaaagtggccttagataaaaaatcaaaaaaatttgaagatattattaaggtcggaagaactcatttacaagatgcaactccaataagtttaggacaagaattttcagggtatgtgtcagcaattgatcatggaattaatcgtctaaaaaaggctttagaccat

SEQ ID NO: 280739 - DNA, 895 bp, Unknown
  Bacterial polypeptide expressing nucleotide sequence isolated from the Sargasso Sea
aatgaaaatagaaaagaaatttgatagcataggaaaaattgatgttcctgtggataaatactggggtgcatctactcaaagatcaaaaaaatactttgatattggggaatttttagttgaacgggttttaattaaatcaattgcaataataaaaaaatcagcagcaattgttcataaaaaagataaacaaataaaccaaaaaatagcaaatgcaattatcaaagcttcaaatgaaattataaaaggtaaattatatgagcattttccacttaaagtttggcaaactggttctggcactcaaacaaatatgaatgttaatgaggtaatatcaaatagagctatagaaatattaagagggaaaaagggcactaaaaaacctgtgcatccaaatgatgatgtaaataaatcacaatctacaaatgacgtatttccaacagccatgcatattgcaatagcacttgagacaaaagaaaaacttttgccttctctaataattttaaataaagaattaaaaaagaaaacagtaaaatttaaaaatattgttaaagttggaagaactcacttacaagatgcaactccaataactctaggacaagaattttctggatatcaatcccagttagagagctgtataaatagaattaaaaacggtttaaatgaaatatattatttagcacaaggaggtactgctgtaggaacaggaataaatacaaaaaaaaactttgataagaaaattgttaaagaaataaaaaatttgaccaaaattccatttaaaccagcaaaaaataaatttgcagcgttagctgcacatgatgcaatagtaaatttttctggaactttaaatactactgctgtttctttaatgaaaatagcaaatgatattagatttttagga

SEQ ID NO: 280740 - DNA, 634 bp, Unknown
  Bacterial polypeptide expressing nucleotide sequence isolated from the Sargasso Sea
cttgtcagataaaaagttcagaattgaaaaagacagtatgggggagctaaatgttcccgctgattcaaaatggggtccacaaacccagcgtgcagtcgataattttcaaatcagtgattacaaaatgcccactggtttcattcgttctttggcgcttttgaaatggggactggccaatgcaaataaagatttgaatcttctctcaaaagaaaaggcatctgctatagcagattcagcaatggaaatttatcgaggcgatcacatgaaagagtttccagtcgatgtctttcaaactggatctggaacaagtaccaatatgaatatgaatgaggttatatctcatctagcatcttcagaatcaaaccccattcatccaaatgatgatgtaaatatgggccaaagcagcaatgatgtcattccttcagcaatcaatgttgattcctctttatccgttaaaaatactcttattccatctatgaagcatctaaaaaatgcaattgatgaaaaagccaaatcaatcggcgacataccaaaaaatgggcgaacccatctcatggatgccatgccgttaactttttctcaggaaatgagtgcatggtctgctcaaattcaggatgccattgaacaatatgag

SEQ ID NO: 280741 - DNA, 871 bp, Unknown
  Bacterial polypeptide expressing nucleotide sequence isolated from the Sargasso Sea
atgtgtttcaactggttctggtactagttctaacatgaatgcaaacgaagtaatagctaatttagctaccaagtatgcaaaaaccaaaattagtgcaaatgacgatgtaaatatgagtcagagcagtaatgatgtaatccctactgctattaagataagtgcctctatggaccttactaaaaaactttatccagctttagataagttgatcgatgaaattgagaagaaagcaaaatctgttgaaggtgtaattaagactggaagaacgcatttaatggatgcaatgcctgtggatctttcagatgagttaagagcttggactagtcagctgagttcttcaagagatatgttaggcgtcattgaacaaaggcttttgcaattacctcaaggtgggactgctgttggaactggaattaacgcccataagaattttgcaaagtattttgcacaagaaatgacaaaactttctggaagtgaatgtaaatgcgtacctagcgagaacttcttccacgaattaagcgctcaagattgctcagtacaactttctggtgaattaaagaatttagccgttgttctgatgaagatctccaatgacttaaggtggatgaatagtggtccgttagcaggcttgtctgagatagaacttcaagctttgcagccaggaagtagcattatgcctggaaaagttaatccagtaattccagaagctgtagccatggcatcggcggatgtaattggaaatgatgtcaccattacggttgctgcacaagctggaaattttcaattaaatgtcatgcttcctgtaatagcttacaaccttcttaaaagtattaatttattagctggagccatgaatgttctatcttctaag

SEQ ID NO: 280742 - DNA, 682 bp, Unknown
  Bacterial polypeptide expressing nucleotide sequence isolated from the Sargasso Sea
actagaaaaaattttgacaaaaaaattatcagagaaattagtaagattactaaaatatcttttaaaccagcaagtaataaatttgcggctttagctgctcacgatgaaattgtaaatttttctggcacattgaatacaacagctgtttgtttaatgaaaattgcaaatgatataagatttttaggttctgggcctagagctggttacggagaattaatacttccgtctaatgagccaggatcatccattatgcccggcaaggtaaatcctacacaaacagaagcagtaacaatggtttgcgtaaaagtgataggaaatcataatggtattactatggcaggatctcatggtcatttcgaattaaatgttttcaagccacttataattcataacattttacaatctattgaaataatgagtgactcagcaaaaacattcgctttatattgtgttaaaggaattaaagcagataaaaaaagaataaaatatttacttgataactctttaatgcttgtaacatcattagctcccaaaatcggttatgatcttgcagcacaaattgcaaaaaaagcacataaaaacggtaccacattaaagcaggaagtagtcaaagcaggattaattaaagaaaaagaatacgatagagttatgaatcctattaagatgactaaaccaaaataaa

SEQ ID NO: 280743 - DNA, 937 bp, Unknown
  Bacterial polypeptide expressing nucleotide sequence isolated from the Sargasso Sea
aaagctattgccatgattaaaaaagctgcagcaatagtaaatatgaaaaatggcgatcttgataaaaagataggtaaagtaattattaaagcatcaaatgaaattatttcaggaaaacataaagataattttcctcttaaagtttggcaaacaggttctggcacacaaacaaacatgaatgtaaatgaagttatttctaatagagctatcgaaattcttaaggggaaaatgggtagcaaaaaaccagttcatccgaatgatcatgtaaataaatctcaatcaactaatgacgtattcccaactgccatgcatatagctatagcgattagagctaaggataaattgttgccatcattaaaattactaaatactgaactgcgaataaaatctaaaaaatttaacaatattgtaaaagttggtagaacacatcttcaagatgcaacgccaattactttggggcaagaattttcagggtatcattcacaattgagcaaatgcataaaaagaatagaacatgctttaaaagaaatatattttttagcacaaggcggaacggctgttggtaccggcctgaacacacgcaaaggttttgataaaaaaatagtttctgaaataaaaaaaattacaaaattaccatttaaaacatcagaaaataaatttgcagctttagcagctcacgattctatagttaatttttctggaacaatgaacacaactgctgtttgtttaatgaaaattgcaaatgacattagatttttaggatcagggcctcgtgctggatatggtgaacttattttgccagaaaatgaacctggttcatctataatgccaggtaaagttaacccaacccaatgtgaagcagtcactatggtgtgtgtaaaagtaattggtaaccataatggaataacgatggcaggatcgcatggtcatttcgaat

SEQ ID NO: 280744 - DNA, 666 bp, Unknown
  Bacterial polypeptide expressing nucleotide sequence isolated from the Sargasso Sea
aacttgttgctaagaaaatagctgctttaacaaatcttccatttgtttctgctccaaataaatttgaagcattagcaacacacgatgccctagttaatttttcaggatcattaagaggaatggcaacatcaatatataaaatatcaaatgatattagatttcttgcttcagggcctagatgtggttttggtgaacttaatttgccagaaaatgagcctggaagttctattatgcccggtaaagtaaatccaacacaaatagaagctctaactatggtttgttcccatatcattggtaatgatacagcagttggatttgcgggaagtcaaggtcattttgaactaaatgttttcaaaccagtaattgcttataatgttttacaatcattgcaattattaggagatgcaacttctagttttacattaaggtgtttaaaaaatataagccccaacgaaaagaaaatatccgacttgatgtggggaagtttaatgctagtaactgccttaactcccaaaataggctatgacgcagcaacaaaaattgctaaagaagcacacttaaatggaactacattagaagatgaagcaataaaatcaggcctaatagataaaaaaacattttctgatattgtaagaccagaaaaaatgatcaatccgactaattaat

SEQ ID NO: 280745 - DNA, 524 bp, Unknown
  Bacterial polypeptide expressing nucleotide sequence isolated from the Sargasso Sea
tatgaaatttagaatagaagaagatagccttggaaaagtaagggtgccaagaaatgctctatggggagcacagactcaaagagcaatagataatttcccaattagcggcatctcaatgaacttccctttcacgaatacctttatagcaatgcttggctttgtaaaagatgctgcagcaagagcaaataaaaatctgaagctattagaagcaaaaaaacaaaaagttatttcaagagctgcaaaagagatttggactaataaacatggaaaagagtttccaattgatgtttttcaaactgggtctggaacaagtacaaacatgaatgcaaatgaggtaatagcaaatctttgctacaaaacctccaaagttaagattcatccaaatgatgatgtaaatatgagccagagctctaacgatgtaattccaactgtcatgaatctggcctattacttcgacgcaacaaagaaattaatgccagcattaaatttactcattgaaactttagagaaaaaagctgaatcag

SEQ ID NO: 280746 - DNA, 790 bp, Unknown
  Bacterial polypeptide expressing nucleotide sequence isolated from the Sargasso Sea
cctgttcatcctaatgatcatgtaaatttatcaccttcatcaaatgatacttttcctactgtaatgcatattgctataaatgaacttgtagatgttaagttattaccatctataaataatttaattaaagaactagaaaaaaaacaaaataaattttcaaatataattaagattggaagaactcatctccaagatgccaccccattaactttaggtcaagaattttctggatattctgcacaaatcaaaaataatttaaaaagaattcttcaagctaaattagaattaaattatattgctcaaggaggaacagctgtagggactggaataaatgctccaaaaaattttgatattattttttgtaaatttttaaacaaactaacactaaataaatataaaccaaataaaaataagtttgaggcaatagctgcccatgactccatagtaaatttttctggaagtttaaatacattagcagtatctattcttaaaataatcaatgatattagattattagcctcaggtccaagatcaggcttaggtgaattaagtttacctgagaatgaacctggctcatcaataatgcctggaaaaattaatcctacacaaatagaggctttaagcatggtatgtgcgcaggtaattggaaataattcatctataagttttgctggctctcatggtaattttgaactaaatacttttaagcctttgattgcatttaataccttgcagtcaattaatttattaagtgatagtattagtagctttaataataattgcctttaag

SEQ ID NO: 280747 - DNA, 785 bp, Unknown
  Bacterial polypeptide expressing nucleotide sequence isolated from the Sargasso Sea
aattaaattagcagcagctgaagttaatgttgatttttgtttgttagagcctgaaattggagatattattgttcaagtatgtagagaagtaataaatggagattttgatgaccagttcttagtagatatttttcaaacaggatctggaacgtctacaaatatgaattttaatgaagttatttcaaatagagctattcaaaaacttggaggagaaatagggtcaaaaactccagtgcatccaaatgatcatgttaatctaggtcaatcttcaaatgatgttattccttctgcaatacatatttctgcattaattggtattcaaaatgagttaattggtgtattggaaaattttcgtgatgaattaaacaataaagcacaagattttatgccaattgtaaaaactggtaggactcatttacaagatgctacaccaattagattaggtcaagaatttgaaggttattctgggcaaatagagagaaggatagataaattatttgaagtagttaatcaattatctgagttagcaattgggggtactgcagttggtactggtgtgaacactcaccctgattttgctatgaaagtatgtaataaattgtctgaatcattaggttttccggtcaatgaaactactaaccattttcaagctcaaagtactttagataccatagtagaatgtagcggagcacttaaaactttagctgttagcttaatgaagatagcaaatgatataagatggttaggatctggacctagagcagggtttggagaagttgaactac

SEQ ID NO: 280748 - DNA, 601 bp, Unknown
  Bacterial polypeptide expressing nucleotide sequence isolated from the Sargasso Sea
tcgcttgctgctcatgacgcacttatagaagtaagtgcggctgaacgtggacttgcgatggcacttctcaaaattgccaacgacatccgctggctagcaagtggcgcacgctgcggcattggtgaaattgcagtacctgaaaatgaacctggcagttcaataatgcccggtaaagtaaacccaactcagtgcgaagcattgactatggtttgtgctcaggtttttggtaacgatgcaacagtagcctttgctgggagccagggcaattttcaactgaacgtctacaagccagtcatgattcataatgtattagaaagcgcggatttacttgcagatggctgtgattcaatgcgtgttcattgcgcaacaggaataacaccaaatctcaatcgcatagaacaacacctcaacgattcgcttatgctcgtaacagcactcaacacacacatcgggtatgaaaactctgcaaagattgcaaaaaaagcccatgccgatggaacaagcctgaaagaagcagcagttgcactgggccttgttaccccggagcaatacgaggagtgggttgtacctgttgaaatgactcgcccacttgcagtttgat

SEQ ID NO: 280749 - DNA, 529 bp, Unknown
  Bacterial polypeptide expressing nucleotide sequence isolated from the Sargasso Sea
aatgaaaatagcaaatgatataaggtttttagcatcaggaccgagagctggcttaggtgaactaattttacctgagaatgaacctggatcatctataatgccaggaaaagtaaaccctactcaatgtgaagcagttacaatggtttgtgttaaaattattgggaatcataatggaataacaatggcaggttctcatgggcattttgaattaaatgtttttaagccacttataatttataatatcttacaatcaattggcatcatgtcagactcaacaaaaagttttgcaaattactgtgtttcaggaataaaggcagataaaaaaaaaataaataaattcttagaaaactcattaatgttggtcactgccttagcgcctaaaataggttacgataatgcctcaatgattgcaaaaaaagctctaaagaataattcaactttaaaaatagaagccattaaatcaggcttaattagtgaaaaagaatataataaaattgttgatcctaaaagaatggtttacccaaaataa

SEQ ID NO: 280750 - DNA, 955 bp, Unknown
  Bacterial polypeptide expressing nucleotide sequence isolated from the Sargasso Sea
cttggatgaaaattttcctttaaaagtttggcagactggttctggcacgcaaactaatatgaatgtaaatgaagttattgctaatagggctattcaaattcttaaagggaaaaaaggatcaaaaaaacctgttcatccaaatgatcatgtgaacaaatctcaatctacaaatgatgtttttccgactgcgatacatatttctatagcacaagaaactataagaaaattaatacctaatttaaagattttagagaaatctcttaaaaaaaaatctgttgagtttaagaatatagtaaagattggaaggacacatcttcaagatgcaaccccacttacgcttggccaagaattttctggatatcatcaacaaataaaaaaaagtttagagagaattaaatattgtcttaatgacatcctttttttagcacaaggaggaacagctgtaggaactggaataaattcaaaaaaaaattttgataaaaaaattgtcaaagagatcgggaaactttgcaaaattaaatttaaaccagcaccaaataaattctctgagcttgccgcacatgatgctgtagttaatttctctggggcattaaatacttgcgctgtagcattaatgaaaatttctaatgacataagatttttaggttcaggaccaagagcaggttatggagaattaattttgccagaaaatgaacctgggtcctcaattatgcccggtaaagtaaatcctactcagtgtgaagctgtaacaatggtatgtgctaaagtaattggaaatcatacaggaatcactgttgctggatcacacggacattttgaattaaacgtttttaaacctttaattgcacataatatacttcagtctatcgacattatggcagacagtgttaaaactttagcttgttttgtgtcaatggaattagggcagacaaatcaaagattaaagaatatttag

SEQ ID NO: 280751 - DNA, 772 bp, Unknown
  Bacterial polypeptide expressing nucleotide sequence isolated from the Sargasso Sea
gaacatcaacgaggtgataagcaatctggcgtctcaggcctcaggcaccgccctcggcagccacaccccagtgcacccgaatgaccacgtcaatcggtcgcaatccacgaatgatgtgtttcccgcagcgatccacgtcgccgcggccaagcacctaatggacgggctgctgccggcactcgatgccctggtgcaggcctttgatgccaaagctcaggcctggatgcccatcgtcaagattggccgcacccatctgcaggatgcggtgcccctgcgtctgggcgatgaagtgggcgcctggcgggatcaactcaaacaagcccaggcatggctggaggactgtctggtcagccttggcgatcttcccctggggggcaccgctgtgggcacggggttgaacacgccgccgggcttccgccatgccgttgcagaagagctgagccgggtcgccggcgtcaaggttcgtcccgctgacaacctcttcgccgtgatggccggccatgacgccctcgttcaagcgatgggccaacttcgcctgctggcggtggccctgctccggatcgccaacgacgtgcggctgcttgggtgtggcccccgggcaggtctgggcgagttgcggctgcccgccaacgaacccggcagctcgatcatgccgggaaaaatcaatcccacccagtgcgaagccatggccatggtctgcacccaggtgatcggtctcgatggcgccgtggcagccgctggcgcaggcggccatctacagatgaatgtctac

SEQ ID NO: 280752 - DNA, 580 bp, Unknown
  Bacterial polypeptide expressing nucleotide sequence isolated from the Sargasso Sea
tggagcttcgactgcaagagctactgataatttcccgatttcaaatttacgtttttcaagggtatttattagatctcttggagagattaaaaaagcttgtgcagttgtaaatgaaaaaaataacttaattgatagtaaattgtcaaaagcaatagttgacagtgcacaagaagtaatagatggaaagcacgataaagattttgttgttgatatttttcaaacaggatctggaacatcaacaaatatgaatataaatgaagtaattgcaactttagcctcagaaaaaattgatacagaagttcatccaaatgatcacgtaaatatgagccaatcatcaaatgatgttatacctacagctacaaaccttgcatctttgctctctattaaagaagatggtggtttgttaacttatttaaataatatgaatgaaacttttaacagcaaagccaaagattgggctgaagtttataaaaatggtagaacacatttaatggatgccactccagttacccttggacaagaatttgagggctatgcaaatttaattgagagcaggataagagatatcgagaattctctt

SEQ ID NO: 280753 - DNA, 559 bp, Unknown
  Bacterial polypeptide expressing nucleotide sequence isolated from the Sargasso Sea
tatgaaatttagaatagaagaagatagccttggaaaagtaagggtgccaagaaatgctctatggggagcacagactcaaagagcaatagataatttcccaattagcggtatctcaatgaacttccctttcacgaatacctttatagcaatgcttggctatgtaaaagatgcttcagcaagagcaaataaaaatttgaagctattagaagcaaaaaaacaaaaagtcatttcaagagctgcaaaagaggtttggactaataaacatggaaaagagtttccaattgatgtttttcaaactgggtctggaacaagtacaaacatgaatgcaaatgaggtaatagcaaatctttgctacaaaacctccaaagttaagattcatccaaatgatgatgtaaatatgagccaaagctctaatgatgtaattccaactgtcatgaatctggcctattacttcgactcaacaaagaaattaatgccagcattaaatttactcattgacactttagagaaaaaagctgaatcagtgaagggaactacaaagacgggcagaacacatctt

SEQ ID NO: 280754 - DNA, 847 bp, Unknown
  Bacterial polypeptide expressing nucleotide sequence isolated from the Sargasso Sea
attataaaagcagcaaatgatgtaatttcaggtaaattgaaagataattttcctttaaaagtctggcaaacaggttctggtacacaaacaaatatgaatgttaatgaagttatttcaaatagagcaatagaaatattaggaggcaaaaaaggatcaaaaaaaccagtacatccaaatgaccacgttaataaatcgcaatcaaccaatgatgtttttcctaccgctatgcatatggctatagctataaaagcgaaagaaaatttattaccaagtcttagtttgcttaaccatgaattaggaaaaaaatctaaagaatttaataaaattgttaaagtaggaagaactcatttacaagatgctactcctttaactttaggtcaggagttttctggctatcatgctcaactatctaaatgtatagaacgtattaaaaaagctttagatgaaatttattttttagcacagggtggaactgcggtaggaacaggaataaatacaagaaaaggattcgataaaaaaatagtagctgaaataaaaaagattacaaaacttccatttaaaacatcactaaacaaatttgcttcattagcagctcacgatgcaatagttaatttttccggaacaatgaatacaacggccgtttgtttgatgaaaatagcaaatgatattagatttttaggatctggaccaagagctggatatggagagcttattctacccgaaaatgaaccgggttcttcaataatgccgggtaaagtaaatccaactcaatgtgaagctgtaactatggtgtgtgtaaaagtaataggaaatcacaacggaataactatggcaggctctcatggcc

SEQ ID NO: 280755 - DNA, 820 bp, Unknown
  Bacterial polypeptide expressing nucleotide sequence isolated from the Sargasso Sea
tgccactccgcttacgttaggacaagaattttctggctattttgaacaattaaaaaaaagtattgaaagaataaaatatagtttaaaagatattctatttttagcacaaggaggaacagctgttggaactggactgaatacaaaaaaaaattttgacaaaaaaattattagagaaataaacaaatattgtaaaataccttttaaaccagcgcctaacaagttttcagaattagcagcacacgatgcagtagttggtatgtctggatcgctaaacgcttgtgctgtagcattaatgaaaatttctaatgatataagatttcttggatcgggtccaagagctggttatggtgaacttatactaccagaaaatgaaccaggatcttcaataatgcctggaaaagttaacccaacacaatgtgaggctgtaactatggtttgtgtaaaagtaattggaaatcatactggaatatcaatagctggctctcatgggcactttgagttaaatgtttttaaacctttaattgcccataacatattacaatcaatagatttgatagcagatagtgtaaaaaattttagcctttattgtgttaaaggaataaaagcaaataagttaaaaataaaagatcatttagacaattctttgatgttagtaactgcacttgcacctagaattggatacgataacgctgcaaatattgctaaaaaagcattgaagaataatacaaaactaaaagaggaagccttaaaaactgggctgattagcgaaaaggaatacgataaaatagttaatccagctaaaatgattggacctaattaa

SEQ ID NO: 280756 - DNA, 920 bp, Unknown
  Bacterial polypeptide expressing nucleotide sequence isolated from the Sargasso Sea
gggagcatccacacaaagatcaaaaaaatactttgatataggagatgtattagtcagaccaaagttaataaaatccatagctattataaaaaaagcagctgctattacaaattataaaagcaaagatattaactcaaaaatttataaatcaattgtacgagcttctaatgaagttattgcaggaaaattagataatcatttccctcttaaagtttggcaaactggttctggcacacaaacaaatatgaatgtgaatgaggtaatttcaaatagagcaattgaaatacttaagggaaaaaagggtacaaaaaaacctgttcatccaaatgatcacgtcaataaatcacagtcaactaatgatgtatttcccactgcaatgcatattgcaatagcaatggaaactagagaaaaactattaccaagcttagtattattaaataaagaattaaaaaaaaaggtaagggaattttataaaatagtcaaaataggtagaacacaccttcaggatgctacccctttatcattgggtcaagaattttctggctaccaatctcaactagaagaatgcattaaaagaataaaagtttcactgaatgaaatttattatttagcacaaggtgggaccgctgttggaactggcataaataccaaaaaaaattttgataagaaaatagtaaatgaaattaaaaaaatcacaaagttgccttttaagccagctaaaaataagtttgctgcacttgctgctcatgatgcaatagtgaattattcaggtacattaaatacaactgcggtatgtttaatgaaaatagcaaatgatattaggtttttaggatcaggaccaagagctggatatggagagttgatattgccagagaatgaacctggatcatcaattatgcctggtaaagtaaatccaactc

SEQ ID NO: 280757 - DNA, 908 bp, Unknown
  Bacterial polypeptide expressing nucleotide sequence isolated from the Sargasso Sea
ggcggtggtgcacattaagcgttgtgcggctgaagcaaaccgggagctgggagaattgccttccaataaagcagtggccattgttggggcctgtaatgacttgttggcgggtcaccatggcgatcagtttcctgttgatatctttcaaacgggttccggcactagcaccaatatgaacgttaatgaggtgattgctcatctgtgcgaagaagcgggggcttcgattcatcccaatgatgatgtgaatttgggacagagcagtaacgacactattcccaccgccatccatgtgtctgcggcgttagccgtgaccgaacacctgattcctgcgctggagcagctgatcgtcgagctgggactgcgcgctcgggagcatcgggagacggtgaaaaccgggcgcacccaccttatggatgctatgccagtgacggtcgagcaggaactgcaaacctgggcgatgcagttgcaggatgcttgcgggcgtgtggccggtgcgcgcgacgccttgttggccgtaccccaaggggggacggccgtggggagtggcatcaacgcgcatccagcgttcggtgagacctttgccagcaagctagcagatgaaactggcctggcatttcgggccttaccgcacccctttgtagcgcagagcgcgctggatggtccgttggcattatcggcagcgctgcgtggtattgctgtggtgttgatgaagatcagtaacgatttgcgctggatgaattccgggcctactcatgggcttggtgagattcaattaccggctactcagccgggttcgtcgattatgcctggcaaagtgaacccggttatttgtgagtctgccactatggtggcaactcaggttatggggtttggatcaggccaatgctattgccgcccagagcggcaat

SEQ ID NO: 280758 - DNA, 505 bp, Unknown
  Bacterial polypeptide expressing nucleotide sequence isolated from the Sargasso Sea
atgatgttatttcctacagcaatgcatatttcaattgcaataagaactaaggaaaaactgttaccatcgctgaaacttttagaaaaagagttaaaaaaaaaatcaaaacaatttaataagattgttaaagtagggagaactcatttgcaagatgctactcctttaactttaggacaagaattttctggttatcatacccaattaaagaaatgtattttgagaattgagtctgctttgaaagaaatttattttctagcacaaggggggactgctgttggaactggattaaacactaaaaagaactttgataaaaaagttgtaaaagaaatcagcagaataactaagcttccctttaaaccatcatctaataaatttgcggctcttgctgctcacgatgaaattgtaaatttttctggaacactaaacaccacagcagtttgtttaatgaagattgcaaatgatataagattcttgggatcaggtcctagagctggctatggagaac

SEQ ID NO: 280759 - DNA, 633 bp, Unknown
  Bacterial polypeptide expressing nucleotide sequence isolated from the Sargasso Sea
tatgaaatatagaatagaaaaagatagcctgggcgaaattaaagttccttctagggccctgtggggagcacaaactcaaagagctgttaataattttccaataagcggcataaagatggatttcccatttactaaatcatttgtttcttcattaggcttaataaaagacgcagctgcaaaaacaaatttgcgcttaaaattattgtcttcaaaaaagtctaaagctatttcaaaagcagcaaaagaagtttggcaagagaagcaccatcacgaatttcctatcgatgtatttcaaactggttctggcacaagctctaatatgaatgctaatgaagttattgcaaatctagcaaccaaatatgccaagcttgatatcaaaccaaatgatgacgttaatatgagtcagagcagtaatgatgttatacccacggctatcaagattagcgcacacatggatttaactaaaaagttatttcctgcattagataaattgatagctgttattgaaaagaaagccaaatctttgcgaggtataattaaaactggtagaactcacctaatggatgcaatgccaattgattttgctgaagaattatatgcgtggtcaagtcagcttaagtcttcaaaaaaaat

SEQ ID NO: 280760 - DNA, 625 bp, Unknown
  Bacterial polypeptide expressing nucleotide sequence isolated from the Sargasso Sea
tccttttagatctgctaagaataagtttgcatcattagcagcacatgatgaaatagtaaatttttcaggaactttaaacacaacagcagtttgtttaatgaaaattgccaacgatattaggtttttaggatctggtcccagagctggatatgcggagttaatacttccttcaaatgaaccaggttcctcgataatgcctggtaaagtaaaccctactcaaaccgaagcagtaacgatggtttgcgtaaaggtaataggtaatcacaatggaataactatggctggctctcatggtcattttgaattaaatgtatttaaacctttaatagctcataatattcttcagtcaattgagataatgagtgactcagctaaaacttttgcattgtattgtgttaagggaattaaagctgataagaaaaaaataaagagttacttagataactcattaatgttggtgacagctttaactccaaaaattggttacgataaagccgcaagtattgcaaaacttgctcacaaaaatggaacaactttaaaagaagaagtaatcaaagcaggtttattaaaagaaaaggaatacgataaaatcatggatcccatgaaaatgactaagccaaagtag

SEQ ID NO: 280761 - DNA, 511 bp, Unknown
  Bacterial polypeptide expressing nucleotide sequence isolated from the Sargasso Sea
gttggcttggctcaggaccaagaaatgtggattgggagaactatcactcccagcaaatgaaccagggtcttcaataatgccaggcaaagtaaatccaactcaatctgaggctatgacaatggtttgctgtcaagtaattggtaatcatacagcacttacaattggaggtacacaaggtaattttgaattgaacgttttcaaacctatgatgatttataatttgttacattcagttagattattaactgattcttgtcgctcatttagagaaaagtgtgtagatggattgaaagccaatgaagaagttattcaagatcatttagaaaattcattaatgttagtcactgcattaaataaccatattggatatgataaagcagcgaaaatcgctaagaatgcccatgagaaaggtttgacattaagagagtcaggtatagaattaggatatttgacaaacactcaatttgataaatggattaagccagagaaaatgataggaccttcaagataa

SEQ ID NO: 280762 - DNA, 556 bp, Unknown
  Bacterial polypeptide expressing nucleotide sequence isolated from the Sargasso Sea
atgaaatttagaaaagaatttgacagtataggctctatcaacgttccaaacgataaatattggggggcttccacacagagatcaaaaaaatattttgatattggggaatttttagtaagaccgattctaattaaatctattgcaataattaaaaaagctgctgcaatagttcatgggaaagaaaaacaaattttaccacgtatttctaaagcaataataaaagcatctaatgaggtaattttaggtaaattagatgagcattttccattaaaagtttggcaaactggatcgggcacacaaacaaatatgaatgtaaatgaagttatagcaaacagagctatagaaattttaggtgggaaaaaaggaacgaagaaacctgtgcaccctaatgatcacgttaataaatctcagtctacaaatgatgtatttccaactgctatgcacatagcaattgctatagaaacaaaaaaaaaactattaccttctctagaattgttgaataaagaacttaaaaagaaagtttctaaatttaagaacatagttaaagttgggagaa

SEQ ID NO: 280763 - DNA, 745 bp, Unknown
  Bacterial polypeptide expressing nucleotide sequence isolated from the Sargasso Sea
gatgttaggtggtgaattgggaagcaaaactccagtccacccaaatgaccatgtcaatatgggacaatcctcaaatgacacattcccaactgccatgcatattgcagctgctatggagattaacagcgagcttctcccagcattagaaaagcttcatgctgctttagagaaaaaacaaaaccaattcaaagacattattaaaataggtagaactcacttgcaagatgcaacgcccctaactctaggccaagaattctctggctatgttactcaaatgaaatatgcaattgcaagagtaaaagacaccttaccaagactataccaattagctcaaggaggcacagctgttggaactggattaaactcaagcaaaggcttcgctgaagattttgcagcagaagttgcaaaacaaacgaatcttccttttgttacagccgagaataaatttgaagcattagcagctcatgactcaataattgaaactagtggcgcactaaatgtcattgccgcctccctcatgaagatcgccaatgacctaagaatgcttggctctggccccaggtctggacttggtgagcttagcttgcctgctaatgagcctggctcatcaatcatgccaggtaaggttaacccgacacaatgcgaagcactgactatggttgccacccaaatcatgggcaatcacagcaccatcacaattgcaggagctactggtcacttcgagttaaacgtcttcaaaccagta

SEQ ID NO: 280764 - DNA, 517 bp, Unknown
  Bacterial polypeptide expressing nucleotide sequence isolated from the Sargasso Sea
aatgaaatatagaacggaatttgattctataggaaaaattaaagttcctggtgataagtattggggtgcatcaactcaaagatcaaataaatactttgatattggtgatttccttgtaagaccaatcctaatccaatcaatagctattattaaaaaagctgcagcaatggtaaatacaagaaatggtgatctagataaaaaaataagcaaatatataattaaagctgctgatgaagttatcagaggaaaattgaataaccattttcccttaaaagtttggcaaacaggttctggaacccaaacaaacatgaatgttaatgaagtaatttctaatagagcaattcaaatgatgagtggtaaaatgggaacaaaaaaacctgttcacccaaatgatcatgtaaataaatctcaatcaaccaatgatgtatttccgacagcaatgcatgtagcaattgcaataaaaactaaaaataaactattgccttcactaaaattattagaaaaagaattaaaaaaa

SEQ ID NO: 280765 - DNA, 772 bp, Unknown
  Bacterial polypeptide expressing nucleotide sequence isolated from the Sargasso Sea
aatgaaattaagaaaagaatttgacagtataggaagtgttaatgtcccaaatgataaatattggggagcttcaactcaaagatcaaataaattttttaatattggaaaaattctagttaacatttcgatcataaagtctattgcaattatcaaaagatcagccgcaatagtccattttaaagatagattaattagcaataaaatatctaaagcaattattaaagcttctgatgaggtaattaaaggtaaattagaccaaaactttcctttaaaagtctggcaaacaggctctggaactcaaactaatatgaatgtaaatgaggtaattgctaaccgtgcgattgaatttttgggtggtaaaaaaggaacaaaaaaaccagttcatccaaatgatcatgtaaataaatctcaatccactaatgatgtgtttccaactgccatgcatatttctgtcgctcaagaaacaattaataaattattgccaaacttaaaacttttagaaaaagagttaaaaagaaaatcacgtgagtttaaaaatattgtaaaaattggaaggactcatctacaagatgcaacaccactttctcttggacaagaattttcaggttattatgtgcaggtacgaaaaagtattaaaagaattgaggttgcattaaaagaaatatatgatcttgctcaaggtggtacggctgttgggacaggaataaattctaaaaaaaattttgataaaaaaattgtaaaagaaatagcaaagtttacaaaaattccattt

SEQ ID NO: 280766 - DNA, 822 bp, Unknown
  Bacterial polypeptide expressing nucleotide sequence isolated from the Sargasso Sea
ccatgtaaataaatctcaatcaactaacgatgtctttcctactgcaatgcatatggcaatcgctataacagcaacagaaaaattaattccaagcctaaacttacttaatttacaattaaagaagaaatcaaaagaatttaaaacaattgttaaagttggtagaacgcatttacaagatgctactcctttaactttgggtcaagaattttctggttatcatttccaattaacaaaatgtattgagagaataaaaaaagctctagaagagatacattttctagctcaaggtggaactgctgtaggcactggactaaatactagaaaaggttttgataaaaaaatagtatctgagataaaaaaaattacaaaacttccttttaaaccttctcctaacaaatttgcctcattggctgctcacgatgctattgttaatttttctggtacaatgaatacgactgctgtttgtctaatgaaaattgcaaatgatatccgatttttaggctctggtcctagagcgggatacggagaacttatcttgccagaaaatgagccaggctcttctataatgcccgggaaagtgaatccaactcaatgtgaagctgtaacaatggtatgtgtaaaagtaattggaaaccacaatggaataacaatggcaggatcacatggtcattttgaattaaatgtttttaagccactaattatccataatattttacaatcaattcacataatgtcggactctgctaaaagttttgcaaaatattgtgtatcaggaattaaggctgacaaaaaaagaattaaagaattattagataattcatt

SEQ ID NO: 280767 - DNA, 792 bp, Unknown
  Bacterial polypeptide expressing nucleotide sequence isolated from the Sargasso Sea
aaaagtaaaaaaatttaaaaatattataaaagtaggtagaacacacctgcaagatgcaactccaatatctttgggacaagaattctcaggttatcaatctcaactcgaaacgtgcattaaaagaattaattacgctcttaacgaaatatataatttggcacaaggaggtactgctgtaggcactggtataaatactaaaaaaaattttgataaaaaaattgtcaatcaaataaaaaaattaacaaaaattgcttttaaaccagcaaaaaacaagtttgcagctttggccgcacatgatgcaattgttaatttttcaggcactttaaatactactgcggtatgtttaatgaaaattgcaaatgatataagattcttaggatctggacctagagcaggttatggtgaattaattttacctacaaatgaacctggctcatcaattatgcctggcaaagttaatccaacacaatccgaggctgtcacaatggtatgtgttaaagtaattggtaatcataatggaattacaatggcaggttcacatggtcattttgaattaaatgtttttaaacctttaattgcccataatatattgcaatcaattgatcttttatcggatagttcaaaaaattttgcttcttattgtatcaaagggattaaagcagataaaaataaaataaaagaatatttagacaattctcttatgctggttacttctttggctcctcacattggatatgacaatgcagcaaaaattgcaaaaaatgctttaaaaaataaaacaactttaaaaca

SEQ ID NO: 280768 - DNA, 939 bp, Unknown
  Bacterial polypeptide expressing nucleotide sequence isolated from the Sargasso Sea
gtgggaagtataatgtccccaaatgataagtattggggtgcatctactcaaagatcaaataaattttttaatattggaaaaattttagtaaatatttcaatcattaaatcgatagctatcattaaaagatcagcttctatagtgcatgctaaagataaattaattgatggtaaaatttctaaagcaataatcaaagcttcagacgaggtaattaaaggtaaattaaatgaaaactttcctttaaaagtttggcagacaggatctggtacacaaacaaatatgaatgtgaatgaagttattgcaaacagagctattgaaattttaggaggaaaaaaaggtacaaaaaaaccagttcatccaaatgatcatgtaaataaatctcaatctacaaatgacgtttttcctactgcaatgcacatatcaattgctcaagaaactataagtaaaatgttgccaagtttaaaaattttagaaaaggcactaaagaagaaatcaaacgagtttaaaaatattgtcaaaattggaagaactcatcttcaagatgccactccaatttcacttggacaagaattttctggatatcattttcaaataaagaaaagtattgaaagaatagaatatgctttgagggaaatattatatcttgctcaaggaggtactgctgttggaactgggattaactcaaagaaaaattttgataaaaaaattgtaaaagagattgcaaaatttacaaaaattaaatttaaaccagctccaaacaaattcgcagaactagctgcgcacgattctatagtcaatttttctggtgctttaaatacgtgtgctgttgctttaatgaaaatatctaatgatatccgatttttaggttcaggtcctagagctggttacggtgagttaattttaccagaaaatgaacctggctcatcaataatgccagga

SEQ ID NO: 280769 - DNA, 737 bp, Unknown
  Bacterial polypeptide expressing nucleotide sequence isolated from the Sargasso Sea
cctggtgataagtattgggggagcatcaacagaaagatctaataaatattttaatattggagatttcttagtcaggcctctagttattcactctatagcgatgattaaaaaggctgcagcgatcgtgaactctaaaaataaagatttagatcccaaaatggcaaaatatattattaaagcttcggaagaggtgattaaagggaaacatgatgaacactttccgttaaaagtttggcaaacagggtcgggcacacaaacaaatatgaatgtaaatgaggttatagcaaatagagccattgaaatgatgggtggaaaacttggatcgaaaattccagttcatccaaatgatcacgtgaataaatcacaatcaacaaatgatgtatttcctacagctatgcatattgcaattgctctaaaagcaaaggaaaaacttttaccgtcgttaaaattattagaaaaagaattaaataaaaaatcaaaagagtttaaaaatattgttaaagtaggaaggactcacttacaagatgcaacacctttgactcttggacaagagttctccggatattattctcaacttaaaaaatgtatattaagaatcgaaaacgctcttaaagaggtttatcatttggcgcaaggtggaacggctgttggaactggattaaatacaaaaaaaaactttgataaaaagattataaaagaaatttctagaataactaaattaccatttaagccagcat

SEQ ID NO: 280770 - DNA, 946 bp, Unknown
  Bacterial polypeptide expressing nucleotide sequence isolated from the Sargasso Sea
aaaattttttaatattggtaaaatatatgttccagtttcaattataagatctattgcgatcattaagagaagtgccgctatagtccatcaaaaagacgggttaatttcatccaaaatttcaaatgcaataattaaagcatcaaatgaagtcataagtggtaaaatgaatgaaaattttcctctaaaagtttggcaaacaggttctggtacgcaaacaaatatgaatgttaatgaagtaattgctaatagagctattgaaatcttaaagggtaaaaagggatcaaaaaaaccagttcatccaaatgatcatgtgaataaatctcaatccacaaatgatgtttttcctacagcaatgcatatctctgtagctacagaaacattgaataaacttttgcctaatttaaatttacttaaaagttccttaaatattaaaagtaaagagtttaataatattgttaagattggaagaactcatctgcaagatgcgacaccattatctttaggtcaagaattttctggttactacgaacaagtgaggaaaagtatagatagaatatcatattgtttaaatgatatttattatttagcgcaaggaggaacagcagttggaacaggaataaattcaaaaaaaaattttgacaaaaaaataattaatgaaatcaaaaaattttgtaaaataaaatttaaacctgcgccaaataaattttcagaattggcagcacatgatgctatagtaaacttttctggatcattaaattcatgtgcagttgctttgatgaagatctcaaatgatattagatttttagggtctggaccaagagcaggttacggtgagcttatattgcctgaaaatgaaccaggatcttccataatgcctggcaaagtgaatccaactcaatgtgaagctgttactatggtttgtgcaaaagtcattgaaatcatacag

SEQ ID NO: 280771 - DNA, 610 bp, Unknown
  Bacterial polypeptide expressing nucleotide sequence isolated from the Sargasso Sea
tatgaaatatcgaatagagaaagacacacttggagaagtgaaagtacctaaaaacgtttactggggtgctcaaacagaaagatcccgaaataattttaaaattggcccttctgcatcgatgccgatggaaataatctatggttttgcttatctaaaaaaatcagctgcttttacaaatcatgaattaggagttctatcgattgaaaaaagagatttaattgctaaggtttgtgatgaaattattaatggtgatcatgatgatcaatttcctttagttatatggcaaactggatcaggaactcaatctaatatgaatattaatgaagttatttcaaatagagcacatgtaattaaaggaaataaattaggacgaggagataagtttttaaacccaaatgatgacgtaaacatgtctcaatcatcaaatgacacttacccaactgcaatgcatattgctgcctacaaaaaaataatggaggtaaccattccgggtgttttaaaattaaaagattctttagaaaaaaaagtaaaaaaattcaaatctattgtaaaaattggccgaacacatttaatggatgcaactcccctaacacttggtcaagaattttca

SEQ ID NO: 280772 - DNA, 841 bp, Unknown
  Bacterial polypeptide expressing nucleotide sequence isolated from the Sargasso Sea
aagaactcacctcatggacgctactcctattactcttggccaagagttctcaggttatgtagctcaaattgataatgggattaaatctattaaaaatgcattggatcacttatcggaattaccgattggaggaactgctgttgggactgagctaaacactcctaagggttactcaaaaaaagttgttgaaagtatttcaaaaaactctggtcttaaatttaaagaatcccccaacaaatttgaaggtattgcatctcatgattgtattgttgagatgcacggtgcaatcaagacagccgctgcctcaatatataaaatatcaaatgatataaggctgatggggtctggaccaagatctggattaggtgaactaatattgcctgctaatgagcctggaagttctataatgccaggaaaagttaatccaacacaatgtgaagcaatttcaatggtttgtgcacaaataataggtaatgacgtggctgtgagttttgcaggggctaatggtcactttgagttaaatgtttttaagcctttattcgcatacaatattatagagtcatcaaaaatactaggagatgcatgtttgagtttctcaaaaaactgtattgaaggtctaaaaccaaataaaaagaaaatagaaagatttttaaatgattctcttatgcttgtaactgctttaaactcaaaaattggatactacaaatcagcagagatagctaataaagcttataaagaagatattacgcttaaagaagcatgcattcaactaaattatttgtcagaaaaagagtttgacaaatatgtcaatcctcaaagaatgacaaacaatgaaggttga

SEQ ID NO: 280773 - DNA, 820 bp, Unknown
  Bacterial polypeptide expressing nucleotide sequence isolated from the Sargasso Sea
ggaggaaaaaaggggtcaaaaaaacctgttcatccaaatgatcatgtaaataaatctcagtctactaatgatgtgtttccaacagccatgcatatagcaatagcattaaaaacgaaaaataaactattaccatcattatatttgctaaacaaatctctcaaaaaaaaagtaaaggaatttagtaaaataataaaaataggaagaacacatttacaagatgctacccctctttcattgggacaggaattttctggttaccagacgcaggttcaagagtctatttatagaattgaacattcgttaaatgaaatttattatctagctcaaggtggaactgcagttggaactggaataaataccagaaaaaactttgacaaaaaaattattaacgaaataaaaaaaattacaaaattgccgtttaaaccaacaaaaaataaatttgcagcattagcagcacatgatgctgttgtaaatttttctggagcattaaatacatccgctgtgagcttaatgaaaattgcaaacgatattagatttcttggatcagggccaagagcaggatatggagaattaatgctacctgaaaatgaacctggatcttcaattatgcctggaaaagtaaatcctacacaatgtgaagcgttaactatggtatgtgttaaagttataggtaatcataatggtattactatagcaggttctcatggtcattttgaattaaacgtatttaaacctctaattatacataatactttacaatctataaatttattatcaaacagcataaaaaattttacaaatttttgtgttgtaggaatta

SEQ ID NO: 280774 - DNA, 478 bp, Unknown
  Bacterial polypeptide expressing nucleotide sequence isolated from the Sargasso Sea
aatgacaaaaaactttaggattgaaaaagatagtatgggaactatagaggttcccatagaagctttgtggggtgctcaaacacaaagatcgataataaatttttctattggagaagaattaattccaattgagttaatttattcactcacccttataaaaaaagctgcttcaattgcaaatttcaatttaggtttaatagataaaagaaaaaaagatttgattgtagaggcatgtcaagaaatacttgatgggcttcatgattcacagtttcccttaaaggtttggcaaacaggtagtggcacgcaaacaaatatgaatgttaatgaggtaatttcaaatattgcagcattaaaaacaaattcagaacttggtagtcatcaacccattcatccgaatgatgatgtaaataaatctcagtcaactaatgatacttttcctgctgctattcaaatagctgttgttaatgaaataatcaaa

SEQ ID NO: 280775 - DNA, 661 bp, Unknown
  Bacterial polypeptide expressing nucleotide sequence isolated from the Sargasso Sea
catgagtcaaaaaataagacaagaacaggacagtttaggcaaaatcagtcttgcaaatagtaatctttggggcgctcaaactcaaaggtcccttaaaaattttagaattggcaacactagaatgccaattgaaataattcatgcattagtaataattaagatgtcatgcgcaaaagctaatcaaaaacaaaaacttattagcccaaaaatttcaaatgccattgtaaatgcagctaagcaagttttatcaggaagatatgacgatcattttcctctttctgtttggcaaactggatcaggaacacaaacaaatatgaatgtaaacgaggtgattgctaaccttgcaaataaaaaactttcaggaaaacttggaactaattctccagttcatccaaatgaccatgttaataagagtcaatctaccaatgacagctttccttcggctctaaatattgcaacatccatcaatattattcaggagcttttgcctgctttaaaaaatatggaaaaaacattgcgctctcaatcacagaaatggaaaagtattattaagatcgggagaactcacttgcaagatgcaacccctttatcgctaggacaagaattttcaggatatcaagctcaaattatatcaaatatcaaaagggttgaatcagctcta

SEQ ID NO: 280776 - DNA, 583 bp, Unknown
  Bacterial polypeptide expressing nucleotide sequence isolated from the Sargasso Sea
atgaaatatagaatagagttcgatagcattggtaagataaaggtacctggtgataagtattggggggcatcgacagaaaggtcaagaaaatattttaatattggagattttctcgttaggccaatagttattcgttctatcgcaataattaaaaaagcagctgcaattgttaatgcaaaaaataaagatctagatcctaaattaagcagatatgtaatcaaagctgcagaagaagtaattaaaggaaaacacaacgatcattttcctctaaaagtttggcaaactgggtctggcactcaaacgaatatgaatgttaatgaagtcatagctaatagagcaattgaaatgatgggaggtagaatgggaacaaaaaaacctgttcatccaaatgatcatgtaaataagtcacaatcaacaaatgatgtttttcctacagcaatgcatatttctatagctattaaaacgaaggaaaaactactgccatcattaaaattattagaaaaagaattagcaaaaaaagcaagagaatttaaaagtattgttaaagttggaagaactcatttacaagacgctactcctttaa

SEQ ID NO: 280777 - DNA, 742 bp, Unknown
  Bacterial polypeptide expressing nucleotide sequence isolated from the Sargasso Sea
gcattaaaagaaatttattttttagcacaaggcggaactgctgttggaacaggattgaatgcaagaaaaaactttgataaaaaaatcatcaaagaaatttgtaaaataacaaaacttccttttaaaccatcatcaaataaatttgcatctctagcggcgcacgatgaaattgtaaatttttctggtaccctaaatactactgcagtttgtttaatgaaaattgctaatgatatcaggtttttgggatcaggtcctagagctggctacggagaacttatattaccttcaaacgaacctgggtcatcaattatgcctggtaaaattaacccaacacaatcagaagctgtcactatggtttgtgtgaaagttattggaaaccataatggaattacgatggcaggttctcatggtcattttgaattaaatgtttttaaacctcttatcattcacaatattttacaatccatagaaataatgagtgactctgcaaaaacttttgcgctttattgcgtgagaggaattaaagctaataaaaaaagaataaaaagtcttttagataattcattaatgcttgttactgcactagcgcctaaaattggctacgataaagctgctaaaattgcaaaatcagctcacaaaaatgggaccacattaaaacatgaagtgattaaatcagggttaattcaagaaaatgagtatgataaaattatgaatccacttcatatgactaaaccgaagtaag

SEQ ID NO: 280778 - DNA, 645 bp, Unknown
  Bacterial polypeptide expressing nucleotide sequence isolated from the Sargasso Sea
aattgactggattaccattcaagaccgcaccaaataaatttgaaacattagcgggtcaggacagcattgtggagctttccggatcattaaaaacattagccgtatccctatttaaaatcgcaaatgatattagatggctagctagcggccctagatctggaattggtgaaattataattccatcaaatgagccaggctcatcaatcatgcctggaaaagtcaaccccactcaatgtgaagcaatgaccatggtatgtactcaagttatgggaaacgatttaaccatttctattgctggagcgagtggaaattttgaattaaatgtttacaggcctgtgattgcgtataatattattcaatcaattagactcttaactgatgcatgcgattcgtttcgcgaaaattgtgtggatggaatcactcctaatgaagaaaaaattaaaacaaatctatataattcgctcatgcttgtgacagctctaaatccacacattggttacgataaagctgccgaagtagcaaaaaaagcacatgagaataacacatcattaagagaggcaattattgatctaggttacatgtcaggtgaggattttgatgagttagttgatccacaaaaaatgataaaaccttcaaaaaaatagt

SEQ ID NO: 280779 - DNA, 574 bp, Unknown
  Bacterial polypeptide expressing nucleotide sequence isolated from the Sargasso Sea
atgaaatttagaaatgaatacgatagtttggggaagataaaagtcccatttgataaatattggggagcttcaactcaaagatctaataagtattttgatataggcgacttcttggtaagacctattgttataaaatctattgcaatgataaaaaaggctgctgcgatagttaacgctaaaaatagaagtcttgacaaaaaaattagtagggcaattattaaagcgtctaatgaagttatttcaggaaaacttaatgatcattttcctttaaaagtttggcaaactggatctggtacacagacaaacatgaatgttaatgaagttatcgctaatagagctattgaaatacttggaggtaaaatgggaagcaaaaaaccagtacatccaaatgatcatgtaaataaatcacaatcaactaacgatgtatttccaacagcaatgcatatggctattgcaattagagcgaaagggaaattgctacctagtcttaaattgcttaattcagagttaaaaaaaaagtcaaaagaatttaaaaaaattgtaaaagtggcagaactcatctacaagatgcaac

SEQ ID NO: 280780 - DNA, 760 bp, Unknown
  Bacterial polypeptide expressing nucleotide sequence isolated from the Sargasso Sea
tattgaaagaattgaaagagctttaaatgaaatttattatcttgcccaaggtggaactgctgttggaacaggtttaaatactaaaaaaaattttgataaaaaaataattagagaaataaaaaaaataacaaaactaccatttaaacctactaaaaataaatttgcagctttggcagctcatgattccattgtgaacttttcaggtacgatgaatacaacagcggtctgtcttatgaaaattgctaatgatataaggtttcttggatctggaccaagagcaggttatggagaattaattcttcctgagaatgaacctggttcttcaattatgccaggaaaagttaatcctactcaatgtgaagcagtaacaatggtttgtgtaaaagttattggtaatcataacggtataacgatggcaggctcccatggtcattttgaattaaatgtttttaagcctttaattatacataatattttacaatctattaatataatgtctgactcctcaaaagcttttgcaaattattgcattaaaggtttaaaggctgacaaaaaaagaattaaatctcttcttgataattctttaatgttagtcacggccttatctccaaaaattggttatgataaagctgctaaaattgcaaagcttgcacataaaaatggaacaacattaaaagaggaggctttaaagtcgggatttattagtgaaaaggattacattaaaataatgaatccaatgtcaatgactaaaccaaaataa

SEQ ID NO: 280781 - DNA, 730 bp, Unknown
  Bacterial polypeptide expressing nucleotide sequence isolated from the Sargasso Sea
tatgaaaactagaaaagaacatgatagtataggaatagttaaagtgcctgttgataagtactggggagcctcaactcaaagatcaaaaaagttttttaatattggtgatattttaatcaaccctataattattaagtctattgctgttataaagaaatctgcagcgattgttcatttaaaaaataagcaaattgataggaaaattgctaaagctataattaaggcagctgatgaaattatatcaggaaaattaaatgataattttccactcaaagtgtggcaaacgggatccggaactcaaacaaatatgaatgttaatgaggtcatatcaaatagagcaatcgaaattttaaaaggaaaaaaagggacaaaaaaaccagttcacccaaacgatcacgtgaataaatcccaatccacaaatgatgtttttcccacagctatgcatatagcagttgcaaataaaactataaaagaattgatacctagtcttgaattactaaataaaagtttaaaaaaaaaagttaacgaatttagtaaaattataaaaattggaagaacacatcttcaagacgcaacaccaatttctttaggacaagagttttcaggatatcaatctcaactttcagattgtattaaaagaattaaaataagtttgaaagaaattttttatttagcacaaggtggaactgctgttggaacaggaatcaatactaagaaaaattttgataag

SEQ ID NO: 280782 - DNA, 637 bp, Unknown
  Bacterial polypeptide expressing nucleotide sequence isolated from the Sargasso Sea
acaaaacttccatttaaaccaattaaaaacaaatttgcagccttagctgctcatgattcaatagtaaacttttcgggtaccttaaatacaacagcggtttgccttatgaagattgcaaacgatattagatttcttgggtctggaccaagagctggttatggagaactcatacttccagaaaatgaaccgggttcatcaattatgcctggtaaagtaaatcctacacaatgtgaggctgtgactatggtttgtgtaaaggtcattggcaatcacaacggtataacaatggcaggttcgcatggtcactttgaattaaatgttttcaaaccattaattatacataatattttacaatctataaatataatggctgactcatcaaaaggtttcgcaaattattgtatcaaaggaatcaaggctgacaaaaaaagaattaaatctcttcttgataattctttaatgctagtcacagctctctcaccaaaaataggttacgataatgctgctaaaattgcgaaattagcacataagaatggaacaactttaaaagaagaggctataaaatcaggcctgataaatgaaaaggaatttttaaaaattgtcaatccaaaaagaatggttgctcctaatagataaa

SEQ ID NO: 280783 - DNA, 590 bp, Unknown
  Bacterial polypeptide expressing nucleotide sequence isolated from the Sargasso Sea
aatgaaatatagaacggaatttgattctatagggaaaattaaagttcctggtgataagtattggggagcatcaacacaacggtcaaacaagtactttgatataggtgattttcttgtgagaccgattcttattcaatcaatagccatagtaaaaaaggctgctgcaattgtaaattcaagaaatggagatttagataaaaaattatctaagtatattgttaaagctgctgatgaagtaattaagggtaagcttgataaacactttccgttaaaagtttggcaaacaggatcaggtactcaaactaatatgaacgttaatgaagtaatatcaaatagagcaatacaaattatgggtggaaagatgggaacaaagaaacctattcatccaaatgatcacgtaaacaaatctcaatctactaatgatgtgtttccaactgcaatgcatatagctatcgcaatgaaagctaaaaataaattaattccttcattaaagctattagaaaaagagttgggaaaaaaagttaaagaatttagtaaaattgtaaaattaggaagaacgcacttacaggatgctacacctctaactttag

SEQ ID NO: 280784 - DNA, 777 bp, Unknown
  Bacterial polypeptide expressing nucleotide sequence isolated from the Sargasso Sea
tatgatccgtgctctcggaactctcaagaagtccgcggcactagccaacaaggaactgggtgagttgccgggcgacgttgccgacctcatcgtccaggccgccgacgaggtcatcgccggaaaactcgatgacgagttcccgctggtggtcttccagaccggttcgggcacccagtccaacatgaacaccaacgaggtcatcagcaaccgtgcgattgagttggccggtggcgaacgcgggtcgaagaagcccgtccaccccaacgaccacgtcaatcgtggccaatcctccaacgacaccttcccgacggccatgcatatcgccgtcgtgtgtgccctcactgagcgcctctaccccgccgtccagcagcttcgcgacactctcgacgagaaggccaaaaagtacgacgacgtcgtgatggtcggccgcacccacctgcaggacgcaacgccgatccgtctcggccaggtcattagtggctgggtcgcccaaatcgatttcgccctcgacggcatccgctatgccgattcacgcgcccgtgaactagccatcggcggcaccgccgtcggcaccggcctcaacgcccaccctaatttcggcccgaccgtcgctaagcacgcgaccgaggagactggcattgagttcaagcaggccgacaaccttttcgccgcgctgagcgcccacgacgccctagtgcaagtttcggggtcgctgcgtgtcctcgccgacgccctcatgaagattgccaatgacgtccgctggtacgcttccggccc

SEQ ID NO: 280785 - DNA, 805 bp, Unknown
  Bacterial polypeptide expressing nucleotide sequence isolated from the Sargasso Sea
atttctattggctttaaaagctaaagaaaaattattaccatctctaaaacttttagaaaaagagttagctaaaaaatcaaaagaatttaaaaatatagttaaggtaggaagaacacatctgcaagatgcgacaccactaacattaggacaagaattttctggttaccattctcaacttaaaaaatgtattttaagaatagaaaatgccttaaaggaaatttattatcttgcccaaggtgggacagcagtaggtactggattaaatacaagaaaaaattttgataaaaaaattatcaaagagattagaaaaatcactaagcttccattcaaggtatcaacaaataaatttgcagctttagccgctcatgatgaaatagtgaatttttcaggaacattaaatactacagctgtttgtttaatgaaaattgcaaatgatataagatttttaggttcagggccaagagcaggatatggtgaacttatattaccatcaaacgagcctggatcttctataatgcctggaaaagttaatccaactcagtcggaagctgttacaatggtatgtgttaaagtgataggtaatcacaatggaattactatggctggctcacatggtcattttgaactaaatgtttttaaacctctaattattcataatattttacaatcaattgagattatgagtgactcagcaaaaacttttgccctcttttgtgttaaagggattaaggcagacaaaaaaagaataaaaaaattattagataactccttgatgactgttacagccttagccccccaaattgga

SEQ ID NO: 280786 - DNA, 400 bp, Unknown
  Bacterial polypeptide expressing nucleotide sequence isolated from the Sargasso Sea
tatgaaaaatagaaaagaatatgacagtattggtggaattaatgtgcctgtggataaatattggggagcatctacacaaagatcaagcaaatattttgatattggggattttttagttagacctatagtcattaaatcaattgctataattaaaaaagctgcggcaatcgtaaatgcaaaaaatggcgatctagacaaaaaaataagtaaaacaattgttaaagctgcaaatgaagtaatttctggaaaattaattaatcattttcccctaaaagtctggcagacaggatcgggtacacaaacaaatatgaatgttaatgaagtaattgctaatagagctatagagattttaggtgggaaaaaaggatctaaaaaaccatacatccaaatgatcatgtaa

SEQ ID NO: 280787 - DNA, 688 bp, Unknown
  Bacterial polypeptide expressing nucleotide sequence isolated from the Sargasso Sea
attaataccaaaaaaaattttgataagaaaatactaaatgaaataaaaaaaatcacgaagttaccttttaagccagctataaataagtttgctgcacttgctgctcatgatgcaatagtaaattattcaggtacattaaatacgactgcagtatgtttaatgaaaatagcaaatgatattagatttttaggttcagggccaagagctggttatggagagttgatattgccagagaatgaacctggatcgtcaattatgcctggcaaagtaaacccaactcaatgtgaagctgtaacaatggtttgtgtgaaagtaattggaaatcacaacggtattacaatggctggttcacacggtcattttgaacttaatgtttttaaacctttaataattcataatgtacttcaatcaattcaaattctttcagatagtactaaaagtttcgcaaaatattgtatctcgggattaaaagctgacaaaaatagaattaaacatttagtagataactctttaatgttggtaactgccttatctccaaagattggctacgataatgccgcaaagattgctaagaatgctttaaaaaataagacaactctaagaactgaagcattaaaatcaggtttaataaatgagagagaatataataaaattgttgatcctgtaaaaatgattaaaccagactaac

SEQ ID NO: 280788 - DNA, 622 bp, Unknown
  Bacterial polypeptide expressing nucleotide sequence isolated from the Sargasso Sea
aaaaggttttgataaaaaagtaataaatgaaataaaaaaaataactaaactaccctttaaaccaaccaagaataaatttgctgcgttagcagctcatgatgaaatagtaaatttttctggaaccttaaatacaactgctgttagtttaatgaaaattgcaaacgatattagatttttaggatcggggcccagagctggatatggtgaaataattttaccagcaaatgaaccaggttcatcaattatgccaggaaaagtaaatccaacacaatcagaagcagtgacaatggtttgtgttaaagtaatcggtaatcataatggaataacaatggctggttcacatggacattttgagctaaacgtttttaaaccattaattgctcacaacattttacaatctattgatcttcttgcagatagtactaaaaattttgctttatattgcgtcaaaggaattaaagcagataaagtaaaaattaaaaaatttttagataactcattaatgctagttactgcactagctccacatattgggtatgataactccgccaaaatagctaagacagcacttaaaaaaggcacaactctaaaagaggaagctttaaaaaacaaaattaattaa

SEQ ID NO: 280789 - DNA, 463 bp, Unknown
  Bacterial polypeptide expressing nucleotide sequence isolated from the Sargasso Sea
attgcccgaaaatgaaccgggttcttcaataatgccgggaaaagtaaatccaactcaatgtgaagctgtgactatggtttgtgtaaaagtgatcggaaaccataatggtataactatggcaggatcccatggacattttgaattaaatgttttcaaacctttaattattcacaatatattacaatcaattcatataatgtcggactcaacaaagagttttgcaaaatattgtgtttctggaattaaagctgataaaaaaagaattaaagaattgctagataattctttaatgttggttacagcgcttgctccagaaattggttatgacaatgctgcaaacattgcaaaaaaagctttaaaaaataaaacaacactaaaagtggaagctatcaaatcaggattaataagtgtgaaagattatgatcgtatagttaatcctaaaaaaatgacctatccttcataa

SEQ ID NO: 280790 - DNA, 859 bp, Unknown
  Bacterial polypeptide expressing nucleotide sequence isolated from the Sargasso Sea
gttgaatgttaaagctaaagcgttttctaagattattaaattaggaagaactcatttacaggatgcaactcctttaagccttgggcaggaattttcaggttatgtaactgctattgattatggatgtcaaagaataaaaaatgcattagaaagttgttatagcttggcaatgggtggtacagcagttggcactggaattaatacaattgaggggtttggtgaaaaagctgcagaggaaattgctagtttaacaaatttaccatttagaactgctgaaaataaatttgaagcacttgccgctcaagactgcatagtagaattatcaggagctttaaaaacagtagctgtttcattatttaaaatatctaatgatatacggtggttaagtagtggtccaagatcaggtattggagaattaattctgccagccaatgaaccagggtcatccataatgccgggaaagataaatccaacacaatgtgaagctatgacaatggtttgtactcaagtcatggggaatgacacatcgatttctttcgctggagctaatggaaactttgaattgaatgtttataggccagtaattgctcataatattttacaatcagttagattattagctgatgcatgtcaatcttttttacttaatgctgttaatggaattgaaccaaatcaaaagagaatagatgataatttatttaattcactaatgttagtgacagctttaaatcctcatataggatacgataaagcagcaaaagtcgctaaaaaagcttatgatgaaaatctttcattgcgcgatgccattcaaaaattaggttatatgacaggagatgattttgataaaattgtggaagcc

SEQ ID NO: 280791 - DNA, 946 bp, Unknown
  Bacterial polypeptide expressing nucleotide sequence isolated from the Sargasso Sea
aatgaagttatagcaaacctttgttataaaacatctaaagttaagattcatccaaatgatgatgtgaatatgagtcaaagttccaatgatgtaataccaactgtaatgaatttggcctattacttcgactcaacaaagaaattaatgccagcattaaatttactcattgaaactttagagaaaaaagctgaatcagtgaagggaattacaaagacaggcagaacacatcttatggatgccatgccggtggatatgtccgatgagttaaatgcttggaatactcaacttaaatgctctagagaatctatagtagttgttctagagaagcttttatttcttcctcagggaggaacagcagttggatcaggaataaatgcacacagaaggttttcaaaggaatttgctaaggaactctcaaaactcactggatttaaaactaagccaagcaaagattttttcagaaacttaagcgcacaagatttatctgtccagctatctggagaacttaaaaatttagctacaatccttttaaaaatatctaatgatcttagatggatgaatagtggacccttatccggaatctctgaaatcgagcttcaggctcttcaaccaggaagtagcataatgcctggaaaagtaaatcctgtaattcctgaggctgtagcaatggctgcagcagatgttatcggtaatgatgtttctattacagttgcagctcaatcaggaaacttccaacttaatgtgatgttaccagtaattgcttattgtaatttgaaaagtgtaaatatacttgcaggtagcatgaatgttcttgctaaaaaagctataaagacctttaaggtaaatcataaaaagattgaagaatcactctcaagaaatcccatcttggtcactgctttgaatccggtcattggttatcagaaggcagcagaaatagctaaaagag

SEQ ID NO: 280792 - DNA, 877 bp, Unknown
  Bacterial polypeptide expressing nucleotide sequence isolated from the Sargasso Sea
tattaatgtgcctgtggataagtattggggagcatctactcaaagatcaaaaaaatactttgatatcggagatgtcttggtcaggccgaaattaataaaatctattgccataataaaaaaggcagcagctataacaaactataaaaacaaagatattagttcaaaaatttataaatctattattagagctgcaagtgaagtaattaatggaaaattagatagtcattttccacttaaagtttggcaaaccggttctggtactcaaacaaacatgaatgtaaatgaagttatatctaatagagctattgaaatattaaaaggaaaaaaaggtacaaaaaaacctgtacatccaaatgatcatgtaaataaatctcaatctactaatgacgtatttccaactgcaatgcatattgctatagcaatggaaacaagagataaacttttgccaagtttggtacttttaaataaagaattaaaaaataaagtgaaagaatttaataaaatagtaaaaataggtagaacacatctccaagatgcaactccattatcattaggacaagaattttcaggttatcaatcacagttagaagagtgtatcaaaagaatagaaacatctcttaatgaaatttattatctggcacaaggtggtactgctgttggcactgggataaatacaaaaaagaattttgataaaaaaatagtaaatgaaattaagaaaattactaaattgccattcaaacctgctaaaaataaatttgcagctttagctgctcatgactcaattgtgaattattcaggtacactaaatacaactgcggtatgtttaatgaagattgcaaaagatataagatttttaggttctggtcctagagcagga

SEQ ID NO: 280793 - DNA, 838 bp, Unknown
  Bacterial polypeptide expressing nucleotide sequence isolated from the Sargasso Sea
tagtcatcatccaattcatccgaatgatgatgtaaataaatctcagtcaactaatgatacttttcctgctgctattcaaatatctgttgttaatgaaataatcaaaaaattagttccaactttaagagaacttacaaagatccttgataaaaaaagtgacgagtggaaagaccttataaagataggaagaacccattttcaagatgcagtacccataactcttggacaagaaatatcaggatggtcagagcaacttaaagatgctgaaaatgctattattatgagtctggatgaattgtttttcttacctcttggaggtactgcagtaggtacagggattaattgtccaaaaggattttgtgaagagtctataaaatcaatttcccatgatactaatctaattttctataaatcaaaaaataatttttctatcatggcctctcatgatcgtctagctcaagtaatgagtcaaataaaaatattagcaggtgcattatttaaaatttcaaatgatataaaaattctatcttctggaccaagatcaggaatatatgaattaattatccctcaaaatgaacctggaagttctatcatgccgggcaaagtgaatccgactcaatgtgaagcattatcaatggtttgtactcagatcatgggttttgaatatgcagttacaatggcaaattctagcggcactttacagatgaatgaatataaacctctgattggatttaatattcttacaagtttaaaattacttaaaaatgcaatagacaacttcaaaataaaattagttgatgggatggaacctaatcaacagaaaataaagttaaattta

SEQ ID NO: 280794 - DNA, 816 bp, Unknown
  Bacterial polypeptide expressing nucleotide sequence isolated from the Sargasso Sea
tagcaacacttgccagtactcaacaggagcttgtacatcctaatgatgatgtaaacatgggccaaagctcaaacgatgtagtccctacggctattgcactaagtagtgccctagccgttaaacaagcattacttccagctcttgaaaacctttcgcaacatttagaaaataaaaagagcgaagtaggcgctattgttaaaacaggtcgcactcacttaatggacgcgatgcctgttacattcgagcaaacccttaatgcatggcaatcgcaagtaaacaacgcggcctcaggcattcgccatagcttagagccagtgtgtgagcttgctcaaggtggtacagctgttggtaccggtattaatgccgacccaaagtttgcagacttattttgcactaacctaactaaaaacgtggggatccggttttcgccaagcaaaaactttttttataatattggttcacaagatgccattgttgcactgtctgggcagttaaaagtactcgctgtagctcaaatgaaaatagcgaacgacttacgctggatgaactcaggcccccttgcaggtttaggcgaaatagaacttgaagccctacaacctggctcatctattatgccgggtaaagtaaacccagtcataccagaagccgctgcgatggttagtgcgcaagtgattggtaacgacgctacaattaccgttgctggtcaatctggtaactttgaactaaatgttatgctgcccgttattgcctataatattttgcaaagcatagagctactaacaaacagcgcccaagcttggcagaaaaagccatagc

SEQ ID NO: 280795 - DNA, 913 bp, Unknown
  Bacterial polypeptide expressing nucleotide sequence isolated from the Sargasso Sea
ataagtattgggggggcatcaacccaaagatctaataaatactttgatatcggagattttttagtaagaccaatactaattcaatccatagcaatagtaaaaaaagctgcggctataattaatgcaagaaatcgggatttagataaaaaaattagtaaatacattgtcagagcaagtgatgaagttataaaaggtaaacttgatgaacatttccccttaaaagtttggcagactgggtctgggactcaaacaaatatgaatgtaaatgaagtaattgccaatagagctatacaaatgatgggtggtaaaatgggtacaaaaaaacctgtacatccaaacgatcatgtaaataaatcacaatctacaaatgatgtttttccaaccgctatgcatatagctatagctatgaaaactaaaaaaaagttacttccctccttaaaactattagaaaaagaactaggcaaaaaaacaaaacagtttaagaaaatagttaaattaggaagaactcatttgcaagatgctacaccattaactctggggcaagagttttctggttaccattctcaattaaaaaaatgtatttctagaatagagaaagctttagaagagatatatttcttagcacaaggtggaactgctgttggaactggactaaatacaaaaaaaggatttgatacgaaaattattaaggaaataaaaaaaataactaaaataccttttaaaccaactaataataagtttgctgcgttagcttctcatgatccaattgtaaatttttccggaacaatgaatacaactgctgtatgtttaatgaagattgcaaatgatataagatttcttggatctggtccaagagctggttatggcgagctaatcttgcctgaaaatgaacctggatcatctataatgcctg

SEQ ID NO: 280796 - DNA, 865 bp, Unknown
  Bacterial polypeptide expressing nucleotide sequence isolated from the Sargasso Sea
attggatgggaaaagcaacccacaaatataatcaaggcttttggtataattaaaaaagctgcagcgctcgttaatattgagaatggacagcttagaaaagaaattggaaaggccataatttctgcatcagaagacgtgatatctggaaaacttaattctcatttcccacttgctgtctggcaaacgggctctggcacccaaacaaatatgaatgccaacgaagtcatatctaatcgagcgattgaattgcttaaaggcacaattggctcaaaagatcctgtgcatccaaacgatcacgtcaacatgtctcaaagttccaacgacacctttccaactgctatgcatattgcgataatactttcagccgtagaaataacatttccaggtctaaaaaccttacaagctgagtttaaaagaaaggtatcaaattttaattctataattaagattggcagaacacatactcaagatgccacccctttgacattaggccaagagtttggtgggtatcatactcaaataaccaagggaattttaaggttagaaacggctcttaaaggcatttacccaattgcgcaaggcggaactgcagttggcactggactaaatacaaagaagggattcgataaaaggatagccaaggaaatagctaagatttctgggcacccttttgtaactgctgagaataaatttgaggcccttgctgcccatgacgctttagtagaattatctggagcactcaaaactattgcctctagtttatttaaaatagcaaatgatataagattcttaggatctggccctaggtgtggacttggagagttatctcttcctgaaaatgaacctggttcatcaataatgcaag

SEQ ID NO: 280797 - DNA, 739 bp, Unknown
  Bacterial polypeptide expressing nucleotide sequence isolated from the Sargasso Sea
tatgaagaaatcaaaaaataactatagaattgaaagtgatagtatgggtaaagtaaaaatacctaaaaattcactctatggaccacaaactcaaagagccattaacaattttgatatcagcgacttattgatgcctaaagaatttattattagtactcttcttatcaaaaaagctgctgctattgctaactttaaacttggattaatcgataagaaagtctctaccgctattactagaagtgttgaatacttattatctaattataaccaagagcactttcctgtagatgttttccaaacaggttctggtaccagtacaaatatgaatgttaatgaggtaatttcaaatatagcaaaaattaaatttaaaacaaaggtgcatccaaatgatcatgtgaatatgtcacagagttcaaatgatgtcataccaactgctataaatcattgcgcatattatttggctgtgacaaaactactaccatcattaactgtattgtcaaaagatattggtataaagtcaaaaaaattaaataatattgttaaaactggaaggacacatttaatggatgctatgccaattacatttggccaagaattatcaggctggaaagcacagatagatgataatattgtaagtttaaaaaactgtttaagtagacttaaaagattaccaataggtggaactgcagttggtactggcattaatgctcataaacaatttacaaaagaatttttaata

SEQ ID NO: 280798 - DNA, 457 bp, Unknown
  Bacterial polypeptide expressing nucleotide sequence isolated from the Sargasso Sea
cctgtggataagtattggggtgcatcaactcaaagatcaagtaaatattttgatattggagattttttagttagaccaatagtaatcaaatcaatagcaataattaaaaaagctgcggcaatagtaaatgcaaaaaatggtgatctagataaaagaataagcaaaacaattattaaagcagcaaatgaagttatttctgaaaaattaattaataattttcctctaaaagtatggcaaacaggctcgggtactcaaacaaacatgaatgttaatgaagttattgccaatagagcaatagaaattttaggtggaaaaaagggatctaaaaaaccagtccatccaaatgaccatgtaaataaatctcaatcaactaatgatgtttttccaactgcaatgcatatggcgatagcaatggaagcaacaggaaaattaatacctagtctcaatttacttaatt

SEQ ID NO: 280799 - DNA, 734 bp, Unknown
  Bacterial polypeptide expressing nucleotide sequence isolated from the Sargasso Sea
aagagatatatttttagcacaaggtggaactgctgttggaactggcttaaatacaaaaaaaggttttgataaaaaaatagttgcagaattaagaaaaattacaaaaatgccatttaaacctgctccaaataaatttgcagctttggctgctcatgatgcaatagtaaatttttctggcagtttaaatacaactgcagtttgcctaatgaaaattgcaaatgatataagatttttgggttcagggcctagagcaggttatggtgaacttattttaccagaaaatgaaccaggatcctctattatgccaggaaaaataaatccaacacaatgtgaggctgtaaccatggtttgtgttaaagttattggtaaccataatggtataactatggctggttctcatggacactttgaattaaatgtatttaaacctctaatcatacataatatcttacaatctattcatctaatggcagactcatcaaaaagttttgcaaattattgtgtaaaaggtttaaaagcagataaaacaaaaataaaaaattacttagataactctctaatgcttgtaacagcattgtccccaaaaattggttatgacaatgcggctaaaattgcaaaaaaggcacttaaaaatagaactactttaaaagaagaagctataaaatctggattaataaatggaaaggagtacgacaaaacagttaatccaaaaaaaatgctcaagcctttttaaa

SEQ ID NO: 280800 - DNA, 506 bp, Unknown
  Bacterial polypeptide expressing nucleotide sequence isolated from the Sargasso Sea
catggactatagaatagaaaaagacacactaggagacgtcaaagttccgaaaaactcgctctggggagctcaaacagaaagatctagaggaaattttaaaattggtaattctgcatctatgcctatcgagataattcactcatatgctataataaaaaaatctgccgctgctacaaatgaggaacttggagttttatcaaaagaaaaatcaaaactcattcaaactgtatgtgatgaaatcatttctaacaaacataatgatcaattcccactagttatttggcagacaggatctggtacacaaactaatatgaatgttaatgaggtaatttcaaatagagcccatattatagagggcaaagaactcggtaagtctgaaaaaacattatctccaaatgaccacgttaatctttcacaatcttctaatgatacatttcctactgcaattaatattgctgctatgaaaataattaaaaataatactttagttaatctgaaaatcttaa

SEQ ID NO: 280801 - DNA, 720 bp, Unknown
  Bacterial polypeptide expressing nucleotide sequence isolated from the Sargasso Sea
ttaattatttacctcaaggtggtacggcagtgggttctggattaaatgcaccaaaaaattttgataaaattttttgtaaatacctaaataaatcaacaaaaaataattataaaccctcaaaaaataagttcgaagctatagccaatcatgactctttagtaaatttttctaattctctaaattctttatctatatcattatttaaaattcttaacgatataagatttttatcgtctggcccaaggtctggcttaggagaactacaaattcctgcgaatgaacctgggtcatcaattatgccaggaaaagtaaatcctactcaaattgaagctcttagtatgatttgctgtcaagtgatgggaaataatttagcagttgctcaaggtggatcccaaggtcattttgaattaaatacttttaagccattaattatttttaatataatcaattcaatcaatctacttgctgatggaataaacagtttttgtaaaaattgtttaaaaggaattaaaattaatgagagaaatattgataaacatcttaataattcacttatgcttgttacagcattaaataaatacataggatatgataatgcagctaaaatagcaaaaaaagcatttaaagaaaatattacccttaaacaatcagcaataaaattaaatttagttacagaaaaagaatttgatagaatagtaaatccaaagaaaatgatttaaa

SEQ ID NO: 280802 - DNA, 502 bp, Unknown
  Bacterial polypeptide expressing nucleotide sequence isolated from the Sargasso Sea
atgaaattaagaaaagaatttgacagtattggaagcataaatgtcccaaatgataaatattggggtgcatctactcaaagatccaataaattttttaacataggtaaaattttagtaaatatttcaatcattaaatcaattggaattattaagagatcagctgcgattgtacatgctaaagataaattaattgatggtaaaatttctaaagcaataatcaaagcttctgatgaagttattaaaggtaaattagatgaaaattttcctctaaaagtttggcaaacagggtccggtacacaaacaaatatgaatgtgaacgaggttattgctaacagagcaatcgaaatattagtaggaaaaaaaggcactaaaaaaccagttcatccaaatgatcatgtaaataaatctcaatctacaaatgatgtatttccaactgcaatgcatatatcgattgcacaagaaacaataaataaaatgttgcctaatttaaaaatactagaaa

SEQ ID NO: 280803 - DNA, 838 bp, Unknown
  Bacterial polypeptide expressing nucleotide sequence isolated from the Sargasso Sea
atggctgacacgtaccgcatagagagagattctcttggcgagatgaaggtccctgcagaagcacgctacggtccgcagactcagcgcgccgtagagaattttcccatcagtggtcagcgtttcagtcgccgtttcattcaggcgatgggtctgattaagaaatcggctgctgagaccaacgttgaactgggcaacctcgacccggtggtagcaaaggcgatcattgcagccgcgggtgaagttgcagatggcgcatgggatgacgagttcgttctggacatctaccagactggctctggtacgtcgacgaacatgaataccaatgaggtggtcgcgcatagggcgacagagcttctggaaggcacaggctcggtgcatccaaacgatcacgtaaattttggacagtcctcaaacgatacgatcccgaccgcgattcacatatccacccgcatcgcgattgaggaagaactaataccggctcttcaacacatgcacgatgcgatggctgagaaggctacagaattcgacggagttctgaagtctggacgaactcacctcatggacgcgacgcccgttcgacttggtcaggagttctctggctacgcaacacagatccggaagggcatcgagcgcgttcgtttggttgcggctgagttggaggagctcgcactcggcggaacggccaccggtaccggtattaacacccatgaagatttttcaacgcatacgattgccaagatcgcgtctgctactggaatctcgttttgtgaggcggatgatcattttgaggcgcagggggcgaaggacgctgcggtcaattgtgcgggcgcgctcaata

SEQ ID NO: 280804 - DNA, 847 bp, Unknown
  Bacterial polypeptide expressing nucleotide sequence isolated from the Sargasso Sea
catgtaaataaatctcaatccacaaatgatgtatttcccactgctatgcacattgctatagctttaaaaacaaaaaatgtgcttttgccttcattaaatttgctaaataaagaattaaagataaaggtacaaaaatttaaaaaaattgtaaaaattggtagaactcacttgcaagatgcaactcctttatctctgggacaagaattttctggatatcaatctcaattagaaaaatgcatagatagaatagagaatgctttggaagaaatttattatctagcccaaggaggaactgctgttggcacaggaataaatactacgaaaaattttgataaaaaaattgtcaatgaaattaaaaaaataacaaaacttccctttaaacctgcaaaaaataagtttgcagctctcgctgctcatgattcaatagttaatttttcaggaacgttaaatacaactgctgtttgcttaatgaaaatagctaatgacattagatttttaggatcaggcccaagagcaggatatggagagctattattacctgaaaacgaacctggctcttctattatgccgggcaaggtcaatcctactcaatgcgaagcggttacgatggtttgtgtaaaagtaatcggaaaccacaatggaataacaatggctggttcacatgggcattttgagttaaatgtttttaaacctctaatcatacacaatatacttcaatcaattcatattttatctgatagtacaaaaagttttgcaaaatattgtattaaaggattaaaggctaataaatcaaaaataaaagagcatttagataattcttttatgttagttaccgccttgtcaccaa

SEQ ID NO: 280805 - DNA, 724 bp, Unknown
  Bacterial polypeptide expressing nucleotide sequence isolated from the Sargasso Sea
atgacaaaaaactttaggattgaaaaagatagtattggaaatgtagaggttcccatagaagctttatggggtgctcaaacacaaagatcaataataaatttttctattggagaagaattaattccaattgagttaatttattcaatcaccctcataaaaaaagctgcttcaattgcgaatttcaatttagggttaatagataaaagcaaaaaagatttgattatagaggcatgcacagaaatacttgatgggcttcatgattcacagtttcccttaaaggtttggcaaacaggaagtggtacgcaaacaaatatgaatgtgaatgaggtgatttcaaatattgcagcattaaaaacaaattcagatcttggtagtcatcatccacttcatccgaatgatgatgtaaataaatctcagtcaactaatgatacttttcctgctgctattcaaatatctgttattaatgaaataatcaaaagattagttccaacgttaagagaacttacaaatatccttgataaaaaaagtgacgaatggaaagaccttataaagataggaagaacccattttcaagatgcagtacccatcactcttgggcaagaaatatcaggatggtcagagcaacttaaagatgctgaaaatgcaattattatgagtctagatgaattatatttcttacctcttggaggtactgcagtgggtacagggattaattgtccaaaag

SEQ ID NO: 280806 - DNA, 796 bp, Unknown
  Bacterial polypeptide expressing nucleotide sequence isolated from the Sargasso Sea
gaattttcgggatatcagtctcaactggaggactgtattaataggatcaaaaactctgttgaagaaatatattttctagctcaaggtggaactgctgtgggtacagggataaacacaaaaaaaaattttgatacgaaaatttgtaaagagataagtaaattaacaaagataaagtttaaaccctcaaaaaataaatttgcttcgcttgctgctcatgactcaattgttaatttttctggtacactcaatacaacagcagtatgtttgttaaaaattgcaaacgatataagatttttaggatctggaccaagagctggatatggtgaattgaccttaccggctaatgaacctggctcttctataatgcctggcaaagtgaacccaacccaatctgaagcagttacaatggtttgtgtaaaggttattggaaatcatacaggaattacaattgcaggctctcaaggtcagtttgaacttaacgtatttaaaccattaatagctcacaatattttacaatcaattgatttaatttctgatagctcaaaaaatttcgcaaaatattgtgtaaaagggataaaggctaatgtaaataaaattcaaaaagatttggataactcattaatgcttgtaacagctttagcaccaaagattggttacgacgaagcagcaaatattgctaaaaaagcattgaaaaataatacaacacttaaaactgaggtgttaaaaagtggactaatgaatgaaaaagaatacaaaaaaattgttgatccaagaaaaatgattcaacccgaataaa

SEQ ID NO: 280807 - DNA, 421 bp, Unknown
  Bacterial polypeptide expressing nucleotide sequence isolated from the Sargasso Sea
gttaatccaactcaatgcgaagcagtaacaatggtctgtgtaaaagtaataggaaatcataatggaataacaatggctggatcgcatggtcattttgaacttaatgtatttaagcccctaataattcataatgtgcttcaatcaattcaaattctatcagatagtacgaaaagtttcgcaaaatattgtatctcaggactaaaggctgacaaaaatagaattaaatatttggtagataactctttaatgctagtaactgctctatctcctaaaataggctacgataatgctgcaaagattgccaagaatgcattaagaaataaaactactcttaaatctgaagcattaaagtcagggttaataaatgagaaagaatataataaaattgttgatcctaataaaatgataaaaccagactagt

SEQ ID NO: 280808 - DNA, 625 bp, Unknown
  Bacterial polypeptide expressing nucleotide sequence isolated from the Sargasso Sea
atgaaattaagaaaagaatttgacagtataggaagtgttaatgttccaaatgataaatattggggggcttcaactcaaagatcaaataaattttttaatattggaaaaattttagtaaacatttcaatcataaaatccattgcaattatcaagagatcagctgcaatagtacactctaaagataaattaattaacagtaaaatatctaaagcaattattaaagcttctgatgaggtaattaaaggtaaattggacaaaaactttcctttaaaagtctggcaaacaggctctggaacccaaactaatatgaatgttaatgaagtaattgctaaccgttcgattgaaattttaggtggtaaaaaaggaacaaaaaaaccagttcatcctaatgatcatgtaaataaatctcaatctactaatgatgtgttcccaactgctatgcatatttctatcgctcaagaaacaattagtaaattattaccaaatttaaaaattttagaaaaagagttaaaaagaaaatcacgtgagtttaaagatattgtaaaaattggaagaactcatcttcaagatgcaacacctctttctcttggacaagaattttcaggttatcatgtgcagatacaaa

SEQ ID NO: 280809 - DNA, 607 bp, Unknown
  Bacterial polypeptide expressing nucleotide sequence isolated from the Sargasso Sea
  misc_feature (39)..(39): n is a, c, g, or t
aataaatttgctgcattagccgcccatgatgaaatagtnaacttttcaggcacacttaatacggcagcagtgtgtcttatgaaaattgctaacgacataagatttttaggatctggaccgagagctggttatggtgaacttatattaccatctaatgaacctggttcatctataatgcctggcaaagtaaaccccactcaatcagaggctgttacaatggtttgtgtaaaagtaataggaaatcataacgggataactatggctgggtcacacggccattttgaactaaacgtctttaagccattgataattcataatatcttacaatcaatagaaataatgagtgactcagctaaaacttttgctttattttgtgtaaaaggaattaaagcagataaaaaaagaattaaacatcttctggataattcattaatgttagttacagcactagcacctaaaattggttacgataaggctgcctctattgcaaaaactgcttataaaaatggaactacgcttaagtttgaagtaataaaggcagggctagttagtgaaaaagagtatgacaagattatggatcctattaaaatgactaagccaaagtgaa

SEQ ID NO: 280810 - DNA, 785 bp, Unknown
  Bacterial polypeptide expressing nucleotide sequence isolated from the Sargasso Sea
tatgaaatttagaatagaagaagatagccttggaaaagttagagtaccaagaaatgctttatggggagcacaaactcaaagagcaatagataatttcccaattagcggtatctcaatgaattttcctttcacaaatacctttatttcaatgcttggttatgtgaaagatgctgcagcaagagcaaataaaaaccttaagcttttagaagtaaaaaaacagagagtcatttctagagcctctaaagaggtgtggaaaaataagcatggtaaagagttcccaattgacgtttttcaaactgggtctggaacaagcacaaatatgaatgcaaatgaagttatagcaaacctttgctataaaacttccaaagttaagattcatccaaatgatgacgtgaacatgagtcaaagttccaatgatgtaattccaactgtcatgaatttggcttattacttcgattcaacaaaaaaattagtgcctgcactagatctgcttattgaaactttggaaaagaaagctgactcagtcaagggagtaacaaagactgggaggacacatcttatggatgcaatgccggtggatatgtctgatgaattaaatgcttggaatacacaacttaaatgctccagagaatctatatcagttgttttagaaaaacttttattccttccacaaggcggaactgcggttggaacaggtataaatgcgcataaaaggttttcaaaagaattttcaaaggagctttcaaagctaactggctttaaaacgaagccaagcaaggactttt

SEQ ID NO: 280811 - DNA, 365 bp, Unknown
  Bacterial polypeptide expressing nucleotide sequence isolated from the Sargasso Sea
tcacaatggtataactatggctggttctcatggtcattttgaattaaatgttttcaaacctttgattgctcataatattctacaatcagttgatcttttggcagatagttcaaaaaacttcgcactttattgtgtgagaggtttaaaagctgacaaaacaaaaattaaacaatttttagataattcattaatgcttgtaacagctctagctccacatataggatatgataatgcagctaaaattgctaaaagtgctttaaaaaataatacgactttaaaagaagaaactttaaaaacaaagttaattactgaaaaagattacgataagatcgttaatccaaaaaaaatgactcatccagcataag

SEQ ID NO: 280812 - DNA, 760 bp, Unknown
  Bacterial polypeptide expressing nucleotide sequence isolated from the Sargasso Sea
aacgctaatgaggtgattgctgcacttgcttcacaagagttaaataaagaaattcatcctaatgatcatgtaaatatgagtcaatcatcaaacgatgttattcctacagctacaaatatcgccgccgtgttagaaattacagaaaatttaatcccagcgattgataaattaattgtctcctttgaagaaaaaggaaaactgtgggagaaggtatataagaatggtagaacacacttaatggacgctacccctgtatctctaggtcaagaatttagtggttttgcagctttaattaaagagaggaaaacagatatagaaaattcattagtaaatgtctcaaaattagcaattggtggaactgcagttggaactggaataaatgcacctgaaaactttggaagtgatgtttgtagcgaaatttctaaatctttagaaatttcatttcaagaaattgaaaatcattttactcgccaaggctctcgtgaagaaattgtacatctctcaggttgcttgaaagcatatgcagtttcaatgtttaaaatagcaaatgacattagatggatgggaagcggtcctgtttctggactaaatgaattaaaactgcccgcattacaaccaggttcttcaattatgccaggaaaagtaaatccagttatatcagaaatgatgatgcaagtatcagctcaggttataggcaatgataatactattacattttcctctgctaatggcaattttgaactgaatacaatgttgccag

SEQ ID NO: 280813 - DNA, 407 bp, Unknown
  Bacterial polypeptide expressing nucleotide sequence isolated from the Sargasso Sea
tatgaaatttagatatgaatttgacagtttaggaaaaattaaagtcccaaacgataaatactggggcgcatcaacccaaagatccaataaacattttgacataggtgattttttagtgaggccaattgttattaaatctattgctatgattaaaaaatctgcagcaatagtaaatgcaaaaaatggaagtattgataaaaaaataagtaaagcaattattaaagcagcaaatgaaattatagctggaaaacttaatgaccattttcctcttaaagtttggcaaacaggctcaggtactcaaacaaatatgaatgttaacgaagtcatagctaatagagctaatgaaatgcttggagctaaactaggaagtaaaaaacctgtacatcctaatgaccatgttaataaat

SEQ ID NO: 280814 - DNA, 478 bp, Unknown
  Bacterial polypeptide expressing nucleotide sequence isolated from the Sargasso Sea
tatgggggaattaatcttaccagctaacgagccaggttcatcaataatgccaggtaaagtaaatcctactcaatcggaagcagttacaatggtctgtgtcaaagtaattggcaatcacaatggtattactatggccggatcacatggtcactttgaattgaatgtatttaaaccattgattgcccacaatattcttcagtctattgatttgttatctgatagttcaaaaaattttgcattgtactgcattaaaggtattaaggccgataaggttaaaataaaacattatcttgagaattctcttatgctggtcactgcgctcgcaccaaaaattggatatgataaagctgccaaaattgctaaatcggcacttaaaaatggaactactttaaaatctgaagctttaaaatcaggtttaatcaatgaaaaagaatacgataaaattgttgatccaaaaaaaatgatctatccaacataa

SEQ ID NO: 280815 - DNA, 517 bp, Unknown
  Bacterial polypeptide expressing nucleotide sequence isolated from the Sargasso Sea
aatgatatcagatttttaggatctgggcctagagcgggttatggagaattaattttacctgctaatgaaccaggttcatcaataatgcctggaaaagtaaatcctacccaatcagaggctgtaaccatggtatgtgtcaaagttataggaaatcataatggaattactatggctggttcacacggacactttgaattaaatgtatttaaacctctcatcgctcacaatattttacaatctattaatttattagctgatagtataagaaacttttcgctttattgcgttaaaggattaaaagctgataaaaataaaataaaagaatatttagataattccctcatgctagttactgcgctagcacctcacattggttacgataactctgctaaaatagctaagttggctcttaaaaataaaacaaccctaaaacatgaagcacttaaatctaaacttataagtgaaaaggaatataataaaattgtagacccaaaaaaaatgatttacccagcataag

SEQ ID NO: 280816 - DNA, 832 bp, Unknown
  Bacterial polypeptide expressing nucleotide sequence isolated from the Sargasso Sea
catctgcaagatgctactccaatcactttgggacaagaattttcgggatatcattctcaattaaataaatgcataaagaggatagaattggctcttaaagaaatatatttcttagcacaaggtggaaccgctgtaggtactggtttaaataccagaaaaggttttgacaaaaaaattgttgctgaaataaaaaaaattaccaaactgccttttaaaccatcagaaaataaatttgctgcattagctgcacatgactctatagtaaacttttcaggaacaatgaatacgactgctgtttgtttgatgaaaatagcaaatgatattagatttttgggatcgggtcctagagcaggatacggcgaacttattttaccagaaaatgaaccaggctcctcaattatgcctggcaaagttaatcctacgcaatgtgaggccgttacaatggtatgtgtaaaagtcattggtaaccataacggaataacaatggcaggatctcatggtcattttgagttaaatgtttttaaaccactaataattcataatatcttacaatcaattaacataatggctgattcatcaaaaagttttgcaaacttttgtattaaagatcttaaggcagataaaaaaaaaattaaaaaatttctagataattccctgatgctagtaacagctctatctccaaaagtaggttatgataacgctgcaaaaattgcaaaaaaagctcataaacacggaactactttaaaagaagaagctataaaatctggattaataactgaaccggaatataataaaatagtaaatccagaaaaaatgattaaaccttattaaa

SEQ ID NO: 280817 - DNA, 628 bp, Unknown
  Bacterial polypeptide expressing nucleotide sequence isolated from the Sargasso Sea
aataaaatttaaacctgcaccaaataaatttgccgagcttgctgctcatgatgcaatagttagcttttctggaatgctaaattcttgtgcggtagctttaatgaaaatatctaatgatattagatttttaggttcaggtccaagagcaggttacggagaattaattttgcctgaaaatgaacctggctcatctataatgcctggtaaagttaatcctactcaatgtgaagcagtcacaatggtatgtgtaaaagttattgggaaccataacggcattacaatggctgggtctcatggacattttgagttgaatgtttttaaacctttaatcgcgcataacattttacaatcaatagatctaatagctgatagtactaaaaattttgctctatattgtgttaaaggaattaaagcaaataaaaagaaaattcaggaaaatctagataattccttaatgcttgttactgcacttgcacctcacataggctatgacaatgctgctaaaattgcaaaaacagcgcttaaaaataataccacattaaaatatgaaacattaaagacaggactaattaaagaaaaagattacaaaaaaatagttgatcctaaaaagatgatctatccagcataa

SEQ ID NO: 280818 - DNA, 522 bp, Unknown
  Bacterial polypeptide expressing nucleotide sequence isolated from the Sargasso Sea
tatgaaatttagaaaagaatatgacagtattggcactattaatgtgcctgtggataagtattggggagcatccactcaaagatcaaaaaaatactttgatatcggagatgtcttggttaggccgaaactaataaaatctattgccataataaaaaaggcagcagctataacaaactataaaaataaagatattaattctaaaatttataaatcaattattagagcttcaagtgaagtaattaatggaaaattagatagtcactttccacttaaagtttggcaaactggttctggcactcaaacaaatatgaatgtaaatgaagttatatctaatagggctattgaaatattaaaaggaaaaaaaggaacaaaaaaacctgtacacccaaacgatcatgtaaataaatcacaatctactaatgacgtatttcctactgcaatgcatattgctatagcaatggaaactagagagaaacttttaccaagtttagtgcttttaaataaagaattaaaaaaaaaagt

SEQ ID NO: 280819 - DNA, 820 bp, Unknown
  Bacterial polypeptide expressing nucleotide sequence isolated from the Sargasso Sea
cttgggctatgtaaaagatgctgcagcaagagcaaataagaatctcaagcttttagaagcaaaaaaacaaaaagtcatttcaagagctgcaaaagaggtttggactaataaacatggtaaagagtttccaattgatgtttttcaaaccggctctggaacaagtacaaacatgaatgcaaatgaggtaatagcaaacctttgctacaaaacttcaaaagttaagattcatccaaatgatgatgtaaatatgagccagagctctaacgatgtaattccaactgtcatgaatttggcttattacttcgactcaacaaagaaattaatgccagcattaaatttactcattgaaactttagagaaaaaagctgaatcagtgaagggaattacaaagacgggcagaacacatcttatggatgccatgccagtcgatatgtctgatgaattaaatgcttggaatactcaacttaaatgctctagagaatcaatagcagttgttctagagaagcttttatttcttcctcagggaggaactgcagttggatcaggaattaatgcacacagaagattttcaaaagaatttgctaaggaactttcaaaacttactggctttaaaacaaagccaagcaaagatttttttagaaacttaagtgcgcaagatttatctgtccagttatctggagaacttaaaaatttagctacaatacttttaaaaatatctaatgatcttagatggatgaatagtggacctttatccggaatctctgaaattgagcttcaggctcttcaaccaggaagcagcataatgcctggaaaagtaaat

SEQ ID NO: 280820 - DNA, 521 bp, Unknown
  Bacterial polypeptide expressing nucleotide sequence isolated from the Sargasso Sea
atctaatgatattcgtttcttaggctctggtccaagagcaggttatggagaattaattctacccgaaaatgaaccaggctcatctattatgccaggaaaagttaacccaacccaatgtgaagcagtaacaatggtttgtgttaaaattataggtaatcataatggtataacaatggcaggatctcatggtcactttgagctaaatgtttttaagccattaattgcccataacatcttgcaatcaatagatttgatggcagatagtacaaataattttgctctttattgtgttaaaggaataaaagctaataaaaaaaaaatacaggaacatctagataattcattgatgcttgtgactgctctagctccttatattggatatgataatgctgcaaaaattgcaaaaaatgcgcttaaaaataatacaactttaaaacatgagactttgaaaacaggattaataaatgaaaaagaataccataagatagttaatcccaaaaaaatgatttatcctgtgtaac

SEQ ID NO: 280821 - DNA, 354 bp, Unknown
  Bacterial polypeptide expressing nucleotide sequence isolated from the Sargasso Sea
aatgaaattaagaaaagaattcgatagcattggaagtgtcaatgttcctaatgacaaattatggggagcatctacacaaagatctaacaaattttttaatattggtaaaattctagttaatatttctatcatcaaatctattgctattattaaaagatctgcagcaatagttcacgcaaaggaaaaattaatagataataaaatatcaaaagcaattattagagcgtcagatgaagtaattaaaggtaagttagatgataatttcccattaaaagtttggcaaacaggctctggaactcagacgaatatgaatgtaaacgaggttattgccaatcgtgccatagaaataatggg

SEQ ID NO: 280822 - DNA, 655 bp, Unknown
  Bacterial polypeptide expressing nucleotide sequence isolated from the Sargasso Sea
atgaaatataggattgaaaaagacacaatgggcgaagtaaaagtaccaaaagatgccctatggggcgcacaaacccagcgtgcattagaaaactttaagattagtggaattaagttcgtctttccatttggaagaagtttcatagaggctttgggaatcatcaaatatgccgcggcttcatcaaatcataaacttaaactgcttgatgcaagaaaagccaaagcaataaaaattgctgcaaaggaagttatttcaggtaaacatgataatcaatttccacttgatgtttttcaaactggctctggcacaagcacaaatatgaatgcaaatgaagtaattgccaatttagcctctaaaaaagctcgtattaaaattaatccaaatgatcatgtaaacatgagtcaaagtagcaatgatgtgatcccaactgcaatttgtatttctgctttattagatacacatagattattgcagccatcactaaattttttaataaagactattgataagaaagctttatctttaaagggccaaattaaaactggaaggactcacctcatggatgctatgccaattgatttttctcaaagaattatcaggatggagcgctcaattaaaaatttgtcaggcatcactcaaagcttctataaaagaa

SEQ ID NO: 280823 - DNA, 808 bp, Unknown
  Bacterial polypeptide expressing nucleotide sequence isolated from the Sargasso Sea
acacttgggcaagagttttcttggttatcaatcacaacttcaggattgtattaccagaataaaaattgcaatcaaagaaatacattatctagctcaaggagggacagctgtaggtacaggtataaacactaagaaaaactttgataagaaaatttgtagagaaattagtaaattaacaaatttaaattttaagccttcaaataataagtttgcagccctcgcagcacatgactcaattgtaaatttttctggaactctgaatactacggcagtttgtttactaaaaatcgcaaatgatattagatttcttggatcaggaccaagagctggttatggtgaattaaatttacctgcaaacgagcctggctcttctataatgcccggtaaaataaatcccactcaatcagaagcagttactatggtttgtgtaaaggtaattggcaatcatacaggtatcacaatcgcaggatcccaaggtcaatttgagcttaatgtattcaagcctttaattgcgcacaatatcttgcagtcaattgacctaattgctgacagctcaaaaaattttgcaaaattttgtgtaagtggcattaaagctaacaaaaataaaataaaaaaagatttagaaaattctttaatgttagtaactgcgctggcaccaactataggttacgacaaagcagcgaatattgcaaaaaaagctttaaagaataatactaccctaaaaactgaggtaattaaaagtggtctaatgaatgaaaaagaatatcacaaaattgtagatccaaaaaaaatgattcaaccagcatag

SEQ ID NO: 280824 - DNA, 877 bp, Unknown
  Bacterial polypeptide expressing nucleotide sequence isolated from the Sargasso Sea
ggtaaggtaggttcaaagcacccaatacacccaaatgatcatgtcaatatgtctcaaagttcaaatgatacattcccttcagcaattcatattgcgatagccacagaatttttggagcacacgctaccaaagatgaagtttttacataaatgcctgaaagagaaacaaaataaatttcaaaaaattataaaaattggtaggactcacactcaagatgctacaccgcttacacttggtcaggaatttagtggttacacatttcaaattgagcaagctatgaaacgcctaagccattcattaaaggatatattatttttagctcaaggtggtactgcagttggaactggaattaatgcctctaaaactttttcgagacgggtagcccaggaaatttcaaaaattacaaaaataaatttcaaaacggctcctaataaatttgaagcactagctgcaaatgacgctatagtagaattttctggctcattgaaaaccgctgcctcaagcctctttaagattgctaatgatattagattcctaggttccggtcctagatgtggtcttggtgaactgagcctgcctgagaatgaaccaggtagttctataatgccagggaaggtaaacccaactcaagtagaagctactacaatggtttgtattcagataatgggcaatgatgccgcgataggatttgcggggagccagggtcattttgagttaaatgtttacaaaccgctattgagctacaatacgcttcaatcactacaattacttggtgacgcttgtaattctttcgcaaaaaattgtgtaaagggattgaaagcaaatgaggttgagattaaaaggcacctcgataatagtttaatgcttgtaactgctt

SEQ ID NO: 280825 - DNA, 877 bp, Unknown
  Bacterial polypeptide expressing nucleotide sequence isolated from the Sargasso Sea
ggaagtaaaaaacctattcacccaaatgatcatgtaaatttatctcaatcatcaaatgatacctttccaacaataatgcatgttgcaataaatgagttatcaataaaaaatttgattccaaatctaaaagagttaataaaacaatttcaaaaaaagaaaaaaatatttcaaaatataattaaaataggaagaactcatactcaagatgcaacgccaattactttaggtgatgagttttctgcgttttgtactcaattacaagcctgtttaaaaagaatagaaatttcaaaatcagaattgagatatcttgctcaaggtgggactgccgtaggttctggaattaatgcaccaaaaaaatttgataaggtattttgtaaatatttgaataaacttacttgggataattataaaccatctcaaaataaatttgagtctttagcatctcatgatccactaattaatttttcaaattctttaaaaacattatcaatttcattattaaaaataataaatgatattcgatttttagcatctggacctagatcaggtttaggagagctaattttgcctgctaatgaacctggatcatcaattatgccaggaaaggtaaaccctactcaaattgaagccttaagcatggtatgtgttcaagtaataggaaatagtacaactgtagatcttgctggttcaaatggtcattttcaattaaatacatataaaccagttatagccttaaacattctacaatctgtaaatctccttagtgatggtattaaaagttttaataaaaattgtttaaaaggattacaagcaaacaaagaaacaattcataatcatttaaataactctttaatgcttgtaactgctttaaataaaa

SEQ ID NO: 280826 - DNA, 634 bp, Unknown
  Bacterial polypeptide expressing nucleotide sequence isolated from the Sargasso Sea
ttggcagaaaaaaaattcagaatcgaaaaagacagcatgggtgaactgaaggttcctgaggagtctaaatggggccctcaaactcagcgtgccatcgataattttcagatcagtgatcataaaatgcctgccggttttattcgttccctagccctcttgaaatgggggctcgcgaatgcaaataaagacctcggcctccttccaaaagagaaagcgtctgcgattgcagataccgctatagagatctatgaagggagccattcttcagagttcccattggatgtattccaaaccgggtctggtacaagcaccaatatgaatatgaatgaagtcatatccaatctatcatcgacagattcaaatccagtgcatccgaacgatcacgttaatatgggacaaagcagtaacgatgtcattccttctgccattaatgtggatgctgtcctcacccttaccaataatttgattccttcaatgagacatttaaaaaatagcattgaggaaaaggcaaaatcaattggggatttacccaagaacggacgcactcatctcatggatgcgatgcccgttactttctccctaagaaatgagcgcttggtctgcacaaatcgaggattccataacacaatatgaa

SEQ ID NO: 280827 - DNA, 646 bp, Unknown
  Bacterial polypeptide expressing nucleotide sequence isolated from the Sargasso Sea
gttaacaaatctcaatctacaaatgatgtatttccaactgcaatgcatatttctgtagcaacagaaactattgataaacttttaccaagcttaaagctattagaaatttcgttgaaaaaaaaaagtaaagaatttaaaaaaatcgttaaaattggaagaacgcatcttcaagatgctactccattatcactaggtcaagaattttctggatatcatgaacaggttaaaaaaagtattaatagaataaaattttgcttagaagatatttattttttagcacaaggaggtacagctgttggcactggtataaattcaaaaaagaattttgataaaaagataattaatgagatcagaaaattttgtaagattaaatttaaacctgcaccaaataaattttcagaattagcagcacacgatgcgatagttaatttttcaggttcattaaattcatgtgctgttgctttaataaaaatttcaaatgatataaggtttttaggctcgggacctagagctggttatggtgaactattgctacctgaaaatgagccaggatcatctataatgcctggaaaagttaacccaacgcaatgtgaagcggttacaatggtatgtgcaaaagttataggaaatcatacaggaattactg

SEQ ID NO: 280828 - DNA, 502 bp, Unknown
  Bacterial polypeptide expressing nucleotide sequence isolated from the Sargasso Sea
atgactattaaaaaaagaatagaatttgacagtttaggttccaaaaagatagataaaaataaactctggggtgcacaaactcaaagatcattagaaaattttagaattggcagtgaaaaaataccatcagaattgattattgcgttgggtcagcaaaagaaagcagctgcagaagcaaacatagaactaggtgttatagataaaaaattgggatcatttatatcaaaagcctgcgatgatattattaatttaaaacttatagatgagtttccattatcagtatggcaaactggatcgggaactcaaactaatatgaatgcaaatgaagtaattagtaatcatattatcaaaaaattaaaaggaagaattggaagtaaaaaacctattcacccaaatgatcatgtaaatttatctcaatcatcaaatgatacatttccaacaataatgcatgttgcaattaatgagttatcaatgaaagattttattccaaatctaaaagatc

SEQ ID NO: 280829 - DNA, 442 bp, Unknown
  Bacterial polypeptide expressing nucleotide sequence isolated from the Sargasso Sea
taaattaccatttaaacccgcaaaaaataagtttgcagcacttgcggcccacgatgcaattgtaaacttttctggaactttaaatactacagcagtttgtttaatgaaaattgcaaatgatattagattcttaggatctggtccgagagctggttacggagaattaattttacctgaaaatgaaccaggatcttcaataatgcctggaaaagtaaatcctacacaatgcgaagctcttacaatggtttgtgtaaaagtaattggaaaccataatggaattacaatggctggatcacatggtcattttgaactaaatgtttttaaacctttaattattcataatatacttcagtcaattcaaattttatcagatagtataaatagttttgcaaaatattgtgtaaaagatttaaaagcagacaaaaataagattaaggaacat

SEQ ID NO: 280830 - DNA, 810 bp, Unknown
  Bacterial polypeptide expressing nucleotide sequence isolated from the Sargasso Sea
ttaaaggtgtggcaaacagggtttggaacacaaactaatatgaatgttaacgaggttatatccaacagggcaattgagattataggtggaaaaaaaggatctaaaaaaccagtacatcctaacgatcacgttaacaaatcacaatctacaaatgatgtttttccaactgcaatgcatattgcaatagcactggaaacaaaaaataaacttttaccttcattaaacttattaaataaagagttaaaaaaaaaagttaataaatttagaaaaattgttaaaataggtagaactcatttacaagatgcaactccgatttccctgggacaagagttttcaggttatcaatctcaattagaaaaatgtatagatagaataaaaaaagcattggatgaaatttattatttagcacaaggtggaacggctgtgggaacaggaataaatacaaaaaaaaattttgataaaaaaattattaatgaaataaaaaaaataacaaaactaccatttaaacctgcaaaaaataaatttgctgcccttgcagctcatgattcaattgttaacttttcaggtactttaaatactgcttctgtctgcttaatgaaaattgctaatgatataagatttttgggctctggtccaagagctgggtatggtgagttattgttacctgaaaatgagcctgggtcatctataatgccaggaaaagtaaatccaactcaatgtgaagctgtgactatggtttgtgttaaagtaattggaaatcacaatggaataacaatggctggatcacacggacactttgagttaaatgtt

SEQ ID NO: 280831 - DNA, 682 bp, Unknown
  Bacterial polypeptide expressing nucleotide sequence isolated from the Sargasso Sea
atgagtcaaaaaacgagacaagaacaagacagtttaggcaaaattaaagttgccaacactaatctatggggggcgcaaactcaaagatcattaaaaaattttagaattggcaataataaaatgccaattgagataatttatgccttggcaattattaagatgtcatgtgcaaaagctaaccaaaaacaaaagcttctaagtcctaaattagctcgtgcaattattgatgctgcaaaacaagtttctttaggaaagcacgacgaacatttccccctttctgtatggcagactggatctgggactcaaacaaatatgaatgtaaacgaggttattgccaatatagcaaacaggaaaatatcaaaaaaacttggcacaaattaccctgttcatccaaatgatcatgttaataaaagtcagtcaactaatgatagctttccttcggctataaatattgcatctaaattaaaaattataagcgaacttctcccagcactaagaagtatggaaaaagtattaaaatcccaatctcagaaatggaaagatattataaagattggaagaactcacttacaggatgcaactccactttcactagggcaagaattttctggatatcaggcgcaaatcaattcaaatatacgaagagttgagggagctttaaccaacttgagttacctagctc

SEQ ID NO: 280832 - DNA, 718 bp, Unknown
  Bacterial polypeptide expressing nucleotide sequence isolated from the Sargasso Sea
aagtaaattagcgattggtggtactgcagttggtacaggaatcaatgcaccagagaatttcggcaaagatgtagcagtagagatttcaaattcattaggaattaatttttttgaagttgagaaccattttactcgtcaagggtcacgagaagaaattgttcaattgtcaggatctttaaaagcatttgctgtatctatgtttaaaatagcaaatgatattaggtggatgggcagtgggcctgtctcaggactaaatgagttaatcattcctccattgcagccaggatcttcaataatgcctggaaaagttaatccagtaatacctgaaatggtgatgcaagtttccgcacaagtaataggaaacgacaatacaattactttttcttcatcaaatggtaactttgaattaaatacaatgttgcctgttatggcatacaatttactagaaagtattgaacttttgactacaagcactgatgtatttgaaaaaaaattaatcaatcatttagaagcaaatactgaaaagcttgatgaaaatatccaaaaaaattcaattttggttactgccctcgtgcctgtcattggttatgacaaatctgctgaagtagcaaaagaagcgatgtcacaaaacaaaactataaaagaagttttaattgataaaaacttgatttcaattgaagaaattgatgagcttttagacatagaaaaactaatttaa

SEQ ID NO: 280833 - DNA, 838 bp, Unknown
  Bacterial polypeptide expressing nucleotide sequence isolated from the Sargasso Sea
tactttgatataggagacgtattggtcaggccaaagttaataaaatctatagctattataaaaaaagcggcagctgttacgaactataaaaataaggatattagttcaaaagtttataaatcaattgtacgagcttctaatgaagttatggcaggaaaattagataatcatttccctcttaaagtttggcaaactggttctggtactcaaacaaatatgaatgtgaatgaagttatttcaaacagagccattgaaatgcttaaagggaaaatgggtacaaaaaaacctgttcatccaaatgatcatgttaataaatctcaatcaacaaatgatgtatttccaacagcaatgcatattgctattgctatagaaactagagaaaaactattaccaggcttaacattgttaaataaggaattaaaaaagaaagtaagagaatttaaaaaaataattaaaatagggagaacacatttgcaagatgcaactcctctatcattaggtcaagaattttctggctaccaatctcaactagaggaatgcattaaaagaattaaagtttcactaaatgaagtttattatttagcacaaggtggtacagcggtaggcacaggtattaataccaaaaagaattttgataagaaaatagtaaatgaaataaaaaaaataactaagttaccttttaagccagctaaaaataagtttgctgctcttgctgctcatgatgtaatagtaaattattcaggtacattaaatacaactgcagtatgtttgatgaaaatagcaaatgatattagatttttaggttctggaccgagagctggatatggagagttgatat

SEQ ID NO: 280834 - DNA, 739 bp, Unknown
  Bacterial polypeptide expressing nucleotide sequence isolated from the Sargasso Sea
atgaaatacagaactgagtttgacagtataggaaaaattaaagtacctggtgataagtattggggagcttcaactcaaagatcaaataaatattttaatattggtgactttcttgttagacctatagttatcgagtctatagccgttataaaaaaagcagcagccattgttaatgccaagaataaagatttagacaaaaagatttgtaagtttataattagagcctcagatgaagtaatcaaaggtaaattaaatgataatttccctctaaaggtttggcaaactgggtcgggcactcagacaaatatgaacgttaatgaagtaattgcaaatagagcaattcaattaatgggaggcaagatgggaagtaaaactccggttcaccctaatgatcatgtaaataaatctcaatcaactaatgatgtttttccaacagcaatgcatatagcaatcgcaataaagactagagaaaagttattgccttctcttaagttattaaataaggagctccaaaaaaaaactaggcaatttaaaaatattgtaaaaattggtaggactcatttacaagacgcaaccccaattacattaggtcaggaattttctggttatcaatcccagctaaacaaatgtatagaaagaatagaacacgcacttaaagaaatatactttttagcacaaggaggcactgcggtaggaacggggctaaatacaagaaaaggttttgataaaaaagtttaaa

SEQ ID NO: 280835 - DNA, 877 bp, Unknown
  Bacterial polypeptide expressing nucleotide sequence isolated from the Sargasso Sea
aaaaaaatctaaaagttttaacaaaattataaaacttggaagaacacatttacaagatgccacgcctattactttgggtcaggaattttctggataccacgctcaattagataaatgtataaaaagaatagaaattgcattacaagaaatttattttttagcacagggtggaacagctgtaggtacggggctaaatactaaaaaaggttttgataaaaaaatagtttcagagataaagaaaattactaaacttccttttaaaccttccaaaaataaatttgcagctctagcctctcacgattctattgttaatttttccggtacaatgaatacaacagcagtttgtttaatgaaaatagctaatgatattagatttttaggatcaggcccgcgcgcaggatatggagaacttattttaccagaaaacgaaccaggttcgtctattatgcctggaaaagttaaccctacacaatgtgaagctgtaacaatggtttgtgtaaaagtaataggaaatcataatggaattactatggctggatctcatggtcattttgagcttaatgtatttaaaccattaataattcataacattcttcaatcaatccacataatgtctgactcggcaaaaagttttgctaaatattgtgtaaaaggtttaaaagcagataaaaagaaaattaaaaaatttttagataattccttaatgctagtaacagctttatctcccaaaataggttatgataatgcaactatgattgcaaaaaatgctcatagaaatggaacaactttaaaagaagaagctttaaaatcaaaattaatttctgaaaaagattataataaaattgttgatcccaaaaaaatggtcagcccgcactaa

SEQ ID NO: 280836 - DNA, 802 bp, Unknown
  Bacterial polypeptide expressing nucleotide sequence isolated from the Sargasso Sea
aaaaaaaggttcaaaaaaaccagttcatccaaatgatcatgtaaataaatctcaatctactaatgatgttttccctactgcaatgcatattgccattgcaattgaaagtaaggataagctcttaccagcacttgaattattaaataaagaattaaaaaagaaagtttctaaattcaaaaatattgtaaaagttggaagaacacatctacaagatgcaactccactatctttgggccaagaattttctggatatcaatcgcaactagaggattgtattaagagaattaagaatgcattaagtgaaatttacttgttagcgcaaggtggaactgctgtagggactggaattaacagtaaaaaaggttttgatagaaaaattattagtgaaattaaaaaaattactaaactaccttttaaaccaactaagaataaatttgcagcacttgccgctcatgatgaaattgtaaatttttcaggaacacttaacactactgcagtttgtttaatgaaaattgctaatgatattagatttttaggttctggacctagggctggttatggtgaattgattttaccggcaaacgaacccggatcatctataatgccaggtaaagttaatcctactcaatctgaggcggtaacaatggtttgtgtaaaagttataggaaatcacaatggtataacaatggcaggatcgcacggtcactttgaactaaatgttttcaaaccgttaattgcccacaacattttacagtcaatagatttgttagctgatagttctaaaaattttggtttgtattgc

SEQ ID NO: 280837 - DNA, 927 bp, Unknown
  Bacterial polypeptide expressing nucleotide sequence isolated from the Sargasso Sea
aaatgaggtaatttcaaatgttgctataaagaatttaggaggggaactaggaagtagagaccctgttcatcctaatgaccatgtaaacaaaggtcagtcctctaatgatgtaattcctacagctatacatattgctgcttgcataggaatatcaaattcgctaatcccttcacttaagattcttaaagactccttaaataaaaaatctaaagaattctggagtgtgataaaaactggaagaacgcacctacaggatgctactcctataaggttaggtcaagaattcttaggatatgcaggtcaaatcgaagaatcaataaaaagagcagaatctgcattaagtgaattgtctgttttggctctaggaggaacagcagtaggaacaggaataggaatgaaaaaggggttttctgagaaagtaataaataaactatctgagagattcaagataaaattcagtgaatcaaataatcattttcatagtcaaagcactattgattcaatagttgcagggtcaggaaatttaaaatcaatagcaattagtctacttaaaatagggaatgatataagatggctaggttcaggtccaagagcaggaattggagaaatatctcttccagaagttcagcctggtagctctataatgcctggaaaagtaaatcctgttatagcagaatcacttacaatggcatgcgctcaggtcattggaaacgaccaaactatcaacatagctggccaatcaggaaatttcgaacttaatgttatgatgcctgtagctgcatataatattctgcaatctatagaccttctttcttcttcatctaataattttgctattcagtgtattgatggattgaaatctaccaaaaagggtcctgaaacagttcaaaatgggttagctatttgtactgctcttgcaccaaaaat

SEQ ID NO: 280838 - DNA, 922 bp, Unknown
  Bacterial polypeptide expressing nucleotide sequence isolated from the Sargasso Sea
aaatcttttgtcagttctctggatttgattaaagatgctgctgcaagggctaactccaaattaaaattactacctgctaataaagctagggctatatcaagagcgtctaaggaggtttggcaagaaaaacatcatcatgaatttcctatagatgtttttcagacaggctctggaaccagctctaatatgaatgctaatgaagttattgcaaatttagcatcaaaaaattctaaattagatattggagcaaacgatgacgtgaatatgagtcaaagcagcaatgacgtaatcccaacggcgatcaaagtttctgctcatatggatctaactaaaaagctttatccagctttagataaattaataaatgaaattgataagaaagctgagtctgtttcaggcattgcaaaaacaggaagaacacatcttatggatgctatgccagttgacttctctgatgagcttaaagcttggtcaagccagttaaatgcatcgcgtaaaatgctaggagttattgaggagagatttttagaaatgcctcaaggtggcactgctgttggaagtggcataaacgctcacaagcagtttgctaagatttttgcacaagaattgactaagttatctggaagtaactgtaagtatgttccaagctcaaatttcttccatgagctaagcgctcaagattgctctgttcaactctctggagagttaaagaatcttgccgtcattttaatgaagatttcaaatgatttgcggtggatgaatagtggaccgttagcaggtttatctgaaatcgagttacaagccttgcaaccaggaagtagcatcatgccaggtaaagtaaatcccgttataccggaggcagtgacaatggcctctgctgatgtcataggaaatgatgtttctataacggttgcgctcaagc

SEQ ID NO: 280839 - DNA, 741 bp, Unknown
  Bacterial polypeptide expressing nucleotide sequence isolated from the Sargasso Sea
acttccccagactgcttgcattagctcagggaggcacagctgtgggtaccgggcttaatgcaaaacccaagttcgctgaggtatttgctaaagaagtcaaaacatatacaggattaccattcgtaactgcagaaaataagttcgaagcacttgcagcgcatgacgcattcgttgagatgtctggtatgcttaatacaattgctgcaggactatataaaatagctaatgatatccgcctattaggatcggggcctcgttcggggctaggtgaactaagtttacctgaaaacgaaccaggttcatcgattatgcccggcaaggttaatccaacccagtgtgaagcaatgactatggtctgcgcccaagtcatcggtaaccatacaaccattagctttgctggtagtcagggacatatggagttgaatgtattcaaaccggtacttgcttataatctaattcaatccatacgactactcactgatgcttgtattagttttgctgataattgtattcagggtatagaaccaaatcgtgaaaacataacaacacttatggaacgatcattaatgcttgtgacagctttagcacctaaaatagggtatgacaatgcaacaatagtcgccaaaactgcacataaaaaaggaacaactctcaaagaagaggcagtcgctctaggttttgtcaccgaaacagagtttgatgagattgtccgccccgagcagatgattaaaccgaagtaag

SEQ ID NO: 280840 - DNA, 880 bp, Unknown
  Bacterial polypeptide expressing nucleotide sequence isolated from the Sargasso Sea
agcaataattaaaagatctgctgcaatagttcataaaagagataaatttatctcaaacaaaatagctaatgcaataattaaagcctcaaatgaggttattgctggaaagttagatgaaaattttcctttaaaagtctggcaaacaggatcaggaactcaaacaaatatgaatgtaaatgaagttattgctaatagagcaatccaaattcttaatggtaaaaaaggatcaaaaaaacctgttcacccaaatgatcatgtaaataaatcacaatctacaaacgatgtttttccttctgctatgcatatttcaatagcaaaagaaacaattggaaagttaattccgaatttaaaaattttagaaaattctttaaggaaaaaatccgttgaatttaagaaaattgttaaaatcggaagaactcatctacaggatgcaacaccacttactttagggcaagaattttctgggtaccatgaacaaataaaaaaatgtttggatagaataaaatattgtctcaatgacattctttttttagcgcaaggtggcaccgcggtaggaacaggaataaatacaaaaaaaaactttgataaaaaaattgttaaagaaataggaaaattttgtaaaatcaaatttaaacctgcgccaaataaattctctgaactcgctgcacatgatgcaattgttaatttttctggggcactaaatacttgtgccgttgcattaatgaaaatttcaaacgatataagatttttggcgtctgggcccagagcaggttatggtgaattaattttaccggaaaacgaacctggctcttctattatgcctggcaaagtaaatcctactcaatgcgaggctgtaacaatgggttgtgcaaaagtaata

SEQ ID NO: 280841 - DNA, 922 bp, Unknown
  Bacterial polypeptide expressing nucleotide sequence isolated from the Sargasso Sea
aagatcaaaaaaatactttgatattggagatgtattagtcagaccaaagttaataaaatccatagctattataaaaaaagcagctgctattacaaattataaaagcaaagatattaattcaaaaatttataaatcaattgtacgagcttctaatgaagttattgcgggaaaattagataatcatttccctcttaaagtttggcaaactggttctggcacacaaacaaatatgaatgtgaatgaagttatctcaaatagagcaattgaaatacttaaaggaaaaaagggtacaaaaaaacccgttcatccaaatgatcacgttaataaatcacagtcaacgaatgatgtatttcccacagcaatgcatattgcaatagccatggaaactagagaaaaactattaccaagcttaatattattaaataaagaattaaaaaaaaaggtaagtgaatttaataaaatagtcaaaataggtagaacacaccttcaggatgctacccctttatcattgggtcaagaattttctggctaccaatctcaactagaagaatgcattaaaagaataaaagtttcactgaatgaaatttattatttagcacaaggtgggaccgcagttggaactggtataaataccaaaaaaaattttgacaaaaaaatagtaaatgaaataaaaaaaatcaccaagttaccttttaagccagctaaaaataagtttgctgcacttgctgctcatgatgcaatagtaaattattcaggtacattaaatacaactgcagtatgtttgatgaaaatagcaaatgatgttagatttttaggttcaggacctagagcaggatatggagagttgatattgccagagaatgaacctggatcatcaattatgcctggtaaagtaaatccaactcaatgtgaggctgtaaca

SEQ ID NO: 280842 - DNA, 589 bp, Unknown
  Bacterial polypeptide expressing nucleotide sequence isolated from the Sargasso Sea
tatgaaaactagaaaagaatatgatagcatcggtataattgatgtgcctgtggataagtattggggagcttcaacccaaagatcaaataaatattttgatattggagaaattttagttgaactaactgtaataaagtcaattgcaattataaaaaaagcaatagctaaagtgaattttaaaagtgggtctttagataaaaaaattagtagcgcaataattaaggcttcaaatgaaataatatctggaaaattaaacaataactttccattaaaagtttggcaaaccggctctggaacacaaacaaatatgaatgtaaacgaggtaattgctaatagggcaatagaaattttaggtggtaagaaaggttcaaaaaagcctgtacatcctaacgatcatgtaaataaatctcaatcaactaatgacgtttttccaacagctatgcacatgtcaattgctttaacagcgaaaaataaattgatacctagtcttactctgcttaataaagaattaaaaaataaatctaaagaattcaataaaataatcaaagtcggacggacgcacttacaagatgctacacctttaactttg

SEQ ID NO: 280843 - DNA, 253 bp, Unknown
  Bacterial polypeptide expressing nucleotide sequence isolated from the Sargasso Sea
gatggtattcgtagttttaatgatcagtgtgctgttggtattgaacctaattattcggcaattgaaacaaatcttcaaaattcactcatgttagtaaccgcattaaatccccatattgggtatgacaatgcagctaaaattgcaaaaaaagcacatgctgatggatcaactttaaaagaagctgcgttggccttgaaactattaactgaatctgattttgatcagtgggttgacccaactaaaatgatttaaa

SEQ ID NO: 280844 - DNA, 691 bp, Unknown
  Bacterial polypeptide expressing nucleotide sequence isolated from the Sargasso Sea
tatgaaatacagaacagaatttgatagtataggaaaaatcagtgttcctggtgataagtattggggggcctcaacagaaagatcaaataaatattttaatattggagattttttggtcagacctttagtgattcattcaattgcaatcataaagaaagctgcagcaatagttaatactaaaaataaagacttgagccctaaaataggtaagtacatcattaaggctgcagaggaagtaataaaaggtaagcacgataatcatttccctctaaaggtttggcagacagggtcgggtactcaaacaaacatgaatgtaaatgaagtgatagctaatagagcaattcaaatgatgggtggaaaattagggtcaaaaaaaccggttcatccaaatgatcacgtaaataaatcacaatccacaaatgatgtttttcctacagcaatgcatattgctatcgccattaaaacaaaagagaaacttttaccatcattaaaattacttgaaaaagaattagctaaaaaatcaaaagaattcagaaatatcgtcaaagtaggaagaacacatttacaagatgcaacgcctttgactttaggtcaggaattttcaggttaccatacccaactaaaaaaatgtattattagaatagagagtgccataaaagaaattcatcatttagctcaaggaggtaccgct

SEQ ID NO: 280845 - DNA, 664 bp, Unknown
  Bacterial polypeptide expressing nucleotide sequence isolated from the Sargasso Sea
atgaaattaagaaaagaatttgatagtattggaagtgttaatgttccaaatgataaatactggggagcgtccactcaaagatctaataaatttttcgatatcggtaaaattctagttaatatctctataattaagtctattgcgattgtaaaaagatcggctgcaatagttcacgcaaaagataagttaatagatataaaaatatctagagcaattataagagcttcagatgaagttattaaaggtaaattggatgaaaattttcctttaaaagtttggcaaactggttccggtacacaaactaacatgaatgttaacgaagtaattgcaaatcgagcaatagaaattttaggtggaaaaaaaggaacaaaaaaacccgtacatcctaatgaccatgtaaataaatctcaatcaactaatgatgtttttccaactgcaatgcatatttctattgctaaagaaactattgataaattattgcctaacttaaaaattttagaaaaagaattaaaaaaaaaatctaatgaatttaaaagtatagttaaaattggtagaactcatctacaagatgcaacgccaatttctcttggacaagaattttctggatattacgtacaaattaaaaagtgtatagaaagaattgagtatgctttaaaagaaaaat

SEQ ID NO: 280846 - DNA, 864 bp, Unknown
  Bacterial polypeptide expressing nucleotide sequence isolated from the Sargasso Sea
tatgaaatataggattgaaaaagacacaatgggtgaagtaaaagtcccaaaagatgccctatggggcgcacaaacgcagcgggcattagaaaactttaagataagcggaattaagtttgcttttccatttggaagaagttttgtagaagctttaggaatcatcaaatatgccgcggcttcatctaatcaaaaacttaaacttcttgatgcaagaaaagcaaaagcaataaaaattgctgcaaaggaggttattttaggcaaacatgataatcaatttcaacttgacgtttttcaaacaggttctggtacaagcacaaatatgaatgcaaatgaagtaattgccaatttagcttctaaaaaagctcgtattaaaatcaatcccaatgatcatgtaaacatgagtcaaagtagcaatgatgtgatcccaactgcaatatgtatatccgctttattggatacacatagactattgctgccatcgctagattttttaacaaagactattgataagaaagcttcatctttaaagggccaaattaaaactggaagaactcacctaatggatgccatgccaatagacttttctcaagaattgtcaggatggagcgctcaattgaaaatttgtcaggcatccttgaaagcttcaataaaagaaatatcctctcttcctcaaggtggaactgcaatcggtactggcgtaaatgcccatagagattttggaaaaatatttgcctcagaggttaataaaatatcaaaacttaaagtaaaaacttcttcaaattactttcaatcactaagcgcacaagactctgccgcccaattatcctcgagtgttaaaaatttaagtttagttttaacaaaaat

SEQ ID NO: 280847 - DNA, 634 bp, Unknown
  Bacterial polypeptide expressing nucleotide sequence isolated from the Sargasso Sea
ttctaaaataacaagaatagattttaagacggcttctaataaatttgaggcattagctgcaaatgaccctatagtcgaattttccggttccttgaaaaccgctgcctcaagcctctttaagattgccaacgatattaggtttctaggttccggccctagatgtggtctcggtgaactaagcctccccgagaatgaaccaggtagttctataatgccagggaaggtaaatccaactcaagccgaagccacaactatggtctgcatccagataatgggtaatgatgccgcaatagggtttgctggaagccaggggcactttgagttaaatgtttataaaccgctattgagttataatacacttcaatcacttcaattacttggtgatgcatgttattcttttgcaaaaaattgtgtaagcgggttaaaagcaaatgaggttcaaattaaaaagcaccttgataatagtttaatgctcgtaaccgctttggcaccaaaaatcggttatgacaatgcaaccaaaattgcaaaaaatgcacataaaaataatacaactctcagaaccgaggctattaaatcaggattaattgatgacaaggaatttactaaaattgtaaatcccaaaaatatgatttag

SEQ ID NO: 280848 - DNA, 508 bp, Unknown
  Bacterial polypeptide expressing nucleotide sequence isolated from the Sargasso Sea
atgatatttagatttttagcatctggacctagatctggtttgggagagttaaccctacccgctaatgaacctggatcatcaattatgcctggaaaggtaaacccaacacaaattgaagcattaagtatggtgtgtgttcaagtaattgggaatagtacgactgtggatttagcaggatcaaatggtcattttcaattaaatgcttataaaccagttatagcctttaacataattcagtcagtaaaccttcttagtgatgggattaaaagttttaataataattgcttaaaaggactaaaagcaaacaaagaaattattgataatcatttgaataactctttgatgcttgttactgctttaaacaaaagtcttggatacgataatgcagcaaaaattgcaaaaaaagcctttactgagaatacaactcttaaggaagcagctttaaaattaaagttaatttctgaaaaagattttgatataatagttgatccaaaaaaaatgatttaat

SEQ ID NO: 280849 - DNA, 464 bp, Unknown
  Bacterial polypeptide expressing nucleotide sequence isolated from the Sargasso Sea
aatgtctacaaaaaaaagaatagaattcgatagcttaggtcccaaaaaaatagataaaaataaattgtggggtgcacaaactcaaagatcattagaaaattttaaaattggtgatgagaaaattccaaatgaaattataattgctttgggtcagcaaaagaaagctgcagctcatgctaatatagaattgggtaaattaaataaaaaaattggttatcagattattaatgcatgtaatcatataattaatttaaatttagtaaatgagtttccattgtctgtttggcaaacagggtccggaactcaaactaatatgaatgcaaatgaagtaattagtaattatgtaattaaaaaactcaaaggtaaaattggaactaagtatccgatacacccaaatgatcatgtaaatttatctcaatcttcaaatgatacttttccgacaattatgaatattgcaattaatg

SEQ ID NO: 280850 - DNA, 532 bp, Unknown
  Bacterial polypeptide expressing nucleotide sequence isolated from the Sargasso Sea
atgaaatttagaaaagaaacagatagcatagggtccataaatgttgctgacgacaaatattggggcgcctcaactgagagatctataaagtattttgatataggagaaatattagtaagcaaaactttaataaaagcaattgcagtgataaaacttgccgctgctaaagttcataaaaatgataaacaaattaatgcaagaatttgtgatgcaattgtaaaagcctcaaaagaagtaattttaggtaagctcgatgataattttccattaaaagtatggcaaactggatctggaactcagacaaacatgaatgtaaatgaagtaatagcaaatagggcaattcatatcttgggtgggaagaaaggctcgaaaaaaccagtacatcctaatgatcatgtaaataaatctcaatcaactaatgacgtttttcctactgctatgcatattgcgatcgctattgaaacgaaaaaaaaattattaccctccttgaaaaatctcaataaagaattgaaaataaaaattaataaattta

SEQ ID NO: 280851 - DNA, 961 bp, Unknown
  Bacterial polypeptide expressing nucleotide sequence isolated from the Sargasso Sea
ggaaactttaatagtcactttccactaaaagtttggcaaactggttccggaactcaaacaaatatgaatgttaatgaggttatttctaacagagcaatacagatgatgggagggaagatggggactaaaaaacctgttcatcctaatgatcatgtaaataaatcacaatctactaacgacgtttttccaacagctatgcatatagcaattgttttaaaaactaaaaaaaaattattaccttcactcaaactacttgaaaaggagttgcgaaaaaaagtaaatgaatttaataaaattgttaaattgggtagaacccatttacaggatgctactcccttaacattgggtcaagaattttctggttaccactcacaattaaaaaaatgtattgaaagaattgaaaaagcattagatgaaatatattatttagcgcaaggtggaacagcagtaggaacaggtctaaatactaaaattaattttgataagaaaatagtaaatgaaataaaaaaaataactaaacttccattcaagccagcaaaaaataaatttgcagccttagctgctcatgatgctattgtaaatttttcagggacgatgaatacaacggcagtttgtttaatgaaaattgctaatgatattagatttttagggtcaggtccaagagcaggttatggtgaattaatattacctgaaaatgaaccaggctcgtcaattatgccaggtaaaattaatccaacgcaatgtgaagcagttactatggtttgtgttaaagttataggaaatcataatggaattactatggctggttcgcatggacactttgagttaaacgttttcaaacctttaataattcataatatacttcagtcaataaatatcatggctgactcatcaagtagttttgcaaagtactgcgttaaaggtttgagggcagataagaaaagaattaaatttcttttag

SEQ ID NO: 280852 - DNA, 874 bp, Unknown
  Bacterial polypeptide expressing nucleotide sequence isolated from the Sargasso Sea
aaaattaaaaaaattcacccgaatgatgatgtgaataaatctcaatcatctaatgatacatttcctactgccatgaatatggccgcttatcatttaatcgaaagctatactattccatcagttaaagaacttgaaaatacattagctaaaaagtctagaaaatttaaagacattgtcaaaattggcaggactcattttatggatgcgacgccactttctcttggcatggagtttagtggttatgctacacaactaaaaaacggaattaaagaattgaaacaaagtttagatcacttgtcagaaattgcacttggtggaacagctgtaggtactgggctaaataccccaaaaggatattctaaagttgtagccaaaaaaatatctgaaataacaggatacaaatttatttctgcaccaaacaagtttgaatctcttgcagcaaatgatgcaatagttggggcatctggagcactaaaaaaattagctgttgcattaatgaagattggcaatgatgtaagaatgttagcatcagggcctagaagtggtataggggaaatacttttaccctctaacgaacccggatcttctataatgcctggaaaagtaaaccctactcaatgtgaagcattaaccatggtctgtgctcaagtaattggaaatgatgttgcaactacagttggcggaatgaatggtcattttgagttgaatgtatataagcctttaatggcttataatatattaaactcttcaagattaattgctgatgcttgtaattcttttaataataattgcgcaaaaggtatagagcctaataaaaaggttattgaaaatcatctaaacaattctttaatgctagtaacagcattaaacaatc

SEQ ID NO: 280853 - DNA, 973 bp, Unknown
  Bacterial polypeptide expressing nucleotide sequence isolated from the Sargasso Sea
accagtgcatccaaacgatcatgtcaataaatctcaatcaacaaatgatgtgtttcctactgcaatgcatatgtcaattgcaattacagcaactaacaaactgataccttcattaactttattaaataaatatttacagaaaaaagctagagaatttaaaaaaattgttaaagttgggaggacacatttgcaagatgcaacaccattaacattgggtcaagaattctctggttatcattcacagctttcaaaatgcattgagagaataaaaggtgctctaagtgaaatatactatctagcccaaggaggtactgcggttggaactggtattaatacaagaaaaggttttgataaaaaaatagtcgcagaaataaaaaaaattacaaaattaccttttaagcctgcaccaaataaatttgcatccttagcggcacacgactctatcgttaatttttcaggaaccttaaatacgacagcagtttgtttaatgaagattgctaatgacataagatttcttggatctggtccgagggcaggatatggagagcttattcttccggaaaacgaacccggttcttcaattatgccaggtaaagttaatccaacccagtgtgaagcagtaacaatggtttgtgtaaaggttattggaaatcataatggaattacgatggcaggatctcatggtcattttgaactgaatgtttttaaaccgcttataattcataatattttacaatctattcatataatgtctgactctgctaatagctttggcaaatattgtgttgctggaataaaagcagataaaaaaagaataaaagaattactagataactcattaatgttagttactgcccttgcgcctcatattggatatgataacgctgcgaaaatcgctaaaagagcgcttaaaaataaaactcgtttaaaatatgaagctttaaaatctgggctgataaatgagaaggactat

SEQ ID NO: 280854 - DNA, 571 bp, Unknown
  Bacterial polypeptide expressing nucleotide sequence isolated from the Sargasso Sea
atgaaatacagaatagaattcgacagtatcggaaaaataaaggttcctggtgataagtattggggtgcttcaacagaaaggtcaaataaatattttgatataggggactttttagtaaggcccatacttatccactcaatagcaattataaaaaaagctgcagctatagtaaacaccaaaaataaagacttagatcaaaaacttagtaaatatattatcaaagcagctgatgaaataattaagggaaaacacgaccagcattttccgttaaaagtatggcaaactggttcaggaactcaaacaaatatgaatgtaaatgaagttatagctaatcgtgctatagaaatgatgggtggcaagcttggttcaaaaaaacctattcatcccaatgatcatgttaacaaatctcaatctacaaatgatgtttttcccactgcaatgcatatcgcaatatctttaaagacaaaagaaaaacttttgccgtcattaaagcttttggaaaatgagctaggaaaaaaatctaaagaatttaaaaaaattgttaaagtaggtagaacacatttacaagacg

SEQ ID NO: 280855 - DNA, 916 bp, Unknown
  Bacterial polypeptide expressing nucleotide sequence isolated from the Sargasso Sea
tattgcaaatagagcaatagaaattatgaagggtaaaaagggatcaaagaaacctgttcatccaaatgatcatgttaataaatcgcaatcaactaatgatgtttttccaactgcaatgcatatctcgattgcagttgaaactatcaacaaacttttaccgagtttaaaattattagaaaattcattggcaaaaaagagtaaagaatttaaaaaaatagttaaaattggaagaacacatctacaagacgctacacctttatcactaggtcaagaattttctggatatcacgagcaagtaaaaaaaagtatagaaagaataaattattgtctaaatgatatttattatttggcgcagggtggaactgctgtaggaacaggcataaattcaagtaggaattttgataaaaagataattaaagaaataaaaaaattttgtaaaataaattttagacctgctccaaataaattttcagaattagcagctcatgatgcaatagtaaatttttctggatctttgaattcatgtgcagttgctctaatgaagatttcaaacgatataagatttttaggttcaggaccacgagcaggctatggtgaacttttgctaccagaaaacgaacctggatcttccattatgcctggaaagattaatcctacgcaatgtgaagctgtcaccatggtttgcgctaaagttattggaaatcacactggtataactgttgcaggtagtcatggacattttgaattaaatgtatttaaacctctaattgcttataacatcttacaatcaattgatattttaggtgatagcgtaaaaaattttagcctatactgtgtcaaaggcataaaagccaataaaaagaaaattaaagaacacttggacaactcattgatgcttgtcactgccctagcacaa

SEQ ID NO: 280856 - DNA, 433 bp, Unknown
  Bacterial polypeptide expressing nucleotide sequence isolated from the Sargasso Sea
tatgaaaaatagaaaagaatatgacagtattggtgaaattaatgtgcctgtggataagtattggggagcatctacacaaagatcaagtaaatattttgatataggggattttttagttagaccaatagtaattaaatcaattgctgtaattaaaaaagctgcagcgatagtaaatgcaaaaaatggagatctagataaaaaattaagtaaaacaattattaaagccgcaaatgaagttatttctggaaaattaataagtcattttcctttaaaagtttggcaaacaggatctggcacccaaacaaatatgaacgttaatgaagttattgcaaatagagcaatagaaattttaggtggaaaaaaagggtcaaaaaaacctgtgcatccaaatgaccatgtgaataaatctcaatcaactaacgatgtttttcct

SEQ ID NO: 280857 - DNA, 808 bp, Unknown
  Bacterial polypeptide expressing nucleotide sequence isolated from the Sargasso Sea
aatgaaattaagaaaagaatttgatagcattggcggcattaatgttccttcagataaatactggggggcatctacagaaagatctaaaaaatttttcaatattggaaaaattttagtaaatttttcaataattaaatctatagcaattataaaaaaagcagcagctatagttcatttaaaagaaaaacaaatagaaaagaaaaaatctcaagcaataataaaagcctcggaagaagtaattaaaggaaaactaaatggaaattttccactaaaagtttggcaaacaggctctggaacccaaacaaatatgaacgtaaatgaagtaatatcaaatagagctattgaaattttaggtggaaaaaaaggaacaaaaaaacccattcatccaaatgatcatgtaaataagtctcaatctaccaatgatgtatttcctactgccatgcatattgctatcgtggaagaaacaaaaaaaaaattattacccaatctaaaaattttagaaaaagaattaagtataaaagtaaaaaaatttaacaaaataattaaaattggaagaacacatttgcaggatgcaactccattatctctcgggcaagaattttctggatatcatgctcagctaaaaaaatgtatcgaaagaatagaacaaagccttaaagaaatttactttttagcacaaggaggaacagctgtgggaactggaataaattcaagaaaaaattttgataaaaaagttgttaaagaaatttctaaattgacaaaattaccttttaaaccagctaaaaataaatttgcagaactcgctgct

SEQ ID NO: 280858 - DNA, 873 bp, Unknown
  Bacterial polypeptide expressing nucleotide sequence isolated from the Sargasso Sea
aaaaattaaaacaaaaattatattcaaaaactatcaaaattggacgtacacatacgcaagatgcaacacctttaactatgggagatgaattttctggatacctgcagcaaattgaaaataactatgaaagattaatcatagcaaaaaaagaacttcattatttagcacaagggggtactgctgtaggatctggtattaatgccccaaaaaattttgatagaattttttgtaaatttttaaataagttaactataaataaatataaaccatctaaaaataaatttgaagctattgctaatcatgactctttagtaaatttctctaattcactaaataccttagctatttcattatttaaaattctaaatgaccttagatttttatcttctggaccaagatcaggcttgggagaaataaatattccagctaatgaacctggctcatctataatgccaggaaaggtaaatccaactcaaattgaggctcttagtatggtttgttgtcaagttatgggaaactgtttagcaattaatcaaggagggtcacaaggtcattttgaattaaatacttttaaacctttaattgtttttaatataataaactcaataaatttactttctgatggaataaatagtttttgcaataattgtcttaaaaatattacaattaataaaaataatattaataaacatttaaaaaattcgcttatgcttgttacagcattaaataaatatataggatatgataatgctgcaaaaattgctaaaaaagcatttgatgaaaacctaactttaaaagaagccgctgtaaaattaaatctggttagtgaaaaagaatttgataagattgttaatccaaaaaaaatgatctaag

SEQ ID NO: 280859 - DNA, 641 bp, Unknown
  Bacterial polypeptide expressing nucleotide sequence isolated from the Sargasso Sea
aaaaataactaaactaccctttaaaccaaccaagaataaatttgctgcgctagcagctcatgatgagatagtaaatttttctggaaccttaaatactactgctgttagcttaatgaagattgctaatgatattagattcttagggtcaggacccagagccggatatggtgaaataattttaccggcaaatgaaccaggttcatcgattatgcctggaaaagtaaacccaacacaatcagaggcagtgacaatggtatgtgtaaaagtaataggtaatcacaatggaataacaatggcaggttctcatggacattttgagttaaatgtttttaaaccacttattgcgcacaatattttacaatctatagatcttcttgcggatagtacaaaaaattttgcactatactgtgtaaaaggaattaaggcagataaagagaagatcaaaaaatttttagacaactcattaatgttagttacagcactcgctcctcatattggatacgataattcagctaaaatagctaaaacagctcttaaaaaaggtactaccttaaaagaagaagctattaaaacaaaattaatcagtaaaaaggattttgatagaatagtagatccaaaaaaaatgatttacccaaaataag

SEQ ID NO: 280860 - DNA, 421 bp, Unknown
  Bacterial polypeptide expressing nucleotide sequence isolated from the Sargasso Sea
atgaaatacagatacgaatctgacagtttgggtaaaataaaagttccaaacgataaatactggggcgcctccactcaaagatctaacaaatattttgacataggtgactttttagtaagaccaattgttattaagtcaatcgcgatgatcaagaaagctgccgcagtagtgaatgcaaaaaatggaaatattaataaaaaaataagtaaaacaattattaaagcatctaatgaaattatttctggaaaacttaatgatcattttcctctaaaagtttggcaaacaggttctggcacacaaacaaatatgaacgttaacgaagtcatagctaatagagctaatgaaatgcttggtttcaaattgggaagcaaaaaaccagtacatcctaatgatcatgtaaataaatctcaatcaaccaatg

SEQ ID NO: 280861 - DNA, 658 bp, Unknown
  Bacterial polypeptide expressing nucleotide sequence isolated from the Sargasso Sea
ataattaacgaaataagaaaaattacaaagattccttttagacctaataaaaataaatttgcagctttagcggcacatgatgaaatagttaatttttcaggaacattaaatacaacagctgtatgtttaatgaaaattgcaaatgatataagatttctaggatctggacctcgagcaggttatggagaactaattctaccagcaaatgaacctggttcttctataatgccaggaaaagtaaatccaactcagtctgaggctgtaacaatggtttgtgtgaaagtaattggaaatcacaatggaataactatggctggttcacatggacattttgaattaaatgtattcaaacctttaattgctcataacattttacaatcaatagatttattaagcgatagttcaaaaaattttgcactttattgtataagaggtttaaaagcagataagaaaaagataaaacagcatttggacaattcactaatgatggtaactgctttagcgccttatataggatatgataatgcagcaaaaattgcaaaaaatgcattaaaaaataatacaaatttaaaagatgaggctcttaaaactaagttattaaattcaaaagaatatgacaaaattgtagatccaaaaaaaatgatcaatccaagttaat

SEQ ID NO: 280862 - DNA, 864 bp, Unknown
  Bacterial polypeptide expressing nucleotide sequence isolated from the Sargasso Sea
accatccttcattgctttaaataaagaacttaaaaaaaaggtaaaaaaatttaaaaatattgtaaaagttggcagaacccacttacaggacgcaacacctattactttaggacaagaattttctggttatcaatctcaattggaagactgtattaaaagaattaaaaatgcattaaatgaaatatattttttagcacaaggaggaaccgcggttgggactggaataaatacaaaaaaaaattttgataaaaaaattataaaagaaattagaaaaatatgtaaagttccgtttaagcctacaaaaaataaatttgcagctttagctgctcatgacgcaattgtaaatttttctggaacattaaatacttcggctgtttgcttaatgaaaatagcaaatgatataagattcttaggatcaggacctagggcaggatacggagaactaattttaccaagcaatgagcctggctcctcgattatgcctggaaaagtaaatccaactcagtcagaagctgtaaccatggtttgtgtaaaagttattggaaatcataatggtattaccatggcaggttctcatggccattttgaattaaatgtatttaaaccattaattgcacataacatattacaatctatcgatttattgtctgatagttcaaaaaattttgcaatttattgtataaaaggaattaaagctgacaaaaataagataaaaaattatttagaaaattcattgatgcttgtgactgcacttgcgccccatataggatatgacaatgcagcaaaaatagcaaaaaaagcaatgaataataatacaaaattaaaatatgaagcattaaaatcaggattaataaatgaaaaaga

SEQ ID NO: 280863 - DNA, 640 bp, Unknown
  Bacterial polypeptide expressing nucleotide sequence isolated from the Sargasso Sea
aatgaaaaataaaaaaagaatagaatttgatagcctaggttcaaaaaaaatttataaaaataggctttggggtgctcaaacgcaaagatcccttgagaattttaaaattggtaatgaaaaaataccagttgaactaataattgctttaggacaacaaaaaaaagccgctgcagaagctaatatcgaacttggtgtcttaaacaaaaaattaggaacattaattatcaaagcgtgtaatgatataattaatttaaaacttatcgaagagtttcctttagtagtgtggcaaactggatctggtactcagacaaatatgaatgctaatgaagtaattagtaattatataataaaaaaaataggaggaaaaattggaagcaaagatccgattcatcctaatgatcacgtaaatttatcccaatcatcaaacgatacttttcctacaataatgcatgttgcaattaatgaattggcaacaaaaggcctaattccaaatctaaaaattttaataaaagaatttcaaaaaaagaaaaatatttttcaaaaaataattaaaataggaagaactcatatacaagatgcaactccaattactttaggtgatgaattctcagcgttttgttttcattgcatacttgtttaa

SEQ ID NO: 280864 - DNA, 688 bp, Unknown
  Bacterial polypeptide expressing nucleotide sequence isolated from the Sargasso Sea
ttgaatactcgcaaaaattttgataaaaaaataattagggaaatatgcaaaataacaaagcttccttttaaaccctcaaagaataaatttgcagcattagccgcacatgatgaaattgtaaatttttctggtacgcttaatacaacagctgtttgcctaatgaaaattgcaaacgacattagatttcttggatcaggaccacgagcaggatatggagaacttatattaccatctaacgagcctggttcctccattatgcctggaaaaataaatcctactcaatcagaagcggtgacaatggtttgtgtaaaagtaattgggaaccacaacggtatcactatggcaggttcgcatggacattttgagttgaatgtttttaaaccacttataattcataatattttacaatcaattgagattatgagtgactcagcaagaacctttgcgctttactgtgttaagggaattaaagctgataaaaaaagaatcaaacatcttttagataattctttaatgctagtaacggccttggctccaaaaattggctatgacaaagctgcaaaaattgcaaaagctgcttataaaaatggcactacgctaaagcatgaagtaattaaatcaggacttattaatcaaaaagagtacgataaaataatgagccctataaaaatgacaaaaccaaaataaa

SEQ ID NO: 280865 - DNA, 871 bp, Unknown
  Bacterial polypeptide expressing nucleotide sequence isolated from the Sargasso Sea
agcctcagatgaagtaataagaggaaaactagatgatcattttcccctaaaagtttggcaaacaggatctggtacacaaacaaacatgaatgtgaatgaggtgatttctaacagagctattgaaatgttgggaggtaaacttggaagcaaaaaaccaatacatcctaatgaccatgtaaacaaatctcagtctactaatgatgtctttccttctgcaatgcatatttctgttgctatcaaaacaacaaaaaaactcataccttctttaaaaattttagaaaaagaactatttaaaaaagtaaaagaatttaaaaaaattgtaaaggttggaagaacacatttacaagacgcaacacccataacactaggacaagaattttcaggatatcactcccaactaaaaaaatgtattaatagaatagagagcgcattagaggaaatttattttcttgctcaaggtggtacagctgttggcacgggattaaatacgagaagaaaatttgatattaaaattattaaagagatatcaaaaattacaaagcttccttttaaacctgctaaaaataaatttgccgctttagcagctcacgatgcaattgtaaatttttctggaacaatgaacacaactgcagtttgtttaatgaagatagcaaacgacataagatttcttggctcaggtcctcgtgctggatacggtgaattaatattaccttctaatgaaccaggttcttcaataatgcctggaaaagtaaatccaactcaatcagaagcagtaacaatggtctgtgtaaaagtaattggtaaccataatggaattacgatggcaggatctcatggacactttgagcttaatgtttttaaaccgttaata

SEQ ID NO: 280866 - DNA, 733 bp, Unknown
  Bacterial polypeptide expressing nucleotide sequence isolated from the Sargasso Sea
atgaaattcagaaaagaatacgacagcattggcattattaatgtacctgtggataagtattggggagcatccactcaaagatccaaaaaatactttaatataggagatgttttagttggtccaaaattaataaaatctattgccataataaaaaaggcagcagctataacaaactataaaaacaaagatattaattcaaaaatttataaatcaattattagagctgctagtgaagtaattaatgggaaattagatggtcattttccacttaaagtttggcaaactggatctggcactcaaacaaatatgaatgtaaatgaagtaatatctaatagggctattgaaatattaaaaggaaaaaaaggaacaaaaaaacctgtacacccaaacgatcatgtaaataaatcacaatctactaatgatgtatttcccactgcaatgcatattgctatagctatggaaactagagagaaacttttaccaagtttagtgcttttaaataaagaattaaaaaaaaaagtaagagaatttaataaaatagttaaaattggaagaacacaccttcaagatgcaactcctttatcattgggtcaagaattttcgggttaccagtctcaattacaagattgtatcaaaagaatagaggtatcacttaatgaaatttactacctcgctcaaggtggcactgctgttggtactggaataaatacaaaaaaaaattttgataagaaaa

SEQ ID NO: 280867 - DNA, 820 bp, Unknown
  Bacterial polypeptide expressing nucleotide sequence isolated from the Sargasso Sea
gcatattgctattgctatggaaactaaaaaaaaattacttccatctctaaaaaatcttaataaagaattaaaaaaaaagataagcaaatttaaaaatattgtcaaagttggtaggacacatcttcaagacgcaaccccacttaccttaggtcaagaattttcaggatattattctcaattaagtgattgtattttaagaattgaaacatctttgaaggaaattttctatcttgctcaaggtggaacagcggttggaacgggaattaattcaaaaaaaaattttgacgtaaaaatttgtaaagaaattagcaaattaacaaaaataaaattctatcctgcaaaaaataaatttgcagctctcgctgcacatgatgcaattgtaaatttttcaggtactttaaatacaacggcagtttgcttaatgaaaattgcaaatgatattcgttttttaggttcaggtcctagagcaggttatggggaattaatattaccggcaaatgaaccaggttcatcgataatgccaggtaaagttaatccaacacagtgtgaggctgtaacaatggtttgtgtaaaagtaattggtaatcatacaggtatcactttagcaggttctcaaggacagttcgaattaaatgtttttaaacctcttatcgctcacaatattcttcagtctatagatcttttgtcagacagttctaataatttttcacaattttgtattaagggtattaaggcagatgtaaataaaattagtgaggatttaaataattcacttatgttagtcacagctttagcacccaaaataggttacgataatgct

SEQ ID NO: 280868 - DNA, 820 bp, Unknown
  Bacterial polypeptide expressing nucleotide sequence isolated from the Sargasso Sea
taatgagcttaaaaaaaaagtaagaaaatttaaaaatatagttaaagttggcagaactcatctccaagatgctactcccattaccttaggacaagaattttctggttaccaatcacaattagaaagttgtattaaaaggataaaaagtgctttaaatgaaatatattttttagcacaaggtggaactgcggtaggaacaggaataaacacaaaaaaaaattttgataaaaaaataatcaaagaaataagaaaaattagtaaaataccttttaaaccaacaaaaaataaatttgcggccttagcggctcacgattcaatagtaaatttctctggtactttaaatactacagcagtttgtttaatgaaaatagctaatgatataagatttttaggatctggacctagagcaggattaggagaattaattctgcctagtaatgaaccgggctcatctataatgccaggaaaagttaatcctacacaatcagaagctgtaacaatggtttgtgtaaaagtaattggaaatcacaatggtattacaatggcaggatctcacggtcattttgagttaaatgtttttaaaccactaattgctcacaacattttacaatctattgatttattatcagatagttcaaaaaattttgcggtatattgtattaaaggaataaaggctgataaaaataaaataaaagagtatttggataactcattaatgctagtaactgctcttgctccacatataggatatgataacgctgcaaaaattgcaaaaaaagctctaaaaaataatacaaaattaaaatacgaagccttaaaa

SEQ ID NO: 280869 - DNA, 376 bp, Unknown
  Bacterial polypeptide expressing nucleotide sequence isolated from the Sargasso Sea
atgaaattcagaaaagaatttgacagtattgggcaaataaatgtacctgttgataagtattggggtgcttcaacccagcgatcaaaaaaatactttgatatcggagaatttttagtaagaccgattctaattaaatctatagcaattattaaaaaagcagctgcaattgttcataatagagaaaagcaaatatcttcgactatttatagagcaattataaaggcttctgatgaagtaatttctggaaaacttgatggtcacttcccacttaaagtttggcaaactgggtcaggcacacagacaaatatgaatgttaatgaagttattgctaatagagcaattgaaattttaggtggaaagaaaggtttcaaaaaag

SEQ ID NO: 280870 - DNA, 667 bp, Unknown
  Bacterial polypeptide expressing nucleotide sequence isolated from the Sargasso Sea
tgataccaaaataattaaagaaatatctaagattacaaaattgccttttaaaccagctaaaaataaatttgctgctttagcggctcatgatgcgattgtaaatttttctggcactatgaatactactgcggtttgcttaatgaagattgctaatgatattagatttcttggctcaggaccgcgtgcaggttatggtgaattaattttaccatctaatgagcctggttcttctataatgccaggtaaagtaaacccaacccagtcagaggcagttacgatggtttgtgtcaaagtaataggaaatcataatggaataactatggctggttcccatggtcactttgaattaaatgtttttaaacctttaataattcataatattcttcaatcaattgaaataatggcagactcatcaaaaacttttgcactttattgcattaaaggtatcaaggcggataaaaaaagaattaaaaaccttctagataattctttaatgatcgtaacagctttagctccccaaatagggtatgataatgctgctaaaattgcaaaggaagcacacaaaaacggaacaactttaaaagaggaaattttaaaaacaaatcttatctctgaaaaagaatatgaaaagattatggatccaattaaaatgactaaacctaaataa

SEQ ID NO: 280871 - DNA, 702 bp, Unknown
  Bacterial polypeptide expressing nucleotide sequence isolated from the Sargasso Sea
aatgaaatttcgtaaagaattcgacagtattggatcaataaatgttcccaatgataaatattggggtgcatccacacaaagatccaaaaaatattttgatattggagattttttagttagaccaattttaattaagtctatagcaattataaaaaaagcagctgcaatagtacatttaaaagaaaaacaacttcctccaaaaatctcaaatgcgataatagcagcctctaatgaaataattgccggaaaattagacgaacactttccactaaaagtttggcaaaccggatctggcacgcagactaatatgaatgttaatgaagttattgctaataaagctattgaaaaattaggtggaaaaaaaggatctaaaagaccagtccatccaaatgatcatgtaaacaaatctcagtcaacgaacgatgtttttccgactgctatgcatattgccatagctattgaaacaaaaaataagttattaccatcactaaaattactagatcaagagttgaaaaaaaaagtatcaaaatttagaaacataataaaagtgggtagaactcatttacaagatgcgacgcctctttctttaggccaggaattttctggttatcaaactcaaattaaagattgtattagtagggttagtatggctttagatgaaatctattcactcgcacaagggggaactgctgtaggaactgg

SEQ ID NO: 280872 - DNA, 825 bp, Unknown
  Bacterial polypeptide expressing nucleotide sequence isolated from the Sargasso Sea
gaggtaattgctaataaagcaaaccaaattcttgggaataaactaggtacctataaaccaattcacccaaatgatcattgtaatcttggccaatcatccaatgattctttcccaacagttatgcatatatctattgtcatggaagttcaaaaaaagttaagaccaacagttgagaactttattcatacaataaatcaaaaacaaaaagaattttcttcaataataaaagttggaagaacacatctacaagatgcaacaccaataactcttggacaagaatttaatgcttttaaaacacaaattcaaaatgctttaaagagaatcataaattgtttggatgaaatctattttattgctcaaggaggaacggcagttggaacggggttaaattcctccaaaaaatttgtttcaggatttgttaaggctattcaagttataactggttacccatttaaagagtcagagaataaatttgaatcccttgcctctcacgattcaattgtaatgctttcaggagcaatcaatactcttgtaattgcatgttataaagtggcaaatgatataagattattagcgtctggaccaagaagtggaattggagaaatcaatctacccgctaatgaacctggttcttcgataatgccgggaaaagtaaatccaacacaatgtgaagcattagcccaagtttgtttgcacttgatgggattacattactcaatctctttagctggctctcaaggaaatttccaacttaatgcaaataaaactatgatcatttttagtattttgagaacaattgaattaataagcgactcagttgactct

SEQ ID NO: 280873 - DNA, 800 bp, Unknown
  Bacterial polypeptide expressing nucleotide sequence isolated from the Sargasso Sea
tcattttcctcttaaagtttggcaaacaggctctggtacacaaacaaacatgaatgtaaatgaagttatctctaatagagctatcgaaattcttaaagggaaaatgggcagcaaaaaaccagtccatccgaatgatcacgtaaataaatctcaatcaacaaatgacgtattcccaactgccatgcatatagctatagcgatcagagctgggaataaattgttaccatcattaaaattactaaatattgaactaggaaaaaaatctaaaaagtttaacaaaattgtaaaagttggtagaacacatcttcaagatgcaactccaattactttgggacaagagttttcaggatatcattcacaattgagcaaatgcataaaaagaatagaacatgctttaaaagaaatatattttttagcacaaggaggaacggctgttggtaccggtctgaacacacgtaaaggttttgataaaaaaatagtttctgaaataagaaaaattacaaaattaccatttaaaacatcagaaaataaattcgcagctttagcagctcacgattctattgtaaatttttcaggaacaatgaacacaactgctgtttgtttaatgaaaattgcaaatgatattagatttttagggtcaggccctcgtgctggatatggagaacttattttgccagaaaatgaacctggttcttctataatgccaggtaaagtcaacccaacccaatgtgaggcagtcactatggtgtgtgtaaaagtaattggtaaccataatggaataacgatggcaggatcacatg

SEQ ID NO: 280874 - DNA, 461 bp, Unknown
  Bacterial polypeptide expressing nucleotide sequence isolated from the Sargasso Sea
aatgaaattaagaaaagaatttgacagtattggcggtataaatgttccaaatgataagtattggggagcatctactcaaaggtcaaataagtttttcaatataggtaaaattttagtaaatatttcaattattaaatcaattgcaattattaagcgatcagctgctatagtgcatgctaaagataaattaattgatggcagaatttcaaaagcaataattaaagcatcagatgaagtgattaaaggtaaattagatgaaaattttcctttaaaggtttggcaaactggttctggcacacaaacaaatatgaatgtaaatgaagtgattgctaaccgagcaatagaaattttaggtggaaaaaaaggagcaaagaagcctgttcatccaaatgatcacgtaaacaaatctcaatctacgaatgatgtttttccaactgcaatgcatatttcagtagctaaag

SEQ ID NO: 280875 - DNA, 601 bp, Unknown
  Bacterial polypeptide expressing nucleotide sequence isolated from the Sargasso Sea
atttgctgcacttgctgctcatgatgcaatagtaaattattcaggtacattaaatacaactgcagtatgtttaatgaaaatagcaaatgatatcagatttttaggttcaggaccaagagctggatatggagagttggtattgccagaaaatgaacctggatcatcaattatgcctggtaaagtaaatcctactcaatgtgaggctgtaacaatggtatgcgtgaaagtaattggtaaccataatggaattacaatggctggttcacatggtcactttgaacttaatgtattcaaacctttaataattcataatgtacttcaatcaatccaaatcctctctgatagcacaaaaagttttgcaaaatattgtatctctggactaaaagctgacaaaaatagaattaaacacttattggataactctttaatgctggtaactgccttatctccaaagattggttacgataatgctgcaaaaattgctaagaatgcattaaaaaataaaactactctaaaaactgaagcgctgaaaacaggtttaataaatgagaaagaatacaataaaattgttgatcctaataaaatgataaaaccagactaa

SEQ ID NO: 280876 - DNA, 702 bp, Unknown
  Bacterial polypeptide expressing nucleotide sequence isolated from the Sargasso Sea
atgaaattaagaaaagaatttgacagtataggaagtgttaatgtcccaaatgataaatattggggagcttcaactcaaagatcaaataaattttttaatattggaaaaattttagtaaacatttcaatcataaaatctattgcaattatcaaaagatcagctgcaatagtgcattctaaagataaattaattagcagcaaaatatctaaagcaattattaaagcttctgatgaggtaattaaaggtaaattggatgaaaactttcctttaaaagtctggcaaacaggttctggaactcaaactaatatgaatgtaaatgaagtaattgctaaccgtgcgattgaaattttaggtggtaaaaaagggacaaaaaaaccagttcatcctaatgatcatgtaaataaatctcaatctactaatgatgtattcccaactgctatgcatatttccgtagctcaagaaacaattagtaaattattaccaaatttaaaacttttaaaaaaagaattaaaaagaaaatcacgtgagtttaaaaatattataaagattggaagaactcatcttcaagatgcaacaccactatcgttaggacaagaattttcaggttatcatgtgcaagtacaaaaaagtattaaaagaattgaagttgcattaaaagaaataattgatctcgctcaaggtggaacagctgtggaacaggaa

SEQ ID NO: 280877 - DNA, 820 bp, Unknown
  Bacterial polypeptide expressing nucleotide sequence isolated from the Sargasso Sea
gacagcatcggcgaaatcgacgtacccgccagcgcctactggggcgcgcagacccagcgctcgatcgagaacttccccttcggcgagaccgaacgcatgccgatcgccatcgtccatgccctggcgctggtgaagcaggcggcggcgcgggtgaatcgcaagcacgggctcgacgcgaaagtggccgacgccatagagagcgccgcgcaggaagtcgtctcgggcaagctcgacgaccagttcccgctggtgatctggcagaccggctcgggcacgcagtccaacatgaacgtcaacgaggtgatcgcgggccgcgccaacgagatcctgaccggtacgcgcggcggcaagtcgccggtccatcccaacgaccatgtgaacatgggccagtcctcgaacgacagcttccccaccgcgctgcacgtcgcggcggcgcgcgcggcgaacgacaagctctatccggcgctggcgcagctgcacgcctcgctgcaggccaagtccgaggcgtggaaggacatcgtcaagatcggccgcacgcacctgcaggacgcgacgccggtgacgctggggcaggaattctccggctacgtccagcagcttcaccttgcgcgcggccgcatcgaaccggccgtctcgggcgaagtgagcgcgctggcgcaggggggtacggcggtcggcaccgggctgaacgcggtgccgggcttcgacgtcgacgtggcggccgaactggccagcctcaccggcctgccgttccgcactgccgagaacaagttcgaggcgctcgcttccaacgatccgctggtgcacttgtcctctacgc

SEQ ID NO: 280878 - DNA, 494 bp, Unknown
  Bacterial polypeptide expressing nucleotide sequence isolated from the Sargasso Sea
gatgacagatgaattcagaatagaaaaagattcaatgggagaagtcaaagttcccaaagatgcgctttatgctgcgcaaacccaacgcgcagtagacaattttcccgtaagcggaatcccgatccgtcgtccgctgattgcggcactcgggatgatcaagtcctcggcagccaaggtcaatggaacttcgggagcgattcctgaagaagtggcggccttgatccagtctgcagcccaggaagtgatcgagggaaaacttgatgaacatttccccatcgacatctatcagacgggttcaggaacctcgagcaacatgaacgccaacgaggtgattgccaatcgggcgagtcagctttcagcggagaaaaacctgaaggttcatcccaatgaccatgtaaattgtggtcaaagctccaacgacacctttcctactgcgatccgtattgccgcggtgatggagactcaggcggatctgatcccggctctgaaggagt

SEQ ID NO: 280879 - DNA, 785 bp, Unknown
  Bacterial polypeptide expressing nucleotide sequence isolated from the Sargasso Sea
ctaccggcatcaggttcaaaagggaattgaccgaattgaaaaatctctagaagatatttacgagttagcccaaggaggtacggcggttggtactggcttaaatacatccgttggatgggatactacagtcgcaaaatacatcgctgaggagactaaacttccatttgtctccgccccaaataagtttgaagcgctagcatcacatgatgctatggtagaaatgtcaggaagtttaaaaactttagcagcaggtctttttaaaattgctaacgacataaggtttttggggtccgggccccgttgtggtttaggtgagcttattttgccagaaaacgaaccgggttcatcaataatgcccggaaaggtaaacccaacacagtgtgaagctcttactcaagtttgtgctcaagtcattggcaatgatgctgccgttgggcttgcaggctcccagggacattttgaattgaatgtgttcaaaccgatgatttcttataatgtcatacagtcaatgcagctgttaggggatgcttgttctgcctttactgataacctggtcaaagatttaaaggcagatagacatcgaattgaaaaattaatgcgagaaagtttaatgttagtcactgcactcgcacctaagataggttatgacaacgccaccacagtcgcaaaaactgcccataaaaacggaacaactctaaaagaagaagcagtaaaacttggttttgttgacgataaaaccttcgatgagattgtaaaaccagaaaatatggttggacccacctaaa

SEQ ID NO: 280880 - DNA, 886 bp, Unknown
  Bacterial polypeptide expressing nucleotide sequence isolated from the Sargasso Sea
tgaattaaaaaagaaagttaaagaatttaacaatattgtcaaagtaggtagaacacatttgcaggacgctacaccaattactttaggccaagaattttcaggatatcatgctcagctcagcaaatgtattgaaagaatagaaattgccctaaaagaaatgtacttcttagcgcaaggagggacagcggttggaacaggattaaacacaagaaaaggatttgataaaaaaatagtttctgaattaagaaagatgacaaaattaccttttaaaccatcagcaaataaatttgctgcattagctgctcatgactctatagttaacttttctggcacaatgaacacaacggccgtttgcttaatgaaaattgcaaatgatattagatttttaggatctggacctagagctggttatggagaacttatactgcctgaaaatgaacctggatcatctataatgccaggtaaaataaatccaacacagtgtgaagctgtgactatggtatgtgtaaaagtaattggaaatcataatggaataacaatggcaggttcacatggtcattttgaattaaatgtatttaaaccattaataattcataacatattacaatcaattcatataatggcagattcttcaaaaagttttgcaaaatattgtataaaaggacttaaagcagacaaacaaaaaattaaaaaattattagataattctttaatgctagtaaccgctctctctccaaaagtaggctacgataatgcagctaaaatagcaaaaaaagctcataaaaacggaacaactttaaaagaagaagctattaaatctaatttaataacagaaaaagaatataacaaaattgttaatcctagaaaaatgatcagaccaaaataa

SEQ ID NO: 280881 - DNA, 409 bp, Unknown
  Bacterial polypeptide expressing nucleotide sequence isolated from the Sargasso Sea
ctcatgtgaggcagttacaatggtttgtgtaaaagtcattggaaaccacaatggcataacgatggctggatctcatggacattttgaattgaatgtcttcaaacctttgatcgcacataacatattgcaatcgatagatctaatagctgacagtaccaaaaattttgctatttattgcgtcaaaggaataaaagcaaataagaagaaaattcaggaacacttagataattctttaatgcttgttacagctctagcaccccacatcggctacgacaatgctgccaaaattgcaaagacagcacttaaaaataatactactcttaaatatgaaactttaaaaacagggctaattacagaaaaagattatataaaaatagttgatcctaaaaagatgatctatcctgagtaa

SEQ ID NO: 280882 - DNA, 557 bp, Unknown
  Bacterial polypeptide expressing nucleotide sequence isolated from the Sargasso Sea
tatgaaaacaagaaaagaatttgatagtatcggtgaaataaatgtgccaaatgataaatattggggtgcatcaacacaaagatcaaaaaaattttttaatatcggcaaaatatatgtaccagagtcaatcataagatctattgcaatcattaagcgaagtgctgctatagttcataaaaaagatggattaattacatccaaagtttcaaaagcaataattaaagcatcaaatgagattattagtggtaaaatgggtgaaaattttcctcttaaagtttggcaaacaggttctggtacacaaacaaatatgaatgttaacgaagtaattgcaaatagagctatagaaattctaaaaggtagaaagggatcaaaaaaacctgttcacccaaacgatcatgtaaataaatcacaatctactaatgacgtttttccgactgcaatgcatatttctgtagcgattgaaactattaataaacttttacctagtttaaaattattagaaaattcattatcaaaaaagattaaagaatttaaaaaaattgtaaaaattggtagaa

SEQ ID NO: 280883 - DNA, 664 bp, Unknown
  Bacterial polypeptide expressing nucleotide sequence isolated from the Sargasso Sea
atgaaatttagaaaagaatttgatagcattggaaaaattaatgttcctaatgataaatactggggtgcttctactcaaagatcaaaaaaatattttgatattggtgaatttctagtaaggcctgtattaatcaaatctattgcaattattaaaaaagctgctgccattgttcatagaaaagaaaaacaaattttaccacaaacttccaaagctattattaaagcatctaatgaagtaatttctggtaaactcaattctcacttccctttaaaagtttggcagacaggttcgggcactcaaacaaatatgaatgtaaatgaggtaatagcaaatagagctattgaaattttaggtgggaaaaaaggcgctaaaaaacctgttcatccaaatgatcatgtaaataagtcacaatcaacaaatgatgtatttccaactgctatgcatatagcgatttctattgaaacaaaaaataaattattacccgcacttgaattgcttaataaagaattaaagaaaaaagtctcaaaatttagaaaagtaataaaagttggtagaactcatttgcaagatgcaactcctttatcattaggtcaagaattttcaggttatcaatctcaattacaagactgtattataagaataaaaaacgcattaaatgagatat

SEQ ID NO: 280884 - DNA, 933 bp, Unknown
  Bacterial polypeptide expressing nucleotide sequence isolated from the Sargasso Sea
aatctatggggagcacaaactcaaagggtcattaaagaatttttagaattggcaaatgatataatgccaattgaaatagtacatgccttggcagttattaagatgtcatgtgcaaagacgaaccaaaaacaaaagcttttaagccctaaaatagccagagcaattatagacgctgcaaaacaagtttccttgggaaagtatgacgaacatttcccactttccgtttggcagaccggatctggaacgcaaacaaatatgaacgtaaacgaagttattgccaatatagcaaataggaaaatattaaagaaacttggtacaaattcacctgttcatccaaatgaccatgttaataagagtcagtcaactaacgacagtttcccttcagctataaatattgcatctaaattaaaaattctaagtgatcttcttccagcgctaaaaagtatggaaaaagtattaaaatctcaatctcaaaaatggaaaagtattataaagatcggaagaactcatttgcaggacgcaactcctctatcactaggacaagaattctctggatatcaagcccagattaattctaatatacgaagagttgagggaagtttaacgaacttaagttaccttgcccaaggaggaacagctgtaggtaccggactaaatacgaagcgaggctttgaccgactggtggtttcagagataagtaagattactaaagtgcaattcaaaccagcggcaaacaaatttcaagcacttgcatctcatgactcgttagtagagctatctggcgtacttaatgtgattgccagtgacttatttaaaatcggaaatgatatacgccttttggcatcaggtcctcgctcaggtttaggtgaactcagtctgcctgaaaatgaacctgggtcatatatcatgccaggtaaagtaaatcctactcaa

SEQ ID NO: 280885 - DNA, 658 bp, Unknown
  Bacterial polypeptide expressing nucleotide sequence isolated from the Sargasso Sea
tatgaaatacagaacagaatttgatagtattggaaaaattaatgttcctggtgataagtattggggagcctcgactgagagatcaaataaatattttaacattggtgattttttagtaagaccgttagttatacattcaattgcaattattaaaaaagcttctgcaatagtaaacgcaaaaaataaagacctggatcctaaaatcagtaagtacatcattaaagcggcagatgaggtaattaaaggaaaacacgacagccactttcccttgaaagtttggcaaacgggatcgggcacccaaactaacatgaatgttaatgaagtaatagccaacagggcaattcaaatgatgggaggtaagttaggatcaaaaaaaccagtgcacccaaatgatcatgtaaataaatctcaatcaactaatgatgtttttccaacggcaatgcacatagccatagctttaaaaacaaaagaaaaacttttgccatcactaaaattacttgaaaaagaactatttaaaaaatcaaaagagtttaaaaatattgtaaaagtaggaagaactcatttgcaagacgcaacacctttgactttaggtcaagaattttctggataccacgctcaactaaaaaaatgtattattagaatagaggcggcgcttaaa

SEQ ID NO: 280886 - DNA, 725 bp, Unknown
  Bacterial polypeptide expressing nucleotide sequence isolated from the Sargasso Sea
ggttgggggcagcagatccaggccaatatcgagcacctgcgtgcgctgcagccgagcctccaggcgctggcccagggcggcaccgccgtgggtaccggagtcaacgcccatcctcgcttcgctgagcagttctgccgtgaactgggcggtctgaccggcgtgaacttcaccaccgcgggcaacttcttcgcgctgatcggctcgcaggacaccgctgtggccgtctctgggcagctcaagaccacggctgtttcgctgatgaagatcgccaacgacctgcgctggatgaactcggggccgctggcggggctggcggagatcgaactggaggccctccagcctggctcctcgatcatgccgggcaaggtcaatccggtgatccccgaggcggcggccatggtcgcagcgcaggtgatcggcaacgacgcggccatcgccatcgccggacagtccggcaacttcgaactgaacgtgatgctgccgctgatcgccgacaacctgctctacagcatgcaactgctgagcaatgtcagtcacctgttggccgaccgcgccatcgccagcttcaaggtcaaccagcccaagctcagggaggcgctggagcgcaatccgatcctggtcacggcgctgaatccgctgatcggctatctcaaggccgccgacatcgccaagcaggcctaccgcgagggcaggccgatcatcgaggtggcgctggagcacaccga

SEQ ID NO: 280887 - DNA, 403 bp, Unknown
  Bacterial polypeptide expressing nucleotide sequence isolated from the Sargasso Sea
atgcatacgattggcgattgggaacggcattgtccgatgggccaaacgatgaggcaggagcacgacagcatcggcactgtcgacgtccccaccgcggcgctctggggagcccagacccagcgctccctcaacaacttcgccatcggtgatcaacggattcccgccgagctgatccatgccctggcacggatcaaacagtgctgcgcagtcgtgaacggtcgccatggtctgttgaacgaccaacaggtggccttgattgaacgggcgggccaggcgatccaaacaggccagcacgatgatcagtttcctctgagtgtctggcagaccggcagcggcacgcagacgaacatgaacgtgaatgaggtgatcagcaacctcgctgctcagcactccggagagagcc

SEQ ID NO: 280888 - DNA, 551 bp, Unknown
  Bacterial polypeptide expressing nucleotide sequence isolated from the Sargasso Sea
gaatactacagcagtatgtttgatgaaagttgctaatgatattagatttttaggatctggccctagagcaggttatggtgaattaattttaccttctaacgaaccaggttcatctattatgcctggtaaagttaatcccactcaatcagaagcagtaacaatggtttgtgtaaaagtaataggaaatcataatggtatcaccatggctggttcacatggacattttgaattaaatgtttttaaacccctaatcatccataacattttacaatctattaatatcatgagcgactctgcaaagacatttgctctgtattgtataaaaggaattaaagcagacaaaaaaagaattaaatatcttcttgataattcactcatgttagtcacggctttagccccaaaaattggatatgatcgagccgcagctattgcaaaaaaagcccataaaaatggaacaactttaaagcatgaagttattaaagctgggctaataaatgagaaagaatacgaaaaaataatgagtccaatgagaatgactaaacccaggtaga

SEQ ID NO: 280889 - DNA, 859 bp, Unknown
  Bacterial polypeptide expressing nucleotide sequence isolated from the Sargasso Sea
aattgaaattttaggtggaaaaaaaggttcaaaaaaaccagttcatccaaatgatcatgtcaataaatctcaatccactaacgacgtttttccaacagcaatgcatattgctatcgcaatagaaactaaaaccaaacttctcccgagccttgagttattaaataaagaattaaaaaagaaagtctctaaatttaaaaatattgtaaaagttggaagaactcatttgcaagatgcaactcctctatccttaggccaagaattttctggatatcaatctcaattagaagactgtatagtaagaattaaaaatgctttgaatgaaatatattcattagctcagggtggtacagctgtaggaactggtatcaatagtaaaaaaggatttgataaaaaagttataaacgaaattaagaaaatcacaaaactaccttttaaaccaacaagaaataaatttgcagctctcgctgcacatgatgaaattgtaaacttttcaggaacattaaataccactgcagtttgtttgatgaaaattgcaaatgacataagatttttaggttcaggccctagagcaggatatggagaattgattttaccagccaatgaaccaggttcttcaattatgcctggaaaagttaatcctacacaatcagaggcagtcacaatggtctgtgtaaaagttattggtaaccacaatggtataacaatggctggttctcatggacattttgaattaaatgtttttaaacctttaatcgctcataatattttacaatcaatagatttgttagccgatagctcaaaaaattttggcttgtattgcatacgaggtttaaaagcagataaagatattataaaaaac

SEQ ID NO: 280890 - DNA, 905 bp, Unknown
  Bacterial polypeptide expressing nucleotide sequence isolated from the Sargasso Sea
aatctaccatgatgtttttccaactgcaatgcatatatcagttgctacagaaacaattagtaagttgttgccaaatttaaaactattagaagattcactaaaaaaaaaatcaatagaatttaaaaaaattgtaaaaattggaagaactcatctacaagacgcaactcctctaactttaggacaagagttttcaggatattatgaacaaactaaaaaaagtatagaaaggataaaatttagtttaaaagatattttgtttttggcgcaaggtggaacagcagttggcaccggtttgaatgcaaaaaaaaactttgataaaaaaattactagagaaataagtaaatattgtaaaataccatttaaaccagctccaaataaattttcagaactagctgcccacgatgcgatagtaagtttctctggagctttaaattcttgtgctgttgctttaatgaaaatttcaaatgatattagatttttaggatccggtccaagagctggttatggtgaacttatattgcctgaaaatgaaccaggatcatcaatcatgccaggtaaagttaaccctactcagtgtgaagcagtaactatggtttgtgttaaggtaattggaaatcataccggaatatcaatagctggaacacatggacactttgaattgaatgtgtttaaacctttaattgcccataacatacttcaatcaattgatttattagctgatagtgtaaaaaattttagcttgtattgtgtaagaggaattaaggcaaataaattaaaaataaaagagcatttagataattcattaatgttggtaactgctctagcacccaaaataggatatgataatgcagcaaaaattgccaaaaaagcattaaagaataatacgaaattaaaacacgaaacca

SEQ ID NO: 280891 - DNA, 796 bp, Unknown
  Bacterial polypeptide expressing nucleotide sequence isolated from the Sargasso Sea
cggagatttcttagtaagacccttagtaattcactctatagcgattattaaaaaagctgcagcaatagttaatgctaaaaataaagatttagatcctaaaatagctaaatacattattaaagcctctgaagaagttatcaaaggaaagctcgataatcattttcctttaaaagtttggcaaactggctctggcacacaaacaaacatgaacgttaatgaagttatagctaacagagcaattgaaatgatgggtggaaaattaggatcaaaaaaaccagttcatcccaacgatcatgtcaataaatctcaatctacaaatgatgtgtttcctacagcaatgcatattgctattgccataaaagctaaagagaaactcttgccctctttacgacttttagaaaaagaattactcaaaaaatcaaaagaatttaaattgatagtaaaagtaggaagaactcacctacaagatgcaacaccattaacacttgggcaagaattctccggatattactctcagcttaaagactgtattgcaagaatagaaaacgcacttaaggaaatttattttttagcacaaggtggaactgcagtaggaacaggtcttaatacaaaaaaaaactttgataaaagaattataaaagaaatatgtaaaattacaaaattacctttcaggcctgcacgcaataaatttgctgctcttgcagcgcatgatgaaattgttaacttttctggaactttaaatacaacggctgtttgtttaatgaaaatagctaatgacatcagatttctaggctca

SEQ ID NO: 280892 - DNA, 923 bp, Unknown
  Bacterial polypeptide expressing nucleotide sequence isolated from the Sargasso Sea
cctatccatccaaatgatcatgtaaatttgtcacaatcatcaaatgatacttttccaactataatgcatgttgctataaatgaattatcaattaaacagttaattccaaatttaaataaattaataaaggaatttcaaaaaaaaacgagagtatttcaaaaaattatcaaaataggaagaacacatacgcaagatgcaacacctattacattaggtaatgaattttcagcattttgcacacaattacaagcttgtttaaaaagaattgaaatttcacaatctgaattaaaatatcttgctcaaggtggaactgctgtaggatcaggtattaatgcaccaaataaatttgacagggtattctgtaagtatttaaataaactgactaaagataactataagcctgcacaaaataaatttgaagcattatcatctcatgacccactagtaaatttttcaaataccttaaaatctttatcgatatcattattaaaaattataaatgacattcgatttttagcatctggaccaagatcaggtttaggagaattaattttacctgctaatgaacctggatcatctattatgcctggaaagataaacccaactcaaattgaggcattaagcatggtatgtactcaagtaattggaaatagcacaacagttgatctagcaggatccaatggtcactttcaattaaatacttataagccagttatagcatttaatattattcaatctgtaaacctacttagtgatgggattgaaagttttaataataactgtttaaagggattaaaagcaaacaaagaaataattgataatcatttaaataattctttaatgcttgttactgctttaaataaaagtattggatatgataatgcggcaaaaattgctaaaaaagcatttgatgaaaatttgac

SEQ ID NO: 280893 - DNA, 913 bp, Unknown
  Bacterial polypeptide expressing nucleotide sequence isolated from the Sargasso Sea
tatggcaaactgggatctaggaacacaaactaatatgaatgcaaatgaagttataagtaatcatgcaataaaattgcttaagggcaatataggtactaaaattccagtacatccaaatgaacatgtaaatctctctcaatcatcaaatgacacatttcctactgtaatgcatatagcaataaatgaattaactgaccaaaaattattgccatctttgaatttaataataagagaattaaaattaaaaattaaaaaatttaataatattataaaaattggaagaactcatacacaagatgcaacacctttgactcttggccaagaattctcaggatatttaacccaaatagaaaattgtaaaaaaagaataattaatacgaaaaaggaattgagttttttagctcaaggaggaactgcagtaggcacaggtataaatgctccaaaaaactttgataaaatcttctgtaaatatatatcaaaattaacaaaaaataattttaaacctgcaaaaaataaatttgaagcaatatcaacacatgattcattggttaatttttcttcttctttaaatttattagctgtttctttattaaaaatttctaacgatatcagatttttggcatctggaccccgctcaggtttgggagagcttgaactccctgaaaatgaacctggttcatcaataatgccagggaaaattaacccaactcaaatagaagctctgagtatggtttgtactcaagtaatgggtaacaacttaactgtaataatatctggttcacaaggtcattttgaattaaatgcatataaacctgtaatagcatacaacattatacagtcagtgaatcttttaggtgatgccattgaaagtttctgcattaaatgtttaataggcatcaagcctaataaataa

SEQ ID NO: 280894 - DNA, 631 bp, Unknown
  Bacterial polypeptide expressing nucleotide sequence isolated from the Sargasso Sea
attccttttaaaccgacaacaaacaaatttgctgcattagcctctcacgatcctatcgtaaatttttctggaacaatgaacacaactgctgtgtgtctgatgaagattgcaaatgacattagatttctaggatctggaccgcgtgctggatatggtgaacttatacttcctgaaaatgaacctggctcttcaattatgcctggaaaagtgaatccaactcaatgcgaagctgtcacaatggtttgtgttaaagtaattggtaatcataatggtattacaatggcaggctcacatggtcattttgaactaaacgtttttaaaccactgattatacataacatattacaatcaattaatattatggctgactcctcaaaagcttttgcgaattattgtattaagggtttaaaagccgataaagaaaggattaaatctcttcttgataattcattgatgttagtaacagcactttctcctaaattaggatacgataatgcagctaaaattgcaaagctagcacataaaaatggcactactttaaaaactgaagctataaaaagtggtctgataactgaaaaagaatttcttaagctagttgatccaaaaaaaatggtcaaacctaaaaattaga

SEQ ID NO: 280895 - DNA, 615 bp, Unknown
  Bacterial polypeptide expressing nucleotide sequence isolated from the Sargasso Sea
catgcgatttgaaaaggattcaatgggagaattagaagtaccttccaaggcctactatggcggaaatactagaagggctgaattaaattttcctatcagtaagcttagattaggaaggtcatttataaaagcaattgcacaagtaaaattgtcagcagcaataacaaataaagaactagggactctagaaaataatatagcaaatgcaataatagatgctgcaaaaaaagttattgatggttattatgacgatcagtttgttgttgatgtatttcaaacaggctcgggtacatcaactaatatgaatgctaatgaggttatttctaatatagctattgaatctttaggaggtttactaggttctagagacccagttcatcctaatgaccatgttaataaaggccaatcatctaatgatgtaatccctacaactattcacgttgctgctgctgtatctataaacgaaaaacttatccctagtctagaaattttagaaaagtcattagagaccaaatctaaagaattttggaacatagtaaaaactggaagaactcatcttcaagatgctacaccaatcagattaggtcaagaatttttaggttatgctggccaaat

SEQ ID NO: 280896 - DNA, 689 bp, Unknown
  Bacterial polypeptide expressing nucleotide sequence isolated from the Sargasso Sea
aatggcttataaaaaaagaatagaatttgatagtttaggttccaagaaaattgatcataataaactttggggtgcgcaaacacaaagatccttagaaaatttcgaaattggcagtgaaaaaataccatcagaattgattgtcgcactaggccagcagaagaaagcagctgcagaagctaatataaaactgggtgttatagataaaaaattgggatcattaatatctaaagcctgcgatgatattattaatttaaaacttattgaagagtttccattatcagtatggcaaactggatctggaactcaaactaatatgaatgcaaatgaagtaattagtaatcatataatcaaaaaattaaaaggaagaattggaagtaaaaaacctattcaccctaatgatcatgtaaatttatctcaatcatcaaatgatacctttccaacaataatgcatgttgcaataaatgagttatcaataaaagatttgattccaaatctaaaagatttaataaaagaatttcaaaaaaagaaaaaaatattcaaaaatataattaaaataggaagaactcatactcaagatgcaacgccaattactttaggtgatgagttttcagcgttttgtactcaattacaagcttgtttaaaaagaatagaagtttcaaaatcagaattaaaatatcttgctcagggtg

SEQ ID NO: 280897 - DNA, 876 bp, Unknown
  Bacterial polypeptide expressing nucleotide sequence isolated from the Sargasso Sea
agttcatccaaatgatcattgcaatatgtcccaatcatcaaatgatacttatcctacagccatgcatattgcatgcgcatcagagatattggatacgttgctacccgcacttacatccctcgctaacaagtttaagaaaaagtctgatgagtgggcgcatgttataaaaattggaagaactcatacgcaagatgctacacccctaacactcgggcaagagttctctggctatgctcagcagattaataacggtattgatagaataaaggatacgctgccaaaactaatggagctagcacaaggtggaactgccgttgggactggcctcaatgcaccaaaagactttggaactaaaatagctcagagtatctcaaagttaacaggcaaaaaatttacaagtgcccccaataagtttgaggctttatcggcacatgacgctatgcttatgactcacggcgcaataaatacggtcgctgcatcactctttaaaatagccaatgatataagatttcttggtagcggcccgcgggctggacttggagagttagcccttccagaaaatgagccaggatcatcaattatgcctggcaaagtaaatcccacccaatgcgaagctctaacacaagtttgcttgcatatttttgggaataatactgccatttcaatagctggcagtcagggccatttccagttgaacgtttttaacccaatgatggcattcaattttttacaatcggtaaagctcatgacagatgccgcaatttcatttgaaaaaaattgcttggatggtcttgaggcgaggcatgaaaatatcaagttaaacctcgaaagatcactgatgcttgtaaccgcactcgcgccaaaaatcggctacga

SEQ ID NO: 280898 - DNA, 625 bp, Unknown
  Bacterial polypeptide expressing nucleotide sequence isolated from the Sargasso Sea
aatgaaattaagaaaagaatttgatagcattggaagcatcaatgttcctaatgataagttgtggggagcatctactcaaagatctaataaatattttaatattggtaaaattttagtaaatatttccatcattaagtctatagcaattatcaaaaggtctgcagcaatagttcatgcaaaagataaattaattaataataaaatatctaaagctattattaaagcttcagatgaaataattaaaggaaaattagacgaaaattttcctttaaaggtttggcaaactggctctggtacacaaacaaacatgaatgttaatgaagttattgctaatcgtgcgatagaaataatgggtggaaaaaaaggctcaaaaaaacctgttcatcctaatgatcatgtaaataaatcacaatctacaaacgatgtttttccaactgcaatgcatatatcggttgtaaaagaatcgttaaataaattattaccaaacttgaagattttagaaaaagaaataaatagaaaatctagagaatttaaaaatatagtaaaaattggacgaactcatcttcaagacgcaactcctctatctttaggtcaagaattttcaggataccatgtacaagttaaa

SEQ ID NO: 280899 - DNA, 779 bp, Unknown
  Bacterial polypeptide expressing nucleotide sequence isolated from the Sargasso Sea
aatgaaattcttcggtgctaagttaggttcctacccctttgttcatccaaatgatcatgtaaatatgtcacaatctacaaatgatacttttccaacagcaattttaattggaagcgtgatatcatctcaggataatttacttcctgcactttctttattggagaagtctttggttgtcaaatcgaaagaatttcacaaaataattaaggttgggaggactcatcttcaggatgcaacgccgatacgattaggccaagaattttcaggatatgcatctatgattaaaaatgatatttcaagaataaagcacgcactaaaaggatgtagcgatttacctgttggcggtacagctgttgggactggaattaatactctcaatggctttgatgagctaatgtgttcatttatctctgaagaaacaggtctttcatttaatgtatgtaagaataaatttgaattgttatcatctcaaaatgcaatatctaacttatcagctcagattagaatttgttcgggatcattaaataaaattgcaaatgatatccgttggttagcatgtggaccgatggctggaattggagaactaattcttccaactaatgaaccaggtagttcgataatgcctggaaaagttaatccaacgcagtgtgaagctgtaaatatggtttatgctcaaattttaggaaatgatactacaataaattacgcaggtactaatggtaattttgaactcaatacttatagaccaattattgcttcatcaattcatgaatcaatat

SEQ ID NO: 280900 - DNA, 636 bp, Unknown
  Bacterial polypeptide expressing nucleotide sequence isolated from the Sargasso Sea
ttacaaaaattaaatttaaacctgctccaaacaaattcgcagaacttgctgctcatgatgcaatagttaacttttctgggaccttgaatacttgtgcggtagctttaatgaaaatatctaatgatattagatttttaggatcagggccaagagctggttatggagaattagttctaccagaaaatgagcccggctcatcaataatgcctggcaaagtaaatcctactcaatgcgaagcggttacaatggtttgtgtaaaagtaattggaaatcataacggtattacgatggctgggtctcacggacattttgaactaaatgtttttaaacctttgatcgctcataacattttacaatcaatagatcttatagctgatagtactaaaaattttgccctttattgtgttaaaggtataaaagcgaataaaaagaaaattcaagaacatttagataattctttaatgcttgtcacggcacttgcgcctcatattggctacgacaatgctgctaaaattgcaaaaactgcacttagaaaaaatactactttaaaatatgaaactttaaaaacaggcttaatctcagaaaaagattataaaaaaatagtagatcctaaaaaaatgatctatccagcataag

SEQ ID NO: 280901 - DNA, 544 bp, Unknown
  Bacterial polypeptide expressing nucleotide sequence isolated from the Sargasso Sea
aatgaaatacagattagaatttgacagtattggaaaaataaaagtacctggtgataagtattggggtgcttcgactgaaagatcaaataaatattttaatattggagattttttagttaggccattagttatccactcaatagccattatcaaaaaagctgcagcaatcgtaaattctagaaataaagatttagactctagattaagtaaatatatcattaaagcagcagaagaagttataaaaggaaagcacgataaacattttcctttaaaagtttggcaaactgggtctggtacacaaacaaatatgaacgtaaacgaagtaattgctaatagagctatagagatgatgggtggaaaaatgggttctaaaaaaccagtgcatccaaatgaccatgttaataaatctcagtctaccaatgatgtttttccaacagcaatgctcatttcaattgctttaaaagctagagaaaaacttttaccttcattaaaacttttagaaaaagaattatcaaaaaaatcaaaagaatttaaaaaaattgtt

SEQ ID NO: 280902 - DNA, 790 bp, Unknown
  Bacterial polypeptide expressing nucleotide sequence isolated from the Sargasso Sea
acaaaaaataaactcctaccgtcattaaaacttttggaaaaagagttagataaaaaggtaaaaaaatttagtaaaatcgttaaattaggcagaactcatcttcaagatgctactcctttaactttgggccaagagttttctggttaccactcgcaattaaaaagatgtatatccagaatagaaaaagctcttggtgaaatatattatttagcacaaggtggtacagctgtcggtactggtctgaatactaagaaaaattttgataaaaaagttgtgagagaaataaaaaaaattactaaacttccatttaagcctgctaaaaacaaatttgcagcactagcatctcatgatccaattgttaatttttctggaacaatgaacacaacagctgtttgtctcatgaaaatagcaaatgatattagatttcttggatctggacctagagctggctacggggaacttatacttccagaaaacgaacctggttcctcaattatgcctggcaaggtaaatccaactcaatgtgaagcagttactatggtctgtgtaaaagtaattggtaatcataatggaattacaatggctggatcacatggtcattttgaattaaatgtttttaaaccattaattattcacaatatattacaatctataaatattatggccgactcatctaaagcgtttgccagccattgtattcgaggattaaaagcggataaaaaaagaataaaatctcttctagacaattcgcttatgatagtcacagccctttcaccaaaaattggttacg

SEQ ID NO: 280903 - DNA, 901 bp, Unknown
  Bacterial polypeptide expressing nucleotide sequence isolated from the Sargasso Sea
cctaatgatcatgtaaataaatctcaatcaaccaatgatgtttttcctacagcaatgcacattgctattgctattgagactaaaaaaaaattactaccttctttaaaagatcttagtaaagaattaaaaataaaggtaaataaatttaaaaatattgtcaaagttggaagaacacatcttcaggatgcaactccactcactctaggacaagaattttctggatattattcacaattaaatgactgtattctaagaattgaaaattctttaaaagaaattttttttcttgctcaaggtggaacagcagttggaactggaattaattcaaagaaagactttgatgtaaaaatctgtagagagattagtaaattaactaaaataaaattctatcctgcaaaaaataaatttgcagctcttgctgcacatgatgcaattgtaaatttctcgggcactttaaatacaacagcagtttgtttaatgaaaattgcaaacgatatccgttttttaggttcaggtcctagagctggttatggggaattattattgcctgcaaacgaaccagggtcatcaataatgcctggaaaagttaatccaacccaatgcgaagctgtcacaatggtttgcgttaaagtgattggaaatcacacaggtattacactcgcaggttctcagggacaatttgaattaaacgtttttaaacctctcattgctcacaatattcttcaatcaatagatcttttgtccgatagctcaaaaaatttttcacaattttgtataaaggggatcaaagctgatttaaaaaagataaatgaggacttgagtaattctttaatgttagtcacagctctagctcctaaattaggttatgataatgcagctcaaattgcaaaatctgctctaa

SEQ ID NO: 280904 - DNA, 833 bp, Unknown
  Bacterial polypeptide expressing nucleotide sequence isolated from the Sargasso Sea
caatgaaaccttaagtaaattgttaccaaacttaaagattttagaaaaagaattgaatagaaaatctaaagaatttaaaaatatagtaaaaattgggcggacgcatcttcaagacgcaacacctctttcgttaggtcaagaattctcagggtaccatgtgcaagttaaaaaaagtatcgaaagaattgagtacgctttaaaagagattttatttcttgcccaaggcgggacggcagttggaacaggtataaattcaaaaaaaaactttgacaaaaaagtagttaaagagattgcaaaatttacaaaaattaaatttaagcctgctgcaaataaatttgcagaacttgctgctcatgatgcaatagttaatttttctggaaccttaaatacatgtgcagtagctttaatgaaaatatctaatgatattagatttttaggttcaggcccgagagctggttatggagaattaattttgccagaaaatgaaccaggttcatctataatgcctggaaaagttaatcctactcaatgtgaagctgttactatggtttgtgtaaaagttattggaaaccacactggtattacaatggccggatcgcatggacactttgagttgaatgttttcaaaccactaattgcacataatattttacagtcaatagatctaatagcagacagcactaaaaattttgcaatttattgtgttaaaggaataaaggccaacaaaaagaaaattcaggaacatttagacaattctttaatgctagttacagcactcgcacctcacataggctacgataatgctgctaaaattgcaaagactgcactaaaga

SEQ ID NO: 280905 - DNA, 565 bp, Unknown
  Bacterial polypeptide expressing nucleotide sequence isolated from the Sargasso Sea
aatgtcaggtgttttgaatgtaattgctactgatctatttaaaattgctaatgatatacgtctattggcatctggcccaagatccgggctgggagaactgagtctacctgaaaatgagcccggctcatctattatgccagggaaagttaatccaactcagagtgaagctttaacgatggtttgcttgcaagttatgggctttcataacactatttcaatggctggttcacaagggcactttgagcttaacgcatttaagcccctaattggactcaatataattaactcagttaatttactttcaaccggaattaataactttaatgaaaaatgtcttaaaggaataaaacttaatataaaaaatattagacaaggagttgaaaattcattaatgctggtaactgcgcttgctccagaaattgggtatgctaaagctgctgaattggcaaaagtagctcataaaaaaaatatctcacttatcgaagcaaataaaaatcttaaatatttagataataaaaagattaaatctctccttgatcctaagaaaatgatttcttcttcataa

SEQ ID NO: 280906 - DNA, 360 bp, Unknown
  Bacterial polypeptide expressing nucleotide sequence isolated from the Sargasso Sea
catggtcaaatttcgtattgaaaaagatagcttaggggaaatcaaagttgaaagctcaaaactatggggtgcacaaacacaaaggtcaatagagaactttcaaataggtattggtaaatttcattttcaaaatatatttatagaagctctagctttacaaaaaaaatcatgtgctttagcaaattcagaatttaaattattatcaaaaaatcatacaaaaattattggaaaagtttgtgatttaattatttcaggaaaattaaataatcattttcctcttgttgtatggcaaactgggtcagggacccaaattaatatgaaccttaatgaagtgattgctaataaaagcaatcaattatt

SEQ ID NO: 280907 - DNA, 519 bp, Unknown
  Bacterial polypeptide expressing nucleotide sequence isolated from the Sargasso Sea
ctaatgatataagatttttaggatctggtccgagagctggttatggagaattaattttgccagaaaatgaaccaggttcatctataatgcctggtaaagttaatcctactcaatgtgaggctgttacaatggtttgtgtaaaagttattggaaaccacaatggtataacgatggctggatcacatggtcattttgaattaaatgtttttaaacctttgatagcacataacattttgcaatcgattgatctaattgccgacagcaccaaaaattttgctatttattgtgttaggggaataaaagcgaataagaagaaaatacaagaacacttagataattctttaatgcttgttacatcactagcgccccacataggctatgacaacgctgccaaaattgcaaagacagcacttaaaaacaatactactttaaaacatgaaacattaaaaacaggcctgatatcagaaaaagattacaataagatagttgatcccaaaaagatgatctacccagcataag

SEQ ID NO: 280908 - DNA, 751 bp, Unknown
  Bacterial polypeptide expressing nucleotide sequence isolated from the Sargasso Sea
atacaattgtcacttaaagaaatttataatttagctcaaggcggtacagcagtgggtactggattaaataccagaaaaaattttgataaaaaaattgtcaaagaaataagtaaaattacaagaattccctttaaggctgcgtcaaataagttcgctgcattagctgcccatgacgaaattgtaaatttttcaggagctttaaatactacggcagtttgtttgatgaaaattgcaaacgatataagatttctaggatctggtccgcgggcgggatatgcagagctaatactcccatctaatgaaccaggttcatcaataatgcctggtaaagtaaatccaacacaaactgaagctgtgacaatggtgtgtgtgaaagtaattggtaatcataatggtatcactatggcagggtcacacggtcattttgaattaaatgtattcaaacctttgatagcccacaacattctacaatcaattgagattatgagtgactcagctaaaacttttgcattatattgcgtaaaaggaattaaagctgacaaaaaaaggattaaaagtctcctagataattctttaatgcttgtaacagctcttgctccgaaaattggatatgatcaagcagcgaatattgcaaaattagctcacaaaaatggaacaactttaaaagaggaagtaattaaggcgagattattaaaagaaagggattatgataaaattatggatcctatgaaaatgactaaacctaaataaa

SEQ ID NO: 280909 - DNA, 722 bp, Unknown
  Bacterial polypeptide expressing nucleotide sequence isolated from the Sargasso Sea
taaattaatagatagcagaatatcaaaagcaattattagagcgtcagatgaagtgatcaaaggtaagttagatgataatttcccattaaaagtttggcaaactggctctggaacgcaaacaaatatgaatgtaaatgaagttgttgctaatcgtgcaatagaaattatgggtggaaaaaaaggttcaaaaaaacctgttcatccaaatgatcatgtaaataaatctcaatctacaaatgacgtttttccaacagcgatgcatatttctgttgcaaaagaaacattaagtaaattattaccaaacttaaaaattttagaaaaagaattaaacagaaagtctagagaatttaaaaatatagtaaaaattggacggacacaccttcaagatgcaactcctctttctttaggtcaagaattttcaggataccatgtgcatgtcaaaaaaagtattgaaagaattgaatatgctttaaaggaaattttattccttgctcagggtgggacggcagttggaacggggataaattcaagaaaaaactttgataaaaaagtagttaaagaaattgcaaaatttacaaaaattaaatttaaacctgctccaaataaatttgctgaacttgctgctcatgatgcgatagtcaatttttcaggaacattaaatacatgtgcggtggctttaatgaaaatatctaatgatattagatttttaggatcaggtccaa

SEQ ID NO: 280910 - DNA, 876 bp, Unknown
  Bacterial polypeptide expressing nucleotide sequence isolated from the Sargasso Sea
atttctaatagagcaattgaaatacttaaaggtaaaaagggcacaaaaaaacccgttcatccaaatgatcacgtaaataaatctcagtctactaatgatgtatttcccacagcaatgcacatagcaatagcaatggaaactagagaaaaacttttaccaagtttaatattattaaataaagaattaaaaaaaaaggtaagtgaatttaataaaatagtcaaaattggtagaacacaccttcaggatgctacccctttgtcattgggtcaagaattttctggctatcaatctcaactagaagaatgcattaaaagaataaaagtttcactgaatgaaatatattatttagcacaaggtggtactgcggtaggtacgggtattaataccaaaaaaaattttgataaaaaaatagtaaatgaaattaaaaaaatcacaaagttaccttttaagccagctaaaaataagtttgctgcacttgccgctcatgatgcaatagtaaattattcaggtacattaaatacaactgctgtatgtctaatgaaaatagcaaatgatattaggtttttaggttcaggaccaagagctgggtatggagagttgatattgccagagaatgaacctggatcatcaattatgccaggtaaagtaaatccaactcaatgtgaagctgtaacaatggtatgtgtgaaagtaattggtaaccacaatggaattacaatggctggttcacatggtcattttgaacttaatgtttttaaacctttaataattcataatgtacttcaatcaatccaaattctctcggatagcacaaaaagttttgcaaaatattgtatcactggactgaaagctgacaaaaatagaattaaacactta

SEQ ID NO: 280911 - DNA, 763 bp, Unknown
  Bacterial polypeptide expressing nucleotide sequence isolated from the Sargasso Sea
actacattgaaaggtcaatcaaaaaaatgggataagataattaaagttggacgtacacacttacaagacgcgaccccactttctcttggacaagagttttcgggatatgaagcaatgataagctctaatatcaaacgagttgaacagtcatttggtagcttattaaatcttgcacaaggaggtacggctgttggatctggcctgaatacaaaaagaaattttgataaactggttattaatgaaattagtaaaattgctaagataaaatttaaacctgcaattaataaatttcaggctttagctgcccatgatgcgatagttgagatgtcggggtcacttaatgtattaacaacagacttatttaaaattgcaaacgacataaggttactaggctcaggcccaagatcaggactaggagagttaaacctgcctgaaaatgaacctggatcatcaattatgccaggtaaggtcaatcctacacaatgtgaagcattaactatggtttgcgtgcaagcgatgggcatgcataacacaatcagtttagctggctcacaaggtcactttgaacttaatgcttataaacctgtaataggacataatattattgaattaatacatcttctatcaagtggaatggacaattttaatgataagtgtctaaaaggcattaaaccaaacttaaaaaatattaaatctggtttagataattcgttaatgcttgtaaccgcactcgctcctgaaattggttattcaaaagcagcag

SEQ ID NO: 280912 - DNA, 553 bp, Unknown
  Bacterial polypeptide expressing nucleotide sequence isolated from the Sargasso Sea
gttgctggatcgttgtttaaaattgcaaatgatataagatggctagccagtggtcccagaagtggtattggtgaattaacattgcctgctaatgagccagggtcatcaattatgccaggtaaggtcaatccgacacagtgcgaagctatgacaatgttatgtactcaggtaatgggtaacgatgtaactataggatttgctggtgcttcagggaattttgaattaaatgtttatagaccagtgctcgcttataatattcttcaatctattcgattactttcagatggatgtcgttctttcacaaagcatgctatttctggtattgaaccgaatcaagagcgcattgatcataatttatataactctctgatgttggtcacagcattaaatcctcatattgggtatgataaagcttctgaagtcgcaaaaaaagcatttaaagacaagagtactctacgtgaagctattactgaattaggttatttgactgcagatagatttgatgaacttgtaaatccggcggatatgattaagcctaagaaaaaagactaat

SEQ ID NO: 280913 - DNA, 382 bp, Unknown
  Bacterial polypeptide expressing nucleotide sequence isolated from the Sargasso Sea
atgaaatttagaaaagagtttgatagtattggaaaaatcaaagttccattagacaaatattggggagcatcaacacagagatcaaaaaaattttttgatattggagaaatttatgtacaaaaaatacttataagatctatagcaattataaaaaaggcagcagctaatgttcacaagaaagaggggcaaattcaaccaaaaattgctaatgccataataaaagcatctaacgagattatatcaggaaagctccaggaaaattttcctttaaaagtttggcaaacaggatctgggacacaaaccaacatgaatgttaacgaggtgatttctaacagggctattgaaattttaggcggtagattaggatcaaaaataccagttc

SEQ ID NO: 280914 - DNA, 861 bp, Unknown
  Bacterial polypeptide expressing nucleotide sequence isolated from the Sargasso Sea
aatcgagcaatagaaattttgggaggaagaaaaggaacaaaaaaaccagtacatccaaatgatcatgtaaataaatctcaatccacaaatgatgtttttccaactgcaatgcatatttctattgcaaaagaaacaattacaaaattattacctaatttaaaaattttagaaaaagagttaaaaagaaaatctaaagaatttaaaaatatagttaaaattggaagaactcatctacaagatgcaacaccactttctcttggacaggaattttcaggatatcatgttcaggttaaaaaatgtatagaaaggttagaatatgctctaaaagaaattttttttcttgctcaaggtggaactgctgtaggaactggaataaactctaaaaagaattttgataaaaagattgtaaaagaaatcgctaaatttacaaaaataaattttaaaccagcggcgaataaatttgctgaacttgctgcacatgattccattgtaaatttttctggaactttaaatacttgtgcggttgctttaatgaaaatatctaatgatattagatttttaggatctggacccagagctggatatggtgaacttattttacctgaaaatgaaccaggttcatcaataatgcctgggaaagttaatccaactcaatgtgaagctgtaacaatggtttgtgtaaaagtaataggaaaccataacggcattactattgcaggttctcatggtcacttcgaattaaatgttttcaaacctttaattgcacataatattttacaatctatagatctaatagctgacagtacaaaaaattttgctatttattgtgttaaaaggtataaaagccaaataagaaaaaaa

SEQ ID NO: 280915 - DNA, 706 bp, Unknown
  Bacterial polypeptide expressing nucleotide sequence isolated from the Sargasso Sea
actgcggtagggactggtattaatagtaaaaaaggttttgatagaaaaattattaatgagataaaaaaaataactaaaatctcatttatgccaacaaagaataaatttgctgctttagccgctcatgatgaaattgtaaatttttcaggcacattaaatactaccgctgtaagtttaatgaaaattgctaatgatataagatttttgggctcaggaccaagagcaggctatggtgaacttattttaccagcgaatgaaccaggttcttctattatgccaggaaaagtaaatcctacccaatcagaagctgtaacaatggtatgtgtaaaagttataggaaatcataatggaataacaatggctgggtctcatggacactttgaattaaatgtattcaaaccactgatagcacataatatcctgcaatcaattgatctacttgcagatagctctaaaaattttgccttgtattgtgttaaaggattaaaagctgacaaagataaaattaaatactatctcgataattccttaatgctcgtaacagctttagcaccaaaaattggttatgataatgcagctaagattgcaaaaaaggctcttaaaaataaaacaacacttaaaaaagaagctatcaaaaccggacttattaatgaaaatgattatgataaaactataaatccaaaaaaaatgatttatccatcataat

SEQ ID NO: 280916 - DNA, 688 bp, Unknown
  Bacterial polypeptide expressing nucleotide sequence isolated from the Sargasso Sea
aatgaagtacagaattgaatttgatagcattggtaaaattaaagtacctggtgataaatattggggagcttcgactgaaaggtctaataaatattttaacattggtgattttcttgttaggccaatagttatccaatcaatcgcaataataaaaaaagctgcagcaattaccaactataaaaacaaagatttagataaaaatattagtagatatatagttaaagcaagtgaagaggttatcaaaggtaaacttgacaatcactttcctctaaaagtttggcaaactggttctggaactcaaacaaatatgaatgtaaatgaggttattgcaaatagagcaatagaaatgatggggggcaaaatgggctcgaaaaaacccgttcatcctaatgatcacgttaataaatcccaatctacaaatgatgttttcccaactgctatgcatatatccatcgccattaaggctaatcaaaaattacttccgtctttgaaactattggaaaaagagataggtaaaaaggtaaaggaatttaaaaacatagttaaggttggtcgaactcatctacaagatgctacgcctattacgctcggtcaagaattttctggataccagtctcaactaaaaaaatgtatcgagagaattgagagagcattagatgaaatatattatttagcgcaaggtggaact

SEQ ID NO: 280917 - DNA, 975 bp, Unknown
  Bacterial polypeptide expressing nucleotide sequence isolated from the Sargasso Sea
tatgaaattcagaaaagaatacgacagcattggcagtgtttatgtacctgtggataagtattggggagcttccactcaaagatccaaaaaatatttcaatataggagatgtattagttggaccaaaattaataaaatctattgctataataaaaaaagctgcagctattacaaattatagaaacaatgacattagttcaaaaatttgtaaatcaatcataagagctgcggatgaaataatcagtggaaaattagacaatcattttcctctaaaagtttggcaaactggatctggaactcaaactaatatgaatgtaaatgaggtcatttcaaatagagctattgaaatattaaaaggaaaaaagggttctaaaaaacctgtgcatccaaatgatcatgtaaataaatctcaatccactaacgacgtatttccaactgcaatgcacattgcaatagctatggaaactaaggagagactattgccaagtttatttctattaaataaagagttaaaaaaaaaagtaaaagaatttaacaaaattgttaaaataggaagaacgcatctacaagatgcaacacctttatctttaggacaagaattttctggatatcaatcacaattagaagattgcataaaaagaattcaagtttctttaaatgaaatttactacctggcccagggtggaacggctgttggtactggcataaatacaaaaaaaaattttgataagaaaattgtttatgaaataaaaaaaattacaaaattaccatttaaaccagctaagaataaatttgctgctttagctgctcatgatgcaattgtaaattattcaggtacactaaacacaactgcagtaagtttaatgaaaattgcaaacgatattagatttttagggtcaggtcccagagctggatatggagaattaatactttcagaagatgagccagggtcatcgattatgcctggcaaagtaaa

SEQ ID NO: 280918 - DNA, 922 bp, Unknown
  Bacterial polypeptide expressing nucleotide sequence isolated from the Sargasso Sea
aaatttcgtaaagaatttgacagtatcggatcaataaaagtaccaaatgacaaatattggggtgcatcaacccaaagatcaaaaaaatattttgacataggagaatttttagtaagacctagattaattaaatctattgctattataaaaaaagcagctgcaaaagttcatttaaaagagaaacaaattttgcctaaaatttgtagagcaataatttctgcatcaaatgaagttatttcaggaaaactagatgaaaattttccattgaaagtttggcaaacaggatctggcacacaaacaaacatgaatgtaaatgaagtgatagctaacagagctatagagattttaggaggaaaaaagggttcaaaaaagccggtacatcctaatgatcacgtgaacaaatcacagtcaactaacgatgttttcccaactgcaatgcatatagctatagctattgaaacaaagaataaattacttccttccctaaagctactcaataaagtacttaaaaaaaaagtttcagcgtttaaaaatattataaaagttggaagaacacatcttcaagatgcaacacctctctccttaggacaagaattctcaggctatcaatctcaaattgaggatagtattaatagaattaataaagcattgaatgaaatatattctcttgcacaaggtggaactgctgttggaactggaattaacagtaaaaaaaactttgataagaaaataataaatgagataaaaaaaattactaaattaccatttaaacccacaaaaaataagtttgcggctttagcggcacatgacgaaatagtgaatttttctggaacattaaatacaaccgcagtgagtttaatgaaaatagcgaatgacataagatttttaggatctggtcctagagcaggttatggagaacttt

SEQ ID NO: 280919 - DNA, 391 bp, Unknown
  Bacterial polypeptide expressing nucleotide sequence isolated from the Sargasso Sea
atgaaattcagaaaagaatatgacagtattggttctataaatgtgcctgtggataagtattggggagcatccacacaaagatcaaaaaaatactttgatattggagatgtattagtcagaccaaagttaattaaatccatagctattataaaaaaggcagcagctatttcaaattataaaaataaagatattcgttcaaaagtttataaatcgattgtacgtgcatctaatgaagtaattaatggaaaattagataatcatttcccccttcaagtttggcagactggttctggcacacaaacaaatatgaacgtgaatgaggttatttctaacagggcaattgaaatactaaaaggtaaaaaaggtacaaaaaaacctgtgcatcatcaat

SEQ ID NO: 280920 - DNA, 466 bp, Unknown
  Bacterial polypeptide expressing nucleotide sequence isolated from the Sargasso Sea
atgaaattaagaaaagaatttgacagtataggaagtgttaatgttccaaatgataaatattggggggcttcaactcaaagatcaaataaattttttaatattggaaaaattttagtaaacatttcaatcataaaatccattgcaattatcaagagatcagctgcaatagtacactctaaagataaattaattaacagtaaaatatctaaagcaattattaaagcttctgatgaggtaattaaaggtaaattggacaaaaactttcctttaaaagtctggcaaacaggctctggaacccaaactaatatgaatgttaatgaagtaattgctaaccgttcgattgaaattttaggtggtaaaaaaggaacaaaaaaaccagttcatcctaatgatcatgtaaataaatctcaatctactaatgatgtgttcccaactgctatgcatatttctatcgctcaagaaacaa

SEQ ID NO: 280921 - DNA, 517 bp, Unknown
  Bacterial polypeptide expressing nucleotide sequence isolated from the Sargasso Sea
aatgatattcgttttttaggttctggtcctagagctggttatggagaattaattttaccagaaaatgaacctggctcatcaatcatgcctggaaaagtaaatccaacacaatgtgaagctgtaaccatggtttgtgttaaagttattggaaaccacaacggaataactatggcaggatctcatggacattttgaactaaatgtttttaagccattaattgctcataacatcttacagtcaatcgacttgattgctgacagtacaaagaattttgctctttattgtgttaaaggaataaaagctaataaaaaaaaaatacaggagcatcttgataattcattaatgcttgttacagcactagccccacatattgggtatgataatgctgcaaaaattgcaaaaactgcacttaaaaataatacgactttaaagcatgaaactttaaagacaggactaataactgaaaaagactacaataaaattgttgatcctaaaaagatgatttacccagcatagc

SEQ ID NO: 280922 - DNA, 856 bp, Unknown
  Bacterial polypeptide expressing nucleotide sequence isolated from the Sargasso Sea
tatgaaatatagatacgaatctgacagtttgggaaaaataaaagttccaagcgataaatactggggtgcgtcaactcaaagatctaacaaacattttaacataggcgactttttagtaagaccaattgttattaagtctattgctatgattaagaaagctgccgcaatagtaaatgcaaaaaatggagatattgataaaaaattaagcaaagcaattattaaagcatcaggggaagttatttcaggaaaatttaatgatcattttcccctcaaagtttggcaaacgggttctggcactcaaactaatatgaatgttaacgaagttatagctaatagagccaatgaaattcttgggtctaaattgggaagtaaaaaacctgtacacccaaatgaccatgtaaataaatctcagtcaactaacgacgttttcccgacggcaatgcatatggctatagctatcagagcaaaaggcaaactgttaccttttcttaaactattaaataaagaattagaaaaaaaatctaaacagtttaaaaatattataaaagtaggaagaactcatcttcaagatgctacacctattacattgggacaggaattttctggatacagctcgcaactagataaatgcattaaaaggatagagatagcacttaaagaaatatactttttagctcaaggcggaacagcagtgggcacaggtttaaataccaaaaaaggtttcgataaaaaaataatagctgaattaagaaaaataactaatcttccttttaaacctgcatcaaataagtttgctgcattagctgcacacgatgccattgtaaatttttctggaactaatgaatactactgctgt

SEQ ID NO: 280923 - DNA, 760 bp, Unknown
  Bacterial polypeptide expressing nucleotide sequence isolated from the Sargasso Sea
tgagggagcgcaaactcaacgctctttagagaattttaagatttcgaatgataaaatgccaaaagaaataataatagctttaggtatgcaaaaaaaagcagctgttttagctaatcaaaatctaggattaataaataaaaatttgtcaaatgctattgttaaagcttgtgatcaagtaattaatctaaatctacttgatgaatttccattgtctgtatggcaaacaggttccggtactcaaacaaatatgaatgctaatgaagttatcagtaattacgcaattaaaactttaaaaggaaaaatcggctcaaaatcgcccattcatcccaatgatcatgtaaatttatctcaatcttctaatgatacttttccaaccgtaatgcacattgcagctaatgagttaactgataagaaacttattccagcgataaaaaatttaattaaagagtttaagattaaaacaaaatcatattcaaaaataataaaaattggtcgtacacacactcaagatgccacacctttaacaatgggagatgagttttctggctacctgcatcaaattcaaaataattataaaagaataattctgactaaaaaagagctaaattatttagcacaaggaggcactgctgttggctctggtataaatgctcctaaaaatttcgataagattttctgtaaacatctaaataagatgacaaaaaataaatataagccagctataaataaatttgaggtaatagctaatcatgactcttta

SEQ ID NO: 280924 - DNA, 670 bp, Unknown
  Bacterial polypeptide expressing nucleotide sequence isolated from the Sargasso Sea
cctaagttaagtaaatacattataagagcttcagaagaagtaataaaaggtaaacacgataaacattttcctttaaaggtttggcaaacaggatctggtactcaaacaaatatgaatgtgaatgaagttattgctaatcgagctattcaaattatgggtggtaaaatgggtacaaaaaaacctattcatcctaatgatcatgtaaataaatcacaatcaacgaatgatgtatttccaacagcaatgcacatttcaatagcattaaaagctaaggaaaaacttttaccttctttaaaactactagaaaatgaattagctaaaaaatctagagaatttaagaagattgttaaagttggcagaactcatttacaagatgctactcctttaacgctagggcaggaattttctggttatcatagtcagttaaaaaaatgtataattagggtagaggctgctctaaaggagatttattttttagcacaaggtggaacggcggtaggcacaggattaaacactcgaaaaaactttgataaaaaaattataaaagaaattagcaaaataacgaaattaccatttaagccttcctcgaataaatttgcagctttagctgcgcatgacgaaatagtgaatttttcagatacacttaatacaacagcagtctgtttaatga

SEQ ID NO: 280925 - DNA, 545 bp, Unknown
  Bacterial polypeptide expressing nucleotide sequence isolated from the Sargasso Sea
ttgtgcagtagctttaatgaaaatatctaatgatataagatttttaggatctggtccaagggctggttatggagaattaattttgccagaaaatgaaccaggttcatctataatgcctggtaaagttaatcctactcaatgtgaggctgttacaatggtttgtgtaaaagttattggaaaccacaatggtataacgatggctggatcacatggtcattttgaattaaatgtttttaaacctttgatagcacataacattttgcaatcgattgatcttattgccgacagcaccaaaaattttgctattttttgtgttaggggaataaaagcgaacaagaagaaaatacaagaacacttagataattctttaatgcttgttacatcactagcgccccacataggctatgacaatgctgccaaaattgcaaagacagcacttaaaaacaatactactttaaaacatgaaacattaaaaacaggccttatatcagaaaaagattacaataagatagttgatcccaaaaagatgatctacccagcataag

SEQ ID NO: 280926 - DNA, 337 bp, Unknown
  Bacterial polypeptide expressing nucleotide sequence isolated from the Sargasso Sea
atggcatttagaattgaaaaggatagcatgggtgaacttcaagtgccttcaaatagatattatggtgctcagacacaaagatcgttaaataattttaaaattaatgatgaaaaatttcctagagagtttatcagagcatatggaattcttaagaagagcgcatctatagtaaatagccgcaataataaaattgaactaaagctttctgacgcaatatgttcagcggcaaatgaagtaatagaaggaaagcttgacgaacactttcctctggttgtttggcaaacaggctctgggactcaaacaaatatgaacttcaatgaagttatttcgaatagag

SEQ ID NO: 280927 - DNA, 826 bp, Unknown
  Bacterial polypeptide expressing nucleotide sequence isolated from the Sargasso Sea
attattaaacaaagaactcaaaaaaaaagtatctcaatttaaaaagatagtaaaagttggcagaactcatttacaagatgcaacgccattatctttaggccaagaattttctggttatcaatctcaactagaagattgtatcaaaagaatagaaaatgcattaagtgaaatttatttgttagcacaaggtggtactgcagtaggaacaggaataaatagtaaaaaaggttttgataaaaaaattataaatgagataaaaaaaataactaaaattccttttaagcctactaaaaataaatttgctgcactcgcagctcatgatgagattgttaatttttctggaactttaaatacgacagctgtttgtttaatgaaagtagctaacgatattagatttttagggtctggtccaagggcaggttatggtgaattgattctaccagcaaatgaaccaggttcatcgataatgccaggtaaagtaaatccaacgcaatcagaagctgtcactatggtttgtgtaaaagtaataggaaatcataatgggattactatggcaggctctcatggtcattttgaactaaatgtatttaagcctttaatcgctcataacatattacaatcaatagatttattagcagatagttctaagaattttgctttgtattgtattaaaggcttaaaagcagataaagaaaaaataaatttttatttagaaaattctttaatgttagttacagctttagctcctaaaattggttatgataatgctgcaaagattgctaaatcagcgttaaaaaacaaaagtacacttaaaactgaagctctt

SEQ ID NO: 280928 - DNA, 724 bp, Unknown
  Bacterial polypeptide expressing nucleotide sequence isolated from the Sargasso Sea
atggctgacacgtaccgcacagagagagattctcttggcgagatgaaggtccctgcagaagcacgctacggtccgcagactcagcgcgccgtagagaattttcctatcagtggtcagcgtttcagtcgtcgttttattcaggctatgggtctgatcaagaaatcggctgccgagaccaacgttgaactgggcaacctcgatccgggtgtagcaaaggcgatcattgcagccgcgggtgaagttgcggatggcgaatgggatgaggagttcgttctggacatctaccagactggctctggtacgtcgacgaacatgaataccaatgaggtggtcgcgcatagggcgacagagcttctggaaggcacaggctcggtgcatccaaacgatcacgtaaattttggacagtcctcaaacgatacgatcccgaccgcgattcacatctctacccgcatcgcgattgaggaagaactaataccggcccttcagcacatgcacgatgcgctggctgagaaggctaccgaattcgacggagttctgaagtccggacgaactcacctcatggacgcgacgcccgttcgtcttggtcaggagttttctggatacgcaacacagatccggaagggcatcgagcgcgttcgtttggttgcggctgagttggaggaactcgcactcggcggaacggccaccggtacgggcattaacacgcatgaggattttcaacgca

SEQ ID NO: 280929 - DNA, 823 bp, Unknown
  Bacterial polypeptide expressing nucleotide sequence isolated from the Sargasso Sea
gatggacgccacaccattgactttgggacaggaattttctggatatgcatcacaaataaagcatggtttaaaatctttacaaaactcattagatcatctatctgaattagcaattggcggaacagcagttgggactggattgaattgtccagatggttttgacaaattaacagtgaaaaatatttcaaaggattgtaatattaatttcaaagtcgcagaaaataaatttgaagccattgcatctcatgatgctatagttgaaacacactcatctattaaacaacttgcaatatcaatttacaaaatagcaaatgacattagattgctaggaagtggtccaagagctggtttttctgagctgattttgcctgcaaatgagcctggaagttctattatgcctggaaaaattaatccaacacaatgtgaggcaatttgtatggtttgtgctcaaattattggtaatgattacactataagctttgctggtactcaaggtcatcttgaactaaatgtgtataaaccactaatggcttcaaagattatagaatccttaaaattattaactgactctgtaattagtttcgaaaaaaattgcgttaagggattaaaagcaaataaaaaaataattaaagaacatctaaataattcattgatgctcgttactgcactgaacaataaaattggatattataaagctgcagaaattgcaaacaatgcatatagaaatggtacaactcttaaagaagaagcgattaaattaaagtacttaaccagcagtgagtttgatcagtgggttgatccaaaaaaaatgacaggaaaataa

SEQ ID NO: 280930 - DNA, 513 bp, Unknown
  Bacterial polypeptide expressing nucleotide sequence isolated from the Sargasso Sea
atattcgctttcttggttctggtccaagagctggatatggagaattacttctcccagaaaatgaaccaggttcatctataatgccgggtaaagtaaatccaacacaatgtgaagcagtcacaatggtttgtgtaaaagttataggaaaccacaatggaataactatggcagggtctcatggtcattttgaactaaacgtatttaagcctttaattgctcataatgttttacaatcaattgatttaatagctgacagtacaaaaaattttgctctttattgtgttaaaggaataaaagctaacaaaaagaaaatacaagaacatcttgataattcattaatgcttgtcactgcacttgttcctcatatcggatatgataaggccgcaaaaattgccaaaagagctcttaaaaataatactactttaaaacacgaaactttaaaaacaggattaataagcgaaaaagattacaaaagaatagttaaccctaaaaaaatgatctatccagcataac

SEQ ID NO: 280931 - DNA, 919 bp, Unknown
  Bacterial polypeptide expressing nucleotide sequence isolated from the Sargasso Sea
aatgtcccacgtgataaatattgggggtgcatctacacaaagatctaataaattttttaatattggtaaaattctagtaaatatctccattattaagtctattgcgatcattaaaagatcagctgcaatagttcacgctaaagataaattaattgaaaacaaaatttctagagcaattataaaagcatcagatgaggtgatcagtggaaaactggacgaaaattttcctttaaaagtttggcaaacgggatcaggaacacaaaccaatatgaatgttaatgaagtaattgcaaacagagcaatagaaattttaggtggaaaaaaaggaacaaaaaaacctgttcatcctaacgatcatgttaataaatctcagtctacaaatgatgtatttcccacagcaatgcatatttcagttgcaaaggagacaattagtaagatgctgcctagtttaaaacttttagaaaaagaattaaaaaaaaagtctaatgaatttaaaaatatagttaaaattggtaggactcatcttcaagatgcaacccccctttctcttggacaggaattttcaggatatcattttcaagttaaaaaaagcattgaaagaatagaacattctcttaaagaaatattatttcttgctcaaggtggtacagcagttggtactggattaaattcaaagaaaaattttgacaaaaaaattatcaaagaaattgctaaatttgcaaaaataaaattcaaaccagctccaaataaatttgctgagttagctgctcacgatgcgattgtaaatttttctggcacattgaatacttgtgcagtagctctaatgaaaatatctaatgatatacgtttcttaggctctggacccagagctggatatggagaattattctacctgaaaatgaacctggctcatccataa

SEQ ID NO: 280932 - DNA, 797 bp, Unknown
  Bacterial polypeptide expressing nucleotide sequence isolated from the Sargasso Sea
tattcatcctaatgatcatgttaataaatcacaatcaacaaactatgtttttccaactgcaatgcatattgcgatcgctttaaagactaaaaacaaacttttgccttcactaaaattactagaaaaagaattagcaaaaaaaaccaaagaatttaaaaatattgtaaaagttggtagaactcatttacaagatgctacgcctttaacgttgggccaagaattttcaggttatcactctcaattaaaacaatgcattaatagagtagaaaatgctcttaaagaaatacattttttagctcaaggtgggaccgctgtaggaacaggtttaaataccaaaaaaaattttgataaaaaaattgtaaaagaaataaataaaataactaaattaaaatttaaaattgctccaaataaatttgcagccttagcagctcacgatgagattgttaatttttctggagctcttaacaccactgcagtatgtttaatgaagattgctaacgatattagatttttaggatctggtcctagagcaggatacggtgagttaatcttgccctcaaatgaaccaggttcatctattatgccaggaaaagtaaatcctacacaatcagaagcggttacgatggtgtgtgtaaaagtaataggaaatcataatggtattacaatggcgggttctcatggtcattttgaattaaatgtttttaaaccactaattattcataacatattacagtccattaatattatgagcgactctacaaaggcatttgctatatattgtattaaaggaattaaag

SEQ ID NO: 280933 - DNA, 403 bp, Unknown
  Bacterial polypeptide expressing nucleotide sequence isolated from the Sargasso Sea
atgaaggactacagaattgaaaaagatacattaggagaagtaaaagttccaataaactctctttggggagctcagactgaaagatcaaggaataattttaaaattggaaatccatcaactatgccaattgagattattcatgcatatgccattttaaaaaagtctgcagctcaaactaattttaattttggaatactatcaaaagataaatgtaacctaatagagagcgtttgtgatgagattctagaaaatatgcataatgatcagtttccattagtaatatggcagactgggtcaggtactcaaactaatatgaatgttaatgaagttatttcaaacagagcacatttaattcagggaaaagaaattggcaagtctgaaaaattattatcccccaaatgat

SEQ ID NO: 280934 - DNA, 668 bp, Unknown
  Bacterial polypeptide expressing nucleotide sequence isolated from the Sargasso Sea
aatgaagtatagaactgaattcgattctatcggtaaaataaaggttcctggtgataagtattggggagcatcaactcaaagatcaaataaatactttgatataggagattttttagtcagacctatacttattcagtcaattgcaattgtaaaaaaagcagtagcgttagtaaatactaggaatggagatttagataaaaaaataagcagatatgtggtgagagccgcagacgaagtaattaaaggtaaattacataaccattttcctttgaaagtttggcaaaccgggtcgggaacccaaacaaacatgaatgttaatgaagtaatcgcgaacagagccatccaaatgatgggtgggaaaatgggaacaaaaaaaccagttcatccaaacgatcatgtgaacaaatcgcaatcaactaatgacgttttcccaaccgctatgcacattgcgatagccatgaaaacaagagataaactgcttccttcgctaaaattattagaaaaagaactaagtataaaaacaaacaagtttggtaaaatcgtaaaattaggtagaacccatttacaagatgcgactccattaactttgggacaagagttttctggctatcaaactcaattaaaaaattgcatcaagagaattgaaaaagcattaaatgaaatatact

SEQ ID NO: 280935 - DNA, 709 bp, Unknown
  Bacterial polypeptide expressing nucleotide sequence isolated from the Sargasso Sea
ttcattaaaaaaaaagtcaattgaatttaaaaaaattgttaaaatcggaagaacacatttacaagacgcaactcctcttactttgggccaagagttttcaggttattatgagcaattaaaaaaaagtatagaaagaatacaattcagtttaaaagatattttatttttagcacaaggaggtaccgcggttggtaccggtttgaatacaaaaaaaaattttgataaaaaaattactagagaaataagtaaatattgtaaaatatcatttagaccagcaccaaataaattctcagaaatagcagcccacgatgcaatagtaagtttctcaggatctttaaattcttgcgctgtcgctttaatgaaaatttcaaatgatattagatttcttggttctggtccaagagctggttatggagaattaatattaccagaaaatgaaccaggatcatcaatcatgccaggtaaagttaatcctacacagtgcgaagcggtaacaatggtttgtgttaaggtaattggaaatcatactggaatatcaatagccggaacccatggacactttgagctaaatgtatttaaaccattaattgcacacaacatactacaatcaattgatttattgggtgatagtgtaaaaaatttcagcttgtattgcgtaaagggaattaaaccaaataaattaaaaataaaagaacatctagataattca

SEQ ID NO: 280936 - DNA, 673 bp, Unknown
  Bacterial polypeptide expressing nucleotide sequence isolated from the Sargasso Sea
catgagtcaaaaaacgagagaagaacaagatagtttaggcagcattaaagttatcaacactaatctatggggagcgcaaactgaaagatcattaaagaattttagaattggcaatgatataatgccaattgagataatacatgccttggcagttattaagatgtcatgtgcaaaagccaaccaaaaacaaaagtttctaagtcctaaattagctagtgcaattattgacgctgcaaaacaagtttctttaggaaagtatgatgatcatttccctctttccgtttggcagaccggatctggaactcaaacaaatatgaatgtaaacgaagttattgccaatatagcaaacaggaaaatatcgaaaaaacttggtaccaactcacctgtacatccaaatgatcatgttaataaaagtcaatcaactaatgacagcttccctacggctatgaatattgcatctaaattaaaaattataagagagcttgttcccgcattaaaaagcatggagaaagtattaaaatcacaatctcagaaatggaaaagtattataaagattggaagaactcacttgcaggatgcaactccgctttcgcttggacaagaattttcaggatatcaggcgcaaatcaattcaaatataagaagagttgagagaactttaacaaatttaagt

SEQ ID NO: 280937 - DNA, 355 bp, Unknown
  Bacterial polypeptide expressing nucleotide sequence isolated from the Sargasso Sea
atgaatgtaaacgaagtaatttcaaatagagcaatagagattatgggtggaaaaaaaggaacaaaaaaaccagtacatccaaatgatcatgtaaataaatctcaatctacaaatgatgtttttccaacagctatgcatatggctatagcaataagagctacaggaaaattaataccaagtcttactttgcttaatttacaattaaaaaaaaaagcaaaaaaattcaataaaattgtaaaagttggtagaactcatttgcaagatgctactcctttaactttgggacaagaattttctggttaccatcatcaactaacaaaatgtatagaaagaatcaaagaagctttaaaagaaa

SEQ ID NO: 280938 - DNA, 501 bp, Unknown
  Bacterial polypeptide expressing nucleotide sequence isolated from the Sargasso Sea
aatgaaaaaaaataaagccttcagaattgagcaagatagcttaggagaaataaaagtaccaaaaaaagctctatggggagctcaaactcaaagagcaatcgaaaatttccctatcagtggaatcaagtttagatttccatttggcagatcttttattaaagctttaggagcaattaagcattcagcggcggtagcaaaccaagatttagggttgcttacagcaaaaaaatctaatgctattaaatctgcagctaaaatggtgatggtcggagaagtagatgatcattttcctttagatgttttccaaacagggtcaggtactagcactaatatgaatgctaatgaagtgatagcaaatattgcaaccaagaaattaggcgccgatgtacatccaaatgatgatgtaaatatgagtcaaagcagcaatgacacaataccaacagcaatttgtttaagcactctttatgacatggaagaatatcttcttcctggtcttgattt

SEQ ID NO: 280939 - DNA, 784 bp, Unknown
  Bacterial polypeptide expressing nucleotide sequence isolated from the Sargasso Sea
gttttctggatacttagaacaaataaaaaataatcttaaaagaataaaattagcaaaaaaagaacttcacttcgtggctcaggggggtacagcagtagggtcaggaatcaatgcacctaaaaattttgataaaatattttgtaaatatctaaataccctaactataaataattataaacctgctaagaataaatatgaggcaattgcttgtcatgactctttggtaaatttttctaatagtttaagtaatttatcagtatctctcttgaagattttaaatgatttaagatttttagcttcgggaccaagatctggattaggtgaaattaatttaccggcaaatgaaccggggtcttcaataatgcctggtaaagtaaatcctactcaaattgaagcacttagtatgatctgttgtcaagtaatgggtaataacgtatctgtcaatcttgcaggatctcaaggtcattttgagctaaacgcatacaaaccaataattatttttaatataattaattcaattaatttacttagtgatggaattgaaagctttgttaaaaattgtttaaaaggaataacaattaatcatgaaaatatagacaaacatctaaccaattcacttatgttagtcacagccctgaatgaacatattggatatgataatgctgcaaaaatagcaaagaaagcatttaatgaaaatatttctttaaaagaagcagcattaaaattaaaattaattagtgaaaaaaaatttgataaaattgtagatccaaaaaaaatgatttaa

SEQ ID NO: 280940 - DNA, 386 bp, Unknown
  Bacterial polypeptide expressing nucleotide sequence isolated from the Sargasso Sea
aatgaaattaagaaaagaattcgatagcattggctcaataaatgttcctggcgataaatattggggagcttcaacacaaagatcaaaaaaatattttgatattggtgagtttttagtaagaccagttttaattagatcaatcgctataattaaaaaagctgccgcaatagttcatggcaaagaaaaacaaatcttaccacaaatttcaaaagctatcataaaagcatctaatgaagttatatctggtaagttagacgagcattttcccttaaaagtttggcaaacaggctctggtactcaaacaaatatgaatgttaatgaagttatagcaaatagagcaattgaaattttagggggtaaaaagggttctaaaaaacctgttcacc

SEQ ID NO: 280941 - DNA, 488 bp, Unknown
  Bacterial polypeptide expressing nucleotide sequence isolated from the Sargasso Sea
tcgagctggttatggagaaattattttacctgctaatgagccaggttcttctatcatgcctggaaaagtaaatcctactcaatcggaagcagttacaatggtttgtgtaaaagtaattggaaatcataacggaattacaatggctggctcacacggacattttgaattaaatgtttttaaacctttgattgctcataacatattacaatcaatcgatttactcgcagatagtacaaaaaatttttctctttattgcatcaaaggcattaaagctgataaaattaaaattaaaaaatttttagataattcacttatgatggttactgcgttagcaccacacataggttatgataatgctgcgaaaatagcaaaatctgctttaaaaaatggaaccactcttaaaactgaaacacttaaatcaggattaatagacgaaaaaaaatatcataaaattataaatccaaagaagatgacctatccaaattaaa

SEQ ID NO: 280942 - DNA, 585 bp, Unknown
  Bacterial polypeptide expressing nucleotide sequence isolated from the Sargasso Sea
cacacgatgaaatagttaatttttctggaacattaaatactcttgctgtttgtttgatgaaaatagcaaatgatataagatttcttggatctggaccaagagcgggatatggagaattaattttaccatcaaatgagcctgggtcctccataatgccaggcaaagtaaatccaactcagtctgaggctgttacaatggtttgcgttaaggtaattggaaatcataatggtataactatggcagggtctcatggtcattttgaactaaatgtattcaaacctcttattgctcataatatacttcaatctattgatttactttctgatagttctaaaaatttcgcactttattgcattaaaggattaaaagcggacaaaaaaaaaataaaagaatatttagataattcattaatgatggttactgctttagcccctcacattggttatgataatgcagctaaaattgccaaacaggctcttaaaaataattcaacattaaaaaaagaagcactaaattccggtctagtaaatgaaaagatgtatgatttaattgttaatccaaaaaaaatgattattccttcttaaa

SEQ ID NO: 280943 - DNA, 919 bp, Unknown
  Bacterial polypeptide expressing nucleotide sequence isolated from the Sargasso Sea
aacgaatgatgtttttccaaccgcaatgcatatggctattgcaataagagcaaagggcaagcttttaccttctttaaaattattgaatttagaattagccaaaaagtcaaaacaatttaaaaaaattataaaagtgggaagaacacacttgcaggatgctactcccattacattagggcaggaattttctggatatcactcacaacttagcaaatgcattaaaagaatagaaaaagcacttgaagaaatatattttttagctcaaggaggaaccgcggttggtacaggcttaaatactaagaaaggctttgatagaaaaattgtatctgaattaagaaaaattacaaagctaccttttaaacctgctccaaataaatttgctgcactagcagcccatgatgccatagttaatttttctggcacaatgaatacaacagcagtatgcttgatgaaaattgcaaatgacataagatttctgggttcgggacccagagcgggttatggtgagcttatattgcctgaaaatgaaccgggttcatctataatgccgggaaaaataaatccaacacaatgtgaggctgtaactatggtttgtgtaaaggtaataggaaatcataatggaataacaatggctggttcccacggacattttgaattaaatgtatttaagcccttaattattcataatattttacaatcaatccatataatggcggattcttcaaaaagttttgcaaaatattgtgttaaaggattaaaggctgataagaaaaaaattaaaaaatttttggaaaattcactaatgctagtaactgctttatcgcccaaagttggttacgataatgcatcaaaaattgcaaaaagggcacataaaaatggaactacactcaaagaagaggctatcaaatctggtctaata

SEQ ID NO: 280944 - DNA, 746 bp, Unknown
  Bacterial polypeptide expressing nucleotide sequence isolated from the Sargasso Sea
aaatgctttaaatgaaatttactcattagctcaaggtggtactgctgttggaaccggaattaatagtaaaaaaggttttgataaaaaaattataaatgaaataaaaaagattactaaactaccctttaaaccaactaaaaataaatttgcagctttagcagctcatgacgaaatagtaaatttttctggtactttaaataccacagcagttagtttaatgaaaattgcaaacgacattagatttttgggatctggtcctagagctggatatggtgaaatcattttacccgctaatgaacctggttcttcaataatgcctggtaaagttaatccaacacaatcagaagccgtaacaatggtatgtgttaaagttattggaaatcataatgggattacaatggcaggttctcatggtcactttgaattaaatgtttttaaacctttaattgctcataatatcttacaatcaattgatctactagcagatagcactaataatttttcattgtattgtgtaaaaggaataaaggctgacaaaattaaaattaaaaaatttttagataattctttaatgttagttactgcactagcacctcatattggctacgacaatgctgctaagattgctaaatcagctttaaaaaaaggaactactctaaaagaagaagcattaaaaactaacttaattagtaaaaaagattttgaaagaattgtagatcctaaaaaaatgatctacccaaaataag

SEQ ID NO: 280945 - DNA, 364 bp, Unknown
  Bacterial polypeptide expressing nucleotide sequence isolated from the Sargasso Sea
tatgaaaaaaagaaaagaatttgatagcattggaaaaatagaggttccaaatgataaatactggggcgcctcaactcaaagatcaaaaaaatattttgatataggtgaattttatgtaaggccaattttgataaaatcgattgcaattattaaaaaatctgcagcaatagttcataaaaaaaataaacaaatttctccgaaaattgcaaatgcaataataaaagcttctaatgaaattatttcaggaaaattaaaagatcattttcctttaaaagtttggcaaactggctcgggaacacaaacaaatatgaatgtaaatgaagtaataagtaacagggcaatagaaatttttaggaggcaaaaa

SEQ ID NO: 280946 - DNA, 428 bp, Unknown
  Bacterial polypeptide expressing nucleotide sequence isolated from the Sargasso Sea
aatgaaaacgagaaaagaatttgacagtataggtggcataaaagtaccaattgataaatattggggtgcttcaactcaaagatcgaaaaaattttttaatattggtaaaatatatgttccagaatcaataataagatctattgcaatcatcaagcgaagtgctgctatagttcatgaaagagacggattaatttcacgcaatatttcaaaagcaataattaaagcatcaaatgaagttataggtggtaaaatgaaagaaaattttcctctaaaagtctggcaaacaggctctggcactcaaacaaatatgaatgttaatgaagttattgcaaatagagctatagaaattatgaagggtaaaaaaggatcgaagaaacctgtacaccctaatgatcatgttaataaatcacaatcaactaatgatgttt

SEQ ID NO: 280947 - DNA, 817 bp, Unknown
  Bacterial polypeptide expressing nucleotide sequence isolated from the Sargasso Sea
tatgaatattaatgaagtggttgcaaatagagctagtgaaatattgggaggcaaattgggttctagagaacctgttcatcccaatgaccatgttaatttaggtcagtctagtaatgatgtgattccatcagctatacacatatcggtatatatggatattgctaataagcttttaccatcgctgactaaattagaaaaatcgctattagataagaaaaaacaatttgatagtattattaaaattggcagaactcatttacaggatgcgacacctatatctttaggtcaagaattctctggttatgtgtatcaaattaagaaatctattaatcgtatacaagatactcaaaaatcattattagatttagctttagggggtacagctgttggtacaggtataaatactcatgcaaagtttggtttaactattgctgatgaaatatctaaatataccaattgtgatttttcagaatcaaaaaatcattttgagtcacaagcaactcaagatagcatagtccatttatcaggtagtcttaaaacattatctgtttcattacataaaatagcaaatgatattagatggttagcatcaggaccgcgttcgggtataggagagcttacattgcctgctgttcaaccgggatcttcaataatgccaggaaaagtgaatcctgtgatctgtgaatcattgattcaggtttgtgcaaaagttattggcaatgattctgcaattacattaggaggtttaggaggcttctttgaattaaatgtaatgttgcctcttgttgcttatagtacattggagtctatagattta

SEQ ID NO: 280948 - DNA, 805 bp, Unknown
  Bacterial polypeptide expressing nucleotide sequence isolated from the Sargasso Sea
atgaatgtgaatgaagttattgcaaatagagcgatagagattttaggtggaaagaaaggttcaaaaaaaccagtacatccaaatgatcatgtaaataaatctcaatctacaaacgacgttttcccaactgccatgcacatagccatagcaatggagtcgaggaaaaaattattaccgtcactagagatgttgaataaagaattaaaaaaaaaagtttctaaattcaaaaatattgttaaagtcggtagaacacatcttcaagatgcaacaccactttcactgggacaagaattttctggataccaatctcaattagaagactgcataacaagaataaaaaatgctcttcatgaaatatattttttagctcaaggtggaacagctgttggaaccggcattaatagtagaaaaggattcgataaaaaagttatcaaagagattagaaaaattactaaattaccttttaaacctacaagaaataaatttgctgctttagcagcacatgatcaaatcgttaatttttctgggactttaaatacgacagctgtgtctttaatgaaaatcgcaaatgatattcgatttttaggctcaggaccaagagcaggatatggtgaaattgttttgccatccaacgagccaggttcatctataatgccaggaaaagtgaacccaacccaatccgaggcagttacaatggtttgtgtaaaggtaataggaaaccacaatggaatcactatggcaggctctcatggacactttgagcttaatgtttttaaacctctccatagcgcacaatatacttcaa

SEQ ID NO: 280949 - DNA, 775 bp, Unknown
  Bacterial polypeptide expressing nucleotide sequence isolated from the Sargasso Sea
tatgaagtttagaacagaatatgattcgctaggaaaaattaaagtaccatcggataagtattggggagcctctactcaaagatctaacaagtactttgatataggagattttttggtaagacccatagtaatcaaatctatagccatgattaaaaaagcagcagctatagttaatacaaaaaatggagatcttgataataagataagtaaaatgattgttagggtcgcgaatgaaattatatctggaaaacataaagaacactttcctcttaaggtttggcaaacaggctctggaacacaaactaatatgaatgttaacgaagtaattggaaatagagccattcagttatttggtggaaaattagggaccaaaaaaccagttcatcctaatgaccatgtaaatatgtctcaatctactaatgatgtatttcctactgctatgcatatagcaattgcgattagagctaatggaaaattattgccttctttaaaattgcttaataatgaattgaaaaaaaaatctaaagaatttaataaaattataaaagtcggcagaactcacttgcaagacgctacaccaattactcttgggcaagaattttctggatatcattcgcagctaactaaatgcataaaaagaatagagtatgcgcttgaagaaatatattttctagcacaaggtggaacggctgttggcacaggcttaaatactagaaagggttttgataaaaaaatagtttcagaattaagaaaaatgacaaaactaccctttaaa

SEQ ID NO: 280950 - DNA, 816 bp, Unknown
  Bacterial polypeptide expressing nucleotide sequence isolated from the Sargasso Sea
ataaaaattggacgaactcatactcaagatgctactcccataacattaggtgatgagttttctggttacttaaaacaaatagaaaataattttgaaagaataaagctagcaaaaaaagagctcaattatttagctcaaggaggcactgcagttggaacaggaataaatgctccaaaaaattttgataaaattttttgtaaatttttaaataagtttactaaaaataaatataaacctgctaaaaataaatttgaagctattgccaatcatgattcattagttaatttttccaattctcttaattccttggctatttcattattaaaaattcttaatgatttaagattcttatcttctggtcctagatctggtttaggagaaataaatattccagctaacgagccaggctcttctataatgccaggcaaagtaaatccgactcagatagaagctttaagtatgatttgttgtcaaataatgggtaataatttagctgtttcacaagctggatcacaaggccactttgagttgaatgcttttaaaccagtaattatttttaatgttataaattcaatcaaccttcttagtgatggcataaatagtttttgcattaattgtttacaaggtatcacaattaacaaagaaaatataactaagcatttaaataattcacttatgctagttacagttttaaataagcatataggatatgacaatgcagcaaaaatagcaaaaaaggcctataaagataatcttactttaaaagaagctgcaataaaactaaaattcatatcagaaaaggaatttgataaaatt

SEQ ID NO: 280951 - DNA, 622 bp, Unknown
  Bacterial polypeptide expressing nucleotide sequence isolated from the Sargasso Sea
atgaaattaagaaaagaattcgacagtattgggagcataaatgtgcctaatgacaagtattggggtgcatcaactcaaagatcaaataaattttttaatatcggtaaaattttagtcaatatttctataataaaatctattgctataattaaaagatcagcagcaatagttcatgctaaagataaattaataagtggaaaaatttcaaaagcaattgtcaaagcttcagatgaggttattaaaggaaaattagatgaaaatttccctttaaaagtttggcaaacaggttctggtactcaaacaaacatgaacgtaaacgaagtaattgctaatagagctattgaaatattgggaggaagaaaaggaactaaaaaacctgttcatccaaatgaccatgttaacaaatctcaatctactaatgatgtttttccaactgcaatgcatatttctatatcgacagaaactttttctaaaatgttaccaaatttaaaaattttagaaaaggaattaaaaaaaaaatctatagaatttaaaaaaatagttaaaattggaagaacacaccttcaagatgcaactccattatctcttggtcaagagttttctggatatcatactcaattaa

SEQ ID NO: 280952 - DNA, 754 bp, Unknown
  Bacterial polypeptide expressing nucleotide sequence isolated from the Sargasso Sea
agaattaaaaaaggacttaatgaaatctataatttagctcaaggtggaacggctgttggaacgggaataaatagtaaaaaaaattttgataaaaaaataattaaagagattaaaaaaattactaaattaccatttaaaccgactaaaaataaatttgctgctttagctgcccatgatgaaatagtaaatttttctggaacattaaatacactggcagtttgtttgatgaaaatagcaaatgacataagatttcttggatcaggtccaagagcgggatatggagaattaattttaccatcaaatgagcctgggtcctccataatgccaggcaaagtaaatccaacccagtctgaggctgtaactatggtttgcgtaaaagttattggaaatcataatggtataactatggcagggtctcatggtcattttgaactaaatgtattcaaaccacttattgctcataatatacttcaatctattgatttactatctgatagttctaaaaattttgccctttattgtattaaaggattaaaagcagataaaaaaaaaataaaagaatatttagataattcattaatgatggtaactgctttggcacctcacataggttatgataacgcagcaaaaattgctaaacgagctcttaaaaataattcaacattaaaaaaagaagcattaaattcaggtcttgttaatgagaaaatgtatgacgtgatagttgatccaaaaaaaatgattattccttcttaaa

SEQ ID NO: 280953 - DNA, 820 bp, Unknown
  Bacterial polypeptide expressing nucleotide sequence isolated from the Sargasso Sea
atcaaaaaatcagccgctatagttcatcttaaagataaaaaaattgataagaaaattgcagctgcaattatcaaggcctcaaatgaggtgatttcaggaaaattaaatgacaacttccctcttaaagtttggcaaacaggttccggtacacaaactaatatgaatgttaatgaagttatttctaatagagcaatagaaatcctaaaaggaaaaaagggtacaaaaaaaccagtccatccaaatgatcacgttaacaaatcgcagtctacaaatgatgtattcccaactgctattcatattgccgttgcatcgaagacaattaataaactgattccgagtcttgaattgttaaacaaaactttgaaacataaagtaaaagaatttaataaaattattaaaatcggcagaactcatcttcaggatgctactccaatttcacttggacaagaattttctggctatcaatcacaactggaagactcaattaaaagaattaaattatctttaaacgaaattttttttcttgctcaaggtggtacagcagttggaactggaataaatacgtcaaaaaattttgacaaaaaaattgtaaaagaaatttcgaaattaacaaaattaccttttaaaataactaaaaataaattcgcagcacttgcttcacacgaccctatagtaaatttttctggatcattaaatactacagcagtttgtttgatgaaaattgcaaatgatataaggtttcttggttctggacccagagctggatactcagagttaatattaccagaaaatgaggctggttcatctataatgccaggca

SEQ ID NO: 280954 - DNA, 481 bp, Unknown
  Bacterial polypeptide expressing nucleotide sequence isolated from the Sargasso Sea
aggttatggagaactattgttacctgaaaatgaacctggatcatctataatgccaggaaaagtaaatccaactcaatgtgaagctgttactatggtttgtgtaaaagtgataggaaaccacaatggaataacaatggctggatcacatgggcattttgaattaaatgtttttaaaccactaattattcacaatgtgcttcaatcaattcaaatattatcagatagcacaaaaaatttttccaaatattgtataagtggtctcaaagccaataaagtaaaaataaaagaacatttagataattcattaatgttagttactgccttgtctccaattattggttacgataatgctgctattattgcaaaaagagcattaaaaaataaaacaactttaaaagctgaagcactaaagtcaggactaattaaagaaaatgaatatgataaaattgttgatccacaaaaaatgattaagcccctttga

SEQ ID NO: 280955 - DNA, 767 bp, Unknown
  Bacterial polypeptide expressing nucleotide sequence isolated from the Sargasso Sea
ttggtaagtaaggcaaccgagtttatggccatcacaaaaacggggcgaacacatctcatggatgcaacaccgttgacgctaggtcaagagttcagtgggtatgccatgcagcttcagagggggatggaagcaatgcacgactcgctccagaggctgcgtgagatagcgcttgggggaactgctgtaggaactgggcttaacaccccgaaagggttcgataagaaagttgcccagaaaatctctgaattgaccggccttccttttgtaacttctgagaacaagtttgaagctttaagtgctcatgatgcaatggtggagataagtgggagtttgaaaagagtggccgtaagcctgatgcatattggaaataacattcgtatgcttgcaagtgggccacggtgcagcatcggagaaatatctcttcctgcgaacgaacctggcagctcaattatgcccgggaaagtgaaccctacccaatgtgaagcgctgacaatggtaagcgcccaagtgatcggaaacgataccgctgtggctgtctccggaagtcacggccactttcagctgaatgttttcaaaccagtaatggctcacaacgttctcgaaagcgcccagcttcttgccgatgcatgcagaagcttcaatgaccactgcgcagtcggcatcgagcccaatataggccgaatagaaggactgctcagccaaagtcttatgctcgtcactgccctaaacaaccacattggctattacaaagcagcggaaatagctca

SEQ ID NO: 280956 - DNA, 397 bp, Unknown
  Bacterial polypeptide expressing nucleotide sequence isolated from the Sargasso Sea
aatgaaaactagaaaagaatttgatagcataggaagtataaatgttcctgtggataagtattggggggcatcgacacaaagatcaaaaaaatattttaatattggcaaaatactcgttaacccatctattattaggtcaattgcaatagtaaaaagatcagcagcaattgttcatctaaaagacaaattaatatccaagaaaatatcaaatgctattgtaaaagcctctaatgaaataattaatggtaaacttaaagataatttccctttaaaggtgtggcaaacagggtctggtacgcagacaaatatgaatgtgaatgaagttattgcaaatagagcaattgagattcttagaggaaaaaaaggtactaaaaaacctgtgcaccctaatgatcat

SEQ ID NO: 280957 - DNA, 901 bp, Unknown
  Bacterial polypeptide expressing nucleotide sequence isolated from the Sargasso Sea
tatgaaaacaagaaaagaatttgacagtataggatcaattaatgtccctgtggataagtattggggcgcctctactcaaagatcaagtaaatattttaatattggagattttttagtaaggcctattttgattaaatccattgcaattattaaaaaggctgccgctatagtaaatgcaaaaaatggtgatttggataaaagaattagtagagctattatcaaagcatcaaatgagattatttccggaaagttaatggataattttcctttaaaggtctggcaaacaggttctggaactcaaacaaacatgaacgtaaatgaggtaatagctaatagagcaattgaaattttaggtggaaaaaaaggaacaaaaaaaccagttcacccaaatgatcatgtaaacaaatcacaatcaacaaatgatgtttttcctacagcaatgcatatggcaatagcaatgaaagctacaaaaaaactaataccaaatcttaatttactaaatctacaattaaaaaaaaaatctaaagaatttaaaaaaattgttaaagttggcaggacacatcttcaagatgcaacgcctctgactttaggacaagaattttcaggttatcattctcagcttacaaaatgtattgagagaattaaaattgcattagaagaaatatattttttggcacaaggtggtactgctgtcggaaccggccttaatacaaaaagaggttttgataaaaaaatagtttctgaaattaaaaaaattacgaaacttccctttaaaccatcttcaaataaatttgcctcacttgctgctcacgatgctatagttaatttttctgggaccatgaacacaactgctgtttgttttatgaaaatagcaaatgatataagatttttagggtcagga

SEQ ID NO: 280958 - DNA, 442 bp, Unknown
  Bacterial polypeptide expressing nucleotide sequence isolated from the Sargasso Sea
gaacctggatcatcaataatgcctgggaaggtaaacccaactcaaattgaagcattaagtatgatatgtgttcaagtaataggaaatagcacaactgtagattttgctggttcaaatggtcattttcaacttaatacttataaaccagttatagcttttaatattattcaatcagtaaaccttcttagtgatggaattaaaagttttaataataattgcttaaggggattaaaagcaaataaagaaatcattgataatcatttaaacaattctttaatgttagttaccgctttaaataaaagtattggatatgataatgcagcaaaaattgcaaaaaaagcttatattgaaaatttgactcttaaaaaagcagcattaaaattgaaattaatttcagaaaaagattttgataaaatagttgatccaaaaaaaatggtttaac

SEQ ID NO: 280959 - DNA, 738 bp, Unknown
  Bacterial polypeptide expressing nucleotide sequence isolated from the Sargasso Sea
gatgaaaataaactttaggggtgcgcaaacccaaaggtctctagagaattttaaaattggtagagaaaaaataccaactgaattaataattgcattaggacaacaaaaaaaagctgctgcagaagctaatattgaacttggtgtcttaaacagaaaattaggaacattaattataaaggcatgtaatgatataattaatttaaaacttatcgaagagtttcctttagtagtatggcaaactggatctggtactcagacaaatatgaatgcaaatgaagtaatcagtaattatataataaaaaaattagaaggaaaaattggaagtaaagaacctattcatccaaatgatcatgtgaatttatctcaatcatcaaatgatacctttccaacaataatgcatgttgcaattaatgaattgtcaattaaaaaactaattccaaatttaaaaaatttgataaaagaatttcaaaaaaagaaaaaagtttttcaaaaaataataaaaataggaagaactcatactcaagatgcgactccaataactttaggtgatgaattttctgcattttacactcaattacaaagttgtttgagtagaatagaaatttcacaatcagaattgaaatatcttgctcaaggtggtactgcagtaggatctggtattaatgcaccaaacaaatttgacaaagtattttgtaaatatttaaataaactcactaaagataattacaaaccttcaca

SEQ ID NO: 280960 - DNA, 352 bp, Unknown
  Bacterial polypeptide expressing nucleotide sequence isolated from the Sargasso Sea
aatgaaatatagaacggaatttgattctacaggtaaaattaaagttcctggtgataagtattggggtgcatcaactcaaagatcaaataaatactttaatataggtgactttttagtcagacccattcttattcaatcaatcgccattgttaaaaaatctgcggcaattgttaatacaaaaaatggtgacttagataaaaagataagcaaatatattgttagagcagctgaagaaattataaagggcaaacttaataatcattttcctttaaaagtatggcagaccggatctggaacacaaacaaacatgaacgtaaatgaagtaattgcaaatagagctatacaaatgatg

SEQ ID NO: 280961 - DNA, 764 bp, Unknown
  Bacterial polypeptide expressing nucleotide sequence isolated from the Sargasso Sea
agagttttctggttatcaatctcaattaaaaaaatgcataactagaatagaaattgctttaaaagaaatattccatttagcacaaggtggcactgctgttggaactggactaaacactagaaaaaattttgataaaaaagtcataagagagataagtaagattactaaattaccttttaaacctgcttcgaataagtttgcagctcttgccgctcatgatgaaattgttaatttctctggaacattaaataccactgctgtgtgtttaatgaaaattgctaatgatattagatttttaggatctggtccgagggcaggatacggtgaactaattttaccttcaaatgaaccaggttcatctattatgcccggtaaagtaaatcccactcaatctgaagcagttactatggtttgtgttaaagttattggaaaccacaatggtattactatggcgggttcgcacggtcatttcgagttaaatgtatttaaacctcttatcatccataacattttacaatccattaacattatgagtgactcagcaaaaacatttgccatgtattgtataaaaggaatcaaagcagataaaaagagaattaagtatcttcttgataattcgcttatgctggttacagctttggcacctaaaattgggtatgataaagcggcctcaatagcaaaaaaatctcataaaaatggaacaacattaaaagaagaaattcttaagcagggactaataagtgataaagaatatgacaaaaata

SEQ ID NO: 280962 - DNA, 544 bp, Unknown
  Bacterial polypeptide expressing nucleotide sequence isolated from the Sargasso Sea
tactgctgtttgtctgatgaaaattgccaatgacataagatttttaggttctggacccagagccggttatggtgaaattatattaccagctaatgaaccaggctcatctataatgcctggtaaagtaaatcccactcaatccgaagcggtaactatggtttgtgttaaagtaattggaaatcacaatggtataacgatggcaggatctcatggtcattttgaattaaatgtttttaaaccgttgatcgctcataatattctgcaatctatagatttacttgctgatagctcaaaaaatttttcactttattgtgttaaaggcattaaagctgacaaagaaaaaataaaatattatttaaatgagtctttaatgttagtaactgcattagctccacatattggttatgataacgcagcaaaaattgcaaaaaaagcactcaaaaataaaactactttaaaacaagaggctatagagtcgggattaattaactctgaagattatgataaaatcgtagacccaaaaaaaatgatctatccagcataa

SEQ ID NO: 280963 - DNA, 843 bp, Unknown
  Bacterial polypeptide expressing nucleotide sequence isolated from the Sargasso Sea
aaaaaaaaagcgaaagaatttaacaaaatagttaaagttggcagaactcatttgcaggatgctactcctctaaccttggggcaagaattttctggttatcattctcagttaacaaaatgtatagaaagaataaatagagctttggaagaaatatattttttagctcaagggggtactgcggtaggaacgggactaaacactaaaaaaggttttgataaaaaaatagtatcagaattaaaaaagatgactaaacttccatttaaaacagctccaaataaatttgcttctttggctgctcatgatgcaatagttaatttttctggaacaatgaatactactgctgtttgtttgatgaagattgcgaatgatattcgttttttgggatcgggaccaagggctggttttggagaactaattttaccagaaaatgaaccaggttcttctataatgccaggaaaaataaacccaactcagtgcgaagctgtaactatggtatgtgtaaaagtaattggaaaccacaatggaataacaatggcaggttcacatggtcattttgagttaaatgtttttaaaccattaattatccataatattttacaatcaattcatataatgtcagactcatcaaatagttttgccaagtactgtgtttcaggtattaaagctgacaaaaaaagaattaaagaattgttagacaattcattaatgttagtaacggcgctagcaccaattattggatatgataatgctgctaaaattgcaaaaaaagctttaaaaaataatactactataaaatatgaggcaattaaatccggtttaatatctgaaaaagaatataaaaaa

SEQ ID NO: 280964 - DNA, 731 bp, Unknown
  Bacterial polypeptide expressing nucleotide sequence isolated from the Sargasso Sea
tatgaaaactagaaaagaacacgacagcataggcgtaattaaagtgcctgtggataagtattggggagcatctacacaaagatctaaaaaatattttgatataggtgagtttaaagttagaccgatattaattaaatcaattgcaataatcaaaaaatcagcagcaatcattcataaaaaacaaggacaaatagatacaaggattgcaaatgcaattatcaaagcttcagagagtgttattaatggaaaactaaatgatcatttcccattaaaagtatggcaaactggatctggaactcaaacaaatatgaatgttaatgaagtcatcgcaaataaggctattcaaatcttaggtggaagattgggttcaaaaaaacctgtgcatccaaatgatcatgtaaataaatcacaatcgacaaatgatgtttttcctagtgctatgcatatcgcaatagcactcgagacaaaagataaattgttgccatcacttgatttgcttaataaggagttgaaaaaaaaagttataaaattcaaaaatattattaaagttggaaggacacatcttcaagatgcaactcctttaacattaggccaggaattttcaggctatcaatctcaattggaagacacaattcaaagaattaaaaatgctttgaaagaaatatatcttttagctcagggaggtactgctgttggaacaggcattaatacaaaaaaaaattttgataaaa

SEQ ID NO: 280965 - DNA, 491 bp, Unknown
  Bacterial polypeptide expressing nucleotide sequence isolated from the Sargasso Sea
tatgaagactcgcgaggagcaagatagtttaggatcaatcgatgttcctgttggaaaatattatggtgcacagactcaaaggtcttttgaaaactttaaaataggttctgaaaaatttcctagagagtttattagatcttacgctataattaaaaaagctgcagcaactgttaatttcaattttggtaatttggatgagtctattatgaaggcaattcataatgcagcagatgaggtaattgttggtaagctagatgaccatttccctttagttgtgtggcaaacaggtagtggtactcaaactaatatgaattttaatgaagtcattgctaatcgtgcaattgaaatgatgggaggtacgctggggagtaagaaccccgtacatccaaatgatcatgtcaatatgagtcagtctacaaacgataccttccccacagcaataaacatagctactgttgagagcgtgatgaataatttaattccttctctac

SEQ ID NO: 280966 - DNA, 923 bp, Unknown
  Bacterial polypeptide expressing nucleotide sequence isolated from the Sargasso Sea
ggaacacaaacaaatatgaatgtaaacgaagttattgctaacagagctatagaaattttaggtggaaaaaaaggcaccaaaagacctgtacatcctaatgatcatgtaaataaatctcaatcaacaaatgacgtttttccaacagctatgcacatgtcaattgctttaacagcaaaaaaaagtttgatacctagtcttactctactcaataaagaattgaaaaataaatctaaagaattcaataaaataatcaaagtcggaagaacgcacttgcaagacgctacccctttaactttagggcaggaattttctggatatcattcacaattaagtgattgtatatcaagaataaaaatagcattgaaagagatttattttttggctcaaggaggtactgcagtcggcactggaatgaatactaaaaaaggttttgatataaaagttgtaaaagaaattaaaaaattaacaaaacttccatttaaaccatctactaataaatttgcttctttagcttctcatgatgctgttgtaaatttttcaggcgctttaaacacaacagctgtatgcctaatgaaaattgctaacgatataagatttttaggatcaggaccaagagctggatatggagaattatttttaccaatcaatgaacctgggtcatcaataatgcctggaaaaataaaccccactcaatgcgaagcgttgacaatggtttgtataaaagtaattggaaatcataatggaattactatggccggctcacatggtcattttgaattaaatgtttttaaacccctaattattcataacgttttacaatcaattgatattatgtccgactcctcaaaaaatttttctaaatattgtgttagaggtttgaaggctaataaaaaaagaattaaagaattattagataactcttt

SEQ ID NO: 280967 - DNA, 556 bp, Unknown
  Bacterial polypeptide expressing nucleotide sequence isolated from the Sargasso Sea
atggagacccggatagaaacggacagcatgggagaaatagaagttcctgctaatcgttattatggtgcgcaaactgcgcggtcgctcatccactttgatattggtgcagaaaccatgcctcgcgaactcatccgcggtatgggtattctgaagaaagcttctgctcttgtcaatgccgagttgggcttgatgccggagaacattaagcaactaatttccaaagctgctgaagaagtcatcgaaggaaaactggatgaccattttccgttaagagtctggcaaacaggaagtggtacccaatccaatatgaatagcaatgaagttattgccaatcgcggcattgagctggcaggtggtgtaattggttctaaagatcctgttcatcccaacgatcatgtaaatatgggccaatcttctaatgatacattccccacggccatgcatattgcggccgtggagcgtattcgagatgctctgcttccttctttgagcaccttggccaattctttcaaaaaaaagaccatagaatttaaagacattattaaaatagggcgta

SEQ ID NO: 280968 - DNA, 529 bp, Unknown
  Bacterial polypeptide expressing nucleotide sequence isolated from the Sargasso Sea
atgaaaattgcaaatgacattagattcttaggatctggtccaagagctggatatggagaattaatactgcctgaaaatgaacctggttcgtcaattatgccaggaaaaattaatcccacacagtgcgaagctgtcactatggtttgtgtaaaagtaattggaaaccacaatggtataacaatggcaggctcccatggacactttgaattaaatgtttttaaacctttgattattcataacattttacaatcaattcatataatggccgattcttcaaaaagttttgcaaattattgcattaaagatttaaaagctaacaaaaaaagaattaaagaacttttggataattctttaatgttagtaactgcattaactccacatataggatacgataacgctgctaaaatagcaaaaaatgctttcaaaaataataccacacttaaacatgaagcattaaaatcaaagttaataaaagaaaaagattacaacaaaattgttgatccaaaaaaaatgattcatcccaagtaag

SEQ ID NO: 280969 - DNA, 418 bp, Unknown
  Bacterial polypeptide expressing nucleotide sequence isolated from the Sargasso Sea
atgaaattaagaaaagaatttgacagtattggaagtataaatgtcccaaatgataaatattggggtgcatctactcaaagatctaataaattttttaatataggtaaaattttagttaatatttcaatcattaaatcaattgcgattatcaagagatctgctgcaatagtccattcaaaagacaaattaattgataacaaaatttctaaagcaataataaaagcgtcagacgaggtaattaagggtaaattagatgaaaactttcctttaaaagtttggcaaacaggatctggtacacaaacaaatatgaatgtaaatgaggttatagctaacagagcaatagaaattttaggtggaaaaaaaggaacaaaaaaacctgttcatccaaatgaccatgttaataaatcacaatctacaa

SEQ ID NO: 280970 - DNA, 667 bp, Unknown
  Bacterial polypeptide expressing nucleotide sequence isolated from the Sargasso Sea
aatgaaatatagaactgaatttgattctattggtaagatcaaagttcctggtgataagtattggggtgcttcaactcaaagatcaaataaatactttgatattggagattttcttgtaaggccaatactaatcaaatctatagccattgtaaaaaaagcagcagcaattgttaattctaaaaatggtgatttagataagaagataagtagatacgtgatcaaggcagcagaagaggtaataaaagggaaacttgacgataattttccattaaaagtatggcagacaggttctggcacacaaacgaatatgaatgtaaatgaagttatagctaacagagctattaagatgatgggaggaaaaatgggaacaaaaaaaccagttcatcctaatgatcatgtaaataaatcacagtcaacaaatgatgtatttcctacagcaatgcacatagctatagccacaaaaacaaaaaataaattattaccttccctgatattattggaaaaagaaataggaaagaaaactaaacaattttctaaaatagttaaacttggtagaacacatttacaagatgcaaccccattgacattaggccaggaattctctggttatcattctcaattaaaaaaatgtataagaagaatagagaatgcattagatgagatttat

SEQ ID NO: 280971 - DNA, 837 bp, Unknown
  Bacterial polypeptide expressing nucleotide sequence isolated from the Sargasso Sea
tctgagtagtaaaacaaaaatttacaaaaatattataaaaattggacgtactcatacacaagatgctacgcctattacattaggacaagtattttcaggatacttagaacaaataaaaaataatgaaaaaagaatattagaagcaaaaaaagaactacaatttgtagtacaaggtggaacagctgtaggaacaggtattaatgcaccaaaaaattttgataaatatttctgcaaaaatttatccaaaattacaaaaagtatttataaacctgctttaaataaatttgaaggaatagcttctcatgactccttagttaatttatctagtgcacttaatggacttgccacatctctttttaagatatctaatgatataagatttttagcctctggaccaagagctggactaggtgaaattactctacctgccaatgaaccagggtcttcgattatgccaggcaaagttaatccaactcaaattgaggcattatctatggtttgtttacaagtaatgggcaacaacctaacaacaacaatagctggttctcaaggtcattttgaattgaatacttttaaaccagtaataatttacaatatcatccagtctttaaatttgttatctgactcaatgaatagttttgttgaaaaatgtcttaaaggattaaagcctaacaaaaaaaatattaaggaaaatctattaaactctcttatgcttgttacagcattaaatgactttattggctatgataatgctgcaaaaatagccaaaaaggcttttaaagaaaatttaactttaaaagaagctgcgataaaacttaaattagtagatataaaaaa

SEQ ID NO: 280972 - DNA, 1393 bp, Unknown
  Bacterial polypeptide expressing nucleotide sequence isolated from the Sargasso Sea
atgacacaaactcgtaccgaaactgatagctttggcccattacaagtgccaaattcaaaatactggggcgctcaaacccaacgctcactcttgaattttccaattggatgggaaaaacaaccagccgcgataattcgagcactaggtgtaataaaaaaggcttgcgccttagctaatgtggaagccggaaaattaaataaacctcatggaatggcgattgtggaggccgcctcagaggttattgcaggtaaactagatgatcactttcccttagtcgtttggcaaacaggttcaggaacgcaatctaatatgaacgcaaatgaagtcattgcaaaccgtgccattgaattattaggtggaactattggttcaaaagaccctattcatcccaatgatcattgcaacatgggtcaatcatcaaatgatacattccctaccgcaatgcacatagctactgcaagtactgctcacaatacactcatacccaatctaagaaaacttgtggacgctatagatgtaaaaatagttgaatttgagggaataattaaaattggtcgcacccatacacaggatgctacccctttgactttatctcaggaattttcgggctacaggcatcaggttcaaaagggaattgaccgaattgaaaaatctttagaagatatttacgagttagcccaagggggtacagcggttggtactggcttaaatacatccgttggatgggatactaaagtggcaaaatacatagctgaggagactaagcttccatttgtctcagccccaaataagtttgaagcgctagcatcacacgacgctatggtggaaatgtcaggcagtttaaaaactttagcagcaagtctttttaaaattgctaacgacatacggtttttggggtccgggccccgttgtggcttgggtgagcttattttgccagaaaacgaaccgggttcatcaataatgcccggaaaggtaaacccaacacagtgtgaagcccttactcaagtttgtgctcaagtcattggcaatgatgctgctgttggtctcgcaggctcacagggccattttgaattaaatgtattcaaaccgatgatttcttataatgtcatacagtcaatgcatctgttgggagatgcttgttctgcctttactgataacctgatgaaagatttaaaggcagataaacatcgaattgaaaaattaatgcgagaaagtttaatgttagtcactgcactcgcacctaagataggttatgacaacgccaccacagtcgcaaaaactgcccataaaaatgggacaactctaaaagaagaggcagtaaaactaggtttcgttgacgataaaactttcgatgaaatggtaaaaccagaaaatatggtgggacccacctaaa

SEQ ID NO: 280973 - DNA, 1270 bp, Unknown
  Bacterial polypeptide expressing nucleotide sequence isolated from the Sargasso Sea
ccaattgtaattaaatcaatagcaatcattaaaaaagcagcttcaatagttaatgccaaaaatagagatattgataaaaaaataagcagagcgatcaataaagcagctgatgaaatcatttcaggaaaacttaaagaccattttcctttgaaagtatggcaaacaggctctggcactcaaaccaacatgaatgttaatgaggtaatctctaatagagctattcaaattttgggtggaaaaattggttctaaaaaaccagtgcatccaaatgatcatgttaataaatgtcagtctacaaatgatgtatttcctactgctatgcacattgctatagcaataagatctactggaaaacttttgccttctcttaaattattaaataacgaattaaaaaaaaaatcaaaaaaatttaataaaattataaaagttggaagaactcatttacaagatgccactccaattactctaggccaagaattttctggttaccacgcgcaattagacaaatgtataaaaagaatagaagttgcactacaagaaatttattttttagcacaaggaggaactgcagttggaacaggattaaatacaaaaaaaggttttgataaaaagatagtttcagagataaaaaaaattaccaagttgccttttaaaccatctaaaaataaatttgcagctttagcttctcatgatcctattgtcaatttttctggtacaatgaatacgacggccgtatgtttaatgaaaattgcaaatgatattagatttttagggtctggaccgcgcgcaggatatggtgaacttattttgccagaaaatgaacctggttcatcaattatgcctggaaaagttaatccaacacaatgcgaagctgtaactatggtatgtgtaaaagttataggaaatcacaatggaattaccatggctgggtctcatggtcattttgaacttaacgtatttaagccattaataattcataacatacttcaatcaattcatataatgtcagactcggctaaaagttttgctaaatattgtgtaaagggtttgaaagcagataaaaataaaattaaaaagtttttagacaattctttaatgttggtaaccgctttatctcctaaaataggatacgacaacgcaactaagattgcaaaaaaagctcataaaaatggtacaactttaaaagatgaagctttaaaatcaaaattaattactgaaaaagaatacgataaaattgttgatccaaaaaaaatggttagcccgcactagt

SEQ ID NO: 280974 - DNA, 1384 bp, Unknown
  Bacterial polypeptide expressing nucleotide sequence isolated from the Sargasso Sea
aatggagcgcgacacgttcggcgaaatcgccgtaccgaacgcccgtctatggggtgcgcagacccagcgctcgctgcagaatttccgcatttcgtcggagaaacaatcgcccgaactgatcaccgcgctggccgtcatcaaacgcgcggccgcggaagtcaatctgggtctgggcgtgctcgacgagagcaaggcgaaggcgatcatgcaagcggccgacgagatcatcgacggcaagcatccggaggaatttccgctcgcggtctggcaaaccggctccggcacgcagaccaacatgaacctcaacgaggtgatcgcgaatcgcgcgagcgaactgctcggcggcgagcgcggcgaagcgcgcaaagtgcatccgaacgacgacgtgaatcgcggccagtcgtcgaacgacgtctttccgacggcgatgcacgtggccgcagcctacgcgatcgtcaagcatctgctgcccgcgctgaaaacgctgcgcgatacgctcgacagcaaggcaaaatccttcgccgacgtcgtcaagatcggccgcacgcacctgcaggacgccacaccgctgacgctcggccaggagttctccggctacgtcgcgcaactcgatcatggcatgcgccacgtggagtcggcgctgccgcatctgtacgaactcgcgcagggcggcacggcggtcggcacgggcctgaacgcgcatccgcaattcgcggacaaagtggcggccgcgatcggcaagctgaccggtttgccgttcgtctcggcgccgaacaaattcgaagtcatggcagcggccgatgcgctggtgttcgcgcatggcgctttgaagacggtggcggccagcctgaacaagatcgccaacgacatccgctggctcgcgagcggcccgcgctgcgggctcggcgaactgtcgattccggaaaacgaacccggcagctcgatcatgccgggcaaggtcaatccgacccaatccgaagccgtgacaatgctgtgctcacaggtgttcggcaacgacgtcgcggtgaatatcggcggcgcgagcggcaacttcgagttgaacgtgttccggccgatgatcgcccacaacgtgctgcaatcgatccgtttgctcgccgacggcgcgcacagcttcaacgacaactgcgcggtgggcatcgagccgaatcgcgagcgtatcgatacgctgctcaacgaatcgctgatgctggtgacggcgctcaatccgcacatcggctacgacaaggccgcgcagatcgcgaagaaagcgcataaggaaggcaccacgctgaaggcggcggcgctcgcgctcggctatgtcaccgggcagcagttcgacgaatgggtacggccaaaggatatggtcgggcattcggccaaatga

SEQ ID NO: 280975 - DNA, 842 bp, Unknown
  Bacterial polypeptide expressing nucleotide sequence isolated from the Sargasso Sea
tggaagaactcatcttcaagatgcaactcctttatcattaggtcaagaattttctggatatcaatcacaattagaagattgtattttgagaataaagcatgccctaaaagaaatttacggattagcacaaggaggtacagcagtaggaactggaattaatagtaaaaaaggttttgataaaaagattattcaagaaattaaaaaaattacaaaactaccattcaaaccttctaaaaataagtttgcttcacttgcagctcacgatgaaatagtgaatttttcaggtacattaaatacaactgcggtcagtttgatgaaaattgcaaatgatataagatttttaggatctggtccaagagcaggttatggcgaactaatattacctgcaaatgaacctggctcatctataatgcctggcaaagtaaatccaactcaatctgaagcagtaacaatggtttgtgtaaaagtaataggaaatcataatggaattacaatggctggttctcatggacattttgagttaaatgttttcaaaccattgattgcacataatattttacaatcaatagatttactttctgatagtacaaaaaattttgcactttattgtataaaaggaataaaagcagataagattaagataaaacaattcttagataattcattaatgttagttacagcattagctcctcatattggctatgataattcagctaaaattgcaaagactgcacttaaaaacaattcaactcttaaagaagaagctttaaaaacagggctaatttctgaaaaagattataataaaattgtagatcctaaaaaaatgatctatccagaataag

SEQ ID NO: 280976 - DNA, 994 bp, Unknown
  Bacterial polypeptide expressing nucleotide sequence isolated from the Sargasso Sea
caacagatcccagtcgacgaacgacgtctcccttgctgcaatccatgtggcagctgctctgcagctgaagcagacgctgctgccggagctgaatcagctgattgccagtctcgatgccaaggccgatgcctggcgggacatcatcaagatcggacgaacccatctgcaggacgcggtgccgctgcgcctcggcgatgaagtcagcgcctggcgcgacaggatccgggacggcgcccaatggctgagcgcagcccaggacaagcttctagctctaccgctagggggaacagccgtcggcagtggtttaaacacgccggaacgatttgcgcacgaggtttgtgctgaactcgccaaccgaaccggatccgaatttcaaccggccgagaatctctttgccgtgatggcgggccatgacgctctggtgcaggccatggcacaactgcggcgtctggccgtgacgctgctcacgatcgccaatgacatccgcctgctggcctgcggccccagagctgggctgggggaactgctgctgccggccaatgaaccgggcagctcgatcatgcccggcaaggtgaatcccacccagtgcgaggccatggccatggtctgcacccaggtgatcggcatggatgccgccgtggcagcggccggggccggcgggcatctgcagatgaacgtctacaaacccctgatcggcttcaatctgatcgaggggatccgtctgctgcaggacgcctgccggtgtttccggctgaatctggtcagtgggatggaaccagaccgtgagcggatcgcgttctacctggagcgatccctgatgttggtgacggctctgacgccggagatcggctacgaaaaggcctccgccatcgcccagcatgcccaccgtgaggggctaacgctgcgggaggcagcccttcaatccggtgccatcaccgccgaacgctttgaccagttgatcgatccagccgccatggcctccccccaccgctga

SEQ ID NO: 280977 - DNA, 688 bp, Unknown
  Bacterial polypeptide expressing nucleotide sequence isolated from the Sargasso Sea
aatgaaattaagaaaagaattcgatagcattggaagtgtcaatgttcctaatgataagttgtggggagcatctactcaaagatctaataaattttttaatataggtaaaattttagtaaatatttccatcatcaaatctattgctattgttaagagatcggcagcaatagttcacgcaaatgacaaattaatagatagcagaatatctaaagcaattattaaggcgtcagatgaggtaataaaaggcaagttggatgataatttcccattaaaagtttggcaaacaggctctggaacacaaacaaatatgaatgttaatgaagttattgccaatcgtgcaatagaaataatgggtggaaaaaaaggttcaaaaaaacctgttcatccaaatgatcatgtaaataaatcgcaatctacaaatgatgtttttccaactgctatgcatatatcaattgcaaaagaaacattaagtaaattattaccaaacttaaaaaggttagaaaaagagttaaatagaaaatccaaagaatttaaaaatattgtaaaaatcggacggacacatcttcaggatgcaactcctctttcgttagggcaagaattttcaggataccatgtgcaaattaaaaaaagtatcgaaagaattgagtatgctttaaaggagattttatttcttgcacaaggtggaact

SEQ ID NO: 280978 - DNA, 1349 bp, Unknown
  Bacterial polypeptide expressing nucleotide sequence isolated from the Sargasso Sea
ttcctgggtgataagtattgggggtgcgtcaactcaaagatcaaataaatactttgatattggtgattttctagtaagaccaattttgattcaatcaataggagtgattaaaaaagctgctgctatagtaaatacaaaaaataaagatcttgataaaaaaattagcaaatacattatcaaagcagctgaagaagttattaaaggcaagcttgatgatcattttccattaaaagtttggcaaacaggttctggtacccaaactaacatgaatgttaacgaggtaatatcaaatagagcgatacagttaatgggtggtaaaatgggtacaaaaaaaccagttcatccaaatgatcatgttaataaatcacagtctacaaatgatgtctttcctactgctatgcatattgctatcgcaattaaatcaaaaaaaaagctgttaccgtcacttaaattacttgaaaaggagttaggtaaaaaagtaaatgaattcaataaaatagttaagttaggtagaactcatctgcaagatgcaactccattgactttgggtcaagaattttctggttaccattctcagcttaaaaaatgtattgaaagaattgaaaaagcattaaatgaaatttattatttagctcaaggaggtacagctgttggaactggtttaaatacaagaagaaatttcgacaaaaaagtagtcaaagaaataaaacaaataacaaaactaccatttaaacctgcaaaaaataaatttgccgcattagctgcgcatgatgcaatagtaaatttttccggaactatgaacactacagcagtttgtttaatgaaaattgcaaatgatataagatttttaggatctggacccagagcagggtatggtgaattgatattgcccgagaacgaacctggatcttctattatgccaggtaaggtaaatcctacccagtgtgaagctgtaacaatggtttgtgtaaaagttataggaaatcataatggtattacaatggcaggttcgcatggacattttgagttgaatgtttttaaaccacttatcattcataatattttacaatcaattaatattatggctgattcatcaaatggttttgccaaatattgcataaaaggtcttaaagctgataaaaaaagaattaagtctcttctggacaactctttaatgctggttacagctttatctccaaaaattggttatgacaatgcagctaaagtcgctaaaagggcccacaagaatggaactactttaaaagaggaagctttaaagactggtttaataaatgaaaaagaattcatgaaaattgtagatccaaaaaaaatggttaaaccgtcttaaa

SEQ ID NO: 280979 - DNA, 1153 bp, Unknown
  Bacterial polypeptide expressing nucleotide sequence isolated from the Sargasso Sea
aatgaaatatagaacggaatttgattctataggtaaaataaaagttcctggtgataagtattggggagcttcaacccaaagatcgaataaatactttgatattggagattttctagtaagaccaatactaattcaatctatagcgattgttaaaaaagctgcagcaattgttaattcaaggaacggtgacttagaaaaaagaattgcgaaatttattattaaagcctctgatgaaattataaaaggcaagcttgataatcactttcctcttaaggtctggcaaactgggtctggtacacagaccaacatgaatgttaatgaagtaatttccaatagagcaatacagatgatgggtggtaaaatgggtacaaaaaaacctgttcatccaaatgatcatgtaaataaatctcaatctaccaatgacgtatttcctacggcaatgcatattgccatcgcaatgaaagcaaaaaaaaaattacttccctctcttaaattattagaaaaagaactttcaataaaagtgaaacaatttaacaaaattgttaaattaggtagaacacatttacaagacgcaacaccgcttactttaggtcaagaattttcaggttatcactctcaattaaaaaaatgcatagaaaggatcgaaagggcattaaatgagatttattatttagcgcagggtggaactgctgtagggaccggtttgaatacaagaaaaaattttgataaaaaaataattaaggaaataaaaaaaataactaaattaccgtttaaaccagcaaaaaataaatttgctgccctcgctgcacatgactcaatagttaatttttctggaactatgaatacaactgctgtctgtctgatgaagatagcaaatgatataaggttccttggttcgggaccaagagcaggatatggtgaattattactacctgaaaatgaacctggttcttccataatgccaggaaaggtaaatccaactcaatgtgaggctgttacaatggtatgtgtaaaagttattggtaatcacaatggaataactatggctggttcgcacgggcactttgaacttaatgttttcaaacctttaataattcacaatatacttcagtctattaatataatgtctgactcttcaaaaaagttttgccaa

SEQ ID NO: 280980 - DNA, 791 bp, Unknown
  Bacterial polypeptide expressing nucleotide sequence isolated from the Sargasso Sea
aatgaaatttagaaaagaaaaagatagcatgggaaccatcaatgttgctgatgacaaatattggggagcctcaactgaaagatcaaaaaagtattttgatataggaaaaattttagtaagcaaaactttaataaatgcaattgcagtgataaaacttgctgcagcgaaagttcataaaaatgataaacaaattgatgcaaaaatttgtgatgctattgtaaaagcttcaaaagaaataattgcaggtaagctcgatggtaattttccattaaaagtatggcaaactggatctggaacacaaacgaatatgaatgtaaatgaggtaattgctaatagggcaattcaaattttaggtggaaaaaaagggtcaaaaaaaccagttcatccaaatgaccatgtaaataaatctcaatcaactaatgatgtttttcctacagccatgcatgtagcggtagctctagagactaaaaaaaaattattaccctctttgaaaaatctcaataaagaattaaaaacaaaaataagtaaatttaaaaatattgttaaagttggcagaactcatcttcaagatgcaactccacttactttaggacaagaattttcaggatatcattctcaactaagtgactgtattttaagaattgagacttctttaaaagaaattttcttccttgcccaaggtggaacagctgttggaacagggattaactcgaaaaaaaattttgatataaagatttgtaaagagataagtaaacttactaaaataaaattctatcctgcaaaaaataaat

SEQ ID NO: 280981 - DNA, 1114 bp, Unknown
  Bacterial polypeptide expressing nucleotide sequence isolated from the Sargasso Sea
aatgaaatacagaactgaatttgatagcctaggtaaaattaaagtgcctggtgataagtattggggagcttcaactcaaagatctaataaatattttgatattggagattttctagtaagacctatattaattcaatctatcgctattgtaaaaaaagctgcagctatagttaatgtaaaaaataaagatttagacaaaaagataagtaaacacataataaaagcagcagatgaaataattaaaggtaaacataaagatcactttcctttaaaggtttggcaaactggttcgggaactcaaacaaatatgaatgttaacgaggtaatagctaacagggcaattcagatgatgggcggtaaaatgggaaccaaaaagccagttcatccaaacgatcatgtaaataaatctcaatcaactaatgatgtatttcctacaggtatgcatattgcgatagccctaaaggctaataagaaattgttaccctcgctaaaactgttagaaaaagaacttaaaaaaaaagtaaaacaatttaataaaattgttaaagttggaagaacacacttacaagatgctacaccgttaactttgggccaagagttttcaggatatcactcacaacttaaaaaatgtattgaaagaattgaaggagctttagaagaaatatactgtttggcacaagggggtacagctgttggaacgggtttaaatactaagaaaaatttcgataaaaagattgttaaggaaattagtaaaataacaaagctgccttttaaaatcgcaccaaacaaatttgctgccttagcggcacatgattcaattgtaaatttttctggtactatgaacacgactgcagtgtgtttaatgaaaattgcaaatgatattaggtttcttggatctggtccaagagctggttacggagagttaatacttcctgaaaatgagcctggatcgtccataatgccaggaaaaataaatccaactcagtgtgaagcagtaacaatggtttgtgtaaaagtaattggtaaccacaatggaataacaatggctggttctcatggacatttcgaattaaatgtttttaaacccttgattatccataatatacttcaaatc

SEQ ID NO: 280982 - DNA, 1306 bp, Unknown
  Bacterial polypeptide expressing nucleotide sequence isolated from the Sargasso Sea
tatgggtacgcgcactgaaagggacagtattgggtctgttgaagtgccttctgaaaagtattatggtgctcagacccaaagatcctatgagaattttaaaataggggatgagcgatttcctagagagtttattcgggcatatggcattataaaaaaagcagccgctagcgtaaatcatgattttaataatctagattcatcaattttaagtgcaattcataaagccgcggatgaggtcattgaaggtaagttagacgatcatttcccattggtagtttggcaaacaggaagcggaacacagacaaatatgaactttaacgaggttatagctaatagagctattgagataatggggggtgaaataggaagtaagcatcctgtgcatccaaacgaccatgttaatatgagtcagtccacaaatgatactttccctactgctatcaatattgctgctgctgaagctgtccatcatcaacttataccctctctagttaacttcagagatgcgcttgctgacaaagcaaataaatttgattcaattattaaactaggtcgaactcatctacaagacgcaactccgcttagtcttgggcaagaattttctggctatgtttctgctattgatcatggtattcgacgattaaatagatctcttgaagattgttatgaactagcaatgggtggtacagctgtaggaacgggaataaattccacagaaggttttgcagaggcagttgcaaaggaaatatcagaattaaccaatttaaattttcgtactgcagataataagtttgaagcgctaggcgggcaagatagtattgttgaactttctggatcactaaaagttgttgctggttcattatttaaaatagcaaatgatctaagatggctagcaagtggtcctagaagtggtattggagaaataacattgcctgcaaatgagccaggatcctccataatgcctggcaaagtaaatccaacacagtgtgaagcgatgactatgctatgtacccaagttatgggtaatgatgtaaccatagggttttctggtgcatcaggaaactttgagctaaatgtttatagaccagtgcttgcttataatattctacaatctattcgtctcctttcagatggatgtaattcatttacagaacacgctattgctggtatagagccaaatgaagaacggatcgaacataatttatataattcactaatgttggtcacagcattgaatccacatattggatatgataaatctgctgaagttgcaaaaaaagcatataaagataatatcacattacgt

SEQ ID NO: 280983 - DNA, 1396 bp, Unknown
  Bacterial polypeptide expressing nucleotide sequence isolated from the Sargasso Sea
atgagtcaaaaaacgagacaagaacaggacagtttaggtaaaattaaagttgccaacagtaatctatggggagcacaaacacagagatcaataaagaattttagaattggcaacgacataatgccaattgagataatacatgccttagccattattaagatgtcatgtgcaaaaacaaaccaaaaacaaaaacttctaagccctaaaatagctagtgcgattattgattccgcaaagcaagtttatttaggaaaatatgacgaacattttcccctttccgtttggcagaccggatctggaacacaaacaaatatgaacgtaaacgaagttattgccaatattgcaaacaggaaaatatcaaaaaaacttggcacaaattcccctgttcatccaaatgatcatgttaataagagtcagtcaactaacgacagcttcccttcagctataaatattgcatctaaactaaaaattctaagtgatcttcttccagccctaaaagggatggaaaaagtattaaaatcccaatctcagaaatggaaaactatcataaagattggaagaactcatttgcaagacgcaactcctctatcacttggacaagaattctctggatatcaagcccagattaattcaaatatacgaagagttgagggaagtttaacgaacttaagttaccttgctcaaggaggaaccgctgtaggtactggactaaatacgaagcgtggttttgaccgactggtggtttcagaaataagtaagataactaaagtgaaattcaaacctgctgcgaataagtttcaagcactggcatctcatgactcaatagtagaactatctggtgtacttaatgttattgccactgatctatttaaaattgcaaatgatattcgccttctggcatcaggtcctcgttcaggtttaggtgagctcagtttgcctgaaaacgaaccagggtcatctatcatgccaggtaaagtaaaccctactcagagtgaagctctaacaatggtatgcttacaagtcatgggtttccataatgttatctcaatggcaggttcacaaggtcattttgaacttaatgcatttaaaccactcatcggcctaaatataattaattcaattaatttacttgcttcagcgattaataattttaatgataaatgccttaaagggatcaagcctaatgtcaaaaatattaagcaaggagtagaaaattcactaatgcttgtaacggctttagccccagagattggctacactaaagctgctgagttggcaaaattagcccataaaaaaaatatatcacttgtagaggcaaataaaattttgaaatatttagaaactaagaaaattaaattacttctcagtcccagcaagatgatctcttcgtattgat

SEQ ID NO: 280984 - DNA, 1162 bp, Unknown
  Bacterial polypeptide expressing nucleotide sequence isolated from the Sargasso Sea
atgagattattagctggaaaacttgatgagcatttcccactcaaagtttggcaaactggttctggtacacaaacaaatatgaacgtcaatgaagtcatagctaatagagctatagaaaaattaggcggtaaaaaaggttcaaaaaaacctgtacaccccaacgaccatgtcaataaatctcaatcaactaatgatgtctttccaacagcaatgcatattgccatagcaatagagacaaaaaataagttactaccatcgttaattttgcttaacaaagaacttaaaaaaaaaatatcaaaatttaagaatattatcaaagttggaagaactcatcttcaagatgcaactccgctttctttgggtcaagaattttctggatatcaatctcaaattgaggattgtattaatagaataaataatgctttaaaagaaatctattctcttgctcaaggtggtacagctgtaggcactggaataaatagtaaaaaaaattttgataaaaaaataataaatgagataaagaagataactaagttgccattcaaacctacaagaaataaatttgcagcgcttgcagcacatgatgaaatagttaatttttctggtactttgaatactactgcagtaagtctgatgaaaattgcaaatgacattagatttttaggctctggcccaagagccggttacggtgaacttattttgcctgctaatgaaccaggatcatcaattatgccaggaaaagtcaatcctacacaatcagaggctgtaacaatggtttgtgtcaaagtaattggtaatcacaatggaataacaatggcaggttcgcatggacattttgagctaaacgtatttaaacccttaatcgctcataatattttacaatcaataaatttattagccgatagtataaaaaacttttcactttattgtataaaaggacttaaagcagataaactaaagataaaagaatatttggataattctttaatgttagtaactgcattagccccacatattggctatgataactctgcaaaaattgcaaaactagcgttgaaaaataaaacaactctaaaacatgaggctttaaaatcaaaattgattaacgaaaaaagttatgacagaatagttaatccaaaaaaaatgatttatcctgcgtaag

SEQ ID NO: 280985 - DNA, 1328 bp, Unknown
  Bacterial polypeptide expressing nucleotide sequence isolated from the Sargasso Sea
tatgaaatatagaattgaaaaagatagtttaggagaagttaaagttccttcaaaggcactttggggcgctcaaacacaacgagctgtaaataatttccctataagcggtataaaaatggatttcccatttacaaaatcatttgtatcttctttgggattgataaaagatgctgcagcaaaagctaatttaagattaaagcttatttcttcaaaaaaatctaaggctatttcaagggcatctaaagaagtttggcaggaaaaacatcatcatgaatttccaattgatgtatttcaaacaggctccggaacaagctcaaatatgaacgctaatgaagttatagcaaatctagctactaaatacgcaaaagttgaagttagtccaaatgatgatgtaaatatgagtcaaagtagtaacgacgtcattcctactgcaatcaaaattagtgctcatatggatctaactaagaaactttttccagctttagatggtttaattaaatcaattgacgataagtcagaatctttgaaaggaactattaaaactggaagaactcatttaatggatgctatgcctattgatttctatgaagaattaaaagcatggtctagtcagttaaaatcttcaaaagagatgttaaatatttttgaaaaaaaactactcgagcttcctcaaggtggaactgctgttggaagcggcataaatgctcataaacaattttcaaaatattttacccaagaaatgaccaagttattaggtagtaagtctaagttttctacagccaagaatttttatcatgagcttagtgctcaagattgctcagtacaattatcaggagagttaaagaatctagcgatcgtattgatgaaagtctcaaatgatcttcgatggatgaatagtggtcctttggctggaatatctgatattgaattaaaagccttacaacctggaagcagcatcatgccaggtaaagttaatcctgtcattcctgaggcagtttctatggcatgtgcagatgttattggtaatgatgtaacaattactgttgcagctcaatctggaaatttccaattaaatgtaatgttgccagtcatagcctacaacctattaaagagtattaacctcttaagtggatcaatgaatgctttatcgaagaaggccataaagacatttaaggtaaatcataaaaatttagaactttcattatcaaaaaacccaatattagttacagcattaaatccaattattggttacgaaaaagcagcagcgattgcaaaaaaagcctataaagaaaataagccaataattgaagttgcagctgaagaaactg

SEQ ID NO: 280986 - DNA, 981 bp, Unknown
  Bacterial polypeptide expressing nucleotide sequence isolated from the Sargasso Sea
aatgaaattaagaaaagaatttgacagcataggatccattaacgtaccgagtgataaatattggggagcttctacacaaagatcaaaaaaatattttgatattggagagtttttagtaaggccagttttaattagatcgatagctttaattaaaaaagctgctgcaatagtccacggtaaaaataaacaaattctaccacaaatatcaaaagcaattataaaagcctcaaacgaggttatgtccggtaagctcaatgaacattttcccttgaaagtttggcaaacagggtctggtactcaaacgaatatgaatgtgaatgaggttatagctaacagagctattgaaattatgggaggaaaaaaaggtacaaaaaaaccagtacatcctaatgatcacgtaaataaatctcaatcaacaaatgatgtatttccaacagcaatgcatatagctattgcgatggagacaaaaaacaaattattaccttctctagagttattaaataaagaattaaaaaaaaaggtatctcagtttaaaaatattgtaaaagttggtagaactcaccttcaagatgcaacaccattatctttaggacaagaattttcaggatatcaatctcaacttgaagattgcatttttagaattaaaaatgctcttaaggaaatatattacttggcccagggtggaacagctgtaggaacaggaataaatactgaaaaaggatttgataagaaaataataaatgaaattaaaaaaataacaaaactaccatttaaaccaactaaaaacaaatttgcagcattagcggctcatgatgagatagttaatttttctggcactttaaatacaacagcagtttgtttaatgaaaattgcaaatgatattagatttttaggttcaggtcctagagctggttatggtgagattatattaccagctaatgaacctggttcctctattatgccaggtaaagtaaacccaac

SEQ ID NO: 280987 - DNA, 1390 bp, Unknown
  Bacterial polypeptide expressing nucleotide sequence isolated from the Sargasso Sea
aatgaaatatagaatagaatttgatagtattggaaaaattaaagtgcctggtgataagtattggggtgcctcaactcaaagatcaaacaaatattttaatataggagattttctcgttagaccgattgttattcaatccatagctataattaaaaaagcagcagcaattgtgaatactaaaaataaagatttaaatccaaaattaagtagatatataattaaagctgccgatgaaattattaaaggtaagcacaaagatcatttcccactaaaagtctggcaaacaggctcaggaacacaaacaaatatgaacgtcaacgaggtaatagctaatagagcaattgagatgatgggtggtaaaaagggatcgaaaaaaccaattcaccctaatgatcatgttaataaatctcaatcaactaatgatgtctttcctactgcaatgcatatagcaattgccttaaaatctaaagagaagcttttgccatctttaaaattattagaaaaagaactagcaaaaaaatctagagaatttaaaaacattgtaaaagtaggaagaactcatctacaagacgcaactcctttaactctaggtcaagaattttcaggctatcagtcccaacttaaaaaatgcataagtagaatagaaaatgcattaaaagaaatatatcatttagcgcaaggtggaacagctgtagggacaggtttaaatacaaaaaaaaattttgataaaaaaattattaaagaaataagcaaaattacaaaactgccatttaaagttgcgacaaataaatttgcagccttagcggctcacgacgaaattgttaacttttcaggaacgttaaacaccaccgcggtttgtttaatgaagattgcaaatgatataagatttttaggatctggaccaagagcaggatatggagaattaattttgccgtcaaatgaaccaggctcatctattatgcctggaaaagttaatcctactcaatctgaagctgttacaatggtttgcgtaaaagtaataggtaatcacaatggaataacaatggctggctcacatggtcactttgaactaaatgtttttaaacctcttataattcataatattcttcaatcaattaatattatgagtgactcagcaaaaacatttggacttttttgtataaaaggaattaaagctgataaaaaaagaataaaacatcttcttgataattcactaatgttagttacggcattagcaccaacaataggatatgatcgagctgcacaaatagcaaaaactgcccatagaaatgggactaccttgaaagaagaggttgttaaagcaggattaatcaataataaagaatatgataaaataatgaatcctatgaagatgactaaacctaaataa

SEQ ID NO: 280988 - DNA, 950 bp, Unknown
  Bacterial polypeptide expressing nucleotide sequence isolated from the Sargasso Sea
agctatgaatatgtcaacctatcacctattaaagatttacacaattcctactttagaaaagcttcacttaactattaaagataaatctaaggaattcaaaaatattgttaagattggtaggacacattttatggatgctacacctcttacattaggaaatgagtttagcggatattcgtctcaattaggaaatgtaattaaaaaccttaaagaagccttacctcacctttctgaattagcacttggaggcactgccgttggaactgggctaaatactccaaaaggatattcaaaattagtggcaaaaaaaatatctgaaattactggatataaatttacttctgcaagcaataaatttgaagcattagcagcaaatgatgcgatggtaaaagcttctggtgctctaaaatctgtagctgtatctcttatgaaaattgcaaatgatataagaatgctttcatccggaccaagaagcggaattggagaaattagtttaccagctaatgagccaggttcctcaataatgccaggtaaagtaaatccaacacaatgtgaggcagttacaatggtatgttcacaaattataggtaatgatgtagctgtaagcattggcggaatgaatggacattttgaattaaatgtttataaaccaatgattgtacacaatgtattaaactcagccagattacttggtgatgtttcaaattcttttaataaaaattgtgctattggaatcaaacccaataaaaacgcaattaaaaatcaattagaaaattctttaatgctagttacagcactaaacccacatatagggtatgataatgcagctaaaattgctaagaaagctcatgcagaaaatcttactttaaaagaagcagcaattaaacttggcttagtatcagctaaagattttgataagtgggttgatcctaaaaaaatgattggatagc

SEQ ID NO: 280989 - DNA, 766 bp, Unknown
  Bacterial polypeptide expressing nucleotide sequence isolated from the Sargasso Sea
atgaaaacaagaaaagaatatgacagtataggatctataaacgtgcctgtggataagtattggggtgcatctacccaaagatcaagtaaatactttgatattggagattttttagtaagaccaattgtaattaaatcaatagcaataattaaaaaatctgcagctatagtaaatgcaaaaaatggtgacctagataaaagaataagtaaagcaatcattaaagcttcaaatgagattatttctggaaagcttaaagataattttcctctaaaagtctggcaaacaggttctggcactcaaactaatatgaatgtaaatgaagtgatttcaaatagggcaatagaaattttgggtggaaaaaaaggaacaaaaaaaccagtgcatccaaatgatcatgtaaataaatcacaatctacaaacgatgtttttccaacagctatgcatatggctatagcaataagagctacaggaaaattaataccaagtcttgctttgcttaatttggaattaaaaaaaaaagcaaaagaatttagtaaaattgtaaaagttggtagaactcatttacaagatgctactcctttaactttgggacaagaattttctggttaccatcatcaattaacaaaatgtatagaaagaatcaatgtagctttaggagaaatatattttttagctcaaggaggtacagcggtaggaactggcctaaatacaaaaagaggttttgacaaaaaagtagtggcggaaattaaaaaaattacaaaacttc

SEQ ID NO: 280990 - DNA, 806 bp, Unknown
  Bacterial polypeptide expressing nucleotide sequence isolated from the Sargasso Sea
attgggtcaagaattttctggctaccaatctcaactagaagaatgcattaaaagaataaaagtttcactgaatgaaatttattatttagcacaaggtgggacggcagtaggcacaggtattaataccaaaaaaaattttgacaagaaaatagtaaatgaaattaaaaaaatcacaaagttaccttttaaaccagctaaaaataagtttgcagcacttgccgctcatgatgcaatagtaaattattctggtacattaaatacaactgcagtatgtttaatgaaaatagcaaatgatattaggtttttaggttcaggaccaagagctggatatggagagttgatactgccagagaatgaacctggatcatcaattatgcctggtaaagtaaatccgactcaatgtgaggctgtaacaatggtatgcgtgaaggtaattggtaaccacaacggaattacaatggctggttcacatggtcattttgagcttaatgtttttaaacctttaataattcataatgtacttcaatcaattcaaattctctcagatagtacaaaaagttttgcaaaatattgtatctctggactaaaagctgacaaaaatagaataaaatatttagttgataactctttaatgttggtgactgccttatccccaaagattggttatgataatgctgcaaaaattgcaaagaatgcattgaaaaataaaactactcttaaaattgaagcaatgagatcaggtcttattaatgagaaggaatataataaaattgttgatcccaataaaatgattaaaccagactaac

SEQ ID NO: 280991 - DNA, 789 bp, Unknown
  Bacterial polypeptide expressing nucleotide sequence isolated from the Sargasso Sea
ggtatgtatctcaacttgaccatggtattaaatcattacaaaattctcttgatcatttaagtgaattacccataggcggaactgcagttggcacccagcttaataccccaaaaggatattcaaagaaagtcgtcgaacatatctcaaaaaattcaggactttcatttaaagaatctcaaaacaaatttgagggaattgccagccatgattgtattgtagaagtacacggtgcattaaaaactctagcagcttctatttataaaatttcaaatgatattagattgatgggatcaggacccagatcaggaataggtgaacttattttacccgctaatgagcctggaagttcaataatgcctggaaaagtaaatccaactcagtgtgaggcaatttcaatggtgtgtgctcaaatattcggaaatgatgtagctgtaagttttgctggtgcaaatggacattttgaactaaatgtttttaaaccactttttgcatttaatataatcgaatcatctaagatattgggagatgcatcattaagttttgctgttaactgtattaatgatttaaaaccaaataataaaagaatcaaaaaatttcttgatgattctttaatgttagttactgctcttaattcaagaataggatattataaggctgcagacatagcaaataaagcctacaatgaagatatttcattaaaagaggcagctttggcacttaattatttatcagaaaaggaatttgataaatatgtcaatcctaatagaatgacaagcaatgaaagttgag

SEQ ID NO: 280992 - DNA, 989 bp, Unknown
  Bacterial polypeptide expressing nucleotide sequence isolated from the Sargasso Sea
taaatctcagtctacaaatgatgtatttcctactgcaatgcatatagctatagctattgaaacaaaaaataaattattaccctcattggaattattaaataaagaacttaaaaagaaagtctcccaatttaaaaatatagttaaagttgggagaactcatttgcaagatgcaacacctttgtctttagggcaagaattttctggatatcagtctcaaatacaagattgtataactaggataaaaaatgctttaaatgaaatttattttttagctcaaggtggtacagcagttggaacaggaattaatagtaaaaaaggctttgatagaaaaataattaatgaaattaaaaaaattactagactgccatttaaaccaacaaaaaataaatttgcagcattggctgctcatgacgaaatagtcaatttttcaggtactttaaatacaacagctgtctctttaatgaaaatcgcaaatgatattagatttctaggttctggtccaagagcaggctatggtgaacttattttgcctgccaatgaacctgggtcatcaataatgccaggcaaaataaatccaactcaatcagaggctgttactatggtttgtgtgaaggtaattggaaatcataatggtattacaatggctggttcacatggacactttgaattgaatgtctttaaaccattaattgcacataatattttacaatcaatagatttgcttgcagatagtactaagaatttttcactttattgcattaaaggaataaaagcagataagattaaaataaaaaaatatttagataactctttaatgttagtaactgcattagctccacacatcggatatgataatgcagcaaaaatagctaaagctgcattgaaaaataatacaacattaaaagttgaaactttaaaaactggtttaataaatgaaaaaacctatgataagatagtcaatccaagaaaaatgatttatccttcttgat

SEQ ID NO: 280993 - DNA, 598 bp, Unknown
  Bacterial polypeptide expressing nucleotide sequence isolated from the Sargasso Sea
atgaaaaaaaataaagccttcagaattgagcaagatagcttaggagaagtaaaagtaccaaaaaaagctctatggggagctcaaactcaaagagcaatcgaaaatttccctatcagtggaatcaagtttagatttccatttggtagatcttttattaaagctttaggggcaattaaacattcagcggcagtagcaaaccaagatttagggctgcttacagcaaaaaaatctaatgctattaagtctgcagctaaaatggtgatggtcggagaagtagacgatcattttcctttagatgtttttcaaacaggctcaggtactagtaccaatatgaatgctaatgaagtgatagcaaatattgcaaccaagaaattaggtaccgatatacatccaaatgatgatgtaaatatgagccaaagcagtaatgacacaataccaacagcaatttgtctaagtactctttatgacatggaagaatatcttcttcctggtcttgatttacttattgctgagatagataaaaaagcaaaaaacttgcaaggaacaataaaaacaggcagaactcacttaatggatgctatgccaaatagaatttcgc

SEQ ID NO: 280994 - DNA, 1369 bp, Unknown
  Bacterial polypeptide expressing nucleotide sequence isolated from the Sargasso Sea
atgacaaaagaatttagaactgaaaaagactcaatgggagagtttcaagttccaatagatgctaaatacggagcctccactgcaagagcagtagaaaattttccaatatcaaaacttagattttctaggtcgtttattaaagctttgggggagattaaaaaagcttgtgcaaaagttaatctaaataataaattattagataaaaattttgcaaactctattatcgacgcagcacaacaggtaattgatggcgatcatgataaagactttgttgttgatatatttcaaactggatcaggaacctcaacaaatatgaatgctaatgaaataatttcaaaaattgcatctgaaagtgcaaatgcaaatattcatccaaatgaccatgtaaatatgagtcaatcatcaaacgatgtaattccgacagctactaatgttgctgccgttacagaaatcgttgaaaggttaattccagctgttgaaagtttaattcaatcactcgatgctaagggcaaaaaatgggataaagtatataaaaatgggcgaacccatttaatggatgcaactcctgtttctcttggacaagaatttagcggatactccgcactgttatccgaaagacttgaagacattaaatcttcactcattaatacaagtaaattggcgattggtggtactgcagttggtacaggaatcaatgcaccagagaatttcggcaaagatgtagcagcagagatttcaaattcattaggaattaatttttttgaagtagataaccactttactcgtcaagggtcacgagaagaaattgttcacttgtcaggatctttaaaagcatttgctgtatctatgtttaaaatagcaaatgatattaggtggatgggcggtgggcctgtctctggactaaatgagttaatcattcctccattgcagccaggatcctcaataatgcctggaaaagttaatcctgtaatacctgaaatggtgatgcaagtttccgcacaagtaataggaaacgacaatacaattactttttcttcatcaaatggtaactttgaattaaatacaatgttgcctgttatggcatacaatttactagaaagtattgagcttttgactactagtactgatgtatttgaaaaaaaattaatcaatcatttagaagcaaatacggaaaagcttgatgaaaatattcaaaaaaattcaattttggttactgccctcgtgcctgtcattggttatgacaaatctgctgaagtagcaaaagaagcgatgtcacaaaacaaaactataaaagaagttctaattgataaaaacttgatttcaattgaagaaattgatgagcttttagacatagaaaaactaatttaat

SEQ ID NO: 280995 - DNA, 645 bp, Unknown
  Bacterial polypeptide expressing nucleotide sequence isolated from the Sargasso Sea
aatgaaaaaaagaaaagagcttgacagtataggttttattaacgttccagctgataaatattggggagcctctacagaaagatcaaacaaattttttaatattggaaatatattagtaaattcttcaataattcgctctatagcaataataaaaagatctgccgccattgttcatagaaaagaaagattaatacctaaaaatataagtggtgcgattgtgaaagcttcaaatgaagttatatcgggaaaactaaaaaataactttccattaaaagtttggcaaactggttctggtactcaaactaatatgaatgttaatgaagtaattgcaaatagagcaattgaaatacttaaaggtaaaaaaggaactaaaaaacctgttcatcctaatgatcatgtaaataaatctcaatctacaaatgacgtttttcctactgctatgcatatctcggtagctacagaaacaattaataaattactgcctaatcttaaactattagaaattgaacttaaaaaaaaatcagttgaatttaaaagaatagtaaaaattggaagaacacatttacaagatgctacacctctgactttaggacaagagttttcaggttattatgaacaattaaaaaaaagtatagaaagaataaa

SEQ ID NO: 280996 - DNA, 549 bp, Unknown
  Bacterial polypeptide expressing nucleotide sequence isolated from the Sargasso Sea
catgagtgaaggttatcgtatagaaaaagattcaatgggggaagtcagggtgccggcgaatgctctttatggggcacaaacacagcgcgctgttgataattttcctgtcagcggaatctgtatcagtcgccccctaattcacgctcttggagtgatcaagcaggctgcagcaatagttaattcagaactaggaaatattcctaaggatgttgctcatgccattcagctcgcagcacaggaagtaattgacggtaaactggacgaacactttcctattgatatttaccagacaggctctggaacatctagcaacatgaatacaaacgaagttattgcaaagcgttcagttcagcttgtcaaggaattgtcaggaagagtccacccaaatgatcacattaattttggccaaagttccaatgacacattccctactgcaataaggatagcaggatatatagaagcaaaaaattatttggtcccttcgcttaaatatttacgcgaaacatttttaaaaaaaggattagagtattcacacgtagtcaaaacagg

SEQ ID NO: 280997 - DNA, 1393 bp, Unknown
  Bacterial polypeptide expressing nucleotide sequence isolated from the Sargasso Sea
atgaaatatagaattgagaaagacagtcttggtgaaattaaagtgcctgcaaaagcattatggggagctcaaacacaacgagctgtaaataatttcccaattagtgggattaagatggattttccttttactaaatcatttgtatcttctttgggtttaataaaagacgctgctgcaaaaacaaatttacgccttaaacttatatcatctaaaaaagctaaagctatttcaaaggcagccaaagaagtatggcaggaaaaacatcatcatgaatttcctattgatgtatttcaaactggatctggcacaagctcaaatatgaatgcaaatgaagttatcgcaaatttagcaactaaatatgcaaaagtaatcgttagcccaaatgatgatgtaaatatgagtcaaagcagcaatgatgtaatacctactgcaattaaaataagtgctcatatggacttaacaaaaaaattaataccagcattagatgaattaattaaaacaattgaaaaaaaggctgattcagtaaaaggaatcatcaagacagggcgaacccatttgatggatgctatgccaatagatttctcagaagaattaagagcatggtctggccaattaaactcttctaaagaaatattgaatattttagaaaagaaatttcttgaattacctcaaggaggaacagcagttggaagtggaataaatgcccataaacaattttctaaatattttgcacaggagataacaaaacttacaggtaataaatgtaaatatattccaagtaaaaatttttatcatgaattaagtgcgcaagattgttctgttcaattatctggagagttaaaaaatttagcagtcatacttacaaaaatctcaaatgatttaaggtggatgaatagtggaccattggctggtttgtctgagatagagcttaaagctttacaaccaggaagcagcataatgccaggaaaggtaaatccagttattcctgaggctgttgcaatggcttctgctgatgtaataggtaatgatgtttcaatcactgttgctgctcaatcaggtaattttcagttaaatgtaatgttgcctgttatagcttataacttgcttaagagtattaatcttctatcaggttccatggaggccctatcaaaaaaagcaataaaaacctttaaggttaataaaaaaaatcttgatatttcattatctagaaatcctattttagtcactgctctaaatccaattataggatatgaaaaagcttcagagattgctaagaaggcttataaagaaaatagatctatagttgaggtcgcatctgaagaaactaatataccaaaaccaaaattaaaaaaattacttgatccttcaaaattagctaaaggtggaatataaa

SEQ ID NO: 280998 - DNA, 1393 bp, Unknown
  Bacterial polypeptide expressing nucleotide sequence isolated from the Sargasso Sea
ttggtaaaatatagaaaagaatctgactcttttggttttataaatgtaccatccaatgcatattggggagcacaaacacagcgttcattaaaaaactttgatataggtaatgaaacaattccattatcaataattaaaagcctaggtgttattaaattagctgcagcaaaagttaattttaatcaaggaaagctggataaaaaagtaagcaacgcgatagttaaagctgcaaaagaagttatatctggaaaattaaatgatcatttccctctatcagtatggcaaactggttctggaactcaatcaaatatgaatgccaatgaagttatttcaaatcgagcaattgaattgcttggtgggaaaaaaggctctaaaacaccagttcatccaaatgaccattgcaatatgtctcaatcttcaaatgatacctttccaacagcaatgcatatagcgtgcgcactcgacacaaaagaagtattacttcctgccctaaaaaggcttgctgaggcattaaaaaataagtcagaagaatttaaagaaatagtaaagattggaagaacacatcttcaagatgcaacgcctgttacactcggacaggaattttctggctattttacccaattggaaaaggggattgagagggttaataaatcactcgaagatgttatgtatttggctcaaggaggaactgctgttggtactggaataaattcaaaaaagggttttgataaaaagtttgcaagagagtgtagtttatttcttaaaatgaattttaaaacagcagaaaataagtttgaagccttagctacacatgatgcaattgtagaattttctggatcattaaatacattagcatcctcattatttaaaatagcaaatgatattagattattaggatctgggccaagggctggtttaagtgaaataatgcttccagaaaatgagcccggctcatcgataatgcccggaaaggtgaatcctacacaatgcgaagcaatgacaatgttatgtgttcaagtaatgggtaatcattcggcaataactataggcggaagtcagggacattttgaattaaatgtatataagccaatgattgcctataatattttacaatcaattaaattgttagctgacggctgcaatagttttgttaagaattgtgtttcaggaattaaattaaataaaaagatgattgatcaacacctcaataactctcttatgctagtaacggcattagctccagttattggttacgataaagctgcagaaatagcaaaaaaagcgcataaaaatggaacaactcttaaagaagaggcagtaaaactcaattatatctctgaaaaggaatatgacaaaatagtccggcctgaaaaaatgattaagccatcataaa

SEQ ID NO: 280999 - DNA, 1393 bp, Unknown
  Bacterial polypeptide expressing nucleotide sequence isolated from the Sargasso Sea
tatgaaatttagaatagaagaggatagccttggaaaagtaagagtaccaagaaatgctttatggggtgcacaaactcaaagagcaatagataatttcccaataagcggcatctcaatgaattttcctttcacaaatacctttatttcaatgctaggttatgtaaaagatgctgcagcaagagcaaataaaaaccttaagttactagaaacaaaaaaacagagagtcatctcgagagctgccaaagaggtatggactaataagcatggcaaagagttcccaattgatgtttttcaaactggctctggcacaagcacaaatatgaatgcaaatgaagttatagcaaacctttgctataaaacttccaaagtaaagattcatcccaatgatgacgtgaatatgagtcaaagttcgaatgatgtaattccaactgttatgagtttggcatattactttgattcaacaaaaaaattaatgcccgcactagatttacttattgaaacgttggaaaaaaaagctgactcagtgaagggagtaacaaagactgggagaacacatcttatggatgcaatgccggtagatatgtcagatgaattaaatgcttggaatacacaacttaaatgctcaagagaatctatatcagttgtcttagaaaaacttttattccttccacaaggtggtactgctgttggttcaggtataaatgcgcataaaaggttttcaaaagaattttcaaaggagctttcaaagctaactggctttaaaacgaagccaagcaaagacttctttagaaacttaagtgctcaggacctctctgttcaactatcaggggagcttaaaaacttagctacagttcttttgaagatatcaaatgacttaagatggatgaatagtggacccttatctgggatctctgaaattgagcttcaggcacttcaaccaggtagcagcataatgcccggaaaagtaaatccagtaatacctgaggcagtagcaatggccgcagcagatgttattggtaatgatgtttctataactgtggcagcgcaatctggtaactttcaactcaatgtaatgctaccagtaatagcttattgtaatttaaagagtgtgaatatcttagctggaagcatgaatgttctagctaaaaaagctataaggacttttaaggtaaatcataaaaagattgaagaatcgctttcaagaaatcctatcttggtcactgctttgaatccggttattggttatcaaaaagctgcagctatagctaagagagcttataaagaatctagacctgttatcgacgttgctcacgaggaaactggaattcctgtttcacgtctcaagaaacttttagatccttcgaaattaacgaagggtggtatcaagtcataa

SEQ ID NO: 281000 - DNA, 1123 bp, Unknown
  Bacterial polypeptide expressing nucleotide sequence isolated from the Sargasso Sea
tatgaaagataataagtatcgtgttgaaaaggattctctaggggacgtaaaagttcctaaaaaagcactgtatggcgcgcaaacacaaagagcgattgataattttaaaataagctggcagaggtttgatcctatttttatagagtctcttgctgccctaaaggcttcatgcgcaatggctaactattcaagcaaacttctttctcaaaaagttgccaaaagtatatattcatcggctttagagatacataaaaatatcaaggactattatgatgaatttcctattgatatctaccaaacaggatctggtacaagtacaaatatgaatatgaatgaagttctttcaaatatcgtttccaaaaaaataaaaaaatcgatacatcctaatgatgacattaataaatcacaaagttcgaatgatgtaattccaactacaataaatatctgtggagtggttctagcagaagagttatgtgatgcaatagattatatggtaataagcatgattgagaaggaatgggagttaagagatgtaattaaatcaggaagaacgcatcttatggatgctgttccattatctttgggatatgaaatagaatcatggagagagcaactggtacatgcaaaagaagtagtggtttttagtaaagaagaacttgaatttttacctataggcggaaccgccataggcacttcactaaatgccccaaaacctttcccaaagaatgtctgttctaatttaaataaaatttactctagtcagaatatcaaatttaaacctaatccaaataaatctgaaatgatgagttcgcaaaatcatattttatctatgaatagcgcattacttagaattgcatcgacatataccaaaatctgtaatgaccttcgctggatgaatagcggtccaatttctgggcttgcagagattagcctgaaacctcttcagccaggtagtagcatcatgccaggaaagattaatcctgtaattccagaggcagttttgatggcaatgactcaagtttcaggacaccatagctctaccataagtggttgtatgtcaggtaattttcaatttaaatacaatgttaccaataatagcacacaatctaatagactcttttaa

SEQ ID NO: 281001 - DNA, 913 bp, Unknown
  Bacterial polypeptide expressing nucleotide sequence isolated from the Sargasso Sea
tatgccaaaaattagttacagaatagaaaaagacagccttggtgaagttaaagttcctagaaaagcattgtggggagctcaaactcaaagagcagtagataattttccaataagcgggataaaaatggatttccctttcaccaattcatttgttgattccttgggattaattaaagatgcggctgcaaaggcaaataaaagcttaggccttcttcctgcaagaaaagccagcgctatttctaaagcagccaaagaagtctggcagagtaaacataatgaacactttccacttgatgtttttcaaactggctcaggcacaagctcaaatatgaatgccaatgaagtgattgctaatttagctagcaaatatagcgggttggatatagatcctaatgacgatgtaaatatgagccaaagcagtaatgatgttattcctactgccattaaagtaagcgcacatatggatttaactaagaagctttaccctgctttagacaagttaatagtgaatatagataaaaaggctcagagcttagaaggtctagttaaaactggtagaacgcatttaatggatgctatgcctatagattttagtcaggaactttctggatggtcttcgcaactgaagaattcaaaagagacacttatctttttagaaaaaagattactagaactacctcttggaggaacagctattggtactgggattaatgcgcatcctagatttgccaaagtgtttgcaaaagagctatcaaaattaagtggtggttcttgtaaatgtgtcccaagtgataatttctttcatgaattaagtgcacaagacaccgccgttcaagtttcaggagaattgaagaatttggccataattttgatgaagatatctaacgaccttagatggatgaatagcggaccc

SEQ ID NO: 281002 - DNA, 1399 bp, Unknown
  Bacterial polypeptide expressing nucleotide sequence isolated from the Sargasso Sea
atgaaaaaaaataaagccttcaggattgagcacgatagtttaggtgaagtaaaagtacccaaaaaagctctatggggagctcaaactcaaagagccattgaaaattttcctattagtggaataaagtttaggtttccatttggcaggtcgtttattaaagctctaggagcaattaaacattcagcagcagtagcaaatcaagatctaggtatcttaacaataaaaaaatctaatgctattaagtctgcagccaaaatggtcatggtcggggaagttgatgatcattttccattagatgtatttcaaacaggatcaggcacaagcactaatatgaatgctaatgaggtaatagcaaatattgcaactaaaaagcttggtgcagatgtacatccaaatgacgatgtgaatatgagtcaaagcagcaatgacacaataccaacagcaatatgtttaagcactctttatgatatggatgaataccttcttccaggacttgatttacttatctccgagatagataaaaaagcaaaaagcttgcagggaacaattaaaacaggcagaacacatctaatggatgctatgcctatagatttttcacaggaactttcaggttggtcagctcaacttaaaagttgcaagacatcattattaaatgctaatcaaagaatgttgcaattacctcaaggcggaactgcaattggtactggcgtaaattcacataggaatttccctaaagctttttgccaggctctagaaaaaacttcaggatttaaagtaaaacctgctacaaacttttttcaaggccttagctcccaagataattcagcagagctatcaagcgcattaaagaatcttgctctagttcttatgaaaatttgtaatgatcttcgttggatgaacagtggacctttgactggattatctgatattgagcttgaagcattacaacctggcagtagtattatgccgggaaaagttaatccagtaatgccagaagctgtttctatggcatgcgctgatgttattggaaatgatctaacagtttctattgctgtgcagagtggaagcttccaattaaatgtaatgttacctgttattgcttataacgttttgaaaagtatcaatttgcttggaaactctatgcctttattggcaaagaaatccattaagtcatttaaagttaataaaaaaaatgtttcagagaatctagatagaaatccaattctagtaacagcactaaatccaattattggttataaaaaagcagcagaaattgctaaaaaagcctataaagaaaaacgttcaatagtagatgtagctgaagaaatgacagccattgaaagaaaagagctagaaagcttacttgatccaaaaaatttaactaagccatatttctaat

SEQ ID NO: 281003 - DNA, 1037 bp, Unknown
  Bacterial polypeptide expressing nucleotide sequence isolated from the Sargasso Sea
aatgaaaaaaaataaagccttcagaattgagcaagatagtttaggagaagtaaaagtaccaaaaaaagctctatggggagctcaaactcaaagagcaatcgaaaatttccctattagcggaataaagtttagatttccatttggcagatctttcattaaagctttaggagcaattaaacattcagcggcggtagcaaaccaagatttagggttgcttacagcaaaaaaatctaatgctattaaatctgcagctaaaatggtgatggtcggagatgtagatgatcattttcctttagatgtttttcagacagggtcaggcactagcactaatatgaatgctaatgaagtgatagcaaatattgcaaccaataaattaggtgccgatatacatccaaatgatgatgtaaatatgagccaaagcagtaatgacacaataccaacagcaatttgtctaagtactctttatgacatggaagaatatcttcttcctggtctcgatctacttattgctgagatagataaaaaagcaaaaaacttgcaaggaacaataaaaacaggcagaactcacttaatggatgctatgccaatagaattttcgcaagaactttttggctggtcagcacaacttaagagttgcaaaacttctcttgttaatgctaaccaaagaatgttgcaattacctcaaggaggaactgccattggaactggagttaattcacataagaattttccaaaagctttttgccaagctttagaaaaaacctcaggattcaaagtaaaaccaacagcaaacttttttcaaggccttagctctcaagataattcagctgaactatcaagtgcattaaaaaatcttgctttagttgttatgaagatttctaatgatcttcgttggatgaatagtggacctttaacaggattatctgatattgaacttgaagcattgcaacctggtagcagtattatgcctggtaaagtaaatccagtagtaccagaagctgtttctatggcatgcgctgatgtcattggaaatgatc

SEQ ID NO: 281004 - DNA, 1201 bp, Unknown
  Bacterial polypeptide expressing nucleotide sequence isolated from the Sargasso Sea
attgtctgatgctattaccaaagcttgtgatcatataatagataatcctgataaatatttaaatgagtttcctgtaccagtgtttcaaactggtagtggaactcagacaaatatgaatgtaaacgaagttgttgctaataaggctaatgaaattctaggagcaaagttaggttcatataaatttgttcatcccaatgatcacgttaatatgtctcaatctactaatgatacatttccgactgcaatactagttggatgtttaatatctgcagaggacaatttgatgccctcacttgcaatgcttgagaagtcattgatttctaagtcaaaagaattccacaaaattattaaagtaggaagaacccatttacaggatgcaactccaattagattgggtcaagaattttctggatatgcttctatgataaaaaatgatatatcaagaataaagagcgctgttgaagaatgtagtgatttacctattggtggtactgcagtaggaactggaattaatactgttgcaggttttgacgaattgatgtgctcatttatttcagaggaaactggattatcttttaatgtttgcaaaaataaatttgaattgctttcatctcaaaatgcaatctcaaatctatctgctcaaataagaatttgtgctggctctctaaataaaatagctaacgacattcgctggctagcatgtggaccaatggctggaataggtgaacttattcttccatcaaatgagcctggtagttcaattatgcctggcaaagtaaatccaactcaatgcgaagctgtaaatatggtttacgctcaaatattaggaaatgattctacaattaattacgcaggatcaaatggtaattttgaattgaatacttacagaccaattattgcctcatcaatacacgaatcgattactttattatctgaagtagctgaatcttttacactaaatgcactagacggattaaaagctaacgagaaaaaaataaaagaaaatttagataagtcattaatgttggttaccgcacttgctccaaaaattggttatgaaaaatcagctgagatcgcaaaaaaagcattaaaagaaaatatatcattgaaacacagtgctaaagctttagggtatttatcggaacaagaatttgataaaattgttaaaccagaattaatggttacacccaaaaaagcatga

SEQ ID NO: 281005 - DNA, 1408 bp, Unknown
  Bacterial polypeptide expressing nucleotide sequence isolated from the Sargasso Sea
ttggtaataaattcaatttttattcctgaatgttttagggtagatgtgaaataccgatcagacaaagattctctgggaccagtaaaaattcctgccgatgcatattatggtccatttacgggaagagcaatcaaacagtacaatgtgacaggtagaccatctcatcataatttgataaagtcatttgttatgataaaacgctctgcagcagttgcaaacatgaaaactaaagcaatcaacaaaaaacaaggaaccgcgattgtcaaagcctgtgataagattctttcaggaaaacacattgatcaatttgtcgtagacatggtaaactctggtgcaggaacagcgttcaacatgaacactaacgaagtaattacaaacgtagcactgaaaggattaggtaaaaaacaaggacagtatcaatttcttcatccaaatgatcatgtaaacatgtcacagtcaagtaacgatacatatcctactgcaatgcacatggcaatactgttttcattcaaagaaatgattcctgtaattgacaaattaataaaatcaattaacaaaaaggcaaagcaattttctaaatacaaaaaacttggacgtactcatttgatggatgcattaccagttacacttggaagtgagtttgcagcttatgtaacctcattaacaaatgctagaaatcagattgttgcatcacaaaaagaactggaacaagttgcattaggcggtacagctgtaggtacaggtgcaaacacaccaagaggatacagaaaagctgtaattattgaattaagtaaagtatcaaaattatcacttaaaccacaaaaagatatgcaatatgcattacaaagtaaatttccggttgcaaatgcatcatctgcattgaaaaactttgcaatagaattaggtaaagtatcaaatgatgttagattgatggcatcaggaccaattgcaggtttatcagaacttggaataccagcagttcatgccggttcatcaattatgccaggaaaagtcaatccatctttagcagaatgtatgaatatgatttgctttagcgtaataggaaatgatactacagtctcatttgcagcacaagcaggacagtttgaacttaatgtaatgttaccaggaatgttaaaggcagttttagattcaacagatatgctaacaaactttttgccaatattttctgcaaacctaattgacgggttaactgctaatcaagcaaaacttagagaaaatattgaaaatagtcctgtaattgtaacactacttacaccaaaaattggttatctgaaatctgcagacttgttcaaagaatcactgaaaacaggaaaaacaatcagagaattagtagtctcgaaaaaattaatgacaaataaagaagtcagctcgttgttaggttaag

SEQ ID NO: 281006 - DNA, 1274 bp, Unknown
  Bacterial polypeptide expressing nucleotide sequence isolated from the Sargasso Sea
tatggatatgagacttgaaaaagattcaatgggagagcttgaggttccatcaaaagctctttatggtggaaacactcgtagagcacaattaaattttccaatttcaaatttaagatttggtagatcatttattaagtcattggggcttattaaacaatctgcagcagaaacaaatctagaattaggattaattgaaaaagatatagcaaatgcaattatatcctcagctcaagaggtaattgatggtgatcatgacgaaagctttgtagttgatatatttcaaactggatctgggacttcaacaaatatgaatgtaaatgaagtaatttcaaatctttcaattctaaaattaggaggagaaataggttcaagaaatcctgttcaccctaatgatcatgtaaacaaagggcaatcatctaacgatgtaattccaactgctattcacattgcagctgcaatatcaattaaagacgatctaattccttctatgaaaattttagagtcttctctagaaaaaaaatctaaggaattttgggaaatagtaaaaacaggtagaacacacctacaagatgctactcctattaggctagggcaagaatttaagggataccttgggcaggtaaaaaactctatcaataaaatagaattagctcttaatgaattatctattttagctctagggggaacagctgttggaactggaataggcatgaatcctgaattttgtggagaagtaataaaaagaataggagataaaacagaaataaagttttctgagactgataatcatttccaatctcaatctactatagatggtatcgtttttgcttcaggaattattagaagttatgcagtgagtttaatgaaaattgcaaatgatattagatggttgggatcaggaccaagagcaggaattggtgaaatcagcttgcctgaagttcagccaggctcatctataatgccaggtaaagtaaaccctgttatcgctgaatccattacaatgatatgtgcacaggttatgggtaacgatcaaactgttagtatcgcaggtcaaagtggaaattttgaattaaatgttatgatgccagtagctgctcataatctccttgagtctatagagattctttcaacaggaagtaaaaacttttcagatcaatgtatagatggcttagaagctactactaaagggcctcaaatggtcaatcaaggacttgctatatgtactgcattagcaccaaaaataggatatgataaagcagcagatatagcacata

SEQ ID NO: 281007 - DNA, 1083 bp, Unknown
  Bacterial polypeptide expressing nucleotide sequence isolated from the Sargasso Sea
atgcaaatgaggtaatagcaaatcgtgcaatagagattctgggaggaaaaattggctcgaaagatccagttcatccaaatgatcattgtaatatgggtcaatcatcaaatgatacatttccaactgcaatgcatatagctacagctcaatctacaaataatttactgatacctgctctagaaaatttaaagaagttgatagataaaaaaatcaaagattttgatggtataattaagattggtagaactcatactcaggatgcaactccattaatgttatcacaagaattttcaggatatagttttcaaattagtatgggaattgaaagaataagaaaatctttacaaaatgtttatgagcttgctcaaggtggaacagctgtcggaactggtttaaatactgttaaggggtgggataaatcagtcgcaaaagaaatatcagaaataacaaatttaccatttattacagcttcaaataaatttgaagcattagcttcgcatgattcgcttgctgaattctctggaagtttaaaaactcttgcagtgagtattttcaagattgcaaatgatattagatttcttggctcaggtcctcgttgtggaataggtgagttaattttacctgaaaatgagccggggagttcaattatgcctggcaaggtaaacccaacccaatgcgaagctataacgcaagtgtgtattcaggtaatgggaaatgatgctgcaattggatttgcaggtagtcagggccattttgagctaaatgtttataaaccaatgatttcatataacattcttcaatcaatacaattattagctgatgcttgtaatagtttttctgagaatcttttgaaaggtctaaaagctaataacgaaagaattgaaaaacttatgcaagaaagtttaatgctagttacagcgcttgctccaaaaataggttatgataatgcaacaaaagtagcaaaggctgcacatgccaatggtacaactttaaaagaagaggccattagaatgggttttgttgataataaaacttttgaggaagttgttaggcctgaaaaaatggtaggtccatcagagtgaa

SEQ ID NO: 281008 - DNA, 742 bp, Unknown
  Bacterial polypeptide expressing nucleotide sequence isolated from the Sargasso Sea
aatgaaaactagaaaagaattcgatagcattggttcaataaatgtgcctgataatatgtattggggggcatctacccaaagatcaaataagtattttaatataggaagtatactagttgatctgtctataattaaatcaatagcaataattaaaagatctgctgcaatagttcataaaaaagataaattaatctcaagcaaagtagctaatgcaataattaaagcctcaaatgaggttattgctggaaaattaaatgaaaattttcctttaaaagtctggcaaacaggatctggaactcaaacaaatatgaatgtaaatgaagttgtcgctaatagagcaattcaaattcttaaaggtaaaaaaggatcaaaaaaacctgttcacccaaatgatcatgtaaataaatcacaatctacaaatgatgtatttccaactgctatgcatatatcaatagcaaaagaaacaatcggaaagttaattccaaacttaaaaattttagaaaaatctttaaggaaaaaatctgttgaatttaagaaaattgttaaaattggaagaacacatcttcaagatgcaactccacttactctaggccaagaattttctggataccatgagcaaattaaaaagagtttagatagaataaaatattgtctgaatgatattctttttttagcgcaaggtggaactgcggtaggaacaggaataaatactaaaaaaaattttgataaaaaaaatagttaa

SEQ ID NO: 281009 - DNA, 1291 bp, Unknown
  Bacterial polypeptide expressing nucleotide sequence isolated from the Sargasso Sea
atgattgaaaactccctttctggagccgttatcaacaagcccacctccgaagagatagagtctcgcaaaccgaacaagaccaatctcaaagtgagggttgagactgatacaatgggggagatagaagttcctgctgatagatactatggggcacagacagcaaggtctctgatcaacttcgatattggagaagatagaatgcccagatctgtgattcgtgcattcggaatcctaaagcaggcagccgcagagacaaatgtcaagctcggagtactggaagatgacattggaaaactgatctcggaaacatgcgaagaggtgatttctggaaatctagactcccatttccctctcaggatttggcagacgggctctgggactcagacgaacatgaacgcaaacgaggttgttgcgaatagggcaatcgagatctctggaggaaagctgggcagtaagtctccggtacaccctaatgatcatgtaaaccgcgcgcagtcaagtaatgatacgtttccaactgctatgcacatcgctgcagccgaggaaatacaacatcggctaattccatcagtactgaaacttcgacattctctagcggagaaggaggaagagttctctgatatagtcaaaatcggcagaacccacctcatggacgccgttccgctaacacttggacaggagtttggtgcttacgtgtcgatgttggatgccgacttgattaggattcaaacggccctgaacgatttgtacgaactagcactaggggggactgcagttggaacaggcctcaatactcatcccgatttcgcagaaacagtcgccgataagatatcagaaaagacaggtctacccttcatcagtgcagagaataagtttgcacaattagcagctcacgatgccatcgtagcagcttcgggcgctctgaatacactttcagcctcgttgatgaagatagccaatgatgtgagatggcttggttccggacctcgatgtggctttggagaactctctctacccgcgaacgaacctggctctagtataatgcccggcaaggtcaatccaacacagtccgaggccatgactatggtctgttgccaggtaatggggaaccacgttgctatctccatcggtggaagtcagggaaacttcgaactgaacgtcttcaagccgttgatgatccataatctcctgcatagcacaaggctgctttcagatagctgtgtatctttctctgaaaattgcatactcggactcagggcaaacgaatcaaagattgccgagcatctcgaga

SEQ ID NO: 281010 - DNA, 1396 bp, Unknown
  Bacterial polypeptide expressing nucleotide sequence isolated from the Sargasso Sea
gatgaagagcaggattgaacacgacagcttcggcgcgatcgccgtgccggccgatcggctgtggggggcccagacccagcgctccctgcaacacttcgacatctccggcgagcgccagccaatggcgctgatccatgccctggcccgcatcaagtcggcctgtgcccgggtcaaccacgccaacggactgctgcccgcccgcacggcgcaggccatcatgagtgccgccgacgagatcctgtgcggccagcatgatgaggagttcccgctgcgggtatggcagaccggctccggcacccagaccaacatgaacctcaacgaggtgctggccaaccgggccagcgagctgctcggcggcctgcgcggcgaggggcggctggtgcaccccaacgacgaggtgaacaagagccagtcgagcaatgacgtcttcccgagcgccatgaacctggcggccgtcacggccatcacccagcacctgctgcccgccctgaccaccctgcgcaccaccctggccggcaaggcggcggccttcgacgacatcgtcaagataggccgcacccatctgcaggatgccaccccgctcacactggggcaggagttctccggctgggtcgcccagctcgagcaaggggagcgccatatccgggccgccctgccccatctgtgcgagctggcgctggggggcaccgccgtcggcaccggcctcaacaccccgcccggctttgccgaggcggtggccgccaccctggccgagcagaccggtctgccgctggtgagcgcccccaacaagttcgaggcgctggcggcgagcgatgccctggtgcatggccacggcgccctcaagacgctggccgcctccctcatgaagatcgccaacgacgtgcgctggctggcgagcggtccccgcagcgggctgggggagctgctcatcccggaaaacgagccaggctcctccatcatgcccggcaaggtcaatccgacccagtgcgaggcactcaccatgctgtgcgcccaggtgatgggcaacgacgtggccatcaacatcggcggtgccagcggcaacttcgagctcaacgtgttcaggccgatgatcgcccacaacttcctgcagagcgtgcggctgctggcggacggcatgcagagcttccacgaccactgcgctgtcggcatcaccccgaaccagccccgcatcgacgagctgctggcccgctccctgatgctggtaacggcgctcaacccccatatcggctatgacaaggcggcagagatcgccaagcgggcccaccatgaggggctcagcctgcgggaggcggccatcgcctccggccacctgacggcgcagcagttcgatgcctgggtggtgccggccgacatggtgggtcggcgcggcggctga

SEQ ID NO: 281011 - DNA, 1393 bp, Unknown
  Bacterial polypeptide expressing nucleotide sequence isolated from the Sargasso Sea
atgaaatttagaattgaaaaagatagtgttggtaatgttaaagtacctgcaaaagcattatggggcgcacagacacaaagagcagttgataactttcctattagcggcattaaaatggattttccatttacaaaatcttttgtctcctcgttaggccttattaaagatgcagctgcaaaaagtaatttaaagctaaaattaattagttcaaagaaatcaagagctatatcaaaagctgcaaaagaagtttggcaggaaaaacatcatcatgaatttcctatagatgtttttcaaaccggatctggtacaagttcaaatatgaatgcaaatgaagttattgcaaacttagcaacaaaatattccaaagtaaaaattagtccaaatgatgatgtaaatatgagtcaaagtagtaatgatgttatacctactgcaattaaaattagtgctcatatggatttaacaagtaaactttatcctgcattagatactttaattacagctatcgaaaataaagcaaagacattagaagggaccatcaaaactggaagaactcatttaatggatgctatgcccattgatttttcagaagaattgaaagcctggtcaagtcaattaacatcctcaaaagaaatgctaaatattcttgaaaaaaaattgctcgaacttccgcaaggtggaacagctgttggcagtggtatcaatgcacataaacagtttgcaaaatgttttgcgcaagagatctcaaagttatttggcaataaatataaatttgtaccaagtaaaaatttctatcatgaactaagtgcacaagattgttcagtacaactttcaggtgagctcaagaatcttgccttaattcttatgaaaatatctaatgatttgagatggatgaatagtgggccacttgcaggactggctgagatagaacttaaagcacttcagccaggaagcagtattatgccaggtaaagttaatcctgtaattccggaagcggtagcaatggcatctgctgatgtaattggaaatgatgtatctattacagtggcatcacaatctggcagctttcagttaaatgtaatgttacctgttatagcctataatcttcttaaaagcattaatcttttatcaggagctatgaatgttttatcaaaaaaagctataagtagttttaaggttaatcatgcaaatttagcagtatcaatatcaaagaatccaatactagtaacggctttaaatccaatcatcgggtatgaaaaagctgctttaattgcaaagaaagcatataaagaaaaaaggccaattatagatgttgctgctgaagagactgatataccaaaagcaaaactaaaaagattacttgatcctgcaaagctttctaaaggaggtacttaat

SEQ ID NO: 281012 - DNA, 547 bp, Unknown
  Bacterial polypeptide expressing nucleotide sequence isolated from the Sargasso Sea
aatgacaaataaaaaaaggatagaaactgatagtttaggctcaaaaaaaattgataaaaataaactttggggagctcaaactcaaagatcattagagaatttcaaaattggaaatgaaaaaatgcctactgagctaattgtagctcttggtttacaaaaaaaagctgctgctctagctaatatagaactcggggtattaagtaaaaaaataggattaaatatagttaacgcatgtgatgaaataataaatttaaatcttattgaagaattccctttgctagtttggcaaactggatcaggtacacaaacaaacatgaatgcaaatgaagttattagtaattatattattagaaaattaggaggaaaaattggaagtaaaaaaccaatccatccaaatgatcatgtgaatttatcccaatcatcaaatgatacttttccaacaataatgcatgttgcaattaatgaattagcaaccaaaaaattaaaaccaaatctaataaatttaattaaagaatttcagactaagataaagattttcaaaaaataa

SEQ ID NO: 281013 - DNA, 1372 bp, Unknown
  Bacterial polypeptide expressing nucleotide sequence isolated from the Sargasso Sea
attgaataaaaaagaaacaagaatagaaaaagactcaatgggtgaatttgaagtacctattgatgctatgtatggtgcttcaactgctagagcaattgagaattttccaatttcagaacttaagttctctcgatcatttataagagcacttggtgaaattaaaaaagcttgtgctgtagtaaatcaaaataataaattattagataaaaaaatagcaactgcaattattgatggtgctgaagaagtaatctcaggtaatcatgacaaagattttgcagttgatattttccaaacaggatcaggcacttctacaaatatgaatgcaaatgaaatcattgcaaaaatagcatctgataaaactggtgaatcaatacatccaaacgaccatgtaaatatgagtcaatcatcaaatgatgttattccaacagctacaaatgttgctgctgtaatagatgttactgaagggctcatccctgaattagataatcttatttcattacttaatgaaaaggcaaaacagtgggagaaagtctataaaaatggaaggactcatctaatggatgctacacctgttagtttaggccaagaattttctggatatgctgatttaataaatgaaagaatgggggacattaaagcctctttagataatgttcagaaattagcaattggcgggaccgctgtcggtactggaataaatgctcctgataattttggggccgatgttgcaagcgaacttcagtcatcaattggtataccttttaaagaagttgaaaatcatttcacaagacaaggatcaagagaagaagtggttcatttatcaagtgctttgaaggcacttgcagtatcgctctttaaaattgcaaatgatattagatggatgggtagtggaccagtgtctggattaggagatttgaagatccctgctttgcaaccaggatcatcaataatgccaggaaaagtaaatcctgtaatacctgaaatgatgatgcaggtatcagctcaagttattggaaacgatacaactattacgttttcatcagcgaatggaaattttgagctcaacacaatgcttcctgtaatggctcacaatctacttgaaagcattgctttactcactactggagtgaatgtgtttggggaaaaactaattaaagacttagaagcaaacactgaaaagctaaatgaagatactcaaaaaaactcaatcctagttacagcacttgtaccaaagcttgggtatgatgttgctgctgaagtagctaaagaagctatggataatggattaacaattaaagatgtattgcttagcaaggaattaatgacagagggtgatattgatgatcttttggatattgagaagcttatctag

SEQ ID NO: 281014 - DNA, 844 bp, Unknown
  Bacterial polypeptide expressing nucleotide sequence isolated from the Sargasso Sea
aatgcactatgggggcgcacaaactcaaagagcaatagataatttcccaataagcggcatctcaatgaattttcctttcacaaatacctttatttcaatgcttggttatgtaaaagatgctgcagcaagagcaaataaaaaccttaagttattagaaacaaaaaaacagagagtcatctcgagagctgccaaagaggtatggactaataagcatggcaaagagttcccaattgacgtttttcaaactggctctggcacaagtacaaatatgaatgcaaatgaagttatagcaaacctttgctataaaacttccaaagtaaagattcaccccaatgatgacgtgaatatgagtcaaagttctaatgatgtaattccaactgttatgaatttggcctattactttgattcaacgaaaaaattaatgcctgcactggatttacttattgaaacgatggaaaagaaagctgactcagtgaagggagtaacaaagactgggagaacacatcttatggatgcaatgccggtagatatgtcagatgaactaaatgcttggaactctcaacttaaatgctccagagaatctatatcagttgttttagaaaaacttttattccttccacaaggtggtactgcggttggatcaggcataaatgcgcataaaaggttttcaaaagaattttcaaaggagctttcaaagctaactggctttaaaacaaagccaagcaaagacttctttagaaacttaagtgctcaggacctctctgttcaactatcaggggagcttaaaaacttagctacagttcttttgaagatatcaaatgacttaagatggatgaatagtgga

SEQ ID NO: 281015 - DNA, 1396 bp, Unknown
  Bacterial polypeptide expressing nucleotide sequence isolated from the Sargasso Sea
atgaacgaagcagttcggatggaacgcgatacgttcggcgaaatcgccgtgccggccgaccggctctggggcgcgcagaccgagcgctcgctgcagaatttccggatctcgaccgagaagcagtcgcccgagctgatccacgcgctcgcgatcgtcaagcgcgccgcggcggccgtgaaccagtcgctcggcgtgctggccgacgacaaggcgcgcgcgatcatcgacgcggccgacgagatcatcgccggcaagcatccgcgcgaattcccgctcgccgtgtggcagacgggttccggcacgcagaccaacatgaacctcaacgaggtgatcgcgaatcgcgcgagcgaactgatgggcggcgagcgcggcgaagcgcgcaaggttcatccgaacgacgacgtgaaccgcggccagtcgtcgaacgacgtcttcccgactgccatgcacgtcgcggccgcttacgcgatcgtcaaccacctgctgccggcgctgcgcacgctgcgcacgacgctcgatgcgaagtcgaaggcgttcgccgacatcgtgaagatcggccgcacgcacctgcaggacgcgacgccgctcacgctcggccaggagttttccggttacgtcgcgcaactcgaccagggcatccgtcacgtcgaatcggcgctgccgcacctgtatgaactcgcgctcggcggcacggcggtcggcaccgggctgaacgcgcatccggagttcgcggtgcgcgtcgccgatgaaatcggccggctcgcgaagctgccgttcgtgacggcgccgagcaagttcgaggtaatggccgcggccgacgcgctggtattcgcgcacggcgcactgaagacggttgcagccggcctgatgaagatcgcgaacgacgtccgctggctcgcaagcgggccgcgctgcgggctcggcgaactgtcgattccggagaacgagccgggcagctcgatcatgccgggcaaggtgaacccgacgcagtccgaagccgtgacgatgctgtgctgccaggtgttcggcaacgacgtcgcggtcaacgtcggcggcgcgagcggcaatttcgagctgaacgtgttccggccgatgatcgcgcacaacgtgctgcagtcggtacggctgctcgctgacggcgcgcagagcttcaacgaccactgcgcggtgggcatcgagccgaaccgctcgcggatcgacctgctgctgaacgaatcgctgatgctggtgacggcgctcaatccgcacatcggctacgacaagtcggcgcaaatcgcgaagaaggcgcacaaggatggcacgacgctgaaggcggccgcgctcgcgctcggctacctgaccgaggcggaattcgatgcgtgggtacgtcccgagcagatgatcggatcgcagtaac

SEQ ID NO: 281016 - DNA, 1228 bp, Unknown
  Bacterial polypeptide expressing nucleotide sequence isolated from the Sargasso Sea
aatgaaaaaaagaaaagaatttgacagtataggagctattaatgttcctgcagataaatactggggagcatctactgaaagatcaaataagttttttaatattggaaaaattctagtaaattcttcaataattcgctctatagcaataataaaaagatctgctgccatcgttcataaaaaagaaagattgattcctagtaatattagtggtgcaattgtaaaagcctcaaacgaggttatatcgggaaaacttgaaaataactttccattaaaagtttggcaaactggttctggtactcaaactaatatgaatgttaatgaagtaattgcaaatagagcaattgaaatacttaaaggtaaaaagggaactaaaaaacctgttcatcccaatgatcatgtgaataagtctcaatccactaacgatgttttcccaactgcaatgcatatctctgtagctacagaaacagttaataagttgctgcctaacttaaaattattagaaaatgaattgaaaaaaaaaacaattgaatttaaaaaaattgttaaaattggaagaacacacttgcaagatgcaactcctcttactttaggacaagaattttcaggatactatgagcaagtaaaaaaaagtttagaaagaataaaatttagcttaaaagatattttatttttagcacaaggaggaactgcagttggaaccggtcttaatacaaaaaaaaattttgacaaaaaaattacaagagaaatcagcaagtattgcaaaataccatttaaacctgcgccaaataaattctctgagctagctgcccacgatgcaattgtaagtttatctggagctttaaattcttgtgctgtagctttaatgaaaatttcaaatgatattaggtttcttggttctggtcccagagctggttatggtgaacttatattaccagaaaacgaacctggctcctcgataatgcctggcaaagttaatcccactcaatgtgaagcggtaactatggtttgtgttaaagtaattggaaatcataccggaatatcaattgctggaactcacggacactttgaattaaatgtatttaaacctttgattgctcataacatattgcaatcgattgatatattagcagacagtgtaaaaaattttagcttgtattgtgtgaaaggaattaaagcaaacaaattaaaaataaaagaacatttagataattcattaatgttagtaact

SEQ ID NO: 281017 - DNA, 1003 bp, Unknown
  Bacterial polypeptide expressing nucleotide sequence isolated from the Sargasso Sea
atgaaatttagaaaagaatatgacagtattggctctattaatgtgcctgtggataagtattggggagcatccactcaaagatcaaaaaaatactttgatatcggagatgtcttggttaggccgaaactaataaaatctattgccataataaaaaaggcagcagctataacaaactataaaaataaagatattaattctaaaatttataaatcaattattagagcttcaagtgaagtaattaatggaaaattagatagtcactttccacttaaagtttggcaaactggttctggcactcaaacaaatatgaatgtaaatgaagttatatctaatagggctattgaaatattaaaaggaaaaaaaggaacaaaaaaacctgtacacccaaacgatcatgtaaataaatcacaatctactaatgacgtatttcctactgcaatgcatattgctatagcaatggaaactagagagaaacttttaccaagtttagtgcttttaaataaagaattaaaaaaaaaagtaagagaatttaataaaatagttaaaattggaagaacacaccttcaagatgcaacacctttatcattgggtcaagaattttcaggataccaatcacaattacaagattgtatcaaaagaataaaggtatcacttaatgaaatttattacctcgcacaaggtggtactgctgttggtactggaataaatacaaaaaaaaattttgataagaaaatagttaatgaaataaaaaaaataacgaaattaccatttaaaccagctagaaataagtttgctgctttagctgcgcatgatgcgattgtaaattattcaggtactcttaatactactgcggtatgtttaatgaagattgcaaacgatataagatttttaggttcaggtccaagagcaggatatggagaaataatacttccagaaaatgaaccaggatcatcaataatgcctggcaagggttatccaactcaatgtgaagctgtaacaatgg

SEQ ID NO: 281018 - DNA, 1417 bp, Unknown
  Bacterial polypeptide expressing nucleotide sequence isolated from the Sargasso Sea
atggattttttttcaggagttgttttggtaaaaaacagaaaagaatctgactcttttggttatataaatgtcccagccaatgcatattggggagcgcaaactcaaagatcattaaaaaactttgatataggtaatgaagttataccaacctctataataaaaagtttaggcattattaagcttgcagctgcaaaagttaataacgcacaaggtaaacttgataaaaaaattagtaatgcgattgtaaaagcttcaaaagaagttatttctggaaaattaaatgatcacttccctttgtctgtatggcaaactggatcaggtactcaatcaaatatgaatgctaatgaagttatttcaaatcgagcgattgaattactcggtgggaaaaaagggtcaaaaacaccagtgcatcctaatgatcactgcaatatgtctcagtcatcaaatgatacatttccaacagcaatgcatattgcatgcgcattagatactaaagaaaaattacttccatctcttaaaaaactttccaatatacttaaaaccaagtcagaagaatttaaagatacagtaaaaataggaagaactcatttacaagatgctacacctgttactcttgggcaagaattctctggttattacactcaagtggaaaaagggatcgagcgcgttaataaatctttagaagatataatgtatcttgctcaaggcggaacagctgttggcaccggtataaattcaaaaaaaggttttgataaaaaatttgcaaaagaatgcagtatatttcttaacatgaaatttgaaactgctgataataagtttgaagctttagcaactcatgatgcaatagttgaattttctggatctttaaacacattatcgtcatcattatttaaaattgctaacgatattcgacttttaggctcaggtcctagagcaggtcttggtgaaatacaactacctgaaaatgaacccggatcttcaataatgcctggtaaagtaaatcctactcaatgtgaagctatgacaatgttatgcgtccaagtgatgggaaatcattcagcaataacaataggcggaagtcagggtcatttagaattaaatgtttataagcctatgattgcctataatattttgcagtcaattaaattattatcggatggttgtaatagttttgttaaaaattgtatttcaggcattaagttaaataaaaaaatgattgatctacatcttaataattctttaatgttagtcacatcattagcaccagtaattggttatgataaagcagctgaaatagcaaaaaaagctcataagaatggaacaacccttaaggaagaggcaataaaattaaaatatatctctgaaaaggaatacgacaagatagttcgtcctgaaaaaatgattaagccatcttaag

SEQ ID NO: 281019 - DNA, 1399 bp, Unknown
  Bacterial polypeptide expressing nucleotide sequence isolated from the Sargasso Sea
atgaaaaaaaataaagccttcagaattgagcaagatagcttaggagaagtaaaagtaccaaaaaaagctctatggggagctcaaactcaaagagcagtcgaaaatttccctatcagtggaatcaagtttagatttccatttggtagatcttttattaaagctttaggagcaattaaacattcagcggcagtagcaaaccaagatttagggctgcttacagcaaaaaaatctaatgctattaagtctgcagctaaaatggtgatggtcggagaagtagacgatcattttcctttagatgtttttcaaacaggttcaggtactagcaccaatatgaatgctaatgaagtgatagcaaatattgcaaccaagaaattaggtgccgatatacatccaaatgatgatgtaaatatgagccaaagcagcaatgacacaataccaacagcaatttgtctaagcactctttatgacatggaagaatatcttcttcctggtcttgatttacttattgctgagatagataaaaaagcaaaaaacttgcaaggaacaataaaaacaggcagaactcacttaatggatgctatgccaatagaattttcgcaagaactttctggctggtcagcacaacttaagagttgtaaaacttctcttgttaatgctaaccaaagaatgttgcaattacctcaaggaggaactgccattggaactggagttaattcacataagaattttccaaaagctttttgccaagctttagaaaagacctcaggattcaaagtaaaaccaacagcaaacttttttcaaggccttagctctcaagataattcagctgaactatcaagtgcattaaaaaaccttgctttagttgttatgaagatttctaatgatcttcgttggatgaatagtggacctttaacaggattatctgatattgaacttgaagcattgcaacctggtagcagtattatgcctggtaaagtaaatccagtagtgccagaagctgtttctatggcatgcgctgatgtcattggaaatgatctaacagtttctattgctgttcagagtggaaactttcaattgaatgtaatgttgcctgtcattgcttataacgttctgaaaagcattaatttacttggaaactccatgccattgctggccaagaaatgcatcaaatcatttaaggttaataagaagaacatttcagagaatctagatagaaatccaattcttgtgacagctttaaacccaattattggctacaaaaaagcagcagagatcgctaaaaaagcttacaaagaaaaacgttcaatcatagatgtagccgaagagatgacaagtattgagcgaaaagaactcgaaagtcttcttgacccaaaaaatttaactaaaccatatttctaat

SEQ ID NO: 281020 - DNA, 988 bp, Unknown
  Bacterial polypeptide expressing nucleotide sequence isolated from the Sargasso Sea
gatgagcatcgccaccgcgcacgaagtgcaggaacggttgattcccgcgttgagaacgttacaggaggcgttgcacgccaaggttatagcgtggggaggcgtggtgaaaatcggccgcacgcatctgcaagacgccgtgcccgtcaccctcgcgcaggagtttagcggatacgagcaacaggtgaagaattcgctcgttcgcgcgaaaggggcgttgattcacttgctcgaactcgccatcggcggcaccgccgtgggcactgggttgaattcaccgccgggattcggcgagagcatggcggcggagatttccaccatcacgggtcttcccttcgtgagcgcgccgaataaattcgaagctctcgccgcgcacgacgcgcaatccgcgctgtctggattattaaaaacgatcgccatctcactgttgaagattgcgaacgacatacgactcctcggttcgggaccgcgcgccggactcggcgagcttcgattacccgaaaacgaacccgggagcagcatcatgcccggcaaggtgaatcccacgcagtgcgaatctctcatgcaagcgtgcgcgcaggtgatcggaaacgatctcgccgtcaccgtgggtggtgcgtcgctctcccacttcgagctcaacgtcgcgaaaccgctcatcgcgcacaacaatctcaacagcatcgcgttgctctccgactcggcgatgagtttcaccaaaaattgcgtgcgcggcgtcgaacccgatctcgagcgcatcgacgcgctcatgcgcagttcgctcatgctcgtcacgagtttattaccgaagattgggtacgataacgcggccaagatttcgaaaaaggcgcacgccgagggcacgagtctcaaagaagcgggcgtggcgctcggattgttgacggcggacgagttcgacgcgtgggtgcgtcccgaggagatgacgcgtcctcaatccgaatcggagggcggcattcgctcgaaactgtga

SEQ ID NO: 281021 - DNA, 1396 bp, Unknown
  Bacterial polypeptide expressing nucleotide sequence isolated from the Sargasso Sea
aatgaatcaaaaaacaagacaagaacaagacagtatcggcaaaataaaagtttcaaatagtaatttttggggagctcaaactcaaagatcattaaagaattttaaaattggcaataatttaatgcctatagaaattatacatgcactagtcacaataaaaatggcctgcgcgaaagtaaatcaaaaacaaaagtctttagctcctaaaatagcaaatgcaataattagtgcatcaaaaaatattcttactgggaagcatgatgatcaattccctctttcggtttggcagactggatctggaactcaaactaacatgaatgtaaatgaagtcatcgctaatcttgccaataaaaaacttaccggaaaacttggaacgaatagtccagttcacccaaacgatcatgtcaacaaaagtcaatcaactaatgacagttttccatctgcaattaatattgcggcctcaaaaaaagtttcagatgaacttattccggctttaaatgaaatggaaaaaactttaggtagccagtctaagaaatggaaaagtatcatcaaaatcggcaggacacacttgcaagacgcaactcccttatcacttggacaagaattttcaggttatcaatctcagattgatatgaacattaaacgactgaagacagccctgattaacttaaattatttagcccaaggagggacggccgttggaactggtctgaatacaaaaaaagggttcgatagacttgttgcaaatgaaataagtaaaattaataaaattaaatttaaacctgcaagcaataaattccaagccttggcctctcatgactctcttgtagaactatcgggagtattaaatgttattgcaacggatcttttcaaaatagcaaatgacattaggctgttagcttctggaccaagatcaggtctaggagaactgaatttacctgagaatgaacccgggtcatctataatgcctggtaaggtaaatccaactcaaagtgaagctttaacaatggcttgtttacaggttatgggtagtcataacgtaatatcaatggcaggaactcaaggtcattttgaactcaatgcatttaaaccagtaattggttttaacataattaattcaatcaatttattatcctcaggggttacaaacttttgcgataagtgcctaaagggaattaaaccgaatttaagaaatataaaagaaggtgttgagaattccttaatgcttgtaaccgctcttgctcctgaaattggatacgaaaaagctgcagaactcgcaaagcttgcacataagaaaaatattacgctaattgaggcaaataaaatcctaaaatatattgatgtaagaaagatgaagtctcttctcaatccatcaaaaatgatttcttcttcatag

SEQ ID NO: 281022 - DNA, 1132 bp, Unknown
  Bacterial polypeptide expressing nucleotide sequence isolated from the Sargasso Sea
atggcaactaaaaattacagaattgaaagagatagcttgggtgaagttaaggtacctaagaaagctttatggggagctcaaacacaaagagcggtagataattttcctataagcggaattaaaatggacttcccctttacaaagtcttttgtaagttctttagggctaatcaaggatgctgctgcaagggccaatgccagactaaaactcttacctgcaaacaaagctaaagctatatccagagcagctaaagaagtatggcaagaaaagcatcatcacgaatttccgattgacgtatttcaaactggatccggtacaagttcgaatatgaatgcaaatgaagttattgcaaatctagccagtaaaaactcaaaacttaaaataggatccaatgatgatgtcaatatgagtcaaagcagtaatgatgttatacctactgcaataaaggtctcagcacacatggatctgacaaagaaactctacccagccttggataaattaattgatgagatagaaaaaaaggcaaaaactttggagggcattaccaaaactgggagaactcatttaatggatgccatgcctgttgatttttctgatgagctcttggcatggtcaagtcagctgcatgcctcgcgtaaaatgttaagtgttatcgaagagagatttctggaactgccacagggtggaaccgccgttggaagtggcattaatgcccataagcaattcgctaaattctttgctcaggagctcacaaaactatcaggtaataaatgcaaatgtgttcctagtggtaacttctttcatgaattgagtgcacaagacagttcagtccagctttcaggtgaacttaagaaccttgcagttattctcatgaaaattgccaacgacttaaggtggatgaacagcggtcctttagcaggattatcagaaattgaattgcaggctcttcagcccggtagcagcataatgcctggtaaagtgaatccggtcatacctgaagctgtgacaatggtctctgctgacgtaataggcaatgacgcctcaataactgtcgccgctcaggcaggaaactttcagctgaatgttatgcttccagtgatagcttataacttactgaaaagcattaatcttt

SEQ ID NO: 281023 - DNA, 1378 bp, Unknown
  Bacterial polypeptide expressing nucleotide sequence isolated from the Sargasso Sea
cttggcagaaaaaaaattcagaattgaaaaagacagcatgggtgaactgaaggttcctgaggagtctaaatggggcccccaaactcagcgtgccatcgataattttcagatcagtgatcataaaatgcctaccggttttattcgttccctagcgctcttgaaatgggggctcgcaaatgcaaataaagacctcggcctccttccaaaagagaaagcgtctgcgattgcagatgccgctatagagatctatgaagggagccattcttcagagttcccattggatgtattccaaaccgggtctggtacaagcaccaatatgaatatgaatgaagtcatatccaatctatcatcgacagattcaaatccagtgcatccgaacgatcacgtcaatatgggacaaagcagtaacgatgtcattccttctgccattaatgtggatgcagtcctcacccttaccaataatttgattccttcaatgacccatttaaaaaatagcattgaggaaaaggcaaaatcaattggcgatttacccaagaatggacgcactcatctcatggatgcgatgcccattactttctcccaagaaatgagtgcttggtctgcacaaatcgaggattccataacacaatatgaactatccatgtctaagttgcagcaacttgcaattggagggactgcagtcggtacgggaatcaatgctgatcccaatctctcaaaaaagtgctgcaatcatataaataagctgacaggcatggaatttagacctgccaataattcatttcaagcaatcagttcgcaagatgcgtcattgatattgtcttcttgcaataaaacattggctgttgcattgacgaaaataagcaacgatctcagatggatgaacagtggaccattagggggcataggagaaatcactcttcccgctcttcagcctggaagtagcatcatgcccgggaaagtcaatccggtgatacctgaatcggtctgtatggttgccagccgagtattgggcaatgatctaacaatcactcatgctgctcagtcaagcaatttccaactgaatgtaatgctccccttaatagcatacactctgtcggagtctttgagcttgctttcaaatgcatgtctgagcctcgcagataatgccataaaaggttttgaggtaaatcaagaaaatattgaatccatgttaaatcgaaacccgattctagcaaccgcactgaatgccaccattggctatgagaaaggggctcaaatcgtaaaaaaagcgtatcaggagaaaaggtcgatcattgatgttgccgttgaaatgactgatttagattccgatacacttgcagaaatattagatccactcaaactcaccaggaaccaataa

SEQ ID NO: 281024 - DNA, 1393 bp, Unknown
  Bacterial polypeptide expressing nucleotide sequence isolated from the Sargasso Sea
tatgaaatttagaactgaaaaagatagccttggagaagttaaggttccagcaaaagctttatggggtgctcaaactcaaagagctgtaaataactttccaatcagtggcataaaaatggattttcctttcacgaaatcttttgtatcttctcttggtcttattaaagatgcagctgctagagcaaatttgagacttaaactaatttctacaaaaaaatctaaagctatttctagagcagcaaaagaagtatggaaagaaaagcatcataatgaatttccaattgatgtctttcaaacaggttctggaacaagctctaacatgaatgcaaatgaagtaattgcaaatttagcatcaagatattcaaagttagatattaatccaaacgacgatgtaaatatgtcacaaagcagtaacgatgtaatacccacagcaattaaattaagtgcaatcatggatcttgatggaaagttgttccctgctttagatgagttgattgatagtattgaaaaaaaggctaaatcacttgaaggagttataaaaacaggaagaactcacttaatggatgctatgccaattgatttttctgaagaacttggagcttgggccagtcaattaagtgcttcaaaagaaatgcttaggactattgaaaaaagattttttgaattgccccaaggaggaactgctgtaggcagtggaattaatgctcataaaaacttttctaattattttgctcaagagttatctaaactttgtaatagtaaaaagagattttcaccgagtaagaacttttatcacgaattaagtgcacaagattgctcggttcagctttctggcgaacttaaaaatcttgcaatagttcttatgaaaatatcaaatgatttaagatggatgaatagcgggccactagccggcttatctgaaatagaattaaaagcacttcaaccaggtagcagcataatgccgggaaaagtcaatccagtaattccggaagcagtcgcaatggcttcagcagatgtgattggtaatgatgtttctattacagtggcagcacaatcaggaagttttcagttaaatgttatgttgcctgtaattgcttacaatctccttaaaagtattaatcttattgcgggttcaatgaaagcactttcaaaaaatgctatcaaaacttttaaagttaatgaaaagaatttggaatcatcactatctaaaaatccaattcttgtcactgcattaaatcctattatcggatatgaaaaagctgcagagattgcaaaaaaagcttataaagaaaatcgacctattattgaagttgctgcacaagaaacggacctatctaaagcaaagttattaaaattacttgatcctaaaaaacttgctaagggcggaatttaa

SEQ ID NO: 281025 - DNA, 1081 bp, Unknown
  Bacterial polypeptide expressing nucleotide sequence isolated from the Sargasso Sea
tatgaatgctaatgaagtaatagcaaatctagcaagcaagaattctaaattagagataggacctaatgacgatgtaaatatgagtcaaagcagtaatgatgttattccaactgcaataaaagtttcggctcatatggatttaactcaaaaactttatccagcattagatcaactcataagtgaaattgaaaataaagcagaatctgtacaaggtatcgtaaaaacgggcagaactcatttgatggatgctatgccagtagatttttctgatgaattaaaagcatggtcgtgtcagttaactgcttcaagaagaatgctggaagtcatagaagaaaggtttttagaaatgcctcaaggaggtacagcagtcggaagtggtataaatgctcacaagcagtttgccaaaatttttgcacaagagctcactaaattgtccagaagtaattgcaaatatgtgtccagttctaacttctatcatgaacttagcgcacaagattgctccgttcaactctcaagcgaattaaaaaatttagcagttatcctgatgaaaatttctaatgatttaaggtggatgaatagtggaccattggcaggcttgtctgaaattgaattacaagcactacaacctgggagtagtatcatgccaggcaaggttaatcctgtcataccggaggcagtgacaatggcttcagccgatgtaattggaaatgatgtttccattacggttgcagcccaagcaggaaattttcaattaaatgtcatgttgcctgttattgcctacaacttactaaagagtatcaatcttttgtcaggagcgatggatgttctatcgaataaagccatcaaaacttttaaagtaaacaagaaaaaccttgaagcttccttatcaaggaatcctatccttgttactgctcttaacccaattattggttatgaaaaagctgcagagatagctaagaaggcatacaagcttggtaggccaataattgaagttgcaaatgaagagacagatttaacagaagctcaacttaagaggttattaaatccctcaaaattaaccaaaggaggaattagtaaatag

SEQ ID NO: 281026 - DNA, 1387 bp, Unknown
  Bacterial polypeptide expressing nucleotide sequence isolated from the Sargasso Sea
aatgacaaaaaactttaggattgaaaaagatagtatgggaacaatagaggttcccattgaagctttgtggggcgctcaaacacaaagatcgataataaatttttctattggagaagaattaattccaattgagttaatttattcactcaccctcataaaaaaagctgcttcaattgcgaatttcaatttagggttaatagataaaagaaaaaaagatttgattgtagaagcatgtacagaaatacttgatgggcttcatgattcacagtttcccttaaaggtttggcaaacaggtagtggcacgcaaacaaatatgaatgtaaatgaggtaatttcaaatattgcagcattaaaaacaaattcagagcttggtagtcatcaaccaattcatccgaatgatgatgtaaataaatctcagtcaactaatgatacttttcctgctgctattcaaatatcagttgttaatgaaataatcaaaaatttagttccaacgataagagaacttactaagatccttgataaaaaaagtgaacaatggaaagacctcataaagataggaagaacccattttcaagatgcagtgccccttacttttgggcaagaaatatcaggatggtcagagcaacttaaagatgctgagaatgcaattattataagtctgaatgaattgtattttttacctctgggaggaactgcagttggaacagggattaattgtccaaaaggattttgtgaagagtctataaaatcaatttccgatgatactaatctaatgttctataaatcaaaaaataatttttctatcatggcctcgcatgatcgtctagctcaagtaatgagtcagataaaaatattagcaggtgcattatttaaaatttcaaatgatataaaaattctatcttctggtccaagatcaggaatatatgaactaattattcctcaaaatgaacctggaagttctatcatgccgggtaaagtgaatccaactcaatgcgaagccttatcaatggtttgcactcagataatgggtcttgaatatgcagtctcaatggcaaattctagcggcactttacagatgaatgaatataagcctctcattggatttaatattctcacaagtttaaaattacttaaaaatgtaatagaaaacttcagaataaatttagttgatgggatggaacctaatcaaaagaaaatgaagttaaatttagaaaattcactaatgttgattacagccatagtaccaaaagttggttatgaaaaagcagctgaaattgcaaaccttgccttcaaagaatcattaaatttaaaagaggcaacacttaaattaggttatttaaacgaagatgaatttgatgaaacaatgaatatcaattcaatgatttga

SEQ ID NO: 281027 - DNA, 490 bp, Unknown
  Bacterial polypeptide expressing nucleotide sequence isolated from the Sargasso Sea
tatgaaattcagaaaagaatatgacagcattggttctattaatgtgcctgtggataagtattggggagcatccacacaaagatcaaaaaaatactttgatataggagacattttagttagaccaaaattaataaaatcaattgctattataaaaaaagcagcagctgttacgaattataaaaataaagatattagttcgaaagtttataaatcaattatacgagcttctaatgaagttattgcaggaaaattagatgctcatttccctcttaaagtttggcaaactggttcgggtactcaaacaaatatgaatgtgaatgaagttatttctaatagagcaattgaaatacttaaaggtaaaaaaggtacaaaaaaacctgttcatccaaatgatcatgttaataaatctcagtcaacgaatgatgtatttcctacggcaatgcatattgctatagctatggaaacagagaaaaactattaccaagcttag

SEQ ID NO: 281028 - DNA, 1195 bp, Unknown
  Bacterial polypeptide expressing nucleotide sequence isolated from the Sargasso Sea
gctattagaggcaacaaaacagagagtcatttcgagagctgccaaagaagtatggactaataagcatggcaaagagttccccattgatgtttttcaaactggttctgggacaagtacaaatatgaatgcaaatgaagttatagcgaacctttgttataaaacctctaaagttaagattcatccaaacgatgacgtgaatatgagtcaaagttccaatgatgtaattccaactgttatgaatttggcctattacttcgattcaacaaaaaaattaatgcccgcactagatttacttattgtaaccttagaaaagaaagctgactcagtgaagggaattacaaagacaggcagaacacaccttatggatgccatgccagtggatatgtctgatgaattaaatgcttggaacacacaacttaaatgctccagagaatcaatagcagttgttctagaaaagcttttatttctacctcagggcggaactgcagttggatcaggaataaatgcacataaaaggttttcaaaagaatttgctaaggagctttcaaagctaactggctttaaaacgcagccaagcaaagatttttttagaaacttaagtgcacaagatttttctgtccagctatctggggagcttaaaaatttagctacagtccttttaaaaatatctaatgatcttagatggatgaatagtggacccttatccggaatctctgaaattgagcttcaggctcttcaaccaggaagtagcataatgcctggaaaagtaaatccagtgattcctgaggctgtagcaatggccgcagcagatgttattggtaatgacgtttctataacagttgcagctcagtcgggaaacttccaacttaatgtgatgttaccagtaattgcttattgcaatttgaaaagtgtaaatatacttgctggtagtatgaatgttcttgctaaaaaagctataaagaccttcaaggtaaatcataaaaagattgaagaatcactctcaagaaatccaatcttggtcactgctttgaatccggtcattggttatcagaaggcagcagaaatagccaaaagagcttataaagaatcaaggcctgttattgatgtagctcacgaagaaacaggtatttcagtttctcggcttaaaaaactcttagatccttcaaaattaacgaaaggtggtattaagtcataa

SEQ ID NO: 281029 - DNA, 1427 bp, Unknown
  Bacterial polypeptide expressing nucleotide sequence isolated from the Sargasso Sea
gatttataatataacttatattttaaatatgagtaaaaatcaaacttttagagctgaaaaagatagtctaggtgaagtaaaagttccaaaaaaagcgctatggggggctcaaactcagagagctatagaaaattttccaataagtggaattaagtttaagtttccgtttggccgttcatttatcaaagctttaggactaataaaatattctgcagcagtagcaaaccaggacctaggaaacttaacaataaaaaaagcaaatgcattgaaagctagtgcaaaaatggtgatttcaggtgaggttgatgagcattttcctttagatgtttttcaaactggttctgggacaagtactaatatgaatgctaatgaagtcatagcaaacctagcctcaaaaaagttgggtgaagttgtcagtccaaatgatgacgtcaatatgagtcaaagcagtaatgatactattcctacagctatctgcataagtgctttattggatatggaagaattgcttttaccgggtttagacgtactgattaaagagatggacacaaaagcaaaaaaactgaaaggcaccattaaaactgggagaacacatctaatggatgcaatgcccatagactttgctcaagaaatttctggttggtctgctcaacttaaaagttgtaagaatgcaattatttcagctaataaaagaatgttggagttaccacaaggtggcacagcaataggtactggtgtgaactctcacaaaaatttttcaaagagtttttgtgaagcagtggagaaaatttctggtttaaaagttaaacctgcatccaatttctttcaaggtctgagttcccaagacaatgcagctgaattatccagtgcattgaaaaatctgtctcttgttcttatgaagatttgtaatgacttgcgatggatgaatagtgggccattaacaggattatctgatattgagcttgaggctctacagccaggtagtagtattatgcctggtaaagtaaatcctgtaattcctgaggctgtttcaatggcttgtgctgacgtgttaggaaatgatctgacaatttcagtcgctgttcagaatgggaattttcaattgaatgtgatgttaccagtgattgcgtacaatctattgaagagcatcaatcttttgggaaattgtatgcctctactggcgaaaaaatgtattaaatctttcaaagttaacaaaaagagtgttctagaaaatttaaatcgcaatccaatcctagttacagctcttaatccaattattggttataaaaaagctgctgaaatcgctaaaaaagcttatcaagaacaacgagcaattattgatgtggcagaagagatgacaactattgaaagaaaggaattagaaagccttcttgatcccaaaaacctaattaagccctatttctaat

SEQ ID NO: 281030 - DNA, 982 bp, Unknown
  Bacterial polypeptide expressing nucleotide sequence isolated from the Sargasso Sea
catggtcaaatttcgcattgaaaaagatagtttaggtgaaattaaagttgaaagtacaaaactttggggggcacaaactcaaagatcaatagaaaactttcaaataggtattgggaaatttcattttcagaatatttttatagaggcccttgccttacaaaaaaaatcatgtgcttacgcaaatgcagaattaaaattattaccaaaaaatcatacaaaaattattggtaaagtttgtgatttaattatatctggaaaatttaatgatcactttcctcttgttgtatggcaaacaggatcaggtactcaaatcaacatgaatcttaatgaagtcattgcaaataaaagtaatcagtttttaggcagaaaactcccgacaaataacccacttcatcctaatgatcatatcaatatgtctcaatcatctaatgacagtattcctactgctatgcacatagctacagtattatcaataaaaaaaatattactcccggagatagctttttttaaaaaatctttaaaaaagaaaatttctgagttcaaaggaataattaaaattggaaggactcacactcaggatgcaacaccaattaaaatttcaaatgaatttttggcgttttatgatcaaatatcttatgcagaaaatgttattaaaaaaagtttagataaactctacgaactagctcaaggaggaactgctgttggatctggagtaaatgccccaaaaaatttttctaaaatatttattaaatacttaaaaaaggaaacaggacttccgtttaaatctgccccaaataagtatgagtctctcgcgtcccatgatgtatttattgaagtaatgtcaggtgttgaaattttaacgagtgcgttatttaaaatggcaaatgatattagggtattagcgtccgggccgagaagtggtatttctgagttaattcttccagccaatgagcctggctcatcaattatgccaggaaaaata

SEQ ID NO: 281031 - DNA, 790 bp, Unknown
  Bacterial polypeptide expressing nucleotide sequence isolated from the Sargasso Sea
atgaaaacaaggaaagaatacgatagtattggatcagttaatgttcctgtggataagtattggggggcttcgacacaaagatcaagcaagtattttaatattggagattttttagtaagaccaattgtaatcaaatcaatagcaataattaaaaaagctgcagcaattgttaatgtaaaaaatcaagatattgaaaagaggataggcaacgcaatcgttagagctgcaaatgatgtgatttcaggaaaattaaatgataattttcccttaaaagtttggcaaactggatcaggaacacaaacaaatatgaatgtaaatgaagttattgctaatagagcaatagaaattttaggtgggaaaaaaggaactaaaaagccagtacatccaaatgatcatgttaataaatctcagtctacgaatgatgttttcccaacagcaatgcatatggcgatagctatgaatgcaaatgaaaatttattacctagccttaatttaattaataatgaattaagaaaaaaaactaaagaatttaataaaattgttaaagtaggcagaactcacttacaagatgctactccattaacattaggccaagaattttctggttatcatgctcagctaaaaaaatgtattgaaagaataaaaagggctctggatgaaatctattttttagcgcagggtggcactgctgtaggaactggaataaatacaaaaaagggatttgataaaaagatagtatctgagataaaaaagataactaaactaccatttaagaaatctaaaaataaat

SEQ ID NO: 281032 - DNA, 328 bp, Unknown
  Bacterial polypeptide expressing nucleotide sequence isolated from the Sargasso Sea
ttttgaattaaatgtatttaaaccgcttattgcacacaacatattacaatcaattgatctactagcggatagttcaaaaaattttgctaaatattgtataaaaggcattaaagctaatgaaagaaaaataaaagaatatttagataattctttaatgttagttacggcactagcaccagaaatcggatatgataatgcggctaaaattgcaaaaaatgcattaaaaaataatacaacattaaaacatgaagctttaaaaagtaaattaatttctttaagagcatataacaaaattgttaatccaaaaaaaatgattaaccctcaataa

SEQ ID NO: 281033 - DNA, 1032 bp, Unknown
  Bacterial polypeptide expressing nucleotide sequence isolated from the Sargasso Sea
aaagcaaaatgcattgaaagcaagtgcaaaaatggtgatttcaggtgaggttgatgagcattttcctttagatgtttttcaaactggttctgggacaagtactaatatgaatgctaatgaagtcatagcaaacttagcctcaaagaagttgggtgaggttgtcagtccaaacgacgacgttaatatgagtcaaagtagtaacgatactattcctacagctatctgcataagtgctttattggatatggaagatttgcttttgccgggtttagatgtcctgattaaagagatggactcaaaagcaaaaaaactgaaaggcactattaaaactgggagaacacatctaatggatgcgatgcctatagactttgctcaagaaatatctggttggtctgctcaacttaaaagttgtaagaatacaattgtttcagctaataaaagaatgttggagttaccacaaggtggtacagcaataggtactggtgtgaactctcacaaaaatttttcaaagagtttttgtgaagcagtggagaaaatttctggtttaaaagttaaacctgcatccaatttctttcaaggtctgagttcccaagacaatgcagctgaattatccagtgcattgaaaaatctttctcttattcttatgaagatttgtaatgacttgcgatggatgaacagtgggccattaacaggattatccgatattgaacttgaggctttgcagccaggtagtagcattatgcctggcaaagttaatcctgtaattcctgaggctgtctcaatggcttgtgctgatgtgttaggtaatgatctgacaatttcagtcgctgttcagaatggaaattttcaattaaatgtgatgttaccggtgattgcatacaatctattgaagagcattaatcttttgggaaattctatgcctttactggcaaaaaaatgcattaaatctttcaaagttaacaagaagagtgtccaggaaaatttaaatcgtaatccaattctagtcacagctctcaatccaattattggtta

SEQ ID NO: 281034 - DNA, 1408 bp, Unknown
  Bacterial polypeptide expressing nucleotide sequence isolated from the Sargasso Sea
aatggtaacaaaaaattatagaattgaaaaagatagcttaggcgaggttaaggtgcctaagaaagcactttggggagctcaaacacaaagagcagtagacaactttcccattagcggaataaaaatggattttccctttaccaaatcttttgtcagttcacttggattgattaaagatgctgctgcaagagccaactcaaaattaaaattactacctgctaataaagctagggctatatcaagagcatctaaggaggtatggcaagaaaagcatcatcatgaattccctatagatgtttttcagacaggctctggaactagctccaatatgaatgctaatgaagttattgcaaatctagcatcaaaaaattctaaattagatattggagcaaacgatgacgtgaatatgagtcaaagcagcaatgacgtaatcccaacggcgatcaaagtttctgctcatatggatctaactaaaaagctttatccagctttagataaattaataaatgaaattgataagaaagctgagtctgtttcaggcattgcaaaaacaggaagaacacatcttatggatgctatgccagttgacttctctgatgagcttaaagcttggtcaagccagttaaatgcatcgcgtaaaatgctaggagttattgaggagagatttttagaaatgcctcaaggtggcactgctgttggaagtggcataaacgctcataagcagtttgctaagatttttgcacaagaattgactaagttatctggaagtaactgtaagtgtgttccaagctcaaattttttccacgagctaagcgctcaagattgctccgttcaactctctggagagttaaagaatcttgccgtcattttaatgaagatttcaaatgatttgcggtggatgaatagtggaccgttagcaggtttatctgaaatcgagttacaagccttgcaaccaggaagtagcatcatgccaggtaaagtaaatcctgtcataccggaggcagtgacaatggcctctgctgatgtcataggaaatgatgtttctataacggttgctgctcaagcaggaaattttcaattaaatgtcatgcttccagttatcgcctataacctactcaagagtattaatctcttatctggagccatgaacgtactggcaacaaaagctataaagacttttaaagttaacaaaaaaaatctcgaaacatccttatcgagaaatcctattttagtgaccgcactcaatccgattatcggatatgaaaaagcagctgagattgcaaaaaaagcatataagctaggtaagcctattattgaagttgccagtgaagaaactgatttgaccgaagcacagctcaaaaagttattaaatccctctaaattaaccaaaggaggaatcagtaaatag

SEQ ID NO: 281035 - DNA, 1390 bp, Unknown
  Bacterial polypeptide expressing nucleotide sequence isolated from the Sargasso Sea
aatgaaattaagaaaagaattcgatagcattggaagtgtcaatgttcctaatgataaattatggggagcatctacccaaagatcaaataaattttttaatattggcaaaattttagtaaatatttccataatcaaatctattgcaattattaaaagatctgcagcaatagttcatgcaaaagacgaattaattgataacaaaatttctaaagcaattgttagagcttcagatgaggtaattaaaggtaagttggatgataatttcccgttaaaagtctggcaaacaggttctggaacacaaacaaatatgaatgttaatgaagttattgctaatcgtgcgatagaaatgatgggtggaaaaaaaggatcaaagaaacctgttcatccaaatgatcatgtaaacaaatcacaatctacaaatgatgtttttccaactgcaatgcatatttctgttgcaaaagaaacgttaagtaaattgttgccaaacttaaagattttagaaaaagaattaaatagaaaatctaaagaattcaaaaatatagtaaaaattggacgtacacatcttcaagatgcaactcctctttctttaggtcaagaattttcaggatatcatactcaagtaaaaaaaagtatcgaaagaattgaatatgcattaaaggaaattttttttcttgctcaaggtggaacggcagttggaacaggaataaattctaaaaaaaactttgataaaaaaatagttaaagagatcgcaaaatatacaaaaataaaatttaaacctgctccaaataaatttgctgaacttgcagcgcatgatgcaatagttaatttttctggaactttgaatacttgtgcagtcgctttaatgaaaatatctaatgatataagatttttaggatctggtccaagagctggttatggagaattaattttgccagaaaatgaaccaggttcatctataatgcctggtaaagttaatcctactcaatgtgaggctgttacaatggtttgtgtaaaagttattggaaaccacaatggtataacgatggctggatcacatggtcattttgaattaaatgtttttaaacctttgatagcacataacattttgcaatcgattgatctaattgccgacagcaccaaaaattttgctatttattgtgttaggggaataaaagcgaataagaagaaaatacaagaacacttagataattctttaatgcttgttacatcactagcgccccacataggctatgacaacgctgccaaaattgcaaagacagcgcttaaaaacaatactactctaaaatatgaaacattaaaaacaggccttatctcagaaaaagattacaataagatagttgatcccaaaaagatgatctacccagcataa

SEQ ID NO: 281036 - DNA, 952 bp, Unknown
  Bacterial polypeptide expressing nucleotide sequence isolated from the Sargasso Sea
gctattgagatgatggatggtgaaataggtagtaaagatccagttcaccctaatgatcatgttaatatgagccaatcaactaatgatactttcccaactgctattaatattgctgcttgcgaaaccgtttatcatcaacttattcctgccttaacaaccctcagagattctctaggtcagaaagctgatgcatttgattcaattataaaacttggacgtactcatctccaagatgccacaccaattagtctaggacaagaattctccggctatgtatctgccatagaacatgggattaagcgattagaaaattctcttgaaaattgttatgaattagcaatgggtggtacagccgtaggtacgggtattaattctttagaaggatttgcagatgctgctgccgatgagatttctaatttgacaggtctaaacttccgaactgctgataataagtttgaggcattaggtggacaggattgcattgtggagttgtctggggcacttaaagttgtcgctggatcgttgtttaaaattgcaaatgatataagatggctagccagtggccctagaagtggtattggcgaattaatattgcctgctaatgaaccaggttcatcaattatgccaggtaaggtcaatccgacacagtgcgaagccatgacaatgttatgtactcaggtaatgggtaatgatgtaactatagggtttgctggtgcttcagggaattttgaattaaatgtatataggccagtacttgcttataatattcttcaatctattcgattactttcagatggatgtcgttcgttcacaaagcatgctgttgttggtattgaaccaaatcaagaacgtattgaacataatttatataattcactaatgctggtaacagcattaaatcctcatattgggtatgataaagcttctgaagttgcaaaaaaaagcatttaaa

SEQ ID NO: 281037 - DNA, 818 bp, Unknown
  Bacterial polypeptide expressing nucleotide sequence isolated from the Sargasso Sea
cataacactgggtcaggagatctcgagttggcgcactcaactggatgaaagaatcctgggactagaacgtgctttaccgggcctctacgaactggcaatcggtggaactgccgttggaacaggtctcaacgcccatcctaatttcggcgaaaaggccgcggctttcatctcgagggaaactgaccaccccttcgtctcagcatcaaataaatttgcagctcttgctgcccatgacgcacttgtagaagtgagtgcagctgaacgtgggcttgcaatggctcttctgaaaattgccaacgacatccgctggttagcaagcggccctcgctgcggcattggtgaaatagctatacccgagaatgaacccgggagctcaattatgcctggaaaagtcaacccgactcaatgcgaagcattgactatggtttgtgctcaggttttcggtaacgatgcaaccgtagcctttgctgggagccaaggaaattttcaactgaatgtctacaagccagtgatgcttcataatgtactggaaagcgcggatctacttgcagatggctgcgactcaatgcgtgttcattgcgcaaccggaataacaccgaatctagatcgcatagaacaacacctcaacgattcgcttatgctcgtgacagcactcaatacacacatcgggtatgaaaactctgcgaagattgcaaaaaaggctcacgctgatggaacaagcctgaaagaagcagcggttgcacttggtcttgttacttctgagcaatatgacaaatgggttgtgccagttgaaatgacacgcccactttcagtttgat

SEQ ID NO: 281038 - DNA, 379 bp, Unknown
  Bacterial polypeptide expressing nucleotide sequence isolated from the Sargasso Sea
catgaaattaagaaaagaattcgatagtattggaaaaataaacgtacctaatgacaaatattggggtgcttcaactcaaagatcaaaaaaatattttgatattggtgaatttttagttagaccgactcttattaaatctattgcaatcataaaaaaagctgcagctaaggttcacgtgaaagagaaacaaatttctccaaatatttctaaagcaatcattaaagcttctaatgaagtaatatcaggaaaattaaatgagcactttcctttaaaagtttggcaaactggatctggcactcaaacaaatatgaatgtaaatgaagttatagctaatagggctatcgaaattttgggaggaaaaaaaggttcaaaaaaacct

SEQ ID NO: 281039 - DNA, 934 bp, Unknown
  Bacterial polypeptide expressing nucleotide sequence isolated from the Sargasso Sea
tgcaattaatgaactaacttcaaaaaaacttttaccaaaattaaaaaatttaattttagaattaaataaaaagagtaaaaaatttaataaaattataaaaataggaagaactcatacgcaagatgctacacctatcactttaggtaatgagtttttagctttttattcacaagtaaaaaactgttatgaaagaattaaaattgcaaaaaaagaactagatttcatcgctcaaggtgcaacagctgtgggatcaggcataaattctccaaaaaattttgataaagttttttgtaaatatcttaataaaatgactacaaataaatataagcctgcaattaataaatatgaatcaattgccgctcatgactcattagtaaacttctctaattcattaaatacattggcattatcaatattgaaaattatcaatgatatacgtttattgtcatcaggtccgagatcaggaattggggaaataatattgcctgaaaatgaaccaggatcttctataatgcctggaaaggttaatccaacacaaattgaagctcttagtatggtatgtactcaagtaataggtaataatttaactgtatgtatagctggctcatctggtaattttcaattaaatacatataaaccagtaattgcatataacattatccagtctatccatttattaagcgatagcattgaaagttttaataaaaattgtcttaaagacattaaagcaaatacaaaaaaaataagtgaacatttaaataattcactaatgttagtaacttcactaaataaacatataggttatgacaatgctgctaaaattgcaaaaaaagctcataaggaaaatataacattaaaggaagcggctattaaattaaatttggtagaagaagatgaatttgataaaatagttaatcctaagaaaatgatttaa

SEQ ID NO: 281040 - DNA, 1399 bp, Unknown
  Bacterial polypeptide expressing nucleotide sequence isolated from the Sargasso Sea
catgagtaaaaatctaaaaactagagtcgagactgacagtcttggtgagattaaagtcccaaaagatgcgttatggggagcacaaacacaacgtgctattgagaatttccctataagtggaattaaatttaaatttccttttggtcgctcctttttaaaagctttaggtgtaattaaatattctgcagctattgcaaacaatgatctaggaattctaagtaacaaaaaaagcgatgcaataaaatcagcagcaaaaaaagtaataaatggagatgttgatgatcattttcctattgatatttttcaaacaggttctggaacgagcacaaacatgaatgcaaatgaagttatagctaatttagcctctgcaaaattaaaggatcaaattagccctaatgatgaggtgaatatgagtcaaagcagcaatgacactatccctacagctatatgcattagcgcattgttagatatgaaagaattattactacctggactggatgttttgattaaggaaattgataagaaggaggcaaagttaaaaggagtagtaaaaactggcagaacacatcttatggatgcaatgccaatagaattttctcaagaactctctgcctggtctgctcagcttaggggttgtaaaaattcacttaattcctcctttaaaagactttctgagctgcctcaaggaggtacagcaattggaacaggtataaattcacataaagactttccaaaagttttttgccaagaagtgaaaaaaacaattggtataagcgtgaaaccagcaagtaatttttatcagcatttagcggcacaagatgttgcagcagaggcatcaagtgctcttaaaaatttagcacttgctctgatgaagatttctaatgatttgagatggatgaatagtggccctttaactggtttatcagacatagagcttgaagcattgcagcctggtagcagcataatgccaggaaaggttaatcctgtaattccagaggctgttgctatggcaagtgcagacgttatcgggaatgatttaacaatatcaattgctgcacaaagtggaaatttccaactgaatgtaatgcttcctgttattgcctacaaccttcttaagagcataaatttacttggtaatgcaatgccattactggcaaaaaaatgtataaaaactttcaaagtaaacaaaaagaatgtttcagaaaatttaaatagaaatccaatacttgtaactgctcttaatagggtcattggttataaaaaagctgcagaaattgcaaaaaaggcctataaagaaaagcgctcaataatagacgtggcagaagaaatgacaacgattgaaagaagtgaacttgaaactctgttagatccaaaaaatctaactaaaccatatttttaa

SEQ ID NO: 281041 - DNA, 538 bp, Unknown
  Bacterial polypeptide expressing nucleotide sequence isolated from the Sargasso Sea
tatgaatactcgcaccgaaaaggacagcttgggccccatagaggtaccctcagacagatattacggtgctcaaacacaacgctcttacgaaaattttaaaataggaaaagagcgtttccctcgtgagtttataagggcctacggaatactaaaaaaagcagctgctaccgtaaatcataactttggaaacttagatagtaaaatcatggaagctatccatgatgcaactgaagaagttattggaggaaaattagatggacatttccctctagttgtttggcaaactggaagtggtacacagactaatatgaattttaatgaggtaatctctaatagagctattgaaatgcttggtggtgaaatgggtagtaaggatccagttcatccaaatgaccatgtaaatatgagccaatcaacaaatgatacttttcctacagctataaatattgcagctgtggagagtgtacatcatcaattattgcctgcaatgaatgaattaagagatgccttaaataataaatcaatggagttcgcttcg

SEQ ID NO: 281042 - DNA, 1390 bp, Unknown
  Bacterial polypeptide expressing nucleotide sequence isolated from the Sargasso Sea
atgaaaaaaaggaaagaatttgacagtattggaactattggtgttcctaaggataagtactggggagcctccactgaaagatctaataaattttttaatattggaaaaattcttgtagatagttcgataattcgttcaatagcaattataaaaagatctgcagctatagttcataaaaaagatcagcttatacctggaaaaattagtaacgctattgttaaagcttctaacgaagttatttctggaaaactcaataataattttcctctaaaagtatggcaaaccggctcgggaacacaaactaatatgaacgtaaatgaagttattgctaatagggcaattgaaatactaggaggaaaaaaaggaagtaaaaaacctgttcatcctaatgatcatgtaaataaatctcaatctacaaatgatgtttttccaactgcaatccatatttcggtagcaacagaaacaataaataatttattaccaagtttaaaattattagaaagcacacttaaaaaaaaatcaaaagaatttaataaaattgtaaaaattggaagaacacacctgcaagatgccactcctcttacattgggacaagaattttcgggttattttgagcaattaaaaaaaagtattgaaagaataaaatatagtttaaaagatattctatttttagcacaaggaggaactgctgttggaactggactgaatacaaaaaaaaattttgacaaaaaaattattagagaaataaataaatattgtaaaataccttttaaaccagcgcctaacaagttttcagaattagcagctcacgacgcaatagttggtatgtctggatcactaaatgcttgtgcagtagcgttaatgaaaatttcaaatgatataagatttcttggatcaggtccaagagccggttatggtgaacttatactaccagaaaatgaaccaggatcttcgattatgcctggaaaagttaacccaacacaatgtgaggctgtaacaatggtttgtgtaaaagtaattggaaatcatactggaatatcaatagctggctctcatggacactttgagttaaatgtttttaaacctttaattgcccataacatattacaatcaatagatttgctagcagatagtgtaaaaaattttagcctttattgtgttaaagggattaaagcaaataagttaaaaataaaagatcatttagataattctttgatgctggtaactgcacttgcacctagaataggatacgataacgctgcaaatattgctaaaaaagcattgaagaataatacaaaactaaaagaagaggctttaaaaactggactgattagcgaaaaggaatacgataaaatagttaatccagctaaaatgattggaccttcttaag

SEQ ID NO: 281043 - DNA, 1387 bp, Unknown
  Bacterial polypeptide expressing nucleotide sequence isolated from the Sargasso Sea
atgaaaaaaaaatttagaatagaaaaagacagtattggtaataaaaaaatagaaaattcttgtttatggggagctcaaactcaaagatctcttgaaaattttgaaattggaattgaaaaaatacctagtgaaattataattgctataggataccaaaaaaaagcagcagctctgactaatatacagcttggtaaattagatagaaaaattgggaaagcaataattgcggcatgtgatcaaataattaattctaatttaaacaaccattttccactttctgtatggcaaacaggatcaggaacacaaacaaatatgaatgctaatgaagttataagcaattatgcaattaaaaaactcaaaggtaaaataggttcaaaaatacctgttcatccaaatgatcatgtaaatttgtctcaatcatcaaatgatacatttccaacagttatgcatatagcgagtaatcaaattatagaaaataaattaattaattcattaaaaaaaattaaaaaaattctaagtagtaaaacaaaaatttacaaaaatattataaaaattggacgtactcatacacaagatgctacgcctattacattaggacaagtattttcaggatacttagaacaaataaaaaataatgaaaaaagaatattagaagcaaaaaaagaactacaatttgtagtacaaggtggaacagctgtaggaacaggaattaattcaccaaaaaattttgataaacatttttgtaaaaatttatctaaaattactaaaagtttatataagcctgcttcaaataaatttgagggaatagcagcacatgattccttagttaatttatctagtgctctaaatggacttgctacatctctatttaaaatttcaaatgatttaagatttttagcttctggaccaagagctgggctaagtgaaatcactttacctgcaaatgaaccaggatcttctattatgccaggaaaggttaatccaactcaaatagaggcattatctatggtttgtttacaagttatgggtaataacttaacaacaacaatagccggttctcaaggtcattttgaattgaatgcttttaaaccagtaataatttacaatattattcagtctttaaatttgttatctgactcaataaatagttttgttgaaaaatgtcttaaaggattaaagcctaataaaaaaaatattagggtaaatttattaaattctctgatgcttgttacggctttaaatgaatttattggttatgataatgctgcaaaaatagcaaagaaggcttttaaagaaaatttaactttaaaagaagctgcaacaaaacttaaattagtagatataaaaaaatttgatggaattgtagatccaaaaaaaatgatttgat

SEQ ID NO: 281044 - DNA, 813 bp, Unknown
  Bacterial polypeptide expressing nucleotide sequence isolated from the Sargasso Sea
aatgaaatttagaaaagaatttgatagcattggtaaaattaatgtgcaaaatgataaatattggggcgcatctactgagagatcaaaaaagttttttgatataggtgaaatttatgttcaaaagattcttataaaatcaatcgcaatcataaaaaaagcagcagcaattgttcataaaaaagataaacaaattgaaacaaaaatcgcaagagcaattataaaagcatcaaacgaaataatttctggaaaacttcaaaataactttcctttaaaagtttggcaaacaggatcaggcactcaaactaatatgaatgtaaacgaggttatttcaaatcgtgcaatcaaaattttagggggtaagttaggttcaaaaaaaccagtacatcctaacgatcatgtaaataaatctcaatccactaatgatgtttttcctactgccatgcatatagcaatagccttagaaacaaaaaacaagcttctaccaaacttaaatcttttaaataaagaattaaaaaaaaaaattataaaatttaaaaaaataataaaagttggcagaactcatttacaagatgcaacaccattgacacttggtcaagaattttcaggttaccagtctcaattgcaagactgtattaaaagaattaaaattgctattaaagagatatattttttagctcaggggggcacagctgtaggaacaggtattaacacaaaaaaaaactttgataaaaaaatttgtaaagaaattagaaaattgacaaatattaattttaaaccatctagaaataaatttgctgcccttgctgctcatga

SEQ ID NO: 281045 - DNA, 1333 bp, Unknown
  Bacterial polypeptide expressing nucleotide sequence isolated from the Sargasso Sea
atgaaatatagaactgaatttgattctattggaaaaattaaagtacctggtgataagtattggggcgcatcaacacaaaggtcgaataaatactttgatattggagattttttagtaagacctattctcattcaatcaatagcaatcgtaaaaaaagctgctgcaattgttaatgttaaaaataacgatttagataagaaaattggtaaatacattgttaaagcctcagatgaaataataaaaggtaaattaaatagccattttcccttaaaagtttggcaaacaggatcgggcacccagacaaacatgaatgtaaatgaggttattgccaacagagcaatacaaatgatgagtggtaaaatgggaaccaaaaaaccagtccatcctaatgaccatgtaaataaatctcaatctactaatgatgttttcccaacagcaatgcatatagcaatagcaatgaaagctagaaaaaaattacttccgtccctcaagttattagaaaaagaattaggaaaaaaaactaagcaatttaaaaaaattgttaaattaggaagaacacacttgcaagatgctactcctttaacattgggccaagagttctctggttatcaatcccaattaaaaaaatgtatagagagaatcgaaaaagcccttaatgaaatttattatttagctcaaggagggactgcagttggaactggtctaaacactaaaaaaggttttgataaaaaaatagtaaaagaaataagacaaattactaaactaccatttcaaccatcaaaaaataaatttgcagcgttagcgtctcatgatccgattgttaatttttctggaacaatgaatactactgccgtatgtctaatgaaaattgcaaacgatataagatttttgggttcaggtccaagagcaggttatggtgagcttattttgccagaaaatgaacctgggtcatctattatgcctggaaaagtaaatcctacccagtgcgaagcagtaacaatggtttgtgttaaggtcattggtaatcataatggtataacaatggcaggatctcacgggcattttgaattaaatgtttttaaaccattaataattcataatattttgcaatcaataaacattatgtcagattcgtctttggcatttgcaaaatattgtattaaaggtctaaaagctgacaaaaaaagaataaaatttttattagaaaattcattaatgttagttacagctttatcacctaaaattggttatgataatgctgctaaaatagcaaagttagctcacaaaaatgggactactttaaaacatgaggttttgaagtctggattaatca

SEQ ID NO: 281046 - DNA, 1390 bp, Unknown
  Bacterial polypeptide expressing nucleotide sequence isolated from the Sargasso Sea
atgaagcatagaaacgaatttgatagtataggtaaaatcaaagttcctggtgataagtattggggtgcatccactgaaagatcaaacaagtacttcaacattggtgattttttagttagaccaatagttattcaatctattgctattattaaaaaagctgctgctattgttaataaaaaaaatggtgacctagatgcaagaatatcaagatatataattaaagcggcagacgaggtgatacggggtaaattggacgatcattttcccttaaaagtatggcagacgggctctggaactcagacaaatatgaatgtaaatgaagttatatccaatagagccatagaaatgatgaaaggtaaattgggaacaaaaaaaccagttcaccccaatgaccatgtaaataaatcacaatcaacaaatgatgtttttccatcagcaatgcatatttcaattgctattaaaacaacaaaaaaacttttaccgtcactaaagatattggaaaaggaactttttaaaaaagtaagagaattcaaaaaaattgttaaagttggaagaacacatttacaggatgcaacgccaataacattgggacaggaattttcaggatatcattcacaacttaaaaaatgtatacaaagaattgagagtgctttagaggaaatttattttttagcacaaggtggtactgcggttggaaccggattaaatacaaaaaaaaaatttgatgtgaaaatcattaaagaaatatctaaaataacaaaacttccttttaagccagctaaaaataaatttgcagctttagcagctcatgatgccatagtaaatttttctggaacaatgaatacaacagctgtatgtttgatgaagatagctaatgatatcaggtttttaggatctggtccaagagcaggttatggtgaattaatattaccttctaatgaaccaggctcttctataatgccaggaaaggttaatcctacacaatctgaagcggtaacaatggtttgtgtaaaggttataggtaatcacaatggaataaccatggcggggtctcatggacattttgaattaaatgtttttaaaccgttgataattcataatattttacaatcaattgaaataatggctgactcttcaaaaacattcgcactttattgcgttaaaggaataaaagcagatagaaaaagaataaaaaatcttttagatagctcactaatgattgttacagcattagctcctaaaataggttacgataatgctgccaaaattgcgaaggaggctcacaaaaatggtactactttaaaagaggaagttttgaaaacaaaccttatctcagcaaaagactacgaaaaaattatggatcctatcaaaatgactaagcctaaatagt

SEQ ID NO: 281047 - DNA, 934 bp, Unknown
  Bacterial polypeptide expressing nucleotide sequence isolated from the Sargasso Sea
tatgaaaacaagaaaagaaaaagattcaattggatatgttgaggttccaatcaacaaatattggggcgcacaaacacaaagatcactagttaattttgatataggctttgaaaagatgccctgggaaataatagaaagttttgccgttcttaaaatggcagcagctgaaaccaatcatgaattaggtgtattaaataaagagaaaatggaagttatttccgtggtttgtgaagaaatactcgatggaaaattagttgatcattttccattagttgtttggcagactgggtctggaacacaaactaatatgaatgtcaatgaggtgatatcgaatagaggtcatgaactaatggggggtaaaatttcagataacactaagaaaatccatccaaatgacgatgtcaacaaatctcaatcatctaatgacacatttcctactgctatgaatatggcagcttatcatctaatcgaaagctatacaattccatcagttaaagaacttgaaaaaactttatctaaaaaagcaaatgattttaagaacattgtgaaaattggaagaacccattttatggacgcaactccactgtctcttggtatggaatttagcggatatgctacacaattaaataatggaattaaagaattaaaacaaagtttaaaacacctttcagaaatcgcacttggtggaacagctgtcggcactgggttaaataccccaaaaggatactctaaaattgttgcaaaaaaaatatctgaaataactggttataactttgtttcagctccaaataaatttgaatctcttgccgcaaatgatgcaatagttggagcatctggagcactaaaaaaattagccgttgcattaatgaaaataggcaatgacataaggatgttatcatcgggtcctcgaagtggtataggagaaatactttta

SEQ ID NO: 281048 - DNA, 1111 bp, Unknown
  Bacterial polypeptide expressing nucleotide sequence isolated from the Sargasso Sea
atgaaatatagaatagaaaaagatagcttaggtgaggtcaaagttccatcaaaggctctatggggtgctcaaacacaaagagctgtgaataattttccaataagtggaataaagatggattttccatttactaagtcatttgtttcctcattaggtttaattaaggatgcagcggctaaggcaaatcttagattaaaattaatatctccaaaaaaatctaaggctatatccagagcagcaaaggaagtatggcaagaaaaacatcatcacgaatttccaattgatgtatttcaaactggttctgggactagctctaacatgaatgcaaacgaagttattgcaaacttagcaagtaaatatgccaaacttgatgtcaatgcaaatgatgacgtcaatatgagtcaaagcagcaatgatgtcataccaacagctattaagataagctcacacatggatttgacaaaaaaactttatcccgcattagataaattaataattactattgaaaaaaaagccctttcattgagaggaactattaaaactggtcgaactcatctcatggatgccatgcctgttgattttgcagaagagctttacgcttggtcgagtcaactaaagtcttcaaaagagatgctgtttattattgaaaaaaaactacttgaattaccacaaggcggaacagctgttggtagcggaataaatgctcacaaaaatttttcaaaatactttgctcaggaaatgacaaaacttttgggaaagggcaataaatgcgttcctagtaaaaacttttatcatgaattgagcgcacaagattgttctgttcaattatctggagaacttaaaaatctggccttaattcttatgaaaatatccaacgatcttagatggatgaatagtggtccgttagctggactttctgatatagaattagaagctttacagcctggtagcagcataatgccaggtaaagtaaacccagtaattcctgaagcagttgcaatggcatccgctgatgttattgggaatgatgtatcaataacagttgctgctcaatctggcaattttcaacttaatgttatgttacccagtgatagcttacaaccttcttaaa

SEQ ID NO: 281049 - DNA, 1363 bp, Unknown
  Bacterial polypeptide expressing nucleotide sequence isolated from the Sargasso Sea
gttgaaatatagaactgacaaagactcacttggaccagtcaaaattcctgcagatgcatattatggcccatttactggcagagcaatcaaacagtataacgttacaggaagtccatctcatagaaatctgataaagtcctttgtaatgataaaacgctctgcagcagttgcaaacatgaaaactaaagcaattaacagaaaacaaggaactgcaattgttaaagcatgtgataagatacttgcaggaaagtttgtggatcaattcatggttgatatgataaactcaggtgcaggtacggcatttaacatgaactcaaatgaagtaattacaaatgttgcactaagagtattagggaaaaaacaaggccagtatgaattcttacatccaaatgatcatgtaaacatgtcacaatcaagtaacgatacatatcctactgcaatgcatatgtcaattctgttctcctttaaagaaatgcttccagccattgacaaattgataaaatctctaaataaaaaagcaagacaattttcaaaatataaaaaaattggacgaactcatcttatggatgcgcttccagttacagtaggaagtgagtttgcagcatatgttacatctttaacaaatgcaagagatgaaattgttgcatcacaaaaagaattggctcaagtcgcactaggtggaacggcagtaggaacaggagcaaacacaccaaaaggttatcgtaaggcagtgattaccgaattagctagagtttcaaaattaccattaaaaccacaaaaagacatgcagtattcattacaaagtaaatttccagttgcaaatgcatcatcagctttgaaaaattttgcaattgaattgagtaaagtttcaaatgacatcagattaatggcatcaggaccagttgcaggattatcagaattaggaattcctgcagttcacgcaggttcttcaatcatgccgggaaaagtaaatccatcgttggcggaatgtatgaacatgatttgttttagcgtaataggaaatgataccacagtttcttttgcatcacaagcaggacaatttgaactaaatgtcatgttgcctggaatgctaaaagcagtgttagattcaacagatatgctaacaaactttttgccaatattttctgcaaatcttattgatggattaactgcaaaccaaaccaaacttagagaaaatatagaaaacagtcctgtgattgttacgctactaacaccaaaaattggttatttgaaatctgcagaattattcaaagaatctctcaaatctggaaagacaattagagaattagtggtatcaaagaagttaatgacagataaagaagtcactgcactaatgagttag

SEQ ID NO: 281050 - DNA, 1333 bp, Unknown
  Bacterial polypeptide expressing nucleotide sequence isolated from the Sargasso Sea
atgagactagaaaaagattcaatgggagagttagaagttccatctaaagctttatatggagcaaatactcgaagagcacaattaaattttcctatttctgatcttcgttttggcagatcttttattaaagctctaggattaataaaacaatcagcagctgagacaaatttagagcttaatttattagataaaaaaattgctgaatcaattatcatttcagctcaagaagttatagatggagatcatgacgatagttttgtagttgatatttttcaaacaggctcaggtacgtctacaaatatgaatgtaaacgaagtcatttcaaacctagcgatatcaaaaatgggtggagaaattggttcaaggaatccagttcatcctaatgaccacgtaaataaaggacaatcatcaaatgatgttattccaacagctattcacatagctgctgctatttcaataaaggacgacttagttccttcaatgaaaatcttgaaaaaatcattacaaaaaaaatcagatgagttttggaatattgtaaaaactggaagaacccatcttcaagatgcaacaccaataagacttggtcaagaatttaaaggttattacggtcaaatagaaaattctataaaaaaagtcaattcaggactagatgaattatcagttttagcacttggaggtacagctgttggaacaggaataggaatgaatccagaattttgcggttcagttattagtaaaattagtgataaaactggaataaatttctctgagacagaaaatcattttcaatctcaatctacaattgatggaattgtttacgcatcaggttgtgtaagaagtttcgcagtaagcttgatgaaaattgcaaatgatataagatggttaggttcagggccaagagcaggaataggtgaattgaatttacctgaagttcaacctggatcatccataatgcctggtaaagtaaatcctgtcatagctgagtcagtaacaatgatatgtgcacaagtaatgggaaatgatcaaacagttagtattgcaggacaaagtggaaattttgaattgaatgtaatgatgccaattgcagctcataacttgctagaatcaattgaaattctgtcaaagggaagtgataatttctctaaacaatgtatagaaggacttgtggcaacagaaaaaggtcctaatatggtaaaccaaggattagcaatatgtacagcattagctcctaagttaggttacgataaagctgctaatatagctcatatagcttctgaaactggagaaacaataaaacaggtaacattaaaaagaaacagaattaacctctgaa

SEQ ID NO: 281051 - DNA, 1375 bp, Unknown
  Bacterial polypeptide expressing nucleotide sequence isolated from the Sargasso Sea
catgggatctgttaaagtgccaaatgatcgctattacggagcccaaacacaacgatccctcaataattttaagataggaaacgaagttttccctagagaatttattagagcatatggtcttgttaaaaaagcagctcttaaagtaaacgtttccgcaggtttaattgactcaaatatatcgaaagcaataagcactgctatcaatgaagtaatttctggagatttagataatcattttcctctagtggtttggcaaacggggtctggaacgcagacaaatatgaatgtaaatgaggtgatagcaaatcgtgccattgaaattctaggaggagagataggcagtaaggatccagtccatcctaatgatcacgttaatatgggccaatcaacaaatgatacttttccaacagctataaatatatcagctgtagaatctgttacacacaacttactcccgaaccttgaagcactaagagatggtttgaatgttaaagctaaagctttttctaagattattaaattaggaagaactcatttacaggacgcaactcctttaagccttgggcaggaattttcaggttatgtaactgctattgattatggatgtcaaagaataaaaaatgcattagaaagttgttatggcttggcaatgggtggtacagcagttggcactggaattaatacaattgagggttttggtgaaaaagctgcagaggaaattgctagtttaacaaatttaccatttagaactgctgaaaataaatttgaagcacttgctgctcaagactgcatagtagaattatcaggagctttaaaaacagtagctgtttcattatttaaaatatctaatgatatacggtggttaagtagtggtccgagatcaggtattggagaattaattctgccagccaatgaaccagggtcatccataatgccgggaaagataaatccaacacaatgtgaagctatgacaatggtttgcactcaagtcatggggaatgacacatcgatttctttcgctggagctaatggaaactttgaattgaatgtttataggccagtaattgctcataatattttacaatcagttagattattagctgatgcatgtcaatcttttttacttaatgctgttaatggaattgaaccaaatcaaaagagaatagatgataatttatttaattcactaatgttagtgacagctttaaatcctcatataggatacgataaagcagcaaaagtcgctaaaaaagcttatgatgaaaatctttcattgcgcgatgcaattcaaaagttaggttatatgacaggagacgattttgataaaattgtgaagccagaaaagatgattaaaccagcaaaggcaagtaaatag

SEQ ID NO: 281052 - DNA, 1181 bp, Unknown
  Bacterial polypeptide expressing nucleotide sequence isolated from the Sargasso Sea
aaaagcaattaacagaaaacaagcacttgcaattgtaaaggcatgtgacagtgtactaaaaggaaaagcacaagatcaatttgtagttgatatgataaactctggtgcaggtactgcatttaacatgaatacaaatgaagtcatttccaatgttgcactaagagttttaggtaaaagacaaggtcaatatcaatttcttcaccctaatgatcatgtgaacatgtcacaatcaagtaatgacacttatccaactgcaatgcatatggcaattttattttcattagaaaatttgattcctcaaattgaaaaattgataaagtcattagaaagaaaagcaaaaaaattctcaaaattcaaaaaacttggacgcacacacttaatggatgcactgccagttacacttggggatgagtttggtgcatatgcaacatcactaactaatgcaaaagattctatcataaattcaaaaaaacaattagagcaagttgcactaggtggaacagcagttggtactggtgcgaatacaccaagaggttatagaaaaattgtaatttcagagctttcaagaatttcaaaacttaatctaaaaccagaaaaagatatgcaatattctctacaaagtaaatttccagtgactaatacatcatctgcattgaaaaactttgcaatagaacttggaaaaatttcaaatgatattagattaatggcgtcaggaccaattgctggacttggtgaacttggaatacctgcagtacatgcaggttcatcaataatgcctggtaaagttaatccttcacttgcagaatgtatgaatatgatttgttttagtgtgataggtaatgatactactgtttctttttcagcaaatgcaggacaatttgaactgaatgtaatgttgcctgtaatgctaaaagcagtacttgactctactgacatgctaacaaactttttgccaatattctcatcaaatcttattgatggacttagtgcaaaccaactaaaacttagagaaaatattgaaaatagcccagtaattgtcacattgttgacaccaaaaattggctaccaaaaatctgccgagctattcaaagaatcactaaaaactggtaaaaccatcagagagttagtagtttccaaaaagttattgacaaataaagaagtgaattctctactaagttagt

SEQ ID NO: 281053 - DNA, 1390 bp, Unknown
  Bacterial polypeptide expressing nucleotide sequence isolated from the Sargasso Sea
tatgaaaaatagaaaagaatatgacagtattggtggaattaatgtgcctgtggataaatattggggagcatctacacaaagatcaagtaaatattttgatattggagattttttagttagacctatagtcattaaatcaattgctataattaaaaaagctgcggcaatcgtaaatgcaaaaaatggcgatctagacaaaaaaataagtaaaacaatcgttaaggctgcaaatgaagttatctctggaaaactaattaatcatttccccctaaaagtatggcagacaggatcgggtacccaaacgaatatgaatgttaatgaggtaattgctaatagagctatagagattttaggtggaaaaaaaggatcaaaaaaaccagtacatccaaatgatcatgtaaataaatctcaatcaactaatgatgtttttccaactgcaatgcatatggcaattgctatagaagcaattgaaaaattattacccagccttaatttgctcaattttcaattaaagaaaaagtcaaaagaatttaataaaattgttaaaattggaagaactcatttgcaagatgctacacctttaactttggggcaggaattttctggttaccattttcaattaacaaaatgtattgaaagaataaaaaaatccctagaagaaatatattttttagctcaaggaggtactgctgttggaactggactaaatacaaaaaaaggttttgataaaaaaatagtttcagaaataaaaaaaattacaaaacttccttttaaaccctcaccaaacaaatttgcttcattagcggctcatgacgctatagttaatttttctggaacaatgaacacaactgctgtttgtttaatgaaaatagcaaatgatatacgtttcttaggatcaggtcctagagctggatacggtgaacttattttaccagaaaacgaacctggttcctctataatgcctggaaaggtaaatcccactcaatgtgaagccgtaaccatggtgtgtgtaaaagttattggaaaccataatggtataacgatggcaggatcacatggtcatttcgaattaaatgtatttaaaccgttaattatacataatattttacaatcaattcatataatgtcagactcagcaaaaagctttgctaaatattgtgtttccggtttgaaagctgacaagaaaagaattaaggaattattagataattcgctaatgttagttacggcactagcacctcatgttggatatgacaatgcagcaaaaattgcaaaaaaagctttaaagaataaaacaaaattaaaagatgaggctttaaagtcaggattaattagtgaaaaagaatacgataaaatagttgatccaaaaaaaatgattaatccaagttaa

SEQ ID NO: 281054 - DNA, 736 bp, Unknown
  Bacterial polypeptide expressing nucleotide sequence isolated from the Sargasso Sea
agaaatatacttcttagcacagggtggtacagctgtgggtactggattaaatactaaaaaaggttttgataaaaaaatcgtaagagaaataaaaaaaattacaaaactgccatttaaaccatctaaaaataaatttgcttctttagcttctcatgacgcagtcgtgaacttctcgggaactatgaatactactgcggtttgtctgatgaaaattgcaaacgatataaggttccttggatctggaccaagagcaggttatggagaacttatattgccagaaaatgaacctggatcctccataatgcctggaaaagttaatcctacacaatgtgaagctgttacgatggtttgtgtgaaagtaattggtaatcacaatggtataactatggcaggatcacatggtcattttgaattaaatgtttttaaaccattaataattcataacatattgcaatcaataaaaattatgtctgactcttctaaagcatttgccaagtattgtattaaggggcttaaggcagataaaaaaagaattaaatcacttcttgataattcattaatgttagtgaccgctctctctccaaaaataggttacgacaatgctgcaaaaattgcaaaactagctcataaaaatggaaccacattaaaagaagaggctttaaaaactggtcttataaatgaaagagaatttttaaaaattgttaatccaaaaaaaatggtcaagccaaacaattag

SEQ ID NO: 281055 - DNA, 868 bp, Unknown
  Bacterial polypeptide expressing nucleotide sequence isolated from the Sargasso Sea
atgagaaacaaaaaaagaacagaatatgatactttaggtagtaaaagaatagataataaaaatttctggggtgctcaaactcaaagatctcttgaaaattttcaaattggaagcgaaaaaataccctttgaaataattcgagctctaggtatgcaaaaaaaagctgcttgtgagacaaatttacaatttagattaatagataaaaatataggtgcagctataattaaagcttgtgataaaattataaattcagagctaaataatcaatttccactatcagtttggcaaacaggatctggaacgcagacgaatatgaatattaatgaagttataagtaatgttgcaattaaacttttaaaaggcaaggtgggaacaaaaaaaccagtgcatcctaatgatcatgtaaatttatcacaatcttcaaatgatacatttccaaccgtaatgcatatagctattaatgaaagaacagatgaaaaattaattccaaatttaaataatttgataaaagaattaaaattaaaaacaaaaaaatttaataaaattattaaaattggtagaacacatactcaagacgctacacctttaactttaggacaagagttttcagcgtatttagctcaaattgaaaattcaaaaaaaagaataatatattcaaaaaaagatttatcttttttagcgcaaggaggcactgctattggaaccggaattaattcaccaaaaaattttgacaaaactttttgcaaaaatttatcaaaaatgacaaacaatatatacaaacctgcaaagaataaatttgcagcaattgcctcacatgatactttggtcgcattttcaaactcgttaaattcattagctatagaaattt

SEQ ID NO: 281056 - DNA, 757 bp, Unknown
  Bacterial polypeptide expressing nucleotide sequence isolated from the Sargasso Sea
atgtcgcaaacgcggacagagactgatagttttggacctttagaggtaccttccgaaaaatactggggggcacaaactcagcgatcaattataaactttcccataggctgggaaaagcagccagtggctattatccgtgcgttgggtgttatcaagcaggcttgtgctgaagcaaataaatctgctggtaatttagatgaaaaaattgctgatgctattatcaaagcagcagccgaagttgttgaaggtcaatttgacgataattttcctctcgtagtttggcaaactggttctggtactcagtcaaacatgaacgctaatgaggtaattgcaaaccgcgccatagaaatacttggaggcactattggctcgaaagatccagttcatccaaatgaccattgcaatatggctcaatcttcaaatgatacctttccaactgccatgcatattgcgacagcaatggcttccagcgatgtgcttatgcctggactagaaaagctagagaaagctttgcgaagcaagatagaagaatttgatggtattatcaaaattggacgaacccatacgcaggacgcaacgccgattaggctttcgcaggaattttcaggttatgctcatcaagtgcatatgggtatcagacgaataagcaagtctcttgaggatatatatgaactggcgcaaggcggcactgctgttggcactggacttaatacttttgaggggtgggacaccacagttgcagaaaatatttcaaata

SEQ ID NO: 281057 - DNA, 662 bp, Unknown
  Bacterial polypeptide expressing nucleotide sequence isolated from the Sargasso Sea
tatgaaaactagaaaagagtacgacagtatcggtgaaattaatgtacctgtggataagtattggggcgcatcaactcaaagatcaaaaaaatattttgatataggtgagtttaaagttagaccaatattaattaaatcaattgcaattatcaaaaaatcagcagctatcgtccataaaaaagaaagacaaatagaaccaaagattgcaaatgcaataattaaagcttctgaggaagttataaaaggaaaactttatgaacatttccctttgaaagtttggcaaactggatctggaactcaaacaaatatgaatgttaatgaggttattgcaaaccgtgctattcaaattttaaaagggaaattaggatcaaaaaaacctgttcatccaaatgaccatgtaaataaatctcaatctaccaatgacgttttcccaagcgcaatgcacattgctattgcaatagaaacaacagataaattattaccttcgctaaactttctaaataaacaattaaaaaaaaaagttagacaattcaaaaaaattattaaagttggaagaacacatcttcaagatgctacacctttgacattaggtcaagaattttctggctatcaaaatcaggtagaagaaactattaatagaataaaaaatgcgttgaaagaaa

SEQ ID NO: 281058 - DNA, 1390 bp, Unknown
  Bacterial polypeptide expressing nucleotide sequence isolated from the Sargasso Sea
atgaaattcagaaaagaatacgacagcataggttctataaacgtgcctgtggataagtattggggtgcatctacagaaagatcaaaaaaacactttaatattggagatgttttagtgggatcaaagttaataaaatccatagctataataaaaaaagcagctgctattacaaattataagaataaagatattagttcaaaaatttatagatcaatcgtgcgtgcttccgacgaagtaattaagggaaaattagataatcacttccctcttaaagtttggcaaactggctctggtactcaaacaaatatgaacgttaacgaagtaatttctaatagagcaattgaaatgctcaaggggaagaagggcacaaaaaaacctgttcatccaaacgatcatgtaaataaatctcaatctactaatgatgtatttccaacagcaatgcatatagcaatagcaatggaaactagggaaaaactattgccaagcttagtactgttgaataaagaattaaaaaaaaaaattagagaatttagtaaaattgttaaaataggacgaacgcatttgcaagatgcaactccattatctctcggtcaagaattttcaggttatcaatcacaactagaagagtgtattaaaagaatagaagtatcacttaatgaaatttattacttagctcagggtggaactgccgttggcactggtataaatacaaaaaaaaattttgataaaaaaatagttagtgaaataaaaaaaataactaaattacctttcaaaccagctaaaaataagtttgcagcacttgccgctcatgatgcaatcgtaaattattcagggacattgaatactacagcagtgtgtttgatgaaagtggcaaatgatattcgatttttaggctcaggacctagagcaggatacggagaattgatattaccagagaatgaacctggatcttcaataatgcctggtaaggtaaatccaactcaatgtgaggctgttactatggtttgtgtaaaagtaattggaaaccataatggaattactatggctggatcacatggtcatttcgaactaaatgtttttaagcctttaataattcacaatgtgctacaatccattcaaattctctccgatagcactagaagttttgcgaaatattgtatttctggacttaaagctgacaaaaatagaattaaacatttggtagataattctttaatgctagtaactgctctatctcctaaaataggttacgataatgctgcgaagatagctaagaatgcactaaaaaataaaactactcttaaagttgaagcaatgaaatcaggtctaataaacgagagagaatataataaaattgttgatcctaataaaatgattaaacctgattaac

SEQ ID NO: 281059 - DNA, 1047 bp, Unknown
  Bacterial polypeptide expressing nucleotide sequence isolated from the Sargasso Sea
aatgaccaaaaactttaggattgaaaaagatagtatgggaacaatagaggttcccatggaagctttgtggggtgctcaaacacaaagatcgataataaatttttctattggagaagaattaattccaattgagttaatttattcactgaccctcataaaaaaagctgcttcaattgcgaatttcaatttaggtttaatagataaaaggaaaaaagatttgattgtagaggcatgtacggaaatacttgatgggcttcacgattcacagtttcccttaaaggtttggcaaacaggtagtggcacgcaaacaaatatgaatgttaatgaggtaatttcaaatattgcagctttaaaaactaattcagagcttggtagtcatcaaccaattcatccgaatgatgatgtaaataaatctcagtcaactaatgacacttttcctgctgctattcaaatatctgttgttaatgaaataatcaaaaatttagttccaacgatcagagaacttactaaggtccttgataaaaaaagtgaagaatggaaagaccttataaagataggaagaacccattttcaagatgcagttccccttacttttgggcaagaaatatcaggatggtcagagcaacttaaagatgctgagaatgcaattattatgagtctgaatgaattgtatttcttacctctgggaggaactgcagttggtacagggattaattgtccaaaaggattttgtgaagagtctataaaatcaatttccgatgatactaatctaatgttctataaatcaaaaaataatttttctatcatggcctcgcatgatcgtcttgctcaagtaatgagtcagataaaaatattagcaggtgcattatttaaaatttcaaatgatataaaaattctatcttctggtccaagatcaggaatatatgaactaattattcctcaaaatgaacctggaagttctattatgccgggtaaagtgaatccaactcaatgcgaagccttatcaatggtttgtactcagataatgggtcttgaatatgcagtttc

SEQ ID NO: 281060 - DNA, 1369 bp, Unknown
  Bacterial polypeptide expressing nucleotide sequence isolated from the Sargasso Sea
tatggggcaaattgaagtacctgacgataggtactatggagctcagacccagcggtctctacaaaattttaaaattggtggtgaaaaatttcaaagagaattaatccgggcatatgctattcttaaaaaagctgcagcagtatctaatgaatccgcggggaagcttgattccaatatatcgcaagccattattcaggcggctgatgaggtaattgaaggtaaattagatgaacattttcctctagtcgtttggcagaccggctcaggaacgcaatcaaatatgaactttaatgaagtgattgcaaatcgagcgattgaaattttaggcggtcaattaggcagcaaagacccagtgcatcccaatgatcatgtcaatatgtcccaatcaactaatgatacatttccaactgcaattaacattgcagcagctgaaatggttttcaaccaactaattccatccctaaaaaaattgcttaaatcgcttgcccaaaagtcaaaggattttgattcaattgtgaagcttggccgtacgcatcttcaggatgctactccattaagcctagggcaagaattttcaggatacgcctcagcgataaaccacaatattgaaagattagaagcttcattagaccaatgctatgaattagcaatgggcggcactgctgttggaacaggaattaattcatacgaaggatttgctgagtccgttgcagaaaatatcgcttcgattacgggattaccatttaaatcagcctcaaacaaatttgaagctgttgctacgcaggacgctatagtagaattatcgggttcactaaaaacccttgctgcttctttatttaaaattgcaaacgatattagatggttagctagtggcccacgatcaggtattggtgaaatcataattccatcgaatgagcctggctcatcgattatgcctggaaaagtaaatccgacgcaatgcgaagctatgaccatggtttgtactcaagttatgggtaatgacctgacgatttcaattgcaggtgctagcggaaattttgaattaaatgtctttcgaccagtgatcgcttataatattattcaatcgattcgtttattaaatgatgcttgtgattcatttcgaaaaaattgcatcgatggaattacacctaataaagatagaataaaatctaatttgtatgattcattaatgctcgtaacagcactcaatcctcatatcggatacgataaagcggctgaagttgccaagaaagctcataaagacaatacctcgctcaaagaagctgttattgaattgggttacttgtcagaagaagattttgacaaattagtagaccccaataaaatgattaagccatcagaaaagtaa

SEQ ID NO: 281061 - DNA, 1378 bp, Unknown
  Bacterial polypeptide expressing nucleotide sequence isolated from the Sargasso Sea
cttgtcagataaaaagtttagaattgaaaaagatagcatgggcgagctaaatgttcccgctgattcaaaatggggcccccaaacccagcgtgcagtcgataattttcaaatcagtgattacaaaatgcccactggtttcattcgttctttggcgcttttgaaatggggactggccaatgcaaataaagatttgaatcttctctcaaaagaaaaggcatctgctatagcagattcagcaatggaaatttatcaaggcgatcatatgaaagagtttccagtggatgtctttcaaactggatctggaacaagtaccaatatgaatatgaatgaggttatatctcatctagcatcttcagaatcaaacgccattcacccaaatgatgatataaatatgggccaaagcagcaatgatgtcattccttcagcaatcaatgttgattcctctttatccgttaaaaataatcttattccatccatgaagcatctaaaaaatgcaattgatgaaaaagccaaatcaatcggtgacataccaaaaaatgggcgaacccatctcatggatgccatgccggtaactttttctcaggaaatgagtgcatggtctgctcaaattcaggatgccatcgaacaatatgagcaatccatgcctaaaatacagcaacttgcgattggtgggactgcagttggcactggaatcaatgcggatcctcatctttcagaaaagtgctgtaagcatatgaataatctgacaggcatggaatttaaaccggcaaataattcttttcaggcaatcagttcacaagatgcagctttgattttgtcttcttcaaataaaacattggctgttgcattgacaaaaattagcaatgatctgaggtggatgaatagcggacctcttggaggtttaggagagattactttgcctgcacttcaaccgggcagcagtatcatgccgggtaaagtcaatccagtaatccctgagtcggtttgcatggttgcaggaaaagtttttggcaatgatttaacgatcactcatgctgctcaatctggcaattttcaactcaatgtcatgctacctctggttgctcacagcttatctgagtctctatctttgctttcgaatgcatgcttaagtctggctgacaaggcgattaaagattttgaagtgaatcaggataatatcgaatccatgttaagccgaaatccaatattagcaacagcgctcaatgccaccattggatatgagacaggtgctcaaatcgtaaaaaaagcttatcaggagaagagatcgattatagaggttgccactgaaatgactgatctagattctaaaactcttgcagagttgctcgatccagtcaaactcactaggaatcaataa

SEQ ID NO: 281062 - DNA, 1141 bp, Unknown
  Bacterial polypeptide expressing nucleotide sequence isolated from the Sargasso Sea
tatgaaatatagaattgaaaaagacagtcttggtgaagttaaagtgcctagaaaagcattgtggggagctcaaacacaacgagctgtaaataatttcccaattagtgggattaagatggattttccttttactaaatcatttgtatcttctttaggtttaataaaagacgctgctgcaaaaacaaatttacgccttaaacttatatcatctaaaaaagctaaagctatttcaaaggcagccaaagaagtatggcaggaaaaacatcatcatgaatttcctattgatgtatttcaaactgggtctggcacaagctcaaatatgaatgcaaatgaagttatcgcaaatttagcaactaaatatgcaaaagtaatggttagcccaaatgatgatgtaaatatgagtcaaagcagcaatgatgtaatacctactgcaattaagataagtgctcacatggacttaacaaaaaaattaatgccagcattggatgaattgattaaaacaattgaaaaaaaagctgattcagtaaaaggaattatcaagacagggcgaacccatttgatggatgctatgccaatagatttctcagaagaattaagagcatggtctggccaattaaaatcttctaaagaaattttaaatattttagaaaagaaatttcttgaattacctcaaggaggaacagcagttggaagtggaataaatgcccataaacaattttcaaaatattttgcacaggagataacaaaacttacaggtaataagtgtaaatatattccaagtaaaaatttttatcatgaattaagtgcgcaagattgttcagttcaattatctggagagttaaaaaatttagcaattatacttacaaaaatctcaaatgatttaaggtggatgaatagtggaccattggctggtttgtccgagatagagcttaaagctttacaaccaggaagcagcataatgccaggaaaagtaaatccagtcattcctgaggctgttgcaatggcttctgctgatgtaataggtaatgatgtttcaataactgttgctgctcaatcaggtaattttcagttaaatgtaatgttgcctgttatagcttataacttgcttaaaagtatcaatcttctatcaggctccatgagc

SEQ ID NO: 281063 - DNA, 1390 bp, Unknown
  Bacterial polypeptide expressing nucleotide sequence isolated from the Sargasso Sea
tatgaaatatagaaatgaatatgatagtttagggagtataaaagttccacatgataagtactggggcgcctctacccaacggtctaataaacattttgatataggggattttcttgtaagaccgattgttattaaatctattgcgatgatcaaaaaggctgctgcaatagtaaatcaaaaaaatggaagtttagataaaaaaataagtaaagctattataagagcagcggatgaagtcattttaggaaaacttaatgatcatttccctctcaaagtttggcaaacaggttcaggaactcaaacaaatatgaatgtaaatgaagtaatagcaaatagagcaatagaaattcttggaggtaaattaggtagcaaaaaaccagttcatccgaatgaccatgttaataagtcacaatcaacaaatgatgtttttccaaccgcaatgcatatggctatagctataagagcaaagggtaaacttttgccttttcttaaattgttaaatgaagaattaaaaaaaaaagcaaaacaatttaataaaattattaaggttggaagaacccatcttcaagatgctacacctataactttaggacaggaattttctggatatcactcacaacttactaaatgtataaaaagaattgaagttgcactccaagaaatatattttttagctcaaggtgggactgctgtaggaacgggcctaaacaccaaaaaaggttttgataaaaagatagttgctgaaattagaaaaattacaaaacttccttttaaacctgcatcaaacaaatttgctgcattagcagcacacgatgccatagtaaatttttcaggaacaatgaatacaacagcagtttgtttaatgaaaatagctaacgatatcagatttttaggctctggaccaagagccggttacggtgaacttattcttccggagaatgaacccggttcttcaatcatgccaggaaaaattaatccaacacaatgtgaggctgtcactatggtctgtgttaaagtcataggaaatcataatggtattacaatggcaggctctcatggccattttgaattaaatgtatttaagcctttaattattcataatattttacaatcgatacacataatggctgactcttcaaaaagctttgcaaactattgtattaaaggtttgaagccagacaagaagagaattaaaaattatttagataactctctgatgcttgtaactgcgctatccccaaaagtaggttatgacaatgctgctaagatcgcaaaaagagctcacaaaaatggcacgactttaaaagaagaagctatcaaatcaggattaataacggaaaaagaatataaaaaaattgtgaatccaaaaaaaatgattagaccaaattaa

SEQ ID NO: 281064 - DNA, 947 bp, Unknown
  Bacterial polypeptide expressing nucleotide sequence isolated from the Sargasso Sea
catagcaatagcaatcaaaactaaaaataaattattaccctcactagaattattaaacaaagaattaaaaaaaaaagtttctcaatttaaaaatataatcaaagttggtagaactcatcttcaagatgcaactcctttatctttaggtcaggaattttcagggtatcaatctcaattagaaaattgtatttttagaattaaaaatgctttaaatgaaatttattctttagctcaaggtggaacagctgtgggaactggaatgaatagcaaaaaaggttttgataaaaaaattataaatgaaataaaaaaaattactaaactaccatttaaaccaacgaaaaataaatttgcagctttagcggcacatgatgaaattgtaaatttttcaggtacattaaatacaactgcagtttgtttaatgaaaattgctaatgatattagatttttaggatctggtccaagagcaggatatggagaaatcattttacctgctaatgaacctggttcatcaattatgcctggtaaaataaatccaactcaatcagaagcagtaacaatggtatgtgttaaagttattggaaatcacaatggaattacaatggcaggttcacacggacattttgaattaaatgttttcaaaccattaattgcagataatattttacaatctatagatttacttgcagacagtactaaaaatttttccctatattgtgtgaaaggaataaaagcaaacaaaattaaaattaaaaaatttttagataattcattaatgttagttacggctctaacgccttacattggttatgacaatgcagcaaaaatagcaaaagcagctttaaaaaaaggtacaacattaaaagaggaggctttaaaaactaaattaattaacgaaaatgatttcaatcaaattgttaatccaaaaaaaatgatttatccaaaataaa

SEQ ID NO: 281065 - DNA, 625 bp, Unknown
  Bacterial polypeptide expressing nucleotide sequence isolated from the Sargasso Sea
tatgaaattcagaaaagaatatgacagcataggttctataaacgtgcctgtggataagtattggggtgcatctacagaaagatcgaaaaaatactttaatattggagatgttttagtgggatcaaagcttataaaatctatagccataataaaaaaggcagctgctattacaaattataagaacaaagatattagttcaaaaatttataaatcaattgtgcgtgcttccgacgaagtaattaagggaaagttagataatcacttcccccttaaagtttggcaaactggctctggtactcagacaaatatgaacgttaacgaagtaatttctaatagagctattgaaatgctcaaggggaagaagggcacaaaaaaacctgttcatccaaacgatcatgtaaataaatctcaatctactaatgatgtatttccaacagcaatgcatatagcaatagcaatagaaactagggaaaaactattgccaagcttagtactgttgaataaagaattaaaaaaaaaaattagagaatttaataaaattgttaaaataggacgaacgcatttgcaagatgcaactccattatctctcggtcaagaattttcaggttatccatcacaacttgaa

SEQ ID NO: 281066 - DNA, 541 bp, Unknown
  Bacterial polypeptide expressing nucleotide sequence isolated from the Sargasso Sea
atgacaaataaaaaaagaacagaatctgatagtttaggtattaaaaaaatagactctaaaaggatgtggggagcacaaacgcaacgctcattagagaattttaagatttcgaataataaaatgcctatagaaataatcgtagctttaggtatgcaaaaaaaagcagctgccttaactaatcaaaatctaggattgataaataaatatatgtcaaatgcgattgttaaagcttgtgatcacgtaattaacttaaatctactcgatgaatttcctttgtctgtatggcaaacaggttctggaacacaaacaaatatgaatgctaatgaagtaatcagtaattatgcaattaaaatcttaaaaggaaaaattggctcaaaatcgccaattcatccaaatgatcatgtaaatttatctcaatcttctaatgatacttttccaactgtaatgcacattgcggctaatgagttaactgataaaaaacttgtcccagcaataaaaaatttaattaaagagcttaagatcaaaacaaaagcatattcaa

SEQ ID NO: 281067 - DNA, 769 bp, Unknown
  Bacterial polypeptide expressing nucleotide sequence isolated from the Sargasso Sea
gaattctattgtctttataaattcagctaatatgcacctaaaatcattagctcaaggtggaaccgctgtaggtactggtataaattcacatcccaaattcggcacattaatatcaaaagaaatttcaagaaaagtaggtttaaaatttaatgaagccagaaatcattttgaatcacaatcatcaaaagatgccctcgttcaattaagcggcacattaaaaacagcagcaacttcattgatgaagattggtaacgatattcgatggttgagtagcggacctcgatgtggatttggagagataattcttccagctatacagcctggttcttcgataatgccaggtaaagtaaatcctgttttagcagaatcattaactcaagtttgtgctcaagttattggaaatgatactacagtttctatagctggccaatctgggaactttgaacttaatgtgatgatgccagtaatggctcataatattattgaatcaattcaaatactatcatcatgtaccaaaatttttgcactggattgcataaaaggcataaaagctgataaaggtaaatgtgaagggtatattgaggatagtcttgctatgtgtacaagtttagctccaattattggctacaacaatgcagctaatgttgccaagaaagcctatagtaataataaaaccgtaagggaaattgttaatgaagataaaatattagatatcaaagaatctaataaggtcttaaatcctaagtcaatggtgaagcctagtttatga

SEQ ID NO: 281068 - DNA, 1387 bp, Unknown
  Bacterial polypeptide expressing nucleotide sequence isolated from the Sargasso Sea
tatgaaatttagaattgaaaaagatagtttaggtgaagttaaagtgccatctaaagctctttggggtgcgcaaactcagagggctatcaataattttcctatcagtggtattaaaatggacttcccatttacaaagtcttttgtgagttcccttggaataatcaaagatgcagctgcaaaagctaatttaaaattaaaattgatttcttcaaagaaatcaaaatcaatttctaaagctgctaaagagatatggcaagaaaaacatcatcatgagtttccaattgatgtttttcaaacagggtcaggaacaagctcaaatatgaatgccaatgaagttattgctaatctcgcttcaaaatattcaaaaacttcaatttcaccgaatgatgatgtaaatatgagtcaaagtagcaatgatgttatcccaactgcaataaaaataagtgcgcatatggatttaacaagtaagcttttgcctgctttagaaaatcttattaaagatattgattctaaggctgtatctgttgaaggagtaattaaaactggcagaactcatcttatggatgcaatgcctatagattttgctgaagaaattggagcttggtcaagtcaattaaaatcatcaaaagaaatgttacatatcctagaaaataaattacttcaacttccccaaggaggaactgcagttggatcagggattaatgcacacaaacaatttgctaaaaatttctcaatagaagtatcaaaattgctaaagcataaatttgttccaagtaagaatttttatcatgaattaagtgcacaagatacttctgtccagctttcgggagagcttaaaaatcttgctattgtcctgatgaaaatttctaatgatttgagatggatgaatagtggacctttggctggattgtctgaaattgaattaaaagcgcttcagccaggcagcagtataatgccaggtaaagtgaatccagttatacctgaggcagtagcaatggtttctgctgatgtaataggaaacgacgcatcaatttcagtagcagcccagtctggaaattttcaactcaacgtaatgctacctgtaatcgcatacaatttgctaaaaagcataagccttttagctggttcaatgtcagttttgtcaaagaaagcaatcaaatctttcaaggttaatcataataatttgaatgaatctttacaaaaaaaccctattttagttaccgcactcaacccaataattggatatgaaaaagcagcatttattgcaaaaaaggcatataaagaaaagaggccaatcattgatgtggctgaagaagaaacgaacatatctaaagctaaacttgctaaacttcttaatccatccaaactttctaaaggcggcatttaa

SEQ ID NO: 281069 - DNA, 468 bp, Unknown
  Bacterial polypeptide expressing nucleotide sequence isolated from the Sargasso Sea
aatgaaattaagaaaagaattcgatagcattggctcgataaatgttcctggtgataaatattggggagcttcaacacaaagatcaaaaaaatattttgatattggtgagtttttagtcagaccagttttaatcagatcaatagctattattaaaaaagctgctgcaatagttcatggtaaagaaaaacaaatcttaccacaaatttcaaaagctatcataaaagcatctaatgaagttatatctggtaagttagatgagcattttcctttaaaagtttggcaaacaggctctggtactcaaacaaatatgaatgttaatgaagttatagcaaatagagcaattgaaattttagggggcaaaaaaggttctaaaaaacctgttcaccccaatgaccatgtcaataaatctcaatctactaatgatgtattttccactgcgatgcatattgctattgcaatggaaacaaa

SEQ ID NO: 281070 - DNA, 498 bp, Unknown
  Bacterial polypeptide expressing nucleotide sequence isolated from the Sargasso Sea
gatgaaagacggtttcagaatagaaaaagattcaatgggagaggtcaaagttcccaaagatgcgctttatgctgcgcaaacccaacgcgcagtagacaattttccggtgagcggaatcccgatccgtcgtccgttgatttcggcactggggatgatcaagtcctcggcagccagggtcaatggtgtttcgggagcgattcctgaagaagtggcggccttgatccagtctgcagccaaggaagtgatcgagggaaaacttgatgaacatttccctatcgatatctaccagacgggttcaggaacatcaagcaacatgaacgctaacgaggtgattgccaatcgggcgagtcagctttcaacggagaaaaacctgaaggttcatcctaatgaccatgtcaattgtggtcaaagctccaacgacaccttccctactgcgatccgtattgccgcggtgatggagactcaggcggatctgatcccggctctgagggagttgat

SEQ ID NO: 281071 - DNA, 1018 bp, Unknown
  Bacterial polypeptide expressing nucleotide sequence isolated from the Sargasso Sea
aatgtccttcaggatcgagcaagacagcataggtaaaataaaagttccttcaaaagcatattatggtgctcaaactcagagggcaatacaaaattttgaaattgggtggtctatggagttcagtttaattcttccgtatatcattgtaaaaaaatgtgctgcaaaaacaaattatgctcaaaaaaatatttcaaaaaaattgtctgacgcaattattaaagcttgtaatcatattttagacaaccccgatcaatacttaaatgagtttccagtaccagtttttcaaactggaagtggtacacaaacaaatatgaacgtaaatgaagtggttgcaaataaagcaaatgaaattcttggtgcaaaattaggctcttacaagtttgttcacccaaacgatcatgtaaatatgtcgcagtccacaaatgatacttttccaactgcaattttagttggaagtgtaatatcatcagaggataatttgcttccagcgttaactatgcttgagaaatctttagttgcaaagtcaaaagaatttcacacaataattaaagtcggaagaactcatcttcaggatgcaacaccgattcgattagggcaagagttttctggttatgcatcaatgattaaaaatgatattttaagaattaagcatgctttaaaagaatgtagcgatttacctattggaggtacagctgttggaacaggaattaatactataagcggttttgatgagttaatgtgttcatttatttctgaagaaacgggactgtcatttaacgtatgtaagaataaatttgaattattatcttctcaaaatgctatatctaatttatcggcacagattcgaatttgtgcaggatcactaaataaaattgctaatgacatccgatggttagcatgtggaccaatggctggaataggagagttaatacttccatcaaatgagcctggcagctctataatgcctggaaaagtgaatccaacacaatgtgaagctgtaaatatggtttatgctcaa

SEQ ID NO: 281072 - DNA, 493 bp, Unknown
  Bacterial polypeptide expressing nucleotide sequence isolated from the Sargasso Sea
atggactacagaatagaaaaagatacacttggagaggtaaaggttcctaaagactcgctttggggtgctcaaactgagagatcaaaaaaaaactttaaaattggtaatccatcctcaatgccaattgaaataattcaggcctatgctattttaaaaaaatcagctgctattgctaaccaagatttgggagtcctatcaaaagaaaaatctaaacttatccagacagtatgtgatgaaattattgctaataaacataatgaacaatttcctttagttatatggcaaacaggttcaggtactcaaactaatatgaatgtaaatgaagtaatatcaaatagagctcatattattgaaggaaaaagacttggggaatcagaaaaaaccctatcacctaatgacgatgttaatctttcacaatcatcaaatgatagctttcctaccgcaataaacattgctgctatgaaaataattacagataacacattagttaact

SEQ ID NO: 281073 - DNA, 961 bp, Unknown
  Bacterial polypeptide expressing nucleotide sequence isolated from the Sargasso Sea
atgaaatttagaatagaagaagatagccttggaaaagtacgggtgccaagaaatgctctatggggtgcacaaactcaaagagcaatagataattttccaattagcggtatctcaatgaattttccttttacaaatacctttatttcaatgcttggttatgtaaaagacgctgcagcaagagcaaataaaaaccttaagctactagaggcaaaaaaacagagagtcatctcgagagctgccaaagaagtgtggactaataagcatggcaaagagttcccaattgacgtttttcaaactggctctgggacaagcacaaatatgaatgcaaatgaggttatagcaaacctttgctataaaacctccaaagttaagattcatcccaatgatgacgtgaatatgagtcaaagttctaatgatgtaattccaactgtcatgaatttggcttattacttcgattcaataaaaaaattaatgcccgcactagatttacttattgaaactttggaaaagaaagctgactcagtgaagggagtaacaaaaacaggcagaactcatcttatggatgcaatgccggtggatatgtctgatgaattaaatgcttggaatacacaacttaaatgctccagagaatctatagcagttgttctagaaaagcttttattccttcctcaaggcggaactgcagttggatcaggaataaatgcgcataaaaggttttcaaaagaattttcaaaagagctttcaaagctaactggctttaaaacgaagccaagcaaagacttttatagaaacttaagtgctcaggacctctctgttcaactatcaggggagcttaaaaacttagctacagttcttttgaagatatcaaatgatttaaggtggatgaatagcggacccttatccgggattgctgaaattgagcttcaggcacttcaacctggtagtagcataatgcccggaa

SEQ ID NO: 281074 - DNA, 1111 bp, Unknown
  Bacterial polypeptide expressing nucleotide sequence isolated from the Sargasso Sea
tatgaaatatagagaagaattcgatagtataggaaaaataaaagttcctggtgataagtattggggtgcctctactgaaagatcaaacaaatttttcaatattggagattttttagtaagaccgattgttataaaatcaattgctataattaaaaaagcagcagcaatagtcaacgctgaaaacaaagatttagattcaaaaataagtaagtttataattaaagctgcagatgaagttattagaggaaaacttgataatcattttcctctaaaagtttggcaaacaggttctggtacacaaacaaatatgaacgttaatgaagtgatagctaatagagctatacaaatgatgggtggaaaattaggttctaaaaaaccggtgcatccaaatgatcatgtaaacaaatctcaatctactaacgatgtttttccaacagcaatgcatattgcgattgctttaagaacaagaacaaaacttttgccatcattaaagttattagaaaaagagctggcaaagaaatctagggaatttaaaaatattgttaaagttggacgaactcatctacaagatgcgacgccattaaccttaggtcaagaattttctggttatcacgctcaacttaaaaattgcatttatagaattgaaaatgctttaaaagaaatttattttcttgctcagggtgggacggctgttggaactggcttaaatacaaaaaaaaattttgataaaaaaattattaaaaaaattagtaaaataactaaattgccttttaaaccagcttcaaataaattttcagcattagcagctcacgatgaaatcgttaatttttcaggaacattaaatactgcagcagtgtgtttaatgaaaatagctaatgatattagatttttaggctctggacctagggcgggttatggtgaacttattctaccttcaaacgaaccaggttcatcgataatgccgggtaaagttaatcccactcaatcagaagcagtaaccatggtatgtgtaaaagttattggaaaccataatggtataactatggccggatcacacggacattttgaactaaatgtcttcaagcctttaataattcataacattttacaa

SEQ ID NO: 281075 - DNA, 1141 bp, Unknown
  Bacterial polypeptide expressing nucleotide sequence isolated from the Sargasso Sea
actagatgacaattttcctcttaaagtgtggcaaacaggttcgggaactcagacaaatatgaatgtaaatgaagtaattgctaatagagcaattgagatcatgggaggaaaaaaggggtcaaaaaaacctgttcatccaaatgatcatgtaaataaatctcagtctactaatgatgtgtttccaacagccatgcatatagcaatagcattaaaaacgaaaaataaactattaccatcattatatttactaaacaaatctctcaaaaaaaaagtaaaggaatttagtaaaataataaaaataggaagaacacatttacaagatgctacccctctttcattgggacaggaattttctggttaccaggcgcaggttcaagagtctatttatagaattgaacattctttaaatgaaatttattatctagctcaaggtggaactgcagttggaactggaataaataccagaaaaaactttgataaaaaaattgttaacgaaataaaaaaaattacaaaattgccatttaaaccaacaaaaaataaatttgcagcattagcagcacatgatgctgttgtaaatttttctggagcattaaatacatctgctgtgagtttaatgaaaattgcaaacgatattagatttcttggatcagggccaagagcaggatatggagaattaatgttacctgaaaatgaacctggatcttcaattatgcctggaaaagtaaatcctacacaatgtgaagcgttaactatggtatgtgttaaagttataggtaatcataatggtattactatagcaggttctcatggtcattttgaattaaacgtatttaaacctctaattatacataatactttacaatctataaatttattatctgacagcataaaaaatttttcaaatttttgtgttgaaggcattaaagctgataaaaagaaaattaaagagctgctagataattcattgatgttagtgactgcactaactcccaagatagggtatgataatgctgctaaaattgcgaaaactgcattaaaaaataatacaactttgaaacatgaggctttaaaatctagacttatatcaaaaaaagattatgaaaaactaattgaccctataaaaatgacaaggcctaattaa

SEQ ID NO: 281076 - DNA, 937 bp, Unknown
  Bacterial polypeptide expressing nucleotide sequence isolated from the Sargasso Sea
aatgagtcaaaaaactagacaagaacaggatagcttaggaaaaattttagtttccaatgataaactctggggcgcacaaacacaaagatctattaagaattttaaaattggcaatgataaaatgccaattgaaatcattcatgcactcacaatagtgaaaatgtcatgtgcaaaagctaatcaaaagcagaaattattgtcaccaaaaattgctaatgctatttcaaatgctgctaagcaaattttaaaacataaatttgatgatcattttccattatctgtatggcaaacaggatctggaactcaaacaaatatgaatgtaaatgaagttattgcaaacattgcaaataaaaagcttactggaaaattgggaactaataaccctgtccatccaaatgatcatgttaacaaaagtcaatcaacaaacgatagttttccaactgctatgcatatagcgacatcaatgaagcttattcatgatctaattcctgcattaatagcgattgagaaaactttaaagtctcagtctcagaaatggaatagtttgattaaaattggtagaacacacttacaagacgctacacctctatcattaggacaagaattttcaggttacagtgcacagataacttcaaatataaagagagtaaatagctctcttgaaaatgtactatctcttgcacaaggtggtacagcggttggaactggaatgaatactaaaaagaattttgataaattagtagtttctgaaatagcaaaggtaacaaaaattaaattcagaccctctgataataaatatcaatctcttgcatctcatgatgcaattgttgaagtgtctggtgttataaataccattgcaaccgatctgtttaaaattgcaaatgatatacgccttttggcatcaggaccaaggtcgggacttagtgaattgaatttg

SEQ ID NO: 281077 - DNA, 895 bp, Unknown
  Bacterial polypeptide expressing nucleotide sequence isolated from the Sargasso Sea
aaaagtatggcagacaggttcaggaactcaaacaaacatgaatgttaatgaagtaatagccaatagagcaatagaaatattgggtggaaaaaagggaagcaaaaagcctgtgcacccaaatgatcatgtaaataaatcccaatccactaatgatgtttttccaactgcaatgcacatagctatagctattgagactacgaataaattgataccatccttagaattattaaataaagagttaaaaaaaaaagtaacaaaatttaagagcataattaaagttggaagaacacatttacaagatgctacaccattatctttaggccaagaattttccggctaccaatcacaattagaggattgcattaaaagaataaaaaatgctttaaacgaaatatattttcttgctcaaggcggaactgctgttggtactggaattaatagtaaaaaaggttttgataagaaaattattaaggaaattaaaaaaattactaaattaccttttaaaccaaccaaaaataagtttgctgctttggctgcgcatgatgaaattgtaaatttttctggtgcattaaacactactgctgtctgtttaatgaaaattgcaaatgacataagatttttaggttcaggccctagagcagggtatggagaacttattctcccagctaatgaacctggttcatcaattatgccaggcaaagtcaaccctactcaatccgaagctgttacaatggtatgtgtaaaagtaattggaaatcataatgggataacaatggctgggtcacatggacattttgaattaaatgtttttaaacctttgatcgcacataatattttacaatcaatagatctgttatcagacagcacaaaaaaatttttctcttttttgtattaa

SEQ ID NO: 281078 - DNA, 839 bp, Unknown
  Bacterial polypeptide expressing nucleotide sequence isolated from the Sargasso Sea
tatgaaatatcgtattgaagaagataccctgggaaaagtaaaggtcccgagaggggcactctggggagcacaaactcaaagggctgtagataatttcccaattagtggaataagtatgaattttccctttactccaactttcattcaagtgttggggaagattaaagatgctgcagctcgcgcaaataataaattaaagttactaccgaccaacaagcaaagagcaatttcaaaagcggcaaaagaagtctggcaaaataagcatgggaaacaatttcctattgatgtctttcaaactggctcgggaaccagcactaatatgaatgctaatgaggttattgcaaatcttgcatcaaaatactctaaattggacattaatcccaatgatgatgtcaatatgagccaaagctctaacgatgtcattcccacggcaatgcattgtgcttattacgttgatactgcagaaaaacttatgcctgccatggatttgcttatcgatactattgcaaaaaaaattgcacaataccatggggttgtgaaaacaggcagaacgcacctcatggatgctatgcctttaaccattgaccaagagttaggtgcatggaattcgcaattgctcaatgctagggcatctctcataacagtacttgatgcactgcgttttttgccacagggtggcacggcagttggcactggcattaatgcacacccaagatttgctcgtgaattttgcaaagctatttctcctttagtgggtttcaaagctgaaacaagcaatgattactttaggaacctaagttcacaagatttatctgttcaactttcgggagaactcaaaa

SEQ ID NO: 281079 - DNA, 1315 bp, Unknown
  Bacterial polypeptide expressing nucleotide sequence isolated from the Sargasso Sea
tatgaaattcagaacagagtctgatacattaggaaaggttcaaattcccagcgaatctttgtggggtcctcaaactcaaagatcaataaataactttaaaattggtgaccctggatcaatgccaatagagattgtttatgcatatgcaatattaaagaaagcttgttccaaatctaaccatgaattaggggctatagaaaaggataagatgattctaattaatgaagcttgtcaagaaattattgatggtaaacacgatgagcagtttccactagttatttggcaaactggatcaggtacacaaacaaacatgaatgtaaatgaagttattactaacatcgctcacagactggaggggaaggatttaaattcaaatgataagactcttaaaccaaatgatgacgttaacaaatcacaatcttcaaatgatacatttcctactgctatgcatatagcggcttataagttattagtcgaaaaaacaatacctgctattaaagatttttacaaaacacttaaaataaaggaaaaggaatttaaagatgatgttaaaattggaagaacacatttaatggatgccacaccattgactctaggtcaagagttttcaggttatgcatctcaaattgaacatggtttaaaaacccttaataattcattggatcatttatcagaattggccattggaggaactgctgtaggaacaggacttaatacaccaaaaaatttcgataaaataactgttgaaaacatctctaaagaatgtaatataaattttaaagtagctgataataaatttgaagcactagcagcccatgatgctattgttgaaacacacgctgctattaaacaattagcagtttctacatataaaattgctaatgatataagactacttggaagtggtccaagagcaggattttctgaattaattttacctgctaatgaaccaggtagctctataatgccaggtaaaataaacccaactcaatgtgaggctatatgtatggtttgtgctcaaataattggtaatgattatacaattagttttgcaggatctcaaggacatttagaattaaatgtttataaacctttgatggctgctaaaataattgaatcattgaaattattttctgatggtataattagctttaataaaaactgtgtaaaaggattaaaagctaacaaaaaaaagattaatgaacacttgaataattctttaatgttagtaactgcattaaataataaaattggatactataaggcagctgaaattgcaaataatgcttataaaaatggtacaactttaaaagaa

SEQ ID NO: 281080 - DNA, 511 bp, Unknown
  Bacterial polypeptide expressing nucleotide sequence isolated from the Sargasso Sea
atgtcgcaaacgcggacagagactgatagttttggccctttagaggtaccttccgaaaaatactggggggcacaaactcagcgatcaattataaactttcccatagggtgggaaaagcagccagtggctattatccgtgcgttgggtgttattaaacaggcttgtgctgaagcaaataaatctgctggtaatttggatgaaaaaattgctgatgctattatcaaagcagcagccgaagttgttgaaggtcaatttgacgacaattttcctctcgtagtttggcaaactggttctggtactcagtcaaacatgaacgctaacgaggtaattgcaaaccgcgccatagaaatacttggaggcactattggctcgaaagatccagttcatccaaatgaccattgcaatatggctcagtcttcaaatgataccttccccactgccatgcatattgcgacagcaatggcttccagcgatgtgcttatacctggactagaaaagttagagaagcttt

SEQ ID NO: 281081 - DNA, 1372 bp, Unknown
  Bacterial polypeptide expressing nucleotide sequence isolated from the Sargasso Sea
ttgaataaaaagaatacaaggattgaaaaggattccatgggggagttcgaagtccctgaatctgcactatatggagcatctacagcacgagcagtagagaactttccaatctcagacttgaaattttctagaacttttatcagatctttagctgaaattaaaaaagcttgtgcactagtgaatcaaaaaaataaattattagaaaaagatatcacaacagcaattgtagaaagtgctcaagaagtaattgatggaaaacatgatgatgattttgtattagatatctttcaaacaggttcaggtacttcaacaaatatgaatgcaaatgaagtaattgcacgtttggcatcagagaaaagtggaagtgaagtacatccaaatgaccatgtaaatatgagtcagtcctcaaatgatgtaataccaactgcgacgaacgttgctgctgtcttagaggcaacagagggattaattcctgaacttaagggtctagtgtcattacttgaagaaaagggtaaggattgggataaagtttacaagaacggaagaactcatttaatggatgcaacaccagttactttaggtcaagaatttatgggttatgcagcattagtttctgaaagaatgcaagatgttgataattcattagacaatgttagaaaacttgcaattggaggtaccgctgtcggtacaggaataaatgcaccagatggttttggagctgacgtcgctaaagaaataaagaaatctttaagtacagactttgaagaggtagataaccacttcactagacaaggttcaagagatgaaatagttcagctatcaggggctctaaagtcactagctgtctctttatttaagattgctaatgacattagatggatgggtagtggcccaatatctggtttaaatgaattaaaaataccggcattacaacccggatcttcaattatgcctggaaaagtaaatccagtaattcccgaaatgatgatgcaagtatctgcacaagtaatagggaacgatacagcaataacttttgcagctgcaaatggtaactttgaactcaacacaatgttgccagttatggcccataacgtattagaaagtattgcaattctttcaactagtacaaaagtttttggtgagaagctaattaaaggattagaagcaaatactgaaaagttagaaggcaatatccaaaagaattcaatcttagttacagctttagtaccaaagttaggatatgacacagcagcagaagtagctaaggaagctatgtctaatgacaaaactattaaagaagttttactagaaaaagacttactttctgaagcagaaatagacgaattgttagatatcgaaaaattaatttaat

SEQ ID NO: 281082 - DNA, 377 bp, Unknown
  Bacterial polypeptide expressing nucleotide sequence isolated from the Sargasso Sea
aatgaaatatagaactgaatttgattctattggaagaataaaagttcctggtgataagtactggggagcgtcaacacaaagatctaataaatactttgatattggtgattttttggtaagaccaattttaattcaatcaatagctattgtaaaaaaagctgcagcaattgttaattctaaaaatggggatttagacaggaaattaagcaaatatataatcaaagcagctgatgaagtggtaaagggcaaacttgataaacacttccctcttaaagtttggcaaactggatctggaactcaaacaaatatgaatgtgaatgaggtgatagcaaatagagcaattcaaatgatgggaggtaaaatgggaactaaaaaac

SEQ ID NO: 281083 - DNA, 954 bp, Unknown
  Bacterial polypeptide expressing nucleotide sequence isolated from the Sargasso Sea
caatgcatatttctgtagctcaacaaacgattgtaaaaatgctacttaacttaaagattttagaaaaagaattaaaaaaaaaatctttagaatttaaaagtatagtaaaaattggaagaacacatctacaagatgcaactccattatctcttggacaggagttttcaggatatcattttcaagttaaaaaaagtattgaaagaatagaatatgctttaaaagaaatcctatttcttgctcaaggtgggacagcagttggtactggaataaattcaaagaaaaactttgataaaaaaattgtaaaggaaattgctaaattcacaaaaatcaattttaaaccagctccaaataaatttgctgagcttgcagctcatgatgcaattgtaaatttttctggtgcattaaatacttgtgcggtggctttaatgaaaatatctaatgatattagatttttgggttctggtccaagagctggttatggagaactaattttacctgagaatgagccaggctcatctattatgccaggcaaagtaaatcctacacaatgtgaagctgtgacaatggtttgtgttaaagtaattggaaatcacaatggaataactatggcaggatctcatggacattttgaactgaatgtttttaagcctttgattgctcataacatattacaatcaatcgacttaatcgcagacagtacaaaaaattttgctctattttgtgttaaaggaattaaagctaacaaaaagaaaattcaggagcatctggataattcattaatgcttgttaccgcattagctccacacattggttatgataacgctgcgaaaattgcaaaaagcgctcttaaaaataggacaacattaaaacatgaaaccttgaaaacaggattaattaaagaaaaagattacaaaagaatagttaatcccaaaaaaatgatttatccagggtagc

SEQ ID NO: 281084 - DNA, 556 bp, Unknown
  Bacterial polypeptide expressing nucleotide sequence isolated from the Sargasso Sea
tatgaaaaacagaaaagaatatgacagtattggtggaattaatgtgcctgtggataagtattggggagcatctacacaaagatcaagcaaatattttgatataggtgattttttagttagaccaattgtaattaaatcaattgctataattaaaaaagctgcagcaatagtaaatgcaaaaaatggtgatctagatagaaaaataagtaaaacaattgttagagccgcaaatgaagttatttctggaaaattaataagtcattttcctctaaaagtctggcaaacaggatctggcacacaaacaaatatgaacgttaatgaagttattgcaaatagagcaatagaaattttaggtggaaaaaaaggatccaaaaaacctgtgcatccaaatgaccatgtgaataaatctcaatcaaccaatgatgtttttcctactgcaatgcatatggcaattgcaataaaagcaactggggaattaattccaagtctaaacttgcttaatttacaattaaagaaaaaatcaaaagaatttaaaaaaattttaaagtggaagaac

SEQ ID NO: 281085 - DNA, 1174 bp, Unknown
  Bacterial polypeptide expressing nucleotide sequence isolated from the Sargasso Sea
atgaaatacagaatagaattcgatagtattggaaaaataaaggtacctggtgataagtattggggggcatcaactgagagatcaaacaaatattttaatataggcgattttttagttagaccattagttatccaagcaatagcaatagtaaaaaaggctgcagctattgttaatactaaaaacaaagatttagaacctaaattaagtagatatataattaaagcttctgaggaagtaataagtggaaaacacgataaacattttcctttaaaagtatggcaaacaggatctggcactcaaactaatatgaatgtcaatgaagtaatcgccaatagagctatacaaatgatgggtgggaaaatggggaccaaaaaacctattcatcctaatgatcatgtaaacaaatcacaatcaactaacgatgtttttcccacagcaatgcatattgcgattgctttaaaagccagggaaaaattaataccttctttaaaacttttagaaaaagaattgttaaaaaaatctcaacaatttaacagaattgtaaaggttggaagaactcatttacaagacgcaactcctttgactttaggtcaagaattctctggctactatacgcagttaaaaaagtgcattgttagaattgaggctgcactaaaagagatttattatttagctcaaggtggaactgctgtgggaactggtttgaatacaaaaaaaaactttgataaaaaaatcattagggaaattagcaaaataacaaagcttcctttcaaaccatcatcaaataagtttgccgcattagcagctcacgatgaaatagtaaatttctctggaacgttaaacaccacagcagtttgtttaatgaagattgcaaatgatattagatttttagggtctggtcccagagccggttacggtgaactaatactaccatctaatgagccaggttcgtcaattatgccaggaaaagtaaacccaactcagtctgaggcagttacaatggtatgcgtaaaagttattggaaaccataatggaataacaatggcaggatctcacggacattttgaattaaacgtattcaagccgttaattatacataatattttgcaatctatcgaaataatgagtgactctgcaaaaacttttgctttgtattgtgttagaggtataaaag

SEQ ID NO: 281086 - DNA, 1363 bp, Unknown
  Bacterial polypeptide expressing nucleotide sequence isolated from the Sargasso Sea
attgaataaaaaagaaacaagaatagaaaaagactcaatgggtgaatttgaagtacctattgatgcaatgtacggagcttcaactgcaagagcaattgaaaactttccaatttcagatttaaaattctctagatcatttattagagcgctgggcgaaattaaaaaagcttgtgctgtagtaaatcaaaataaccaattattagataaaaaaattgcaactgcaattattgacggtgctcaggaagtaatatctggcaatcacgacaaagattttgcagtcgatatttttcagacaggatcaggtacttccacaaatatgaatgcaaacgaaattattgcaaaaatagcatctgataaaactggtgaatcaatacatccaaacgaccacgttaacatgagtcaatcatcaaatgatgttattccaaccgctacaaatgtagctgctgtaatagatgttactcaagggctcatccctgaattaagtaatcttatttcattactttatgaaaaggcaaaacagtgggagaaagtctataaaaacggaagaactcatttaatggatgctacacctgttagtttaggccaagaattttctggatatgctgaccttattaatgaaagaatgggggacattaaagcctctttagataatgttcagaaattagcaattggggggaccgctgtcggtactggaataaacgctcctgataattttggggccgatgttgcgaatgaacttcagtcatcaataggtataccttttaaagaagttgaaaatcatttcacaagacaaggatcaagagaagaagtggttcatttatcaagtgctttgaaggcacttgcagtatcgctctttaaaattgcaaatgatattagatggatgggtagtggaccagtgtctggattaggagatttgaaaatccctgctttgcaaccaggatcatcaataatgccaggaaaagtaaatcctgtaatacctgaaatgatgatgcaggtatcagctcaagttattggaaacgatacaaccattacgttttcatcagcgaatggcaactttgagctcaacacaatgcttcctgtaatggctcacaatctacttgaaagcgttgctttactcaccactggagtgagtgtgtttggggaaaaactaattaaagacttagaagcaaatactgaaaagctaaatgaagatactcaaaaaaactcaatcctagttacagcacttgtaccaaagcttgggtatgacgttgctgctgaagtagctaaagaagctatggaaaacggattaacaataaaagatgtattgcttagcaaggaattaatgtcagagggcgatattgatgatcttttggatatagagaag

SEQ ID NO: 281087 - DNA, 1402 bp, Unknown
  Bacterial polypeptide expressing nucleotide sequence isolated from the Sargasso Sea
atggctacaaaaaaaattagaattgaaaaagatagtttgggagaagtgaaagttcctaaagatgctttgtggggagcgcaaactcaaagagctgttaataactttcctataagcggaataaagatggattttccttttactaaatcttttgttagcactttaggcataattaaagatgctgcagctagagctaacttaagattaaagcttttgccagcaaaaaaagccaaagctatttccaaagcggccaaagaagtatggcaagagaaacaccacaaagaatttcctatagatgtttttcagacagggtctggtactagttcaaatatgaatgctaatgaggtgattgcaaatttagctagtaaatatgcaaagactccagttagtcctaacgacgatgtaaatatgagtcagagcagtaatgatgtaatacccactgctattaaagtaagtgctcatatggatcttacaaaaaaactttatcctgctttagataatttaataaatgaaattgagaagaaagctaaatcagtagaaggtcttgtcaagacaggaagaactcacctaatggatgctatgcctattgacctttcggatgaactaagggcttggacgagtcagctcggagcctcaagaaatatgttaggtattatagaacagaggttccttgagcttcctcagggcggaactgctgtaggtagtggtattaatgcccataaacaatttgcaaagtattttgcgcaagaaatgacaaaactttcaggtaataaatgtgttccaagtgagaatttttttcatgaactaagtgcccaggattgctcagtgcaattgtcaggggaattaaaaaacttagctgtaatattaatgaaaatttctaatgatttaagatggatgaatagtggaccattagcaggattttcggaaatagaactccaggctttgcagccaggcagcagtattatgcctggaaaagtaaatcctgttatacctgaagcagtaaccatggcttcagctgatgtaattggtaatgatgtgactattactatagctgctcaggcaggcaactttcaattgaatgtcatgttacccgtaatagcttataaccttttaaaaagtattaatttattagctggagcaatgaatgtactttcagctaagggggtcaaaacttttaaagtaaataagaagaatattgtggaatctttatccatgaatcctatattggttactgccttaaatcctattattggctatgaaaaagctgcagagatagctaaaaaagcttataaagaaggtagaccaataattgatgttgcagttgaagaaactgatttgtcggaatctagactgaaaaaactattagacccttcaaaattaactaaaggcggaataagtaagtaaa

SEQ ID NO: 281088 - DNA, 1330 bp, Unknown
  Bacterial polypeptide expressing nucleotide sequence isolated from the Sargasso Sea
ggggcccagacccagcgatccatcaacaacttcgccatcggtcatcagaagattcctgcggagctgattcatgccctggcacggatcaaacagtgctgcgcggcggtgaacggtcgccatggtctgttgaacgaccaacaggtggccttgatcgaaggggcgggccaggcgatccaaacaggccagcacgatcatcattttcctctgagtgtctggcagaccggcagcggcacgcagacgaacatgaacgtgaatgaggtgatcagcaacctcgctgctcagcactccggagagagcctcggctcacatcgtccactccatcccaacgaccacatcaaccggtcccagtccacaaatgacgttttcccggcagccatccatgtggctgcggctctgcagctgcagcaggagctgctgccagagctgaagcggctgatcgcgagtctcgatgccaaggccgatgcatggcaggacatcatcaagatcgggcggacccatctgcaggacgcagtgccgctgcgccttggcgatgaagtcagcgcctggcgcgaccgactcagcgacggcgtccattggctgaccacagcccatcaagatcttctggctctgccacttggaggcacagccgtcggcagtgggttgaacacaccggaccgatttgcccacgaggtttgtgctgaactcgccagccgaacgggatccaccttccagccggcgaagaacctgtttgccgtgatggcaggccatgacgcccttgtgcagagcatggctcagctgcgtcgcctggccgtgacgctgctcaccatcgccaatgacatccgcctgctggcctgcggccccagggctgggctgggggaactgctgttgccggccaatgaaccgggcagctcgatcatgccgggcaaggtgaatcccacccagtgcgaggcgatggccatggtctgcacccaggtgatcggcatggatgcagccgtggcggcggctggtgctggggggcatctgcagatgaacgtctacaagcccctgatcggcttcaacctgatcgaggggatccgtctgctgcaggacgcctgccgctgtttccggctgaatctggtgaccggaatggaagcagaccgtgaccggatcgcgttctacgtggagcgatccctgatgctggtgacggctctgacgccggagatcggctacgaaaaagcctgtgcgatcgcccagcacgcccaccgagacggactgacgcttcgggaggccgccatgcaatccggagcgatcacaggcgaacggtttgaccagttgatcgatccagccgcgatggcctcaccccaccgctgac

SEQ ID NO: 281089 - DNA, 1063 bp, Unknown
  Bacterial polypeptide expressing nucleotide sequence isolated from the Sargasso Sea
atgaaatttagaatagaagaagatagccttggaaaagtacgggtgccaagaaatgctctatggggtgcacaaactcaaagagcaatagataattttccaattagcggtatctcaatgaattttccttttacaaatacctttatttcaatgcttggttatgtaaaagacgctgcagcaagagcaaataaaaaccttaagctactagaggcaaaaaaacagagagtcatctcgagagctgccaaagaagtatggactaataagcatggcaaagagttccctattgatgtttttcaaactggctctgggacaagtacaaatatgaatgcaaatgaggttatagcaaacctttgctataaaacctccaaagttaagattcatcccaatgatgacgtgaatatgagtcaaagttctaatgatgtaattccaactgttatgaatttggcttattacttcgattcaacaaaaaaattaatgcctgcactagatttacttattgaaaccttggaaaagaaagctgactcagtaaagggagtaacaaaaacaggcagaactcatcttatggatgcaatgccggtggacatgtctgatgaattaaatgcttggaatacacaacttaaatgctccagagaatctatatcagttgttttagaaaaacttttattccttcctcaaggtggtactgctgttggatcgggaataaatgcgcataaaaggttttcaaaagaattttcaaaagagctttcaaagctaactggctttaaaacgaagccaagcaaagacttttatagaaacttaagtgctcaggatctctctgtccaactttcaggggagcttaaaaacttagctacagttcttttgaagatatcaaatgacttaagatggatgaatagtggacctttatctgggatctctgaaattgagcttcaggcacttcaacctggtagcagcataatgcccggaaaagtgaatccagtaatacctgaggcagtagcaatggccgcagcagatgttattggtaatgatgtttctataactgtggcagcgcaatctggtaactttcaac

SEQ ID NO: 281090 - DNA, 1393 bp, Unknown
  Bacterial polypeptide expressing nucleotide sequence isolated from the Sargasso Sea
atgaaatatagaacagaatttgattctataggaaaaattaaagtacctggtgataagtattggggtgcatctactcaaagatcaaataaatactttgatattggagattttcttgtaaggcccattttaattagatctattgcaatagttaaaaaagctgcagcgattgtgaatactaagaataaggatttggataaaaaattaagtaagtacatagttagagcatctgatgaaattattaaaggcaagctagacgagcacttccctcttaaagtatggcaaaccgggtccggtactcaaacaaatatgaatgttaatgaagtaataagtaaccgcgccatacagttgatgggtggcaagatgggaacaaaaaaacctgttcatccaaatgatcatgtaaataaatcacaatcgactaatgacgtatttcctactgcaatgcatatagccattgctctaaaaacaagaagtaaacttttgccatctcttaaattacttgaaaaagagttgggcaaaaaagtcaaacaatttaacaatattgtaaaattaggcagaactcatcttcaagatgcaacaccattaacgcttggacaagaattttcaggatatcattcgcaattaaaaaaatgtatcgagcgaattgaaaaatctttaggggaaatatattttctagcacaaggtggtactgcggttgggactggtttaaatacaaaaaaaggttttgacaaaaaagtagttagagaaataagtaaaataaccaaacttccctttaaacctacaaaaaataaatttgccgctttagcctcccacgatccaattgtaaatttttctggaacaatgaacactactgcagtgtgccttatgaaaattgcaaatgatataagatttctcggatcaggacctagagctggttacggagagcttgttttaccagagaatgagcctggatcgtcaattatgccgggcaaagttaatccgactcaatgcgaagcagttacaatggtttgtgtaaaagttattggtaatcataacggaataactatggcaggctctcatggacactttgaattaaatgtttttaagcctctaattattcataacatattacagtcaataaatattatggctgactcatctaaagcttttgcaaatttttgcataaagggattaaaagcagataaaaaaagaattgggtccttacttgaaaattccttaatgcttgtaacagctctttccccaaagttgggttatgataatgcagcaaaaattgcaaagagtgcacataaaaatggcacaagtcttaaagtagaagcattaaaaactggtctcattacagaaaaagacttcttaaaaattgtcaatccaaaaaaaatgacaagacctggtaagtaag

SEQ ID NO: 281091 - DNA, 421 bp, Unknown
  Bacterial polypeptide expressing nucleotide sequence isolated from the Sargasso Sea
aatgaaattaagaaaagaattcgatagcattggaagtgtcaatgttcctaatgataaattatggggagcatctacccaaagatcaaataaattttttaatattggcaaaattttagtaaatatttccataatcaaatctattgcaattattaaaagatctgcagcaatagttcatgaaaaagacgaattaattgataacaaaatttctaaagcaattgttagagcttcagatgaggtaattaaaggtaagttggatgataatttcccgctaaaagtctggcaaacaggttctgggacacaaacaaatatgaatgttaatgaagttattgctaatcgtgcgatagaaatgatgggtggaaaaaaaggatcaaagaaacctgttcatccaaatggatcatgtaaacaaatcacaatctacaaa

SEQ ID NO: 281092 - DNA, 892 bp, Unknown
  Bacterial polypeptide expressing nucleotide sequence isolated from the Sargasso Sea
atgaaattaagaaaagaattcgatagcattggaagtgtcaatgttcctaatgataaattatggggagcatctacccaaagatcaaataaattttttaatattggcaaaattttagtaaatatttccataatcaaatctattgcaattattaaaagatctgcagcaatagttcatgcaaaagacgaattaattgataacaaaatttctaaagcaattgttagagcttcagatgaggtaattaaaggtaagttggacgataattttccgttaaaagtctggcaaacaggttctggaacacaaacaaatatgaatgttaatgaagttattgctaatcgtgcgatagaaatgatgggtggaaaaaaaggatcaaagaaacctgttcatccaaatgatcatgtaaacaaatcacaatctacaaatgatgtttttccaactgcaatgcatatttctgttgcaaaagaaacgttaagtaaattgttgccgaacttaaagattttagaaaaagaattaaatagaaaatctaaagaattcaaaagtatagtaaaaattggacgtacacatcttcaagatgcaactcctctctctttaggtcaagaattttcaggatatcatactcaagtaaaaaaaagtatcgaaagaattgaatattcattaaaggaaattttttttcttgctcaaggtggaacggcagttggaacaggaataaattctaaaaaaaactttgataaaaaaatagttaaagagatcgcaaaatatacaaaaataaaatttaaacctgctccaaataaatttgctgaacttgcagcgcatgatgcgatagttaatttttctggaactttgaatacttgtgcagtcgctttaatgaaaatatctaatgatataagatttttag

SEQ ID NO: 281093 - DNA, 1105 bp, Unknown
  Bacterial polypeptide expressing nucleotide sequence isolated from the Sargasso Sea
tttcaaacaggttcaggtaccagttctaacatgaatgctaatgaagtaatagcaacattagccaccaaatacgcaaaagtaaaagtcggtccaaatgatgatgtaaatatgagtcaaagtagtaatgatgtaatacctacggcgataaaaattagcgctcatatggatcttactaaaaaattatttccgaaacttgacgagcttattaaaacaattgagaaaaaagctgaatcagtaaaagggactattaaaacaggaagaactcacttaatggatgcaatgcctattgattttgcagaagagttaatagcttggtcaagccaacttaaatcttcaaaagatatgttatgtatcattgagaagaaatttcttgagttaccacaaggaggaacagctgttggaagtggtattaatgctcataagcaatttgcgaaatattttgcacaagaaatgacaaagctcgctggtaataaatacaaatgcgtacctagtaaaaatttttatcatgaattaagtgctcaagattgttctgttcaattatctggagaacttaaaaatcttgctgtgatattaatgaaaatatctaatgatttaagatggatgaatagtgggccattagcaggtttatctgagattgaattaaaagcacttcagcccggcagcagcataatgcctggtaaggttaatcctgtaattcctgaagcagttgcaatggcatctgcagatgtaattggtaatgacgtttctataactgttgctgctcaatcaggaacttttcaacttaatgtaatgttacctgtcattgcttataaccttcttaaaagtattaaccttttatctggtgcaatggatgttttatcaaaaaaagctattaagacctttaaagtaaataacaaaaatttagaaaaatcattatcaaaaaatccaatattagttactgctttaaatcctataataggctatgaaaaagcagctgccatagctaaaaaagcatacaaagaaaacagacctataattgacgtagcagctgaagaaactgattttacaaaagcaaaacttataagattgcttgatccctcaaagctgtcaaaaggcggtatctaat

SEQ ID NO: 281094 - DNA, 1399 bp, Unknown
  Bacterial polypeptide expressing nucleotide sequence isolated from the Sargasso Sea
gatggactacagaattgaaaaagatacattaggagaagtaaaagttccaataaattcactttggggagctcagactgaaagatctagaaataattttaaaattggcaacccatcatcaatgccattagagattatccatgcttatgccattttaaaaaaatctgctgcacaaacaaattataatcttggtcaattatctaaagaaaaatgtaatctcattgaaagtgtttgtaatgagattcttgaagaaatgcataatgatcagtttcctctagtgatttggcaaactggttcaggtacccaaactaatatgaatattaatgaagttatttcaaatagagcacacattattgagggaaaagaacttgggaaatctgataaaacattatctccgaatgatgatgtaaacctttcccagtcatcaaatgacacatttcctacagcaattaatattgctgccatgaaacttattactgagaatacaattccaaacattaaaaaattaagagatagtttggaaaaaaaatcaaaagagtttaatgaaattgttaaaattggaagaactcatttaatggatgctacacctataactcttggtcaagaattttctggatatgtttcccaacttgatcatggtattaaatcattacaaaactctcttgatcatttaagtgaactacctattggaggaactgcggttggtaccaaactcaatacacctaaaggatattctaaaaatgttgtcgaaaatatctctaaaaattcagggctttcttttaaagagtccccaaataaatttgaaggaattgccagccatgattgtattgtaaaagtacatggtgcattgaaaaccctagcagcttctatttataaaatttcaaatgatattagattaatgggttcaggacctagatcaggtattggtgaactcattcttccagctaatgaacccgggagttcgataatgccaggtaaagtaaaccctactcagtgtgaagcaatctcaatggtatgtgctcaaatatttggaaatgatgttgctgttagttttgctggtgcaagtggacattttgagttaaatgtatttaaaccacttttcgcatgtaatataatagaatcttctaagatacttggagatgcgtctttgagttttgctctaaactgtattgacggtattgaacctaacaataaaagaattaaaaaatttcttgatgattcattgatgttagttacgtctcttaattcaaagataggctattacaaagctgcagatatagcaaataaagcatacaaagaggatattacattaaaagaagcagccttagcactaaattatttatcagaaaaggaatttgatgaatatgtcaatccaaatagaatgacaaataatgacagttga

SEQ ID NO: 281095 - DNA, 1180 bp, Unknown
  Bacterial polypeptide expressing nucleotide sequence isolated from the Sargasso Sea
catgagtcaaaaaacaagacaagaacaagacagtttaggcaagatcaaagttgccaacactaatctatggggagcgcaaactcaaaggtcattaaagaattttagaatcggcaataatataatgccaattgagataatacatgccctggcaatcattaagatgtcatgtgcaaaagccaaccaaaaacaaaagcttctaagtcctaaaatagctagtgcaattattgacgctgcaaaacaagtttctttaggaaagtacgacgaacatttccctctttctgtatggcagaccggttctggaactcaaacaaatatgaatgtcaacgaagttattgccaatatagcaaacaggaaaatatcgaaaaaacttggtaccaattcacctgtacatccaaatgatcatgttaataaaagtcaatcaaccaatgacagcttcccttcggctataaatattgcgtgtaaattgaaaattgtaagtgagcttgttcccgcattaaaaagtatggaaaaagttttaaaatcacaatctcagaaatggaaaagtattatcaagattggaagaactcatttgcaggatgcaactccactttcgctagggcaagaattttctggatatcaggcgcaaatcaattcaaatatacgaagagttgagggagctttaacgaatttaagttaccttgcgcaaggtggaaccgctgtaggtacaggattaaatacgaaacgtggttttgaccaacttgtggttacagaaataagtaaaataactaagtcaaaattcaaacctgccgcaaataaatttcaagcactggcatctcatgactcaatagtagaactatctggagtacttaatgtaattgccactgatttatttaaaattggaaatgatattcgacttttagcatcaggtcctcgctcaggtttaggtgagctcaacctgcctgagaatgaacctggatcatctatcatgccaggtaaagtaaatcctactcaaagtgaagccttaactatggtgtgtttgcaagtaatgggtttccataatgttatttcaatggcaggttcacaaggtcactttgagcttaatgcatttaaaccactcatcggcctaaatatcattaattcgattaatttattagcttcagccataaataattttaacgagaaatgccttaagggtattaag

SEQ ID NO: 281096 - DNA, 1387 bp, Unknown
  Bacterial polypeptide expressing nucleotide sequence isolated from the Sargasso Sea
atgaccaagaactttagatttgaaaaagatagtatgggacagattaaagttccttcaaaggctttgtggggagcccaaacgcaaagatcaattataaatttttctattggtgaggagttaatcccaattgaattaatttattcacttacggttataaaaagagcagctgcaatttctaatttcaaattgggtttaataaataatgtaaaaaaagatctcattattgaagcctgtacagaaatacttgatgggaaacacgattctcaattccctttaaaaatatggcaaacaggtagtggtacacaaacaaatatgaatatcaatgaagttatatctaatattgctgcgttaaaaacaaattcagaacttggaagtcatcatcctattcatccaaatgatgatgttaataaatcgcagtctacaaatgatacttttcctgccgctattcagatatctgtcgttactcaaataattaaaaaattagttccatcaataaaggaacttactaaggttcttgatagtaagagtaataaatggaaagatcttataaaaataggtagaactcattttcaagatgcagtgccaatttctcttggtcaagaagtttctgcatggtcaaaacaactaaaggacgctgaagatgctctgataattagtcttgatgagttatgtttcttaccactagggggtacggcagttggtacaggtattaattgcccaaaagatttttcaaaagaatctataaaatcaatttcagaatatactggtttgtttttttataaatcaaagaatcatttctctttaatggcatctcatgatcgattagcccaagtaatgggtcaaataaaaatcctagcaagtgcattatttaaggtttctaatgatattaaaatattgtcctcaggaccaagatctggcatttatgaattaataattcccaaaaatgaaccggggagctcaatcatgcctgggaaagttaatccaacccaatgtgaagcattatcaatggtatgcactcaagtaatgggttttgaatacgcagtatcaatagctaatgccagcggcactttacaaatgaatgaatataagccactaattggatttaatattctcacgagtataaaattactgaatcatgcgataagtaacttcagactaaaattagttgaagggatacaaccaaacccaaaaactataaaagctaatcttgaaaattcattaatgcttgtaacagcattggttcccaaaataggttatgaaaaagcagcagaaattgcgaatcttgcttttaatgaatcgatcaacttaaaagaagcaacaataaaattaggttacttaactgctaatgattttgaggatgctataaatactaataaaatgatttaat

SEQ ID NO: 281097 - DNA, 1355 bp, Unknown
  Bacterial polypeptide expressing nucleotide sequence isolated from the Sargasso Sea
aggtcaagttcccaaagatgcgctttatgctgcgcaaacccaacgcgcagtagacaattttccggtaagcggaatcccgatccgtcgtccgctgattacggcactcgggatgatcaagtcctcggcagccagggtcaatggagcttcgggagcgattcctgaagaagtggcggccttgatccagtctgcagcccaggaagtgatcgagggaaaacttgatgaacatttccccatcgacatctaccagacgggttcaggaacctcgagcaacatgaacgccaacgaggtgattgccaatcgggcgagtcagctttcagcggagaaaaacctgaaggttcatcccaatgaccatgtcaattgtggtcaaagctccaacgacaccttccctactgcgattcgtattgctgcggtgatggagactcaggcggatctgatcccggctctgaaggagttgatcaaggcattccaggataaagggtctgaatacgcccatgtggtcaaaaccgggagaacgcatctgatggatgcaatgccggtgaccctggagcaggaattcgggggatatgcccgtcagttggaactcgggattgagcggcttcaaagttcattggaacggatgcgggaactgccgatgggtggaacggcggtaggaacgggaatcaacacccctcccgaatttcctcctgcttttgcggaggaggtatccaagctgagcggagaatcgatgcgcgaggcagagaatcattttgaagcacaatccaccgtggatgcccctgtggaaatgagcggtcaattgaaaacgattgccgtcggtctgctcaaaatcgtcaatgacctgcgctggatgaattcgggtccgaatgcagggttgggagaaatccagcttgcagcgcttcagcccggttcttccatcatgcccggaaaagtgaatccggtgatcgaggaatccacggccatggtctgcgcccaggtgattggttacgattctgcgatcagtgtaggcggactgtcaggaaactttgaactgaatgtgatgttgccgatggtcgcccatagtctactggaatcgatcagattattggctgcggcatctaggaacctggctcaacgttcggtctcaaggatcattgtccgggaagaacacatccagtccctggttggacgtaacccgatactggtgaccaccctcaaccccttgatcggttatgacctggcggcaaagatcgccaaaaccgccttcgcagaaaaccggcctcttttggaagtcgcgaaagaaatttgcgatcttccggaagatgaactgaaaaaagccctggacccggcgaaaatgacccagggcggtctggtggaataaa

SEQ ID NO: 281098 - DNA, 1387 bp, Unknown
  Bacterial polypeptide expressing nucleotide sequence isolated from the Sargasso Sea
tatgaaatacagaattgaaaaagatagtcttggtgaaattaaagtgcccgcaaaagcattatggggagctcaaacacaacgagctgtgaataacttccctataagtggtattaagatggattttccttttacaaaatcatttgtatcttctctaggacttataaaagatgcagcagctaaggctaacttaagattaaagctaatttcttcaaaaaaatctaaggcgatttcaagggcatctaaagaagtttggcaagaaaaacatcatcaagaatttccaatagatgtatttcaaaccggatctggaacaagctcaaatatgaatgctaatgaagtaatagcaaatttggcaactaaatattcaaaaataaagatcagccctaatgacgatgtaaatatgagtcaaagtagcaatgatgtaataccaaccgctataaaaataagtgctcatatggatttatctaagaaattatttccagcgttagatgaattaattcaaacaattgacaataaggctgattcagtaaaaggagttataaaaacaggacgcactcacttaatggatgctatgccaatagatttttcagaagaattaaaagcttggtctagtcagttacagtcttcaaaagcaatgttaaatattattgaaaggaagttccttgaattacctcaaggtggaaccgcagttggaagtggaataaatgctcctaaacaattttctaaatattttgcccaagagatgacaaaacttttaggtaataaatgcatcccaagtaaaaatttctatcatgaattaagtgctcaagattgttcggttcaattatcaggtgaattaaagaatttagcagtaatacttacaaaaatatcaaatgatttaagatggatgaatagtggaccactagctggtttatcagagatagaacttaaggcattacaaccaggaagcagcataatgcctggaaaagtaaatccagttatttctgaagcagttattatggcctctgctgatgtaattggtaatgatgttactattactgtcgctgcccaatcagggaattcccagttaaatgttatgttgccagtgattgcatacaatttacttaagagtattaatcttctatcaggatcaatgaatgccttatcaaaaaaagcaatcaagacctttaaggtaaatgagaagaatttagaatcttcattatctagaaatccaattttagttactgcgcttaatccaattattggctatgaaaagtcagcacaaatagcaaaaaaagcttacaaagaaaatcgaccaataattgatgttgcatctgaagagaccaatatatcaaagtcaaaactgaaaaagttactagatccttcaaaactatcaaaaggtggaatttaa

SEQ ID NO: 281099 - DNA, 1141 bp, Unknown
  Bacterial polypeptide expressing nucleotide sequence isolated from the Sargasso Sea
aagcatcatcacgaattcccaatagatgtttttcaaactggttctggaactagttcaaatatgaatgctaatgaagtcattgcaaatctagcaagcaagaattctaaattagagataggacctaatgacgatgtaaatatgagtcaaagtagtaatgatgttatcccaaccgcgataaaagtttctgcccatatggatttaacccaaaaactttatccagcattagataaacttataagtgaaattgaaaataaagcagaatctgtaaaaggtattgtaaaaacaggcagaactcatttgatggatgctatgccagtagatttttctgatgaactaaaagcatggtcgagtcagttaaccgcttctagaaaaatgcttgaagtaatagaagaaaggtttttagaaatgcctcaaggaggtacagcagtcggaagtggtataaatgctcacaagcagtttgcgaaaatttttgcacaagagctcgctaaattgtccagaagtaattacaaatgcgtggccagttctaatttctttcacgaactcagcgcacaagatagctctgtccaactctcaggtgagttaaaaaatttagcagtcatcctcatgaaaatctctaatgatttaaggtggatgaatagtggaccattgacgggtttgtctgaaattgaattacaagcactacaacctgggagtagtatcatgccaggtaaggttaatccggtcataccggaggcagtgacaatggtctcagctgatgttatcggaaatgacgtctccattacggttgcagcccaagccggaaattttcaattaaatgtcatgttgccagttatagcctacaacttacttaagagtatcaatcttttatcaggagcgatggatgttctatcgaataaagccatcaaaacttttaaagtaaacaagaaaaaccttgaagcttctttatcaatgaaccctatccttgttactgcacttaacccaattattggttatgaaaaggctgcggcgatagctaagaaggcttacaagcttggtaggccaataattgaagttgcatatgaagaaacagatttaacagaggcccaacttaagaagttattaaatccctcaaaattaaccaaaggaggaataagtaaatagt

SEQ ID NO: 281100 - DNA, 1273 bp, Unknown
  Bacterial polypeptide expressing nucleotide sequence isolated from the Sargasso Sea
atttagaaaagaatttgacagtattggaagtgtaaatgtccctaatgataagtattggggcgcatctactcaaagatcaaacaaatattttaatataggtaaaattttagtaaatatttcaatcattaaatcaattgcaattatcaaaagatcagctgcaatagtgcatgccaaagataaattaattgatggcagaatttctaaagcaataatcaaagcatcagatgaagtaattaaaggtaaattagatgaaaattttcctttaaaagtttggcaaacaggttctgggacacaaacaaatatgaatgtaaatgaggttattgcaaacagagcaatagaaattttaggcggaaaaaaaggtacaaaaaagccagttcatccaaacgaccatgtaaacaaatcgcaatctacaaatgacgtttttccaactgcaatgcacatctctgttactaaagaaactatttctaaaatgctaccaagtttaaaaattttagaaaaggagctaaaaagaaaatccaacgaatttaaaaatatagtaaaaattggaagaactcatttacaagatgctactccattatctctcggacaggagttttctggataccatttccaagttaaaaaaagtattgaaagaattgaatatgctttaaaggaaatattgtttctcgctcaaggaggtactgcagttggtactggaataaattcaaagaaaaattttgacaaaaaaattgtaaaagaaattgctaagtttactaagatcaaatttaaaccagctccaaataaatttgcagaacttgctgctcatgattcaattgttaatttttctggtgctcttaatacctgtgctgtagctttaatgaaaatatctaatgatattcgtttcctaggttcaggcccaagggctggttatggagagttaattcttcctgaaaacgaaccagggtcctcaataatgccagggaaagtaaacccaacacaatgtgaagctgtaacaatggtttgtgtaaaagtaattggaaatcataatggaataacaatggcaggatctcacggccatttcgagctaaatgtatttaaacctttaattgctcataacatcttacaatcaatcgatttaattgccgacagcacaaaaaattttgctctttattgcgttaaaggaataaaggctaataaaaagaaaattcaagaacatttagataattctctgatgttggtaactgcactagctcctcatattggatatgataatgctgctaaaattgcaaagact

SEQ ID NO: 281101 - DNA, 1112 bp, Unknown
  Bacterial polypeptide expressing nucleotide sequence isolated from the Sargasso Sea
agtagtatggcaaactggctctggtactcagacaaatatgaatgctaatgaagtaattagtaattatataataaaaaaattaggagggaaaattggaagtaaagaacctattcatccaaatgatcatgtaaatttatctcaatcatcaaatgacacctttccaacaataatgcatgttgcaattaatgagttggtaaccaaaggcttaattccaaatctaaaaaatataataaaagaatttcaaaaaaaaacaaagatttttcaaaatataatcaaaataggaagaactcatacacaagatgcaactccaattactttaggtgacgaattctcagctttttgttctcaattaaacagttgtttaaaaagaatagaaatagcaaaatcagaattaaaatatcttgctcaaggtggaactgctgtaggttcaggtattaatgctccaaaaaaatttgataaagtattttgtaaatatttgaataaactaactaatgataattacaaaccttctctaaataaatttgaagcgttagcttctcatgatccattaattaatttttcaaattctttaaaaaccttatcaatttcattattaaaaataataaatgatattagatttttagcatctgggcctagatctggtttgggagagttaactttacctgctaatgaacctggatcatcaattatgcctggcaaggtaaatccaacacaaattgaagcattaagtatggtgtgtgttcaagtaattggcaatagtacaactgtagattttgcaggatccaatggtcattttcaattaaatgcttataaaccagttattgcttataacattattcagtcagtaaatcttcttagtgatgggattaaaagtttttgtaataattgcttaaagggattgaaagcaaataaggaaattattaataatcatttaaataattctttaatgcttgttactgctttaaacaaaagtattggatatgataatgcagcaaaaattgcaaaaaaagccttcaatgagaatttaacccttaaagaagctgccttaaaattaaaattaatttcagaaaaagattttaataaaatagttgatccaaagaaaatggtataac

SEQ ID NO: 281102 - DNA, 1111 bp, Unknown
  Bacterial polypeptide expressing nucleotide sequence isolated from the Sargasso Sea
aagagtttccagtcgatgtctttcaactggatctggaacaagtaccaatatgaatatgaatgaggttatatctcatctagcatcttcagaatcaaaccccattcatccaaatgatgatgtaaatatgggccaaagcagcaatgatgtcattccttcagcaatcaatgttgattcctctttatccgttaaaaatactcttattccatctatgaagcatctaaaaaatgcaattgatgaaaaagccaaatcaatcggcgacataccaaaaaatgggcgaacccatctcatggatgccatgccgttaactttttctcaggaaatgagtgcatggtctgctcaaattcaggatgccattgaacaatatgagcaatccatgactaaaatacagcaacttgcgatcggtgggactgcagttggcacaggaatcaatgcggatcctcatctttcagaaaagtgctgtaagcatatgaacaatctgacaggcatggaatttaaaccggcagataattcttttcaggcaatcagttcacaagatgcagctttgattttgtcttcttcaaataaaacattggctgttgcattgacaaaaattagcaatgatctgaggtggatgaatagcggacctcttggaggtttaggagagattactttgcctgcgcttcagcctggcagcagtatcatgcctggtaaagtcaatccagtaatccctgagtcggtttgcatggttgcaggaaaagtttttggtaatgatctgacgatcactcatgctgctcaatctagcaattttcaactcaatgtcatgctaccactggttgcccacagcttatctgagtctctatctttgctttctaatgcatgcttaagtctggctgacaaggcaattaaagattttgaagtgaatcaggataatatcgaatccatgttaagccgaaatccaatattagcaacagcgctcaatgccaccattggctatgagacaggtgctcaaatcgtaaaaaaagcttatcaggagaagagatcgattatagaggtcgccactgaaatgactgatttagattccaaaactcttgcagagttgctcgatccagtcaaactcactaggaatcaataa

SEQ ID NO: 281103 - DNA, 1130 bp, Unknown
  Bacterial polypeptide expressing nucleotide sequence isolated from the Sargasso Sea
aagaatagaatttgatagcattggatccaaaaaaattgataaaaataagctttggggagcacaaacacaaagatctttagagaactttaaaattggtagagaaaaaataccgactgagttaatagtagcattaggtcaacaaaagaaagcagccgcacaagcaaatatagaacttggtgttttaaataagaagttaggatccttaattataagcgcttgtaatgatataattaatttaaaacttattgaagaatttccattagttgtatggcaaactggatctggaacccaaacaaatatgaatgcaaacgaagtaattagtaattatattattaaaaaattagaaggaaaaattggaagtaaggatccgatccatccaaatgaccatgtaaatttatcacaatcctcaaatgatacttttccaacaattatgcatgtagcaataaatgaattatcaattaaaaatttagttcctagtctaaaaaacttaataaaagaatttcagaataaaacgagagtatttcaaggaataataaaaataggaagaactcatacccaagatgcaacacctattactttaggtgatgaattttctgcattttactcacaattacaagcctgtttaaaaagaattcaaatttcacaatcagaattaaaatttattgctcaaggaggtacagcagtaggatctggaattaacgcaccaaataaatttgataaagtattctgtaaatatttgaataaacttactaatgataactacaaaccttcacaaaataaatttaaagctttatcatctcatgactcattggtaaatttttcaaattccttaaaaattttatcaatatcattattaaaaattataaatgatattcgttttttagcatctggaccaagatcgggtttaggagaactaattttacctgctaatgaacctggatcatcaattatgcctggaaaagtaaaccctactcaaattgaagctttaagcatggtatgtgttcaagtgatagggaatagtacaactgtagatcttgctggttcaaatggtcattttcaacttaatacatataaaccagttatagcaaaaaacattattcagtcagtaaatcttctaagtgatgggatta

SEQ ID NO: 281104 - DNA, 688 bp, Unknown
  Bacterial polypeptide expressing nucleotide sequence isolated from the Sargasso Sea
cttttgaaggctattgctgaggctacagcaaatgaaatttcatctattactgatttaccatttaaaacagcgcagaataaatttgaagcgcttggtggccaggattgcattgttgacctttctggagcactaaaaactgtgtcaggttctttatttaaaattgcaaatgatatacgttggttagcaagtgggccaagatccggtataggcgaaatattgattccatcaaatgaacctgggtcatcgattatgccaggaaaagtcaatcctacacaatgtgaagcaatgacaatggtttgtgcacaagttatgggaaatgatactacaattatggtttctggagccagtggtaattttgagcttaatgtatataggcccgttattgcctacaatattttacaatctatacgaatactaagtgatgcgataaattcatttaggacaaattgtgttgatggaattgaagcaaacgaagaaaagattaatactaacctttataattctcttatgctaataactgctttaaactctcatatcggatatgataaagctgctgaagttgccaaaaaagcatatgaggataattcatcactgaaggaagccataattgaattgggatatatgagtggtgaagattttgacaaattcgtgaaacctgaagaaatggttaaaccatccaaaaaataat

SEQ ID NO: 281105 - DNA, 1042 bp, Unknown
  Bacterial polypeptide expressing nucleotide sequence isolated from the Sargasso Sea
ttaaaaggaaaaaagggtacaaaaaaacctgtgcatccaaatgaccatgttaataaatcacaatcaacaaatgatgtatttcctactgctatgcatatagcaattgctctggaaacaagaaaaaaattgataccgtctttagatatcttaaacaaagagctaaaaaaaaaagtaattaaatttaaaaatatagttaaagttggtagaacacatcttcaagatgctacgccaattacccttgggcaagagttttctggataccaatcacaactagaaagttgcattaaaaggatcaaaaatgctttagatgaaatatattttttagcacaaggtggaactgctgtgggaacaggaataaatacaaaaaaaaattttgataaacaaattataaaagaaataagaaaattttgtaaaattccttttaaacctacaaaaaataaatttgccgctttggcagctcacgatgcaatagtcaatttttctggaactttaaataccgcagccgtttgtttaatgaagattgcaaatgatattagatttttaggatctggtcctagagcgggatatggagaactaattttaccaagtaatgagcccggttcatctattatgccaggaaaagttaatcctacacaatcggaagcagtcacaatggtgtgtgtaaaagtaattggaaatcacaacggtattacaatggctggctctcatggtcattttgaattaaatgtttttaaacctttaattgctcataacatactgcagtctattgatctattatcggatagttcaaaaaattttgcagtttattgtattagaggaataaaggctgataaaaataaaataaaagattatttagaaaattcattgatgcttgtaactgctcttgctcctcatataggatatgataatgctgctaaaattgccaaaaacgctttaaagaacaacacaaaattaaaatatgaagctttaaaaactggactaataaatggaaaagaatacgacaaaattgtaaatcctattaaaatgaccagtccaaattaaa

SEQ ID NO: 281106 - DNA, 1201 bp, Unknown
  Bacterial polypeptide expressing nucleotide sequence isolated from the Sargasso Sea
attgatggtagaatttctagagcaataatcaaagcatcagacgaggtaattaaaggtaaattagataaaaactttcctttaaaagtctggcaaacaggttctggtacacagacaaatatgaatgtgaatgaagttatcgctaatagagcaatagaaattttaggtgggaaaaaaggaaccaaaaaacctgttcacccaaatgatcatgtaaataaatcacaatctacaaatgatgtatttccaagtgcaatgcatatctctgtagctaaagaaactatttctaaaatgctgccaagcttaaaaattttagaaaaagaacttaaaagaaaatctaatcaatttaaaaatatagttaaaattggaagaactcatttgcaagatgccactccactatctcttggacaggagttttcaggatatcattttcaagttaaaaaaagtattgaaaggatagaatatgcactaaaagaaatattgtttctcgctcaaggtggtactgctgttggtactggaataaattcaaagaaatattttgataaaaaaattgtgaaagaaattgctaaaatcactaaaatcaaatttaaaccagctccaaataaatttgctgaacttgctgctcatgatgcaattgttaatttttctggtgctcttaacacctgtgcagtagctttaatgaaaatatctaatgatattcgtttcttaggttctggtccaagagctgggtatggagaattaatcttacctgaaaatgaaccaggatcatctataatgcctgggaaagttaatccaacacaatgtgaagctataacaatggtgtgtgtaaaagttattggtaaccataatggtataactatggcgggatctcatggtcattttgagctaaatgtttttaaaccattaatagctcacaacatcttacaatcaatcgacttgattgctgacagcacaaaaaattttgccctatattgtgtaaaaggaataaaagctaataaaaagaaaattcaagagcacctagataattcactaatgcttgtaactgcactagctccacatattggatatgataatgctgcaaaaattgcaaaaactgcacttaaaaataatacaactttaaagcatgaaactttaaagacaggactaataaccaaaaaagactacaataaaattgttgatcctaaaaagatgatttacccagcatagc

SEQ ID NO: 281107 - DNA, 503 bp, Unknown
  Bacterial polypeptide expressing nucleotide sequence isolated from the Sargasso Sea
tcttggttctggtccaagagctggttatggtgaactcatattgccagaaaatgaacctggatcttcaatcatgcctggcaaagttaatcctactcaatgcgaagctgtaaccatggtttgtgttaaagtaattggaaatcatactggaatatcaatagctggtactcatggtcactttgagttaaatgtgtttaaacctttaattgctcataatatattacaatcaattgatatattggctgatagtgtaaaaaattttagtcagtattgcgtaaaaggaattaaagcaaataaattaaaaattaaagatcacttggataattcattaatgttagtaacagctttggcaccaaaaataggatatgacaatgctgcaaaaattgccaaaaaagcattgaagaataatacaaggttaaaagatgaagctttaaaaaccggcctaataaaagaaaaagaatacgataaaattgtcaatccaattaagatgattggtccaaattaag

SEQ ID NO: 281108 - DNA, 763 bp, Unknown
  Bacterial polypeptide expressing nucleotide sequence isolated from the Sargasso Sea
ttaaagaatgctgagaatgcaattattatgagtctgaatgaattgtatttcttacctctgggaggaactgcggttggtacagggattaattgtccaaaaggattttgtgaagagtctataaaatcaatttccgatgatactaatctaatgttctataaatcaaaaaataatttttctatcatggcctcgcatgatcgtcttgctcaagtaatgagtcagataaaaatattagcaggtgcattatttaaaatttcaaatgatataaaaattctatcttctggtccaagatcaggaatatatgaactaattattcctcaaaatgaacctggaagttctattatgccgggtaaagtgaatccaactcaatgcgaagccttatcaatggtttgtactcagataatgggtcttgaatatgcagtctcaatggcaaattctagcggcactttacagatgaatgaatataagcctcttattggatttaatattctcacaagtttaaaattacttaaaaatgtaatagaaaacttcagaataaaattagttgatgggatggaacctaatcaaaagagaatgaagttaaatttagaaaattcactaatgttggttacagccatagtgccaaaagttggttatgaaaaagcagctgaaattgcaaaccttgccttcaaagaatcattaaatttaaaagaggcaacaattaaattaggttatttaaacgaagatgaatttgatgaagcaatgaatatcaattcaatgatttgat

SEQ ID NO: 281109 - DNA, 1015 bp, Unknown
  Bacterial polypeptide expressing nucleotide sequence isolated from the Sargasso Sea
accagttcatccaaatgaccatgtaaataaatctcaatcaactaacgatgtttttcctactgcaatgcatatggcaatagcaataacagcaactgaaaaattaattccaagtctaaacttgcttaatctacaattaaagaaaaaatcaaaagaatttaaaaaaattgttaaagttggtagaactcatttacaagatgctacacctttaactttaggtcaagaattttctggttatcatttccaattaacaaaatgtattgaaagaataaaaaatgcgcttcaagagatatattttttagcacaaggaggtactgctgtgggaaccggtctaaacactaggaaaggttttgacaaaaaaatagtatctgagataaaaaaaattacaaaacttccttttaaaccctctccaaacaaatttgcttcattagcagctcacgatgcaatagttaatttttctggaacaatgaatacaactgcagtttgtttgatgaaaattgcaaatgatatccgattcctaggatcaggacctagagctggatacggagaacttattttgccagaaaatgaaccaggttcttctattatgcctggaaaagttaatccaactcaatgtgaagctgtaactatggtatgtgtgaaagtaattggaaaccacaatggaataacgatggcagggtctcacggtcatttcgaattaaatgtttttaaaccattaattattcataatattttgcaatcaattcatataatgtcagactcagcaaggagctttgggaaatattgtgtttcagggctaaaggctgacaaaaaaagaattaaagaattattagataattcactaatgttagtaacagcgttagctccacatgttggatacgataacgcagcaaaaattgcaaaaagagcattaaagaataaaacaacattaaaaaaagaagctttaaaatccggattaatcagtgaaaaagattacaatagaatagtggatccaaaaaaaatgactagtccagcttaa

SEQ ID NO: 281110 - DNA, 1237 bp, Unknown
  Bacterial polypeptide expressing nucleotide sequence isolated from the Sargasso Sea
tatgtaaaagatgcttcagcaagagcaaataaaaatttgaagctattagaagcaaaaaaacaaaaagtcatttcaagagctgcaaaagaggtttggaataataaacatggaaaagagtttccaattgatgtttttcaaactgggtctggaacaagtacaaacatgaatgcaaatgaggtaatagcaaatctttgctacaaaacctccaaagttaagattcatccaaatgatgatgtaaatatgagccaaagctctaatgatgtaattccaactgtcatgaatctggcctattacttcgactcaacaaagaaattaatgccagcattaaatttactcattgacactttagagaaaaaagctgaatcagtgaagggaactacaaagactggcagaacacatcttatggatgccatgccagttgatatgtctgatgaattaaatgcttggaatactcaacttaaatgctctagagaatcaatggcagttgttctagagaagcttttatttcttcctcagggaggaactgcagttggatcaggaataaatgcacacagaagattttcaaaagaatttgctaaggaactttcaaaactcactggatttaaaactaagccaagcaaagatttttttagaaacttaagtgcacaagatttatctgtccagctatctggagaacttaaaaatttagctacaatccttttaaaaatatctaatgatctaagatggatgaatagtggacccttatcaggaatctctgaaattgagcttcaggctcttcaaccgggaagcagcataatgcctggaaaagtaaatcctgtaattcctgaggctgtagcaatggccgcagcagatgttattggtaatgatgtttctataacagttgcagctcaatcgggaaacttccaacttaatgtgatgttaccagtaattgcttattgcaacttgaaaagtataaatatacttgctggtagtatgaatgttcttgctaaaaaagctataaagaccttcaaggtaaatcataaaaagattgaagaatcactttcaagaaatccaatcttggtcactgctttgaatccggtcattggttatcagaaggcagcagaaatagctaaaagagcttataaagaatctagacctgttattgatgtagctcacgaagaaacaggcatttcagtttctcggcttaaaaaactcttagatccttcaaaattaacgaagggtggtattaagtcataat

SEQ ID NO: 281111 - DNA, 1306 bp, Unknown
  Bacterial polypeptide expressing nucleotide sequence isolated from the Sargasso Sea
cttgcccaaaagttttcataaatttcttaacactttcaaaattactcattttaatttcctctcctttacattttataattatctaataaaggtgtattatatcaaagaatcaaagatgaaatacagaacagaattcgatagtattggaaaaataaaagttcctggtgataagtattggggagcctcaactgaaagatcaaataaatatttcaatattggagactttttagtaaggcctttagttatccactcgattgcaataataaagaaagcagcagctatagttaatgcaaaaaataaagatctagatcacagaattagtaaatacatcatcagggcttcagacgaagtgttaaaaggtaaacatgataaacattttcctttaaaagtctggcaaacagggtccggtacacaaacgaacatgaatgttaacgaggtgattgctaatagagcaatacaattaatgggcggaaaaatgggaactaaaaaacctatacatcctaacgatcacgtaaataaatctcaatcgactaatgatgtatttccgaccgcaatgcatattgccatagctttaaaatcaagagagaagttattaccttcattaaagcttttagaaaaggaattacacaagaaatcaaaggaattcagtaaaattgtaaaagttggaagaactcatttgcaagatgctacgccactgactttaggacaagaattctcaggctatcatgctcaattgagaaaatgtattttcaggattgaagctgctcttaaagaaatttactttttagcccaaggtggaactgctgtgggcactggtttgaatactaaaaaaaattttgataaaaagataattaaagagataagtaaaattacaaaacttccatttaaaccctcaacgaataagttcgctgcgctagccgctcatgatgaaattgtaaatttttcgggaacattaaatactactgctgtatgtttaatgaagattgcaaatgatataagatttttaggatcgggtccgagggctggatacggcgaacttatactgccatcaaacgaacctggttcatcaattatgcctggtaaaataaatcccacgcaatctgaggcagtaacgatggtatgtgttaaagttattggaaatcataatggaataacaatggctggttctcatggacattttgaattaaatgtattcaaacctttaattatacataatattttgcaatcaatagaaattatgagtgactcagcaaaaacatttgctttgtattgtgtcaaaggaattaaagcagataaaaaacgaata

SEQ ID NO: 281112 - DNA, 359 bp, Unknown
  Bacterial polypeptide expressing nucleotide sequence isolated from the Sargasso Sea
gctggatctggttctcctggttgcaccaacaacccccgctgatcggatggtgcgaattggtcaacgcagcaggggtttcacttatctggtgagcgtgaccggtgtcaccggggaacgtgcccagatggaaaccagggtggaggggcttgttgaggagctgaagcaatcctcggcagttccagtggctgtgggtttcggtatctctggagctgatcaggtgcgccaggtgcgcagctggggggcagacggcgccatcgtcggcagcgcgctggtcaagcggatggcggcggccggtgaaggccaaattgctgaggaagccgggcgattctgcagagagctccgcaacgcagctgactaac

SEQ ID NO: 281113 - DNA, 147 bp, Unknown
  Bacterial polypeptide expressing nucleotide sequence isolated from the Sargasso Sea
aatgaaagataacttaccagataaagatggattcttcggtgaatatggtggcaagtttgttccagaaactcttatgtatgccctcaatgaactagagcatacttataaaactcttaaagataacaatgattttaatgcggagtttca

SEQ ID NO: 281114 - DNA, 343 bp, Unknown
  Bacterial polypeptide expressing nucleotide sequence isolated from the Sargasso Sea
tgttaatcaaaattcagagggtcaaatagaagaaactgagtcaatctcagctgggcttgattatccaggaatttctcctcttcattgctttttaaaagatactaaaagagcaagatacacagctgcaagtgatgaagaggcattagaagcttttaaacttgtaacaaaatttgaaaaattgagaccttcacttgaaccaagtcatgctttctcagttgcaataaaagagtcaaaaaaattaagtaaagatacaatcatagtagttaatagttgtggagacgcatacaaagaccggagcattttgcaggaaagattaggaaaaaaatatgttaaatccaattag

SEQ ID NO: 281115 - DNA, 892 bp, Unknown
  Bacterial polypeptide expressing nucleotide sequence isolated from the Sargasso Sea
gcaggtaaaaaatatattgttggagatacaggagctgggtatgcaggaaaaatgctttctatggcagctaaaaaatttggccttaaatgtaaaatatttatgggtgctaaagacattaaaagacagaggcctaacgtggaagcaatgagaaaaaatggagcagaaatagttcctgtcacgtctggaagccaaactctggtggatgctgttagcgaatgcatgagatactgggtttcgaattgtgacactacacatatgtgcgttggttcaacagtaggtccaaacatatttattaaaatttgtgcttggagtactgcccaaatttcaagggaattgattaaacaagtgaaagatgaatttggaaagatacctgacaaattaaaattgattaactgtgttggaggtggaagttctgcagcaggtttctggaatgaatttatggatactaaagctcaatttattggggtagaagctggaggaccaaaaaatagcaaacttcacgcagcccctttaactaatggttcaaaaattggaattctccatggggctgcgcaatatgtgatacaagataaagaaggtcagataggctccactgagtcaatttcggctggacttgattaccctggtatttctcctttgcattgttttcttaaagatactaagcgagcgaggtacacttctgcaagtgatgaggatgcgcttaatgcatttcaattagtctctaaacttgaaaatttatcaccatctttagagccatcacatgcttttgcggaagcaatacgaattgctccaaaattaaaatcttctgaagtaattatagtaaattcttgtggtgatagtttaaaagataaagatattattaagcaaaaattgggttcttatataagatgaa

SEQ ID NO: 281116 - DNA, 832 bp, Unknown
  Bacterial polypeptide expressing nucleotide sequence isolated from the Sargasso Sea
gctgcaaaaaagtttgggcttgaaatgtaaaatatttatgggtgctaaagatattaaaagacaaaaaccaaactgcgatgcaatgaaaaaaaatggggctgagattgtccctgtttattctggcagccagaccttagtagatgccgtaagtgaatgtatgagatactgggtatcaaactgtgataatactcacatgtgtgttggtagtacagtaggaccaaatatatttgttaaaatatgtgggtggagtactgcccaaatatccagagaattaaaggtacaattaaaatctgaatttaaaaaaattccaaaaaaaattaaattaataaattgtgtaggtggtggaagttcggcttatggcttctggagtgaatttatagattttaacaaaaaacaaattgagctgattggagttgaagcaggtgggcctaaaaaatcaaaacttcatgcagctccattaagccaaaatgcaaaaattggagttttacatggtgctgcttcttatgtttgccaagataatgaaggtcaaataaatgaaacggagtctataagtgctggattagattatccaggggtaagtcctattcattgtttcttaaaagacactaaaagagcaagatacacttatgcaactgatgaggaggctttgaatgcacacgttatggtaaccaaatttgaaaaccttaatccaagtttagaacctagtcatgcatttgctgaagcaattaaaattgctcctaaactaagtaaagatacaattataattgtaaattcttgtggggacgccatgaaagatagggatattttaaaagaaagattgggtaagaattaa

SEQ ID NO: 281117 - DNA, 940 bp, Unknown
  Bacterial polypeptide expressing nucleotide sequence isolated from the Sargasso Sea
cccagataaattaggttattggactaataaaaaaactggtgaaacatatggagggcagtacataagtcctcttttaattcctaatcttaaaaaagttgagacaggatttaaaaaagcaatgaaaaacaagaaattcctagctgaccttgaagaacagcttgttaatcatattggtattgtgacaccaattctgagaagtaaagaacttgaggaaatagctggaggagaaaaaaaaataggaaaaatttttcttaaaagaactgatcttcatcatgacagttctcataaacctgtaagtgcttttagttcagttttttttgctaaacatattctcaaagctaagaaaataattactgaaaccggagcctctatgaacgctagagctgttgcctcagcatgtgcaaaactaaatctttcttgtgaagtacacatcggtgcacttgatgcggaaaaggtttccttaaataaagatataactgaactttacggtgcagatataaaagtatgtcacgattctacaaagtcgcttttgccagcgatggccgcagctcttcgtagttggcaaggtgatcctaccgcaatgtacgttgtaggatctgtatgtgggcctcacccatatccattaatggttagaacttttgcgagtataattggtagaattgcaaaaaaacaaatgaaagatctaataggtaaatcaccttcaactgtatttgcagtatgtggaggaggatcaaatttatcagcaataagctatcctttttataatgagaaaagtgttgatatttttggaatagagtcggctggaaagggaattgcatcaggagctcacgcagcaacaataacaagtaaagctcctattgggattttattaggtgcacgaacaaacgttttaatggatgcagacggccaagtagacccttctgaaacagaggccagcggg

SEQ ID NO: 281118 - DNA, 899 bp, Unknown
  Bacterial polypeptide expressing nucleotide sequence isolated from the Sargasso Sea
acaaagcaacccgcaggacctgatgattttgcaccattatttccaatgggattgattctccaagaagtttcaactgaaagagaaattgaaatacctgaacctgtaagagaaatttacaaacaatggagaccttcacccttatatagagcaagaagattagaaaagtttttagatactcctgctaaaatttattataaatatgaaggagtaagtccaacaggtagtcataaaccaaatactgctgtacctcaggctttttttaataaagaagaaggtgttaaaaaaatatttactgagactggagctggacaatggggcagttctttggcatttgctggacaaatgtttggaatagatattgaagtttttatggttaaaatcagttttgaccaaaaaccttatagaaaactaatgatgcagtcatttggagctaaatgtaatccaagtccatcatctttaactgattttggaaaaaaattattagaagaaaatcctgataatccaggaagtttaggtatagctatttctgatgctattgaagcagttgttaaaagtgaaggtaaggctaagtattctttaggaagtgttctaggacatgttttaatgcatcaaacaattaatggtaatgaagctatattacaaatggaacaagctggtgattatccagatattattgttggatgtactggaggaggtagtaacttatcaggtttaatgttcccatttttaggccagcaattacgaggtggtaaaaaaattgatataattggatgtgaacctttatcttgtccttcttttactaaaggtaaatacgcatatgatcatggtgacatggctaaaatgacaccacttataaaaatgcatacactaggatcagactttttacctccagctaacca

SEQ ID NO: 281119 - DNA, 685 bp, Unknown
  Bacterial polypeptide expressing nucleotide sequence isolated from the Sargasso Sea
atgtcagatactattaaatattttcttgaagaaagcaaaatgcctaagacttggtataatattgctgcagatttacccaaacctatggaacctccactgcatccaggtactttaaaaccaattggaccagatgatctggctcctctgtttccaatggctttgataggacaagaggtttctcaagatagagaaatagaaataccagagcctgtacgagaaatttataaaaaatggagaccatcaccattatatagagctagagcattagaaaaacatttagatacaccagcaaaaatttattataagtacgaaggagtaagtccatctggaagtcacaaaccaaatacagcagtcgctcaagcattttataataaagaagaaggaacgaaaaaaataactacggaaacaggcgcaggacaatggggaacttctctagcatttgcatgtaaattgtttggaattgaattagatgtttacatggttaaagttagttttgaacaaaaaccatatcgaaaacttgtaatgcaaacttatggtgcaagatgtgtagctagtccatctaatgaaacagatagtggtaaagcaattttagcaaaagatccaaacaatacaggaagtttaggtatagcaatctcagaagcagtagaaatggctgcaaaaaatccagatacaaaatatgcattag

SEQ ID NO: 281120 - DNA, 886 bp, Unknown
  Bacterial polypeptide expressing nucleotide sequence isolated from the Sargasso Sea
tgatactggagctggctacgcaggaaagatgttaagcatggcagctaagaaatttggattaaagtgtaaaatttttatgggtgccaaggatataaaaagacaacaaccaaatgttaaagcaatgaagaaaaatgatgctgaggtaatacctgtatactcaggaagtcaaacacttgtggatgctgtttctgaatgtatgagattttgggttgcaaattgtgatacaactgcgatgtgtgtaggaagtactgtaggacctgcaatttttgttcgaatatgtggttggagtactagtcaaatatctagagagcttaaggttcaattagtaaatgaatttggtgaagttcctaaaaaacttaaattgtataattgtgtaggaggaggttcctcaagttttggtttttggaatgaatttatggattataataaaaaacaagttgagtttattggggttgaagcaggaggtccaagtaaaagtaaaaggcatgcagctcccttaacatatggttctaaaatcggcatacttcatggtgcagctcaatatgttaatcaaaatagtgatggtcagattgaagaaactgagtcaatatctgcaggtctagattatcctggaatttctccactccattgctttttaaaagatacgaaacgtgcaaggtatacagcagctagtgatgaagaagctttgaaagcttaccaaatagtgaccaaatatgaagatttaagaccatctctcgaacctagtcatgcattctcggttgcaatcaaagaagcaaaaaaattgagtaaggatacaatagtaattattaatagttgtggagatgcatacaaagaccgtggaattttagaaaaaaagttaggaaagaaatatgttaaatccaattag

SEQ ID NO: 281121 - DNA, 946 bp, Unknown
  Bacterial polypeptide expressing nucleotide sequence isolated from the Sargasso Sea
cctgaaactctcaaaaaacctattgatgatcttgctaaattgtttgcaaagttacggaaagacaaaaaatttttaaaagaaagagatcattattttaactcatatatcggtgctccaactccatttataaaattagaaaatttaacaaactatctagggggagctcaaatatatgcaaaggttgtgtctgaagcaaatggtggtgcacataaaatatataatgcaacagtacactgtctaattgcaaaaagagcgggaaaaaaatttattgtgggagatactggagctggctatgcaggaaagatgttgtcaatggcagctaaaaaatttggtcttaaatgcaaaatattcatgggtgcaaaagatataaaaagacaaagacccaatgttgaggctatgaaaaaaaatggcgctacaatagtgcctgtcaaaacaggtagtcaaacattagtagatgctgtgagtgaatgcatgagatactgggtttcaaactgtgatactacacatatgtgtgtaggttcaactgtcggaccaaatatttttattaagatatgtgcatggagcactgcacagatttctagagaactattattacaagtaaaggaagaatttggaaaaattccaaaaaaaattaaacttctaaattgtgttggcggtggaagttctgctatgggtttttggaatgagtttatggatactgacgctgaatttattggtattgaagcaggaggtccgaaaaatagcaatctacatgcagctccactatctaatggatcaaaaataggaattttgcatggtgccgctcaatatgtagttcaagacaaagaaagtcaaataggtttgactgaatctatttctgctggtttagattatcctggtatttcacctttacattgttttttaaaagactctaaaagagcaagatatacttctgcaggtgacgagg

SEQ ID NO: 281122 - DNA, 932 bp, Unknown
  Bacterial polypeptide expressing nucleotide sequence isolated from the Sargasso Sea
aatttataatgctactgttcactgtttaatagctaaaaaggctggtaagaaatacgtcgttggtgatacaggggcgggttacgcaggaaaaatgttatcaatggctgcaaagaaatttggtttaaaatgtaaaatttttatgggcgctaaagacatcaaaagacaaagacctaatgttgaagctataagaaaaaatggggcaacaatagtgcctgtaaccactggaagtcaaacattggtggatgcggtgagtgaatgcatgagatattgggtttctaattgtgatactactcatatgtgtgttggttcaacagttggtcctaatatatttataaagatttgcgcttggagcactgctcagatttctagagagttaattaaacaagttaatgaggaatttggaaaaattccaaaaaatctaaaattaattaattgtgttggtggaggaagttctgcagcaggtttttggaatgaatttatggatacacatgctgagttcattggtgttgaagcaggtggaccaaaaaatagtaagctacatgcagcacctttaactaatggatctaaaattggaattcttcatggagctgctcaatacgttattcaagataaagaagggcagataggttcaactgagtcaatttcagctggactagattatcctggaatatctccattacattgtttccttaaagacacaaaaagagcaaagtacacttctgcaagtgatgaagatgcacttaaagcttatcaattagtatctaaacttgaaaatatttctccatccctagaaccgtctcatgcgtttgcagaagcaatacgaattgctccaaaattaaaatcttcagaagtaattatagtcaattcatgtggtgatagtcttaaagataaggatataatcaaacatagactgggttcttacacaagatgaa

SEQ ID NO: 281123 - DNA, 773 bp, Unknown
  Bacterial polypeptide expressing nucleotide sequence isolated from the Sargasso Sea
acaaaaaccaaactgtgatgcaatgaaaaaaaatggggctgagattgtccctgtttattctggcagccagactttggtagatgccgtaagtgaatgcatgagatactgggtatcaaactgtgataatactcacatgtgtgttggtagtacagtaggaccaaatatatttgttaaaatatgtgggtggagcaccgcccaaatatctagagaattaaaagtacaattaaaatctgaatttagaaaaattccaaagaaaattaaattaatcaattgtgtaggtggtggaagttcggcttatggcttctggagtgaatttattgattttgacaaaaaacaaattgagctggttggagttgaggcgggtgggcctaaaaaatcaaaacttcatgctgctccattaagcagaaatgcaaaaattggagttttacatggtgctgcttcttatgtttgccaaaataatgagggtcaaataaatgaaacagaatctataagtgctggattagattacccaggagtaagtcctattcattgtttcttaaaagatactaaaagagcaagatatacttttgcaactgatgaagaagctttaaatgcacacgtgatggtaaccaagtttgaaaacttaaatccaagtttagagcctagccatgcattcgctgaagcaattaaaattgctcccaaactaagcaaagatacaattataattgtaaattcttgtggggacgcaaaaaaagatagggacattttaaaagagagattaggtaagaattaat

SEQ ID NO: 281124 - DNA, 550 bp, Unknown
  Bacterial polypeptide expressing nucleotide sequence isolated from the Sargasso Sea
ggattaataccaaaaaaacttaaactatataattgtgtaggtggtggatcatcaagttatggtttttggagtcattttatggatttaaataaaaaacaagtagaatttattggagtagaggctggtggaccaaaaaaaagtaaaaaacatgcagcacctctaacttatgggtctagaattggagtgcttcatggtgcaatgcaatatgttaatcaagataaaataggtcaaattgaagagacagaatcgatatctgctggactagattatcctggggtatcacctttacattgttttttaaaagacacaaagagagcaagatatactgcagcaagtgatgaagatgctcttaaagcttaccagattgttactaaatacgaatctcttcaaccgtcccttgaaccaagtcatgcatttcatgttgcaataagtgagagtagaaaattaagtaaagatacaattgtagtagttaacagttgtggcgatgcttacaaagatagtgctattttgaaaaaaagattaggaaaaaaatatgttaaatccaattagt

SEQ ID NO: 281125 - DNA, 925 bp, Unknown
  Bacterial polypeptide expressing nucleotide sequence isolated from the Sargasso Sea
ctcccctctacatcctggaacaaagcaaccagctggacctgatgattttgcaccattgttcccaatgagtttaataatgcaagaggtttcaactgagagagaaatcgaaattcctgaacctgtaagagaagtttataaacaatggagaccatccccattatttagagctagaagattagaaaagtttctagatacacctgcaaaaatttactataaatatgagggtgttagtccaacaggtagtcacaaaccaaatacagcagtacctcaagcattttttaataaagaagaaggaattagtaaaatattcacagaaactggtgcaggacaatggggaagttcattagcatttgcaggtcaaatttttggaatagatattgaagtatttatggttaaagtaagttttgatcataaaccatatagaaaacttatgatgcaatcttttggtgcaaattgtcattcaagtccatcaactttaacagattttggtaataaactactttcagaaaatcctgataaccctggtagtttaggtatagctatatctgaagcaattgaagccacagtaaaaagtggtggtaaggctaaatattcattaggtagtgttttaggtcatgttttaatgcatcaaacaataaatggtaatgaagctattatgcaaatggaaatggctggtgattatccagatattattgttggttgtacaggtggaggtagtaatttgtctggtttaatgtttccattcctaggtcagcaattaagaggtggacaaaaaatagatattatcggatgtgaacctgcttcttgcccttcatttactaaaggtaagtacgcttatgatcacggagatatggcgaaaatgactccattgattaagatgcatactctagggtctgattttttacctccggcaaatcattcaggg

SEQ ID NO: 281126 - DNA, 888 bp, Unknown
  Bacterial polypeptide expressing nucleotide sequence isolated from the Sargasso Sea
ccatggggaaaaaaatatattattggagatactggagctggttatgcaggaaaaatgctaagtatggcagcaaaaaaatttgggttaaaatgtaaaatttttatgggagctaaggatataaaacgtcagaagccgaattgtgatgccatgagaaaaaatggtgctgaaataataccggtttactctggaagtcaaacgctagtagatgcggtaagtgagtgtatgagatattgggtttcaaattgtaacaatacacatatgtgtgtgggttcaactgttggtccaaacatatttgtaaaaatttgcggttggtcaacctcacaaatttctcgagagcttaaatctcaattaaaaaaggaattcaaaagaatcccaaaaaaaatcaagctaattaattgtgttgggggaggtagttcagcatatggtttttggagtgagtttattaattttaataaaaaacaaattgaattaattggtgtagaagctggaggtcccaaaaaatctaaattacatgctgctcctttaagcagaaatgccaaaattggaatcttgcatggagctgcttcatatgtttgtcaaaataatgagggtcagattcatgaaacagagtcaattagtgctggattagattatcctggtgtaagtcctattcattgttttttaaaagatacaaaaagagcaagatatacatatgcaactgatgaagaggctctaaacgcttttaaattagttaggaaatacgaaaaattaaatcccagcttggaaccaagtcacgcttttgcagaagcaatcaagattgcacctaaacttagcagagacacaatttgtgttgttaattcatgtggtgatgcaaagaaagatagggatattctcaaaaaaagactaggt

SEQ ID NO: 281127 - DNA, 769 bp, Unknown
  Bacterial polypeptide expressing nucleotide sequence isolated from the Sargasso Sea
atgtcagactcaattaaatattttcttgaagaaaataaggcaccaaaattttggtacaatattaatgctgacttaccaagtccaccaccaccacctcttcatcctggaacaaaacaaccagcaggacctgatgattttgctccactatttcctatgggtttgataatgcaggaagtatctactgagagagaaatagaaattcccaaacctgttagagaaatttataaacaatggagaccttcaccattatacagggcaagaagattagaaaaatttttagatacacctgcaaaaatctattacaaatatgaaggtgtaagtccaactggaagccataagccaaatactgctattcctcaagctttttataataaagaagagggtgtgaaaaaaatatatactgaaacaggagcagggcaatggggcagttctttggcatttgctggtcaagtttttggtattgatattgaagtatttatggtgaaaatcagttttgatcaaaaaccttatagaaaattaatgatgcaatcatttggtgctaattgtcatccaagtccatcatctttaactgattttggaaaaaaacttttagacgaagatccaaataatcctggaagtttaggtatagcaatttcagatgcaatagagatggttgttaaaagtggaggcaaagctaaatattcattaggaagtgttttgggacatgtgctcatgcatcaaacaattaacggtaatgaagcaattttacaaatggaacaagccaggtgat

SEQ ID NO: 281128 - DNA, 655 bp, Unknown
  Bacterial polypeptide expressing nucleotide sequence isolated from the Sargasso Sea
atgtgtgttggtagcacagtaggaccagctatttttgtccgtatctgcggatggagcacaagtcaaatctctagagaacttaaagttcaattatttgatgaatttggatctattccaaaaaaactcaaactttataattgtgtcggtggtggatcttctagttttgggttttggaacgagtttatggattttgataaaaaacaagtagagtttattggagtggaagcaggtggtccagctaaaagtaaaaaacatgctgcgcctttaacttatggatcaaaaataggaattcttcacggagcagctcagtatgtaaatcaaaatgatgatggacaaatagaagaaaccgaatctatttctgcaggtctagattatccaggaatttcacctttgcactgttttttaaaagatactaagcgagcaaggtatactgctgcaagtgatgaagaggctttaaaggcatatcaacttgttactaaatttgaaaatttaagaccttcgcttgagccaagtcatgcattttatgttgcaattaaagagtctaaaaaattaagcaaggatacaatagtagtagttaatagttgtggtgatgcttacaaagatagagaaattttaaagaaaagattaggaaaaaaatacaatgaatccaattagt

SEQ ID NO: 281129 - DNA, 620 bp, Unknown
  Bacterial polypeptide expressing nucleotide sequence isolated from the Sargasso Sea
catgactgacagcatcaaatattttcttcctgaatcggaaatgccgaaaagctggtacaacattgctgccgatttgccccaacctcctcctcctgttctccatcccggaaccggacagccgatcgggcccgatgacctggctccgctgtttccgatggatctgatcctccaggaagtaagcactgagagcgaaattgaaattcctgaaccggttcgtgaaatctaccgtcagtggaggccgagtcccttgtaccgcgcccgcaggctggaaaaggctttggataccccggccaagatctattacaagtacgaaggagtgagcccgaccggaagccacaaaccgaacaccgcggtggctcaggctttttacaacaaagaggcgggagtcaaacgcatctccaccgaaaccggcgcgggacagtggggttcttcattggcctttgcaggaacgatattcgggatagaaatcgatgtcttcatggtccgtgtgagtttcgaccagaaaccttaccgcaaggcgatgatggagtccttcggggcaagctgtattgcttcaccgtccaacacaactgaatccggtaaagcaatcctggcggaaaacccggactcgaccggcagcc

SEQ ID NO: 281130 - DNA, 897 bp, Unknown
  Bacterial polypeptide expressing nucleotide sequence isolated from the Sargasso Sea
gaaatttttaaaaaagagagattattacttcaagaattatatcggatcaccgacatcatttgtaaaattggaaaatttatctaatcacttaggtggtgctcaaatatgggccaaagttgtatcggaggctaatggtggtgcccacaaaatatacaatgcaactgttcatgcattaatttgtaaggctatgggaaaaaaatatatagttggtgacactggtgctggttatgcaggcaaaatgttaagtatggctgcaaagaaatttggtctcaaatgtaaaattttcatgggtacaaaagacattaagagacaaaaaccaaattgtgatgctatgagaaaaaatggtgctgaaatagttcccgtatattctggcagtcaaaccttggttgatgcagtcagtgagtgtatgagatattgggtatcaaattgtgacacaacacatatgtgcgttggaagtacagttggtccaaatatatttgtaaaaatttgtggatggagtacagcacaaatttcaagagaattaaaaatacaaattaaacaagaattcaaaaaaataccaaaaaaaattaaattaattaactgtataggtggtggtagttcagcttatggtttttggagtgaatttatagattttaacaaatcacaaatagaattaattggtgtagaggctggaggtccaaaaaaatcaaaactgcatgctgcacctttaagtagaaatgctaaaattggaattttacatggtgcagcttcttatgtttgtcaaaacagtgaaggtcaaattaatgacactgaatcaattagtgctggattggattacccaggcgtaagtcctatacattgttttttaaagatacaaaacgagcaaaatatacttatgcaactgatgaagaggcacta

SEQ ID NO: 281131 - DNA, 538 bp, Unknown
  Bacterial polypeptide expressing nucleotide sequence isolated from the Sargasso Sea
ggaaaaataccaaaaaaattaaaattaataaattgtgtaggtggaggttcatcaagttttggtttttggaatgaatttatgcattatgataaaaatcaagttgagtttattggtgttgaggctggtggatcaaacaaaagcaaaagacacgctgcacctttaacttatggatcaaaaattggagtgcttcatggtgctatgcaatatgtaaatcaagataaaatgggtcaaatagaagagacagagtcaattagtgctggattagattatcctggagtttctcctcttcactgttttttaaaagatacaaaaagagcaagatatactgcggcaagtgatgaggactcattaaaagcatatcaattggtaactaagtatgaaaatttaaacccaagtttggaaccaagccatgcttttgctgaagcaattaaaattgctcctaaattaagtaaagaaacaattataattgttaattcttgtggagatgccaaaaaagatagggacattataaaagaaaaattaggtaaaaaaatatgag

SEQ ID NO: 281132 - DNA, 523 bp, Unknown
  Bacterial polypeptide expressing nucleotide sequence isolated from the Sargasso Sea
aaaaaaaattaaactaattaactgtgttgggggtggaagttcagcttatggcttttggagtgaatttatagactttgataaaaaacaaattgagttaattggagttgaggcaggtgggccaaaaaaatcaaaacttcatgctgctccattaagtagaaatgcaaaaattggaattttacatggtgctgcatcatatgtttgccaagataatgaaggtcaaattaatgaaaccgaatctataagtgctggattagattatccaggagtaagtcctattcattgtttcttaaaagacacaaaacgtgcaagatatacttatgcaactgatgaggaagccttgaacgcacatgtaatggtgacaaaatttgaaaatcttaatccaagtttagagcccagccatgcatttgctgaagcaattaaaattgctcctaaacttaacaaagatacaattataattgtaaattcctgtggagatgctcaaaaagatagggatattttaaaagagagattaggaaaaatttga

SEQ ID NO: 281133 - DNA, 751 bp, Unknown
  Bacterial polypeptide expressing nucleotide sequence isolated from the Sargasso Sea
agcctcggaattgccatttcagaagcggttgaggtggctgctcaaaacgatgatgtgaaatatgcgctgggaagcgtactaaatcacgtgcttacccaccagtcgatcatcggtttggaagccatcaagcagatggaaatggccggagactaccctgacgtggtggtcggctgtaccggtggtggatccaacttcgcagggatcgtctttcccttcatcggtgaaatgttccggggtggaaacaaaatccgtgtggttgcggttgaacctgcagcctgtccttccttgaccaggggaaaatatgcctacgattttggagacacggcgcatcttactccattgaccaaaatgcacaccctgggttcaacttttgttcctccaggattccacgctggaggactgcgttatcacggcatggcaccgatgatcagccacctccaggaattggatgttctggaagccaccgcgtatcaccagaatgcctgctttgagtccggggtaatgtttggacgtaccgaagggatccttcctgcccccgaagcgaaccatgcggtcaagggagcgatcgaagaagctttacgctgtaaacgtgagggtaaaagtgaaaccatcctcttcaatctctgcgggcatggtcatttcgacatgcaggcctacaccgattacttcgcgggtaatctggaggaccggaactacgacgaacaggaactggcgatggctctcgctggactgccttccgtagcagcatgac

SEQ ID NO: 281134 - DNA, 646 bp, Unknown
  Bacterial polypeptide expressing nucleotide sequence isolated from the Sargasso Sea
aatggctgatacaattaaatatttcttagaagaaagcaaaatgccaaagacttggtataatattaatgctgatttgcctaaacctatggagcctccactacacccaggtactttgaaaccgattggaccagatgatttggctcctttgtttccaatggctttaattggtcaagaagtttctcaagatagagaaatagaaatacctcagcctgttagagaaatttataaacaatggagaccatcaccattatatagagcaagaaaattagaaaaacatttagatacaccagcaaagatttattataaatacgaaggcgtaagcccttctggtagtcacaaaccaaatacagcggttgctcaagctttttataataaagaagaaggtacaaaaaaaataactactgaaacaggtgctggacaatggggaacatctttagcatttgcgtgtaaattgtttggaatcgagttagatgtttacatggtaaaagtaagttttgaacaaaaaccatatagaaaacttgttatgcaaacatatggtgcaagatgtgttgcaagtccatcaaacgaaacagatagcggaaaagcaattttagaaaaagatccaaacaatactggaagtttaggaatagctattcagaagcagtcg

SEQ ID NO: 281135 - DNA, 451 bp, Unknown
  Bacterial polypeptide expressing nucleotide sequence isolated from the Sargasso Sea
tgagtttattgggggtagaggctgggtgggacctgcgaaaagtaaaaaacatgcagctcctttaacgtatggttcaaagattgggattctacatggtgcagctcaatatgtgaatcagaattcagatggacaaatagaagagactgagtcaatttctgcaggacttgattatcctggaatttctccactccattgttttttaaaggatacaaaaagagccagatatacatctgcaagtgacgaagaagctttaaatgcttttaaacttgtgacaaaatttgaggatttaagaccttccttagaaccaagccatgctttttttgtcgctcttaaagaggcaaaaaaacttagcaaagatacagtggtagtaatcaatagttgtggcgatgcttacaaagaccgtggaattttaaaaaaaagattgggtaaaaaatatgttaaatccaattag

SEQ ID NO: 281136 - DNA, 591 bp, Unknown
  Bacterial polypeptide expressing nucleotide sequence isolated from the Sargasso Sea
ggagtactgcacaaatttctagagaacttatggttcaaataaaaaaagaatttggaagagttcccaaaaaattaaaattaataaattgtgtaggaggagggtcttcagcaatgggtttctggaatgaatttatagattatgataaaaatcaagttgaacttatcggcgttgaagctggtggtccaaaaaatagtaaaaaacatgcggccccactaagctacggagctagagttggtattttgcatggagcaattcaatatgtcattcaagatactgagggccagatagaggaaacagaatctatcagcgctgggctggattacccgggagtttctccattacattgtcttttgaaagattcaaaaagagcaagatatactaccgctaccgatgaggaagctcttgaagcttttaaattagtttcaagattagaaaaaattagaccatcgctggaacctgctcacgcatttgctgaggctattaaaatagcaccaatattaagtaaagatactattgtcgcggtagacagttgtggtgatgctaaaaaagatatgaaaattataaaagaaagattgggaaaaaatttatgat

SEQ ID NO: 281137 - DNA, 690 bp, Unknown
  Bacterial polypeptide expressing nucleotide sequence isolated from the Sargasso Sea
gttggcgacacgggggctggttatgctaggaaaaatgttaagtatggctgcaaaaaagtttggcttaaaatgtaaaatatttatgggtgctaaagatattaaaaggcaaaaaccaaactgtgatgcaatgaaaaaaaatggagctgagattattcctgtatattctggaagccagactttggtggatgctgttagtgaatgtatgagatactgggtatcaaattgtgataatactcatatgtgtgttggtagtacagtaggtccaaatatatttgttaaaatttgtggttggagtactgctcaaatttcaagagaattaaaaatacaattaaaatctgaatttaaaaaaatcccaaaaaaaattaaacttattaattgtgtaggcggtggaagttcagcctacggtttctggagtgagtttatagattttaataaaaaacaaatagagctgattggagttgaagcgggtgggcctaaaaaatcaaaacttcatgcagctccattaagtagaaatgctaaaattggagttttacatggtgctgcttcttatgtttgccaagataatgaaggtcaaattaatgaaaccgagtcaatcagtgcaggattagattatcctggtgtaagtcctattcattgtttcttaaaggatactaaaagagcaagatacacttatgcaactgatgaggaagc

SEQ ID NO: 281138 - DNA, 446 bp, Unknown
  Bacterial polypeptide expressing nucleotide sequence isolated from the Sargasso Sea
aaagcaagttgaacttataggagtagaagctggaggacccaaaaaatcaaagttgcatgctgcacctttaagtaaaggagcaaaattaggtattttacatggagcggcttcttacgtttgccaaaataaagatggacaaataaacgaaactgaatctataagtgccggtttagactatccaggagttagtccaattcattgttttttaaaagatacgaaaagggcgagatatacttatgctactgatgaagaggctttgaatgcatttcaacttgtaactaaatttgaaaaactaaatcctagtttagaaccaagccatgcttttgctaaagcaatagcttatgctccaaaattaagcaagaatacaattataattgtaaactcttgtggagatgcaaaaaaggatagggatatattaaaaaaaagattaaggaaatcaaaatgaa

SEQ ID NO: 281139 - DNA, 580 bp, Unknown
  Bacterial polypeptide expressing nucleotide sequence isolated from the Sargasso Sea
aagttcgactattgctattgaaaatggaatgacaacaaaactattatttgaacaattaaaagacattcgcaaaagtgtacaaattccgttgttgattatgggctattttaatccaataatgcaatttggtgtagaaaaattttgtgaaaaatgtgctgaaattggtattgatggtttaattattcccgatttgcctttggaaatttataaaagtgagtaccaatctatttttgaaaaatacaatttaaaaaatatatttttgattactccacaaacttctgaaagtcgtatacgagaaattgacgaattatctgatagttttatttacatggtgagttcggcagcagtaacaggaagtcagtctggttttggaaatgaacaaacggaatatttcaaaagaattcacaatttaaaattgaaaaatcctcaaattgttggttttggaataaaagataaagaaacatttaatcaagcaactgaataccaaaaaggagctattattggcagtaattttattagtttcttagcaaaaaataaaatcaattgtactgccgaatatattaaaaaaattaaaaaataa

SEQ ID NO: 281140 - DNA, 478 bp, Unknown
  Bacterial polypeptide expressing nucleotide sequence isolated from the Sargasso Sea
tggttttggaacgagtttatgcattatagtaaaaaacagtttgaatttattggtgttgaagctggtggacctacaaaaagtaaaaggcatgccgctcctctaacctatggatcaaaaattggaatactgcacggtgcagctcaatatgtaaatcaaaataatgaaggccaaatagaagaaacagaatcaattagtgccggactagattatcctggagtctctccattacattgttttttaaaagatacgcgtagagctagatacacagctgcaactgatgaagaagctttaaaagcataccaattagtcactaaatatgaaaatttaaacccaagcctagaaccaagtcatgcatttgcagaggcaataaaaatagcaccaaaattaaatagggacacaattattatcgtaaattcttgtggtgatgcacaaaaagatagagatattctaaaaaaaagattaggaaacaaaagatgac

SEQ ID NO: 281141 - DNA, 414 bp, Unknown
  Bacterial polypeptide expressing nucleotide sequence isolated from the Sargasso Sea
caggtggcccaaaaaaatcaaaattacatgctgcgcctttaagtagaaatgctaaaataggaattctccatggtgcagcttcttatgtttgtcaaaataatgaaggtcaaattcatgaaacagagtcaatcagtgctggattggattatcctggagtaagtccaatacattgttttttaaaagatacaaaaagagcaagatatacttttgcaactgatgaagaggctttaaatgcatataaattagttactaaatttgaaaaattaaatcctagtttagaacctagtcatgcttttgcagaggcaattaaaattgctcctaaattaagtaaagaaacaatttgtattgttaactcttgtggagatgccaaaaaagatagagatatattaaaacagagattaggaaaatattaat

SEQ ID NO: 281142 - DNA, 550 bp, Unknown
  Bacterial polypeptide expressing nucleotide sequence isolated from the Sargasso Sea
caaattaaagaggaatttggaaaaattccaaaaaaattgaagttgttaaactgtgtaggaggtggaagttcggctatgggattttggaatgagtttatggactctcatgctgagtttgttggtattgaagccggaggaccaaaaaatagtagtttacatgcagcaccattgacttacggatctaaagttggaattttacacggagccgctcaatatgtgattcaagataaggaaggtcaaataggttctactgaatctatttccgcaggtttagattatccaggaatttcaccattgcattgtttcttaaaagatgcaaaaagagctagatatacctctgcaagtgatgaggatgctttgaaagcataccagttagtttctaaattagaaaatatctcaccatcacttgaaccttctcatgcattcagtgaggccattcgtcttgctccaaaattaaaatcttctgaagttttaatagttaattcctgcggggacagcctaaaagataaagatattattaaacaaaaattaggaacttatgtaagatgaa

SEQ ID NO: 281143 - DNA, 430 bp, Unknown
  Bacterial polypeptide expressing nucleotide sequence isolated from the Sargasso Sea
ttcgcatgcagcacgattttgtggcggaaacgttggtatagctcaaggatacaaaacttattttttccaggacgaagaaggacaaatgcgccacactcattcaattgctgcaggactggactacatcggagtaagtccgattttgagtcatcttcatgataaaaaaagggtgcaatttacagcgactacagatgaggaagttatttctgcaacaaaacacctaattcgtactgaaggaataattcctgccctagaatgcagtcatgcttttgcttcagttattgaagaaactcctcatatacctaatggatctaatgttctgattaacctttccggccgtggtgacaaagatatctttaatatagctgaggctattggggacaaaaaatgggatgaattcctgcgccaaaaagccctgatgaatcaatga

SEQ ID NO: 281144 - DNA, 625 bp, Unknown
  Bacterial polypeptide expressing nucleotide sequence isolated from the Sargasso Sea
aatgaatataaaaactgttttacaagaaaacgatctgccagaatactattacaacatacttgcagatttaaagaatccactacctccggtactaaacccaggaactaaagagccggttggacctgatgatttgtctcctttattcccaatggaattaattggtcaagaagtatcgtccgatagacatatagtaattcctgaagaagtccgagatgtgtaccggttgtataggcctacgccattatatagagcaaaagcccttgaatcagaactagataccccagctaaaatttattacaagtatgaaggcgtaagtccaaccggaagtcataaacctaataccgcaataccacaagcctactataataaaaaagaagggatagataaaatcacaacagaaactggtgcagggcaatggggttcttctttggcatttgcttgttcaaaatttggtatcgacttggaagtatttatggtcaaagtaagctttatgcagaaaccgtacaggaaggctatgatggaagcttttggggcacgttgtatagctagcccttcaaatgaaaccgagataggtaagaaaatattgctagaagacccaaattctacgggaagtcttggaattgct

SEQ ID NO: 281145 - DNA, 551 bp, Unknown
  Bacterial polypeptide expressing nucleotide sequence isolated from the Sargasso Sea
tatgaaagataacaaaatgcaaattaccaaaaataaatctttatctaaggtagatgaaatgttttgtgagttaaaaaataaaaaaaaatttgctttaatgccttttataatggctggagatcccaatattgaaataacttctgagatcttattaaagttacaagaaaatggagctgaccttattgaattaggtatcccgtatagtgacccacttgcagatggacctgttattcaagtggcggcctctcgcgccttaaagtcaggtactagcttaagaaaagtaattactcttttagagtctttaaaaggtaaattaaatatccccatcatccttttttcttacttgaatccattactatgttttggctttgaaaggttttgtgagatggcatctgatgctggagtttctggactaatagttcctgacctccctttggaggaagcttataaattttctaaaatagtaagtaaccattctatggacttaattttattggtagcgccaactactccttttgaaagaatgaaacaaatatcaaatcataccaaag

SEQ ID NO: 281146 - DNA, 631 bp, Unknown
  Bacterial polypeptide expressing nucleotide sequence isolated from the Sargasso Sea
tgttggttcaacagttggcccaaacatctttatcaaaatctgtgcttggagtacggctcaaatatccagagaattgatgaaacaggttaaagaagaatttggaaaagtacctgaaaagttaaaattaattaattgcgttggaggtggtagttcagctgctggattctggaatgaatttttaaatactcgtgcccagttaattggagtggaagctgggggtccaaaaaatagtaaacttcatgccgcaccactaactaatggatctaaaattggtattcttcatggagctgcgcagtacgtcatacaagacaaagaaggtcaaataggttctacggagtctatttccgcaggtcttgattaccctggaatttctcctctccattgttttcttaaagatacaaagagagctagatatacttccgcaagtgatgaagaggcgctttatgcttatcaattagtttcaaaacttgaaaacatttctccctcacttgaaccttcgcatgcttttgcagaagcaattaaactagctcctaaattaaaatcatctgaggtaattattgtaaactcatgcggagatagccttaaagacaaagacattataaaacaaaagctgggatcatacgtaagatga

SEQ ID NO: 281147 - DNA, 767 bp, Unknown
  Bacterial polypeptide expressing nucleotide sequence isolated from the Sargasso Sea
tattaatgttttttccatgagaagttatggcgctgaagttgtacctgtaaactctggctcacaaactttagtggatgctgtgtcagaatgtatgaggtggtggacaagtgagaatgaagaagcgcatatgtgtgttggaagcaccgttggccctactatttttgtcaaaatatgtgcatggtctaccgctcagatatctagagaaatgaaaaaacaagtaatggatgaatttggtgaagttccaaaagatatgaaattaattaattgcgttggtggaggatcatcggctgcaggtttttggaatgaatggattgattatgataatgttgaactcataggagtagaagctgggggacccgaagggtcttcaaaacatgccgcacctttgacaaatgactcacccatcggggttcttcatggcgcaactcaatatgtaattcaagacgatcaaggggaaattgaggaaacagaatcaatcagtgctggacttgattacccaggtgtgagcccacttcattgtttcttaaaagaaactggaagagcaagatacacttctgcaagtgacgaggaggccatagaagcttttcaattagtaagtaaaaatgaaggttttgttagcccctcacttgagccttcacatgcgttcgcagaagcaatcaaaattgcacctaaattaagtaaagatacaattatcgttgtagattcttgcggagactctgcaaaagactctaaaatcattgctgagagacttggttataaaatatgac

SEQ ID NO: 281148 - DNA, 331 bp, Unknown
  Bacterial polypeptide expressing nucleotide sequence isolated from the Sargasso Sea
ttatgtttgtcaaaacaatgaaggtcaaattaatgatactgaatcaattagtgctggattagattacccaggtgtaagccctatacattgctttttaaaagatacaaaacgagctagatacacttacgcaactgatgaggaagcattaaaagcacatgtcatggtaactaaatttgaaaaacttaatccaagtttagaacctagtcatgcatttgccgaggcaataaaaattgctccaaaattaagcaaagacacaattataattgttaactcttgcggtgatgctaaaaaagatagagatatcttaaaagaaagattgggtaaaatataa

SEQ ID NO: 281149 - DNA, 511 bp, Unknown
  Bacterial polypeptide expressing nucleotide sequence isolated from the Sargasso Sea
atgacagaccagattaagtttctgcttggcgaagaagaactgccccgcagttggtacaacatcattgccgacctgcccgagcctcccgctccagtgatgcatcccggcaccggccagcccgttgggcctgatgatctcgcgcccctttttcctatggcatccatcatgcaggaagtcagtggggagcgcacgatcgatatcccggagccggtccgtgagatataccgccaatggcggccgagtccgctgttccgggcccgtcggctggaagaggctctggatacgccagcgcgcatttattacaaatacgaaggcgtcagtcccacaggaagccataagccgaacacagccatggcccaggcatttttctgcaaagaagaaggcgttaaacggatcgcgacagaaaccggcgcgggtcagtggggatcctcactcgctctggccggctcgatgttcggcctcgaaatcgaggtgttcatggtacggatcagttacgaccagaagccctacc

SEQ ID NO: 281150 - DNA, 829 bp, Unknown
  Bacterial polypeptide expressing nucleotide sequence isolated from the Sargasso Sea
cttaatgtaaaattttcatggggcgcaaaagatattgcaagacaacaacctaatgtaaaagcgatgaaaaaaaatggtgctgaggtagttccggtttattcaggaagtcaaacgcttgtggatgctgtttcagagtgtatgagattctgggttgccaattgtgatacaagtgcgatgtgtgtaggcagcacagtaggcccagctgtatttgtacgtatttgtggttggagcactagtcaaatttcaagagagcttaaagttcaattaattgacgagtttggatcaattccaaaaaaacttaaactttacaattgtgtaggtggtggaagttcaagttttggtttttggaatgagtttatggattatgataaaaggcagtgtgaatttattggagtggaagctggtgggcctgcaaaaagtaaaaagcatgcagcacctttaacttatggttcgaaaattggaattctacatggtgctgcccaatatgtgaatcaagactcagatggacaaatagaagagacagagtctatatcggcaggtttggattaccctgggatctcaccgcttcattgttttttaaaagacacaaagagagctagatacaccgctgctagtgatgaacaagcattagaagcttacaagcttgttacaagatttgaaaaattaagaccatctcttgaacctagccatgcattcgctgttgcaatatctgagtctaaaaaattgagtagagatacagtcgtcgtagttaatagttgtggtgatgcttacaaggaccaaggaattttagaaaaaagattaggaaaaaaatatgttaaatccaattagt

SEQ ID NO: 281151 - DNA, 357 bp, Unknown
  Bacterial polypeptide expressing nucleotide sequence isolated from the Sargasso Sea
ttggaattttacatggtgcagcttcctatgtttgtcagaacaatgaaggtcaaattaatgacactgaatcaattagtgctggattggattatccaggtgtaagtccaattcattgttttttaaaagatacaaagcgagcaagatatacttatgcaactgatgaagaagcactaaaagcacatgtgatggtaactaaatttgaaaaacttaatccaagcctcgagccaagccacgcattcgcagaggccatccgaattgcccccaagttaagcaaagacacaattataatcgttaactcatgtggtgatgctaaaaaggatagagatatcttaagagagaggttaggtaaaaattaat

SEQ ID NO: 281152 - DNA, 331 bp, Unknown
  Bacterial polypeptide expressing nucleotide sequence isolated from the Sargasso Sea
ggacgagcgaatcaagctcgttgcggatgcgacgacaggatttttgtattacgtgtcgagagccggtgtgaccggtgagcagacgtcgctctctgatacgctcgctcccatggtaaagaagatcaaagagtttacgaacaagcctgtagcggttggattcggtatctcggacccacaacaggcgcaggaggttgcgcgacacgccgatgcggtcgtcgtgggcagcgcgatcgttcgtcgcatcgcagagaaaggaggcgatcccgatctggcatcacagatcggggactttgttgccgacctgatgcgaccgttgaagacctcaagctga

SEQ ID NO: 281153 - DNA, 418 bp, Unknown
  Bacterial polypeptide expressing nucleotide sequence isolated from the Sargasso Sea
tcgttttgctggtggttcggtcggcattgcccagggatacaaaacctattttttccagaatacggaagggcagatgcagcatacccactcaattgctgcaggattagattatattggggtcagtccgattttaagtcatcttcatgatcagggacgggttcggttctgtgctgctgatgacgaatcggttgtagaagcaacgaaattactaatccgcagagaaggtattataccagccttagagtgtagtcatggctttgcaggattgattgccgaagcagaccagatcggggatggagagattattctaatcaatctttccggtcgaggtgataaggatatttttaatattgccgaagcgatgcaggatgaaaaatggcagcagtttatccgggagaaggcatccttaaacctttga

SEQ ID NO: 281154 - DNA, 802 bp, Unknown
  Bacterial polypeptide expressing nucleotide sequence isolated from the Sargasso Sea
aaagacattaaaaggcaacaaccaaatgttaaagcaatgaaaaaaaatggtgcggatgtaattcctgtatattctggaagtcaaacactggtagatgccgtatcagaatgtatgagatattgggttgcaaattgtgatactactgcaatgtgtgtaggtagtacagtaggacctgcaatttttgttcgaatatgtggatggagtactagtcaaatctctagagaacttaaagttcaattaatgaatgaatttggtgatgttcctaaaaaacttaaattatataattgtgttggaggtggttcctcaagttttgggttttggaatgaatttatggattataataaaaaacaagttgagtttattggagttgaagcaggaggtccagctaaaagtaaaaagcatgcagctcctttaacttatggttcaaaaatcggtatacttcatggtgcagctcaatatgtaaatcagaataatgatggacaaattgaagaaactgagtcaatatctgcaggacttgattatcctggtatttcaccactccattgctttttgaaagatactaaacgtgcaagatatacagctgctagtgatgaagaagctttaaaagcataccaaatagtcacaaaatttgaaaatttaagaccatctcttgaaccaagtcatgcattttttgtagcaatcaaagaagcaaaaaaattgagtaaaaatacaatagtaattattaatagttgtggagatgcctataaagatcgtggaattttagaaaaaaagttgggaaagaaatatgttaaatccaattagt

SEQ ID NO: 281155 - DNA, 804 bp, Unknown
  Bacterial polypeptide expressing nucleotide sequence isolated from the Sargasso Sea
tcatgggtgctaaagatattaaaagacaacaaccaaatgtaagagcaatgaaaaaaaatggagcagaagttgttcctgtatattctggtagtcaaactctcgttgatgcagtgtctgagtgcatgcgttactgggttgcaaattgtgataaagttgccatgtgcgttggcagcactgttggtccggctatttttgttcgtatttgtggatggagtacaagtcaaatatcaagagaattaaaaactcaattagttgaggagtttggatcaattccaaagaaactcaaactttataattgtgttggaggaggaagttctagttttggtttttggaatgagtttatagattacgataaaaaacaatgtgaatttattggcgtagaagctggtggaccaaggaatagtaaaaaacatgcggcaccattaacatttggatctaaaataggaattcttcatggtgcagctcaatatgtaaatcaaaatactgatggtcaaatagaagaaacagagtcaatctctgccggactagattatccaggtatctctccgcttcattgttttcttaaagatacaaaaagagcaagatacactgcggcaagtgatgaagaagctttaaacgcttataaagtggtaacaaaattcgagaaattaagaccttccttggaaccaagtcatgctttctcagttgcaatatctgagtcaagaaaattaagtaaagatacgattgttgtagtcaatagttgtggagatgcatacaaagatcgagaaattataaaaagaagattgggagagaaatatgtctaat

SEQ ID NO: 281156 - DNA, 115 bp, Unknown
  Bacterial polypeptide expressing nucleotide sequence isolated from the Sargasso Sea
tatgaacaaaaaaaaaataaactttaattcacttaaaaatcagccttctgaagatggtaagtttggagaatatggaggtatgtttgttgcagaaactcttatgcctctgatatta

SEQ ID NO: 281157 - DNA, 592 bp, Unknown
  Bacterial polypeptide expressing nucleotide sequence isolated from the Sargasso Sea
caaatctcaagagaacttaaattacaattaataaatgaatttggtgatgttcctaaaaaacttaaactatataattgtgtaggaggaggttcctcaagttttggtttttggaatgaatttatggattatgacaaaaaacaagttgagtttattggggttgaagcaggaggaccaaccaaaagtaaaaggcatgcagctcctttaacttatggttcaaaaatcggtatacttcatggtgcagctcaatatgtaaatcaaaatagagatggtcagattgaagaaactgagtcaatttctgcaggtcttgattatccaggaatttcaccactccattgctttttaaaagataccaagcgcgcaaggtatacagcagctagtgatgaagaagctttaaaagcttaccaaatagtaacaaaatatgaaaatttaagaccttcgcttgaaccaagtcacgcattctctgtagcaatcaaagaagcaaaaagatttagtaaggatacaatagtaattattaatagttgtggagatgcatacaaggaccgtggaattttagaaaaaaagttgggaaaaaaatatgttaaatccaattagt

SEQ ID NO: 281158 - DNA, 574 bp, Unknown
  Bacterial polypeptide expressing nucleotide sequence isolated from the Sargasso Sea
atggcagatacaattaaatatttcctagaagaaagcaaaatgccaaaaacttggtacaatattgctgcagatttaccaaaacctatggaacctccattacatccaggaactttaaaaccaattggacctgatgacctagcgcctttgtttccaatggctttaattggtcaagaagtatcacaagaaagagaaatagaaattcctgaaccagtaagacaaatttataaacaatggagaccatcaccattgtatagagcaagaaaattagaaaaacatttagatacaccagcaaaaatttattataaatatgaaggagttagtccttctggtagtcataaaccaaatacagcagtacctcaggcattttataataaagaagaaggtacaaaaaaaataactacagaaacaggtgctggacaatggggaacatcattagcatttgcatgtaaattattcggaattgaattagatgtttatatggtaaaagtaagttttgaacaaaaaccatatagaaaacttgttatgcaaacttatggtgctagatgtgttgcaagtccatcaaatgaaacagata

SEQ ID NO: 281159 - DNA, 688 bp, Unknown
  Bacterial polypeptide expressing nucleotide sequence isolated from the Sargasso Sea
aatgcatggcggtactggggttgcaaattgtgataaagtcgcaatgtgtgttggtagtaccgttggtccagctgtctttgttcgtatttgtggatggagtacaagtcaaatatcaagagaattaaaaactcaattagttgatgagtttgggacagttccaaaaaaactcaaactttataattgtgttggaggaggaagttctagttttggtttttggaatgagtttatggattacaataaaaaacagtgtgaatttattggtgtagaagctggtggaccagcaaaaagtaaaaaacatgcagcaccactaacatacggatctaaaataggaattcttcatggtgcagctcaatatgtaaatcaaaatactgatggtcaaatagaggaaacagaatcaatttctgctggactagattaccctggtatctctccgcttcattgttttcttaaagatacaaagagagcaagatacactgcagcaagtgatgaggaagctttaaacgcatataaacttgtaacaaaatttgaaaaattaagaccttccttagaaccaagtcatgctttttcagttgcaatagcagagtcaaaaaaatttagtaaagatacaattgttgtggtcaatagttgcggagatgcttacaaagatcgaggaattatagaaaaaagattggggaaaaaatatgtctaa

SEQ ID NO: 281160 - DNA, 723 bp, Unknown
  Bacterial polypeptide expressing nucleotide sequence isolated from the Sargasso Sea
cattggatcatacccttgagtgtctgcagggtctggttgagggaggcgtggatattctggagttgggcattccgttctcggatcctgaagcagagggcccatctattcaggctgccaatgaaagagcgctgaaaggaggagcgaccctaaaagatgttctcgatcaggtgaaactcttcaggaagataaattccgatacgcccatcgtgttaatgggatacctcaattcgataattgcgatgccggacttcgaaaaacgagctttcgaggctggtgttgatggattgatcatggtgaacctgccgccggaggagggagaaaagatagctcaaccgttggctgcgcagtccatagatctcatttatctcttggccccgaccactacaaaagaaagaagtaaggagatcgtagaagtagctagcggttttctatattacgtttctttgaagggtatcactggcgctgatcactttgattcagtagaagtgacaagaaaagtgaaagaattaaaagaactcacggatcttcctatatgtgttggatttggcatcaaggatggggaaactgccaaaaagatagctccttatgctgatgggatcgttgttggaagcgcctttgttaatcttgtcgctaaaggaggaagccctagtgagatttcagcaagactgaaagagaaggcctcagagttgcgagtcgcgatcgactcgacgaaagtttcataag

SEQ ID NO: 281161 - DNA, 367 bp, Unknown
  Bacterial polypeptide expressing nucleotide sequence isolated from the Sargasso Sea
caacagggacttgatctggttctgcttgttgcacccacaacccccgctgatcggatggtgcgaattggtcaacgcagccggggtttcacttatctggtgagcgtgaccggtgtcaccggggaacgcgcccagatggaaaccagggtggaagggcttgtgcaggagctgaagcaatcctcagcagttccagtggctgtgggtttcggtatctctggagctgatcaggtgcgccaggtgcgcagctggggggcggacggcgccatcgtcggcagtgcgctggtcaagcgaatggcggcggccggtaacggccaaattgctgaggaagccggacgattctgcagagagctccgtaacgcagctgactgac

SEQ ID NO: 281162 - DNA, 511 bp, Unknown
  Bacterial polypeptide expressing nucleotide sequence isolated from the Sargasso Sea
gaagttattaaattgtgtgggtggtggaagttcagctatgggttttggaatgaattcatggatacagatgcagagtttattggtattgaagctgggggtccaaaaaatagtaaactacatgcagcgccactaacaaatggctcaaaaattggaattctacatggtgcagcgcaatatgtcattcaagacaatgaaggtcaaattggttctactgagtctatttcagcaggattggattaccctggtatatcacctttgcattgctttctaaaagactcaaaaagagccaggtacacttctgctagtgatgaggaggcactatatgcttataaattagtttcaaaattagaaaatatttcaccttctttagagccatcacatgcctttgctgaagcgatcaaacttgcgccgaaattgaaatcttcagatgttatagtcgtaaattcatgtggggatagtataaaagataaagatataataaaaagtaagctaggatcatataaaagatgaa

SEQ ID NO: 281163 - DNA, 133 bp, Unknown
  Bacterial polypeptide expressing nucleotide sequence isolated from the Sargasso Sea
tgcattaagagatagggtaactaatgttaatgatacattttatattattggcgctgcagcaggacatcatccatatccatcaatggtcagagattttcaatcagtaataggaaaagaggtaagagaacaatta

SEQ ID NO: 281164 - DNA, 207 bp, Unknown
  Bacterial polypeptide expressing nucleotide sequence isolated from the Sargasso Sea
gaaagtatagcgccctgcccgtggtggtcggttttggcatctccagccccgagccggttggggccgtgggtcgggtggcggatggcgtggtggtcggtagcgctctggtcaattgcatttccgagaatctagacgaccccgggtcccttcccgccgccatcggtgcccgcgccggttctctggttgccggcttggggcccggttgag

SEQ ID NO: 281165 - DNA, 820 bp, Unknown
  Bacterial polypeptide expressing nucleotide sequence isolated from the Sargasso Sea
tcaacagaacgtgaaattgaaataccagaaccagtaagagaaatttataagcaatggagaccatctcctttatatagagctcgaaggttagaaaagcatttagatactcctgcaaaaatttattacaagtacgaaggagtaagtccaactggtagtcacaaaccaaatactgcagttcctcaagccttttttaataaagaagagggtgtaagaaaaatatttactgaaacgggagctggtcaatggggaagttcattagcttttgcaggtcaaatgtttggaatagatattgaagtttttatggttaaagttagctttgatcaaaaaccatataggaaacttatgatgcagtcttttggaggcacttgccatcctagtccatctaacattacagattttggaaaaaaacttttatcagaggatccgaataacccaggtagtttaggtatagctatatcagaagctattgaagctgtggttaaaagtgaaggaaaagcaaagtatgctcttggaagtgttttaggtcatgtactcatgcaccaaacaattaatggtaatgaggctattcttcaaatggagcaagctggcgattacccagatattattgttggctgtacaggaggaggaagtaatcttgctggattaatgtttccttttcttggtcaacaattaagaggaggtcaaaagattgatattattggttgtgaacctctctcatgcccatcttttactaaaggaaaatatgcttatgatcatggtgatatggcaagaatgactccattaattaaaatgcatacattaggatcagacttcctgcctc

SEQ ID NO: 281166 - DNA, 751 bp, Unknown
  Bacterial polypeptide expressing nucleotide sequence isolated from the Sargasso Sea
agtcttggtattgcaatctcagaagcagttgaagttgcagcaactaatgatgatgttaaatattccttgggaagtgtccttaaccatgtgctaatgcatcaaacaattgttggtttggaaacgctgcaacaaatggaaatggctggtgactatcctgatgtagtagttggctgtacagggggaggttctaattttgcggggctgatgtttccattcctcggtgagcaattgcgtggaggtgctaatgtgcgggtagtcgcagttgaacctgccgcatgtccatctcttacaaggggaaaatatgcttatgatttcggggacactggaaatatgactccattaactaaaatgcatacacttggctccacatttgtgccgcctggatttcatgctggtggtctacgatatcacggtatggcacctttgataagccacctaaaggaactggatttactggaggcatatgcatttcatcagaacgcttgcttcgaggcaggtgtgacttttggacgcgaggaaggcattattcctgccccagaggcaaaccatgcagtaaagggtgcattagaggaagcgctgcgttgcaagcgagaaggtaaatctgaaactattctcttcaatttatgcggacatggacattttgatatgcaagcatacacagagtatttcagtggtaacctagaagatctaaattatgatgagcaagaactagctatggctctttcgggtctcccctcagttactgactgaa

SEQ ID NO: 281167 - DNA, 775 bp, Unknown
  Bacterial polypeptide expressing nucleotide sequence isolated from the Sargasso Sea
agacaaaagcccaattgtgatgctatgaaaaaaaatggtgctgagatagttccagtttatactggtagtcaaactcttgttgatgctgtaagcgaatgtatgagatactgggtatcgaattgtgataccactcatatgtgtgtaggttcaactgtaggtcctaatatttttgtcaaaatttgtggatggagtacatcacaaatttcaagagagcttttggtacaaataaaaaaagaattcggaagaattccaaaaaaaataaaattattaaactgtgttggaggagggtcttcaagctttggtttttggaacgaatttatgcattacaataaaaagcaggttgaatttattggtattgaagctggaggaccaaaaaaaagtaaaaggcatgccgctcctttaacttatggatcaaaaataggaattctccatggagcagctcaatatgtaaaccaagattttgaaggtcagatagaagaaacagaatctattagcgctggattagactatccaggagtttcacctattcattgttttttaaaagatactaaaagagcaagatatactgcagcaactgatgaggaagctttaagcgcttataaactagtaacaaaatatgaaaatttaaatccaagtttggaaccaagccatgcatttgcagaagcgataaaattagctccacagttaagcaagaatacagttataattgtaaactcatgtggagatgcacataaagatcgagatattttgaaacaaaggctgggaaaattttaat

SEQ ID NO: 281168 - DNA, 817 bp, Unknown
  Bacterial polypeptide expressing nucleotide sequence isolated from the Sargasso Sea
gatggagtccttcggggcaagctgtattgcttcaccgtccaagacaactgaatccggtaaagcaatcctggcggaaaacccggattccaccggcagcctcggaattgcgatttcagaagcggttgaggtcgcggcacagaacgatgatgtgaaatatgcgctgggaagcgtactgaatcacgtgcttacccaccagtcgatcatcggtttggaagccatcaagcagatggaaatggccggagactaccctgacgtggtggtgggctgcaccggtggcggatccaacttcgccgggatcgtctttcccttcatcggggaaatgttccggggtggaagcaaaatccgggtggttgctgttgaacctgcagcctgtccttctttgaccagaggaaaatatgcctacgattttggagacacggcgcatcttacccctttgaccaaaatgcataccctgggttcaacttttgttcctccaggcttccacgccggaggattgcgttatcatggcatggcaccgatgatcagtcacctgcgggaattagatgttctggaagcaaccgcgtatcaccagaatgcctgctttgagtccggggtaatgtttggacgtaccgaagggatccttcctgcccccgaagcgaaccatgcggtcaaaggagcgatcgaagaagctttgcgctgtaaacgtgagggtaaaagcgaaaccatcctcttcaatctctgcgggcatggtcatttcgacatgcaggcctacaccgattacttcgcgggcaatctgaaggaccggaactacgacgaacaggaactggcgatggctctc

SEQ ID NO: 281169 - DNA, 689 bp, Unknown
  Bacterial polypeptide expressing nucleotide sequence isolated from the Sargasso Sea
agtcagtgaatgtatgagatattgggtatcaaattgtgacactacacacatgtgtgttggaagtacagttggtccaaatatatttgtaaaaatttgtggatggagtacagcacaaatttcaagggaattaaaaatgcaaattaaacaagaattcaaaaaaattccaaaaaaaattaaattaattaactgtgtaggtggtggaagttcagcatatggtttttggagtgaatttatagattttaacaaatcacaagtagaattagttggtgtagaggctggaggtccaaaaaaatcgaaactccatgctgcccctttaagtagaaatgccaaaattggaattttacatggtgcagcttcttatgtttgtcagaacaatgaaggtcaaattaatgaaactgaatcaataagtgctggattggattatccaggtgtcagtccaatacattgttttttaaaagacacaaaacgagcgagatacacttatgcatttgatgaagaagcgctcaaagcacatgtaatggtaaccaaatttgaaaaacttaatccaagtttagaacctagccatgcatttgctgaggcgataaaaattgctccaaaattaagtaaagatacaattataatcgtaaactcgtgtggtgatgctaaaaaagatagagatatcctaaaagacagattgggtaaatattaat

SEQ ID NO: 281170 - DNA, 286 bp, Unknown
  Bacterial polypeptide expressing nucleotide sequence isolated from the Sargasso Sea
tcagcaggcttagattatccaggaattggcccagaacattcatttttatttgaagaaaaaagagtaacctacatgtcagcaacagacaaagaagctcttgaagcttttcaatattgttgcaagttagaaggtataattccagctttggaaccagctcatgcattagctgtattaaagaaaatagcaaaaaactatagtaaagataaaattattgtcatgaacatgtgtggtcgaggtgataaagatatttttacaatagctgatgaattaaacataaacatttaaa

SEQ ID NO: 281171 - DNA, 829 bp, Unknown
  Bacterial polypeptide expressing nucleotide sequence isolated from the Sargasso Sea
gaaatttggtttaaagtgcaaaatttttatgggtgcaaaagatatcaaaagacaaaaaccaaattgtgatgccatgagaaaaaatggagctgaaattgtacctgtatattctggaagtcaaactttagttgatgcagtaagtgagtgtatgagatattgggtttctaattgtgataacactcatatgtgtgtgggctctacggtgggtccaaatattttcgtcaaaatttgtggatggtcaactgctcaaatctcaaaagagcttaaaactcaattaaaaaaaagatttgataaaattccaaaaaaaataaaattaataaattgtgttggtggtggtagttctgcttatggtttctggagtgaattcatcgattatgataaaaaacaaatcgaattaataggtgtggaagccggaggaccaaaaaagtcaaaattacatgctgcaccattaagtaaaaatgctaaaattggaatattgcatggtgcagcatcatatgtatgtcaaaacaatgagggtcaaatccatgagacggagtcgattagtgctggattagattatcctggagtaagtccaattcattgttttttaaaagatactaaaagggcgaggtatacttacgcaacagatgaggctgcccttaatgcttataaaatggttacaaaatttgaaaaattaaatccaagtttagaaccttgccacgcttttgcggaagctataaggattgcaccaaaattaaataaagacactatcttaattgtaaattcatgtggagatgccaaaaaggacaaagatattttaaaagcaagactaaaaaataataatgagtaa

SEQ ID NO: 281172 - DNA, 847 bp, Unknown
  Bacterial polypeptide expressing nucleotide sequence isolated from the Sargasso Sea
aaaatgttaagtatggcagctaaaaaatttggtttgaaatgtaaaattttcatgggtgctaaagatattaaaagacaaaaaccaaattgtgatgctatgagaaaaaatggtgctgaaattgtacctgtatattcaggaagtcaaacattagttgatgcagtaagtgaatgcatgagatattgggtatcaaattgtgatacaacacatatgtgtgttgggagtacagttggtccaaatatttttgtaaaaatatgtggatggagtactgcacaaatttctagagaattaaaaatacaaattaaagaaaaattcaaaaaaatcccaaataaaattaaattaattaactgtgttggtggtggaagctcagcatatggtttttggagtgaattcatagattttaataaatcacaaattgaattaattggagtagaggctggaggtccaacaaaatcaaaactgcatgctgctcctctaagtagaaacgctaaaattggaattttgcatggtgcagcttcttatgtgtgtcaaaacaatgatggtcaaataaatgacacggaatctataagtgctggattagattacccaggcgtaagtccaatacattgttttttaaaagatacaaaacgtgcgagatacacctatgcaactgatgaggaagcacttaaagcacatgtgatggtaactaaattagaaaaacttaatccaagtttagaacccagtcatgcatttgcagaagcaattaaaattgctccaaaattaagtaaagatacaataataattgttaactcttgtggtgacgctaaaaaggatagagatattttaagagaaagactgggtaaaaattaat

SEQ ID NO: 281173 - DNA, 437 bp, Unknown
  Bacterial polypeptide expressing nucleotide sequence isolated from the Sargasso Sea
catggagggctttttgcgctcccgcagagacgctggctctaagctattagttgcgtacattactggaggctttgaaggttgggaagccgccgttgagacagcggcggccgcaggagccgatgctattgaaatcggtattcctttttctgacccggttatggatggtcctgtaattcaagaagccagccaaagggcgctggaaggtggcgctacgccagcctctgtgctggcaactgtgcctaatctggacacgggtgtgccacacgctgtgatgacctattacaaccttgcccaccatcccgggcatgatcgattcgcagcgactctagctagctcaggtatcgacgcagctatattgcccgatttaccatttgtggaatcaggtccgtggcgccacgccgcagcgaatgtcgggattgaaacgatcatgcttgcgg

SEQ ID NO: 281174 - DNA, 427 bp, Unknown
  Bacterial polypeptide expressing nucleotide sequence isolated from the Sargasso Sea
agttggtgtagaggctggaggtccaaaaaaatcaaaactccatgccgctcctttaagtagaaatgctaaaattggaattttacatggtgcagcttcttatgtttgtcaaaataatgaaggtcaaattaatgatactgaatcaattagtgctggattagattaccctggtgttagtccaatacattgttttttaaaagatacaaaacgagctagatacacttatgcaactgatgaagaagcgctaaaagcacatgcgatggtaactaaatttgaaaaacttaatccaagtttagaacctagtcatgcatttgctgaagcgataaaaattgctccaaaattaagcaaagatacaataataattgttaactcttgtggtgatgctaaaaaagatagagatattttgagagaaaggttaggtaaaaattaa

SEQ ID NO: 281175 - DNA, 733 bp, Unknown
  Bacterial polypeptide expressing nucleotide sequence isolated from the Sargasso Sea
gaagctaatggcggtgctcataaaatatataatgcaaccgtgcatgctcttctttgtagggctatgggtaaaaaatatatcgttggtgatactggcgcaggttatgcaggaaaaatgttaagtatggcagcaaagaaatttggcttgaaatgtaaaatatttatgggtgctaaagatattaaaagacaaaaaccaaactgtgacgcaatgaaaaaaaatggtgctgaaattgttcctgtgtactctgggagtcaaactttggtagatgctgttagtgaatgcatgaggtactgggtatcaaattgtgacaatacacatatgtgtgttggtagtactgttggtcctaatatatttgttaaaatatgtggttggagcactgctcaaatatctagagaattaaaaatacaattgaaatctgaatttaaaaagatcccaaaaaaaattaaattaattaattgtgttggaggtggaagttcagcttatggcttttggagtgaatttatagattatgacaaaaaacaaattgagttgattggggttgaagcaggtgggccaaaaaagtcaaaacttcatgctgctcccttaagtagaaatgcaaaaattggaattttacatggtgctgcatcgtatgtttgccaagataatgaaggtcaaattaatgaaaccgaatctataagtgctggattagattatccaggtgtaagtcccattcattgtttcttaaaagatacta

SEQ ID NO: 281176 - DNA, 382 bp, Unknown
  Bacterial polypeptide expressing nucleotide sequence isolated from the Sargasso Sea
tctgctggcatcgatccgatctttttgcttgcgcccacgtccacggacgagcgcatcgcggaagtcggcaaaattgccagtggttacgtctattatgtgtcgttgaagggcgtgaccggcgcggcaaatctggacgtttccagcatcgcgagtaaaatcccggccatcaagtcgcacgtgcccctgccggtgggcgtcggtttcggcatccgcgacgcgcaaacagcgcgtctggtggccgaagtgtccgatgccgtcgtgatcggtagccgtatcgtgcagttgctcgaacaagcggcgcctgaagctgccgccgagacgctcacgcgcttcgtcgccgaggtgcgcgaggcgatcgacagcgtcgcgactgcccgataac

SEQ ID NO: 281177 - DNA, 418 bp, Unknown
  Bacterial polypeptide expressing nucleotide sequence isolated from the Sargasso Sea
ggctggaggcccaaaaaaaagtaaaagacatgcagcgcctttaacttatggatcaaaaattggaattttgcatggtgcagcacaatatgtaaatcagaatacagaaggtcaaatagaagaaacagaatcaattagtgcaggtctggattatcctggagtttccccattacattgttttttaaaagatacaaaaagagcaagatacgctgctgctactgacgaagaagctttagatgcatatcaattggttaccaaatatgaaaatttgaatcctagcctagaaccaagccatgcgtttgcagaggcaataaaaatagcaccaaaattaagtaaagacacaattataattgtaaattcatgcggggatgcgcagaaagatcgagatattttaaaacaaagattgggaaataaaaaatga

SEQ ID NO: 281178 - DNA, 966 bp, Unknown
  Bacterial polypeptide expressing nucleotide sequence isolated from the Sargasso Sea
atttggattctggggaagtaaattcggtggaagctttattccagaaactttaaaaaaaccaatagaggatttaactctaaattttcaaaaacttaggaaaaatagaaaatttctgaaaacaagagattattattttaaaaattacattggctctcctactcgatttttaaaattagaaaatttatcaaaccatttaggtggtgcccagatatgggcaaaagttgtttcggatgctaatggaggagctcataaaatttataatgcaacagttcatgccttaatttgtaaaagtatgggtaaaaaatttatagtgggagatacaggagcgggttatgcgggtaagatgctaagtatggctgcaaaaaaatttggtctaaaatgtaaaatttttatgggtattaaagatatgaaaagacaaaaaccaaattgtgatgcaatgagaaaaaatggtgctgaaatagttcctgtttattcgggtagtcaaacattggtcgatgcggttagtgaatgtatgagatattgggtttcaaattgtaatactacacatatgtgtgtaggttcaactgtggggccaaatattttcgtaaaaatatgtggatggagtacctcacagatctctagagagttaaaaatacaaattaaaaaaaaatttaaaaaaattccaaaaaaattaaaattaataaattgtgttggaggtggaagttcagcctatggattttggagtgaatttatagattatcctaaatcacagattgaactaataggtgttgaggctggcggaccaaaaaattctgcattacatgctgcaccattgagtagaggagccaaactaggaattttacacggagccgcctcttatgtttgtcaaaataatgaaggacaaataaaaaaaacagaatctataagtgctggcttagactatccaggggtaagtccaattcattgttttttaaagatgcaagaagg

SEQ ID NO: 281179 - DNA, 784 bp, Unknown
  Bacterial polypeptide expressing nucleotide sequence isolated from the Sargasso Sea
tttatctaatcatttgggtggtgctcaaatatgggccaaagttgtatcggaagctaatggtggtgcccataaaatatacaacgcaactgttcatgccctaatttgtaaggctatgggaaaaaaatatatagttggtgacactggtgctggttatgcgggtaaaatgttaagtatggctgcaaaaaaatttggcctaaaatgtaaaattttcatgggtgcaaaagacatcaaaagacaaaaaccaaattgcgatgctatgaaaaaaaatggtgctgaaatagttcctgtatattcaggcagtcaaactttggtcgatgcagttagtgaatgtatgagatattgggtatcaaattgtgacactacacatatgtgcgttggaagtacagttggcccaaatatatttgtaaaaatttgcggatggagtacagcacaaatttcaagagaattaaaaacacagattaaaaaagaattcaaaaaaattccaaaaaaaattaaattaattaactgtgtaggtggtggaagttcagcatatggtttttggagtgaatttatagattttaataaatcacaaatagagctggttggtgtagaggctggaggtccaaaaaaatcaaaactccatgccgcacccttaagtagaaatgctaaaattggaattttacatggtgcagcttcttatgtttgtcaaaacaatgaaggtcaaattaatgatactgagtcaattagtgctggattggattatccaggggtaagcccaatacattgttttttaaaagatacaaaa

SEQ ID NO: 281180 - DNA, 385 bp, Unknown
  Bacterial polypeptide expressing nucleotide sequence isolated from the Sargasso Sea
gctgctcctttgagtagaggtgctaaaattggggtattgcatggtgctgctcaatatgtttgtcaaaataacgacggacaaattaatgaaactgaaagcataagtgcaggtttagattatccaggagtaagtccgatgcattgttttttgaaagaaacaaaaagggctaaatatacatatgcaacagatgaagaagctttaagtgcatataagctggttacaaagttagaaaaactaaaccctagcttagaaccaagccatgcatttgcagaggcaataaaaattgctccgaaactaaaaaaagatacgatcattgttgtaaattcatgtggagatgcaaaaaaagatagggatattttaaaaaaaagattaggaaaaatatgaa

SEQ ID NO: 281181 - DNA, 235 bp, Unknown
  Bacterial polypeptide expressing nucleotide sequence isolated from the Sargasso Sea
aatgtctaaactagaaaaaaatattgatacttcaacgatagatacattcagttgtatgccagatgaaaacggccattttggtttgtatggaggacgttttgtagctgaaactttaatgggtccattagaggaacttgaagaagcatataaaaaatatatcaatgatcctgaatttaatgctgaatttgtttccagactgaaacattatgtcgggagacctttctcactttatcat

SEQ ID NO: 281182 - DNA, 916 bp, Unknown
  Bacterial polypeptide expressing nucleotide sequence isolated from the Sargasso Sea
taagctagaaaatttaactggttatttaaatggagctcaaatttgggcgaaagttgtgtcggaagcgaatggtggcgctcataaaatttataatgctactgttcacagtcttatagctaaaaaagcaggaaaaaaatatatagttggagatacaggagctggatatgctggaaaaatgttaagtatggcagcaaaaaaatttggtttgaaatgtaaaatatttatgggggcaaaggatattaaaagacaaaaaccgaattgcgacgcaatgaaaaaaaatggtgcagaaataattcctgtttatacaggtagtcaaacactcgtagatgcagtaagtgaatgtatgagatactgggtatcaaactgtgacaccactcatatgtgtgtcggatcaaccgttggcccaaatatatttgtaaaaatttgtggatggagtacatcacaaatttccagggaactgttaattcaaattaaagaagaatttggtgaaattccaaaaaaattaaaattaataaactgtgttggtggaggatcttcaagttttgggttttggaatgaatttatgcattatgataaaaaacaaattgaatttattggggttgaagccgctggaccaaaaaaaagcaaaagacacgcagcacctttgacttatggatcaaaaattggaatattgcatggctcagcccagtatgtaaaccaaaatacagaaggtcaaatagaagaaactgaatctattagtgcgggccttgattatccaggtgtatcagctctacactgttttttaaaagatacaaaaagagcaagatatacagcagcaagtgacgaagaggcattaaatgcatatcaagtggttactaaatttgaaaatttaaacccaaagtttagaacccaagtcatgcttttgctgaagcaatta

SEQ ID NO: 281183 - DNA, 388 bp, Unknown
  Bacterial polypeptide expressing nucleotide sequence isolated from the Sargasso Sea
agcaccactcacgtatggatctaaaattggaattcttcatggtgctgcgcaatatgttaatcaaaatactgatggtcaaatagaggaaactgagtcaatttctgctggactagattatcctggtatttctccacttcattgttttcttaaagatacaaaaagagctaggtacactgcagcaagtgatgaggaagctttaaacgcttataaacttgtaacaaagtttgaaaaattaagaccctccttagaaccaagccacgctttctcagttgcaatagcagagtctaaaaaattaagcaaagatacaattgttgtagtcaatagttgtggagatgcttacaaagataaaggtattttagagaaaagattggggaaaaaatatgtttaa

SEQ ID NO: 281184 - DNA, 477 bp, Unknown
  Bacterial polypeptide expressing nucleotide sequence isolated from the Sargasso Sea
aatttatggattatgataaaaagcaagttgagtttattggggttgaagcaggaggaccagctaaaagtaaaagacatgcagctcctttaacttatggttccaaaataggtatacttcatggtgcagctcaatatgtaaatcaggatagcgatggtcagattgaagaaactgagtcaatatctgcaggtcttgattatcctggaatttcaccacttcattgctttttaaaagatacaaagcgcgcaagatatacagcagctagtgacgaagaagctttaaaggcctttcaaatagttacaaaatatgaaaatttaagaccatctctcgaaccaagtcatgcattctctgtagctctcaaagaaagcaaaaaatttagcaaggacacaatagtaattattaatagttgtggagatgcatataaagaccgtggaattttagaacaaaagttgggaaagaaatatgttaaatccaattagt

SEQ ID NO: 281185 - DNA, 594 bp, Unknown
  Bacterial polypeptide expressing nucleotide sequence isolated from the Sargasso Sea
tatgacagactctataaaatacattctcgaagaatcaaaagcacctaaatattggtataatattaactctgatttaccaagtccaccaccaccacctttacacccaggaactaaacaacctgcaggtccagatgactttgctccactatttccaatgggtttaataatgcaggaagtttcaacagaaagagaaattgaaatacctgagccagtaagagagatttataaacaatggagaccatcacctttgtttagagcaagaaggttagaaaaatatttagatacaccagctaaaatttattacaaatatgagggagtcagtccaacgggcagtcataaacctaatacggcagtaccacaggcattttttaataaagaagaaggtgttaaaaaaatatttactgaaacaggggctggtcaatggggtagttcattggcttttgccggacagatgtttggaatagatatagaagtatttatggttaaagtaagctttgaacaaaaaccttatagaaaactaatgatgcaatcttttggtggaacttgtcacccaagtccgtcagaacttaccgattttggaaaaaacttttatct

SEQ ID NO: 281186 - DNA, 910 bp, Unknown
  Bacterial polypeptide expressing nucleotide sequence isolated from the Sargasso Sea
aaattaagaaacgatgagacatttatcgctgagagagattattattttaaaaattttgttggagcgccaactccatttataaaattggagaaccttacgaagcatcttggtggagctcaaatttattgcaaactggtttctaaagcaacaggtggagcgcacaaagcttacaatgcagtcgttcacagcttaatttgtaagcgattaggcaaaacttatatagggggtgacaccggggccggatatgcagggaagatgctcagtatggcagcggcaaaatttaatttaaaatgcaaaatattcatgggcgcaaaggatattgaaagacaatctataaatgtattttctatgcgaagttatggcgctgaagttgttcctgtaaattctggctcacaaactttagtggatgctgtatcagaatgcatgagatggtggacaagtgaaaatgaagaagcgcatatgtgtgttggaagcactgttggccctactatttttgttaaaatatgtgcttggtcaaccgctcaaatatccagagaaatgaaaaaacaagtaatggatgaatttggtgaagttccaaaggatatgaaattaattaattgcgttggtggaggatcgtcagctgcaggtttttggaatgaatggattgattatgataatgttgagctcataggggtagaagctgggggacccgaagggtcttcaaaacatgccgcacctttgacaaatgacgcgcctatcggggttcttcatggagcaactcaatatgttattcaagacgatcagggggaaattgaagagacagactcaatcagtgctgggcttgattatccaggtgtgagtccaattcattgtttcttaaaagagactggaagagcaagatacacttctgcaagtgacgaggaggccatag

SEQ ID NO: 281187 - DNA, 962 bp, Unknown
  Bacterial polypeptide expressing nucleotide sequence isolated from the Sargasso Sea
ttctaaagcaacaggtggagcacacaaagcttataatgcagtagttcacagcttaatatgtaaacgattaggtaaaacttatatagggggtgacactggtgccggatatgcaggaaagatgctcagtatggcagcggcaaaatttaatttaaaatgcaaaatatttatgggcgcaaaagatgttgaaagacaatctataaatgtattttctatgcgaagttatggcgctgaagttgttcctgtaaattctggctcacaaactttagtggatgctgtatcagaatgcatgagatggtggacaagtgagaatgaagaagcacatatgtgtgttggaagcactgttggccctactatttttgtcaaaatatgtgcttggtcaaccgctcaaatatccagagaaatgaaaaaacaagtaatggatgaatttggtgaagttccaaaaaatatgaaattaattaattgcgttggtggaggatcgtcagctgcaggtttttggaatgaatggattgattatgataatattgaactcataggggtagaagctgggggacccgaagggtcttcaaaacatgccgcacctttgacaaatgactcacctatcggggttcttcatggagcaactcaatatgttattcaagacgatcagggggaaattgaagaaacagagtcaatcagcgctggacttgattacccaggtgtgagcccaattcattgtttcttaaaagaaactggaagagcaagatacacttctgcaagtgacgaggaggccatagaagcttttcaattagtaagtaaaaatgaaggttttgtaagcccctcacttgagccttcacatgcgttcgcagaagcaatcaaaattgcacctaaattaagtaacgatacaattatcgttgtagattcttgcggagactctgcaaaagactctaaaatcattgctgagagacttggttataaaatatgac

SEQ ID NO: 281188 - DNA, 619 bp, Unknown
  Bacterial polypeptide expressing nucleotide sequence isolated from the Sargasso Sea
atgttaagtatggctgctaagaaatttggtttgaaatgtaaaatttttatgggtgcaaaagatataaaaagacaacaaccaaatgttaaagcaatgaaaaaaaatggtgcagatgtaattcctgtttattctggaagtcaaacactagtagatgctgtatctgaatgtatgagatattgggtgtctaattgtgatacaactgcgatgtgtgttggtagtacagtaggacctgcaatttttgtacgaatttgtgggtggagtactagccaaatatctagagaacttaaaattcaattaataaatgaatttggtgaagttcctaaaaaactaaaactatataattgtgtaggaggaggttcctcaagttttggtttttggaatgaatttatggattatgataaaaaacaagttgagtttattggggttgaagcaggaggaccagccaaaagtaaaaaacatgcagctcctttaacttatggttccaaaattggtatacttcatggcgcagcacaatacgtaaaccaaaatagcgatggacagattgaagaaactgaatcaatatccgcaggtcttgattatcctggaatttctccactccattgctttttaaaagatacta

SEQ ID NO: 281189 - DNA, 460 bp, Unknown
  Bacterial polypeptide expressing nucleotide sequence isolated from the Sargasso Sea
atgcattatgataaaaaacaagttgagtttattggtgttgaagctggaggaccaaaaaaaagcaaaagacacgcagctcctttgacttatggatcaaaaattggggtacttcatggagcaatgcaatatgtaaatcaggataaaatgggtcaaatagaagaaacagaatcaattagtgctggtctagattaccctggagtttctccacttcattgttttttaaaagatacaaatagagcaagatataccgcagcaagtgatgaagaagctttaaaagcatatcagttagttactaaatatgagaatttaaacccaagtttagaaccaagtcatgcttttgctgaagcaattaaaattgcacacaaattaagcaaagacacaattataattgttaactcttgtggtgatgcaaaaaaagataaggacattataaaagaaaaattaggtaaaaaaatatgag

SEQ ID NO: 281190 - DNA, 859 bp, Unknown
  Bacterial polypeptide expressing nucleotide sequence isolated from the Sargasso Sea
tttgggtggtgctcaaatatgggccaaagttgtatcggaggctaacggtggtgcacacaaaatatacaatgcaactgttcatgctttaatttgcaaggctatgggaaaaaaatatatagttggtgatactggtgctggttatgctggtaaaatgttaagtatggctgcaaagaaatttggtctcaaatgtaaaatttttatgggtgcaaaagatattaaaaggcaaaaaccaaactgtgatgctatgagaaaaaatggtgcagaaatagttcctgtatattctggtagccaaacattagttgatgcagtaagtgaatgtatgagatattgggtatcaaattgtgatactacacatatgtgtgttggaagcacagttggtccaaatatctttgtaaaaatatgtggatggagcacagctcaaatctctagagaattaaaaaaccaaattaaacaaaaattcaaaaaaattcctaataaaataaaattaattaactgtgtgggtggtggaagttcagcatatggtttttggagtgaatttatagactttcataaatcacaaatagagttaattggtgttgaggcaggtggtccaaaaaaatcaaaacttcatgctgctcctctaagtagaaatgctaaaattggaattttgcatggtgcagcatcatatgtttgtcaaaatagtgaaggtcaaataaatgacactgaatcaattagtgctggattagattatcctggcgtcagtccaatacattgtttcttaaaagatacaaaacgagctagatacacttatgcaactgatgaagaagcgcttaaagcacatgtgatggtaactaaatttgaaaaacttaattcaaagttt

SEQ ID NO: 281191 - DNA, 385 bp, Unknown
  Bacterial polypeptide expressing nucleotide sequence isolated from the Sargasso Sea
tatgggttcaaaaattggtatacttcatggagcagctcaatacgtaaatcagaatagtgatggtcagattgaagaaaccgagtctatttctgcaggacttgactatcctggaatttcaccactacattgctttttaaaagacactaagcgtgcacgttatacagcagctagtgatgaacaagcgttaaaagcctaccagattgtaacgaaatatgaaaatttaagaccgtctctagaaccaagtcatgcattctcagttgcgatcaaagaagcaaaaaaattgagcaaaaatacaatagtaattattaatagttgtggagatgcatataaagaccgtggaattttagaaaaaaagttgggaaagaaatatgttaaatccaattaa

SEQ ID NO: 281192 - DNA, 748 bp, Unknown
  Bacterial polypeptide expressing nucleotide sequence isolated from the Sargasso Sea
tgaacccgtaagagaaatttataaacagtggagaccttcaccattatatagagcaagaagattagaaaagtttttagatactcctgctaaaatttattataaatatgaaggagtaagcccaacaggtagtcataagccaaatacagctgtgcctcaggctttttttaataaagaagaaggtgtaaaaaaaatatttactgagactggagctggacaatggggtagttctttagcatttgctggacaaatgtttggaatagatattgaagtttttatggttaaaatcagttttgaccaaaaaccttacagaaaattaatgatgcagtcatttggagctaaatgtaatccaagcccatcatctttaaccgattttggaaaaaaattattagaagaaaatcctgataatccaggaagtttaggtatagctatttcagatgctattgaagcagtcgttaaaagtgaaggtaaggccaagtattctttaggtagtgttttaggacatgttttaatgcatcaaacaattaatggcaatgaagctattttgcaaatggagcaagcaggtgattatcctgatattattgttggatgtaccggaggaggtagtaacttatcaggtttaatgtttccttttttaggccagcaattacgtggtggtaaaaaaattgatattattggttgcgaacctttatcttgtccttcttttacaaaggcaaatatgcatatgatcatggtgatatggcaaaaatga

SEQ ID NO: 281193 - DNA, 231 bp, Unknown
  Bacterial polypeptide expressing nucleotide sequence isolated from the Sargasso Sea
aaaaaagaatttcttatatgtatgctacagataatgaagctattgaagcatttcaatattgttgtaagcatgaaggaattattcctgctttagaaccatctcatgctttagcagtattaataaaaattgctaaaaactacagcaaagacaaagttgtagtaatgaatatgtgtggacgtggtgataaagatatttttactgtcgcagaagaattaaaaattaaaatataat

SEQ ID NO: 281194 - DNA, 577 bp, Unknown
  Bacterial polypeptide expressing nucleotide sequence isolated from the Sargasso Sea
acttaaagttcagctaattgatgagtttgggtctattccaaaaaaacttaaactttataattgtgttggtggtggtagttcgagctttggattttggaatgaatttatggattatgataaaaagcagtgtgaatttataggggttgaagctggtggacctactaaaagtaaaaaacatgcagcacccttaacttatgggtcaaaaattggaatcctgcatggagcaattcaatatgttaatcaaaactctgatggacaaatagaagaaacagagtctatttctgcaggacttgattaccctggaatttctccgcttcattgttttctaaaagatacaaaaagagcaagatataccgcagcaagtgatgaggaagctttaaatgcatacaagcttgttactaaatatgaaaaattaagaccatctttagagccaagtcatgccttttcagttgcaataaaagagtcaaaaaaattcagcaaagatactatagtagtagttaatagttgtggggatgcttacaaagaccggagcattttggagaaaagattaggaaaaaaatatgttaaatccaattag

SEQ ID NO: 281195 - DNA, 820 bp, Unknown
  Bacterial polypeptide expressing nucleotide sequence isolated from the Sargasso Sea
gttggggcaccaacgccctttataaaattggataatctgactaattttttgggtggcgcagaaatatgggcaaaaatagtgtccgaaaacccagggacagcccataagatctacaatgttttagttcattgcttaattgctaagcgagctggtaaaaaaactgtgtgtactgatactggtgctggaatgaacggaaaaaatcttgcaatggtagcaaaaaaatttcatttgaagtgtaagatatttatgggttcaattgatatacaaaggcaacaggaaaatgtaatagtaatgaaagaatacggtgcagaggtgattcctgtcaacactgggtctaggactctcgtggatgcggtttcagaatgtattagatacttcgtagctaataatgataccactcatttagtaattggttcagctgtaggtcctgctatatgggcccgaatctgcgcctggagtgcagctcaaatttcgagggaattaatgagtcaaattgaagatgaatttggaaaagttccaaaaaagttaaaacttttaaattgtgttggtggaggttcatcagctcttggtttttggaatgaatttattgactacaacaaaaatcaagttgagttaattggagttgaggctggtggaagtaaaaaatcaaaaaaacatgctgctccgctaacaaatggttctaaaattggaatacttcatggttcagctcaatatgttatacaaaataaagatggtcaaatagaagagacagagtcaatttctgctggtcttgattatcctaggagtttcacctattcactgctttttaaaagatactaaa

SEQ ID NO: 281196 - DNA, 760 bp, Unknown
  Bacterial polypeptide expressing nucleotide sequence isolated from the Sargasso Sea
aaaaaatggagcggaagttgttcctgtttattcaggaagtcaaacacttgttgatgctgtatcagagtgtatgagatactgggttgctaattgtgatcatgcacatatggcagtaggatcaactgtaggtccctctatatttgttcgaatatgcggatggagtacgagtcaaatctcaagagaacttaaatctcaaattcttgatgaatttggttcaatgccaaaaaaaataaaactttataattgtgttggtggcggctcatcaagtttcggtttttggaatgaatttatggattatgacaaaaaacaaattgaatttataggtgttgaggctggtggtcctgccaaaagtaaaaaacatgcggcacctcttacttatggatcaaagataggtatactccatggagctgctcaatatgttaatcaaaattcagatggacaaatcgaggaaacagaatcaatttcagctggtcttgattatccgggtgtttctccacttcactgttttttgaaagatgtcaagcgagcaaggtacactgctgcaagtgatgaggatgctttaaaggcttacaaattagtaactaaatatgaaaatctaaaaccatctttagaaccaagtcatgctttttctattgcaattaaagaggcgcgtaaacttagcaaagagacaattgtgattgtcaatagttgtggagatgctcataaagacaaagctattttagagaaaagattgggaaaaaaatatgccaaatttaattga

SEQ ID NO: 281197 - DNA, 673 bp, Unknown
  Bacterial polypeptide expressing nucleotide sequence isolated from the Sargasso Sea
atgagtgataccgttaaatacatactacctgaaagtgaacttccaaaaagctggtacaacattactgccgatcttccggaatctcctcctcctgttttgcatccaggtactggagaacccgtgggacctgatgatttagctcccctttttccaatggatcttatcctacaggaagtaagttctgaacgttatatagacattcctgaacctgtgcgagagatatataggcagtggcgtccgagccctctttatcgtgcaagaagattagagaaggctctagatacacctgcaaaaatatattacaagtatgaaggcgtcagccctacgggaagccacaaaccaaatactgcagttgcccaagctttttataacaaagaatctggtgtaaagaaaatttcaactgagactggggcaggccagtggggatcttcattggcctttgccgggtctatttttggattggagatagaggtttacatggtaaaagtcagtttccagcaaaaaccttatcgcaaggcaatgatggaatcctttggcgcgacgtgcattgcttctccatctgacaggactgagtttggtaaagcatacctggccaagaaccctgattctacaggaagtcttgggattgctatctctgaagcagtcgaagttgcagcaactaatgatgatgtta

SEQ ID NO: 281198 - DNA, 420 bp, Unknown
  Bacterial polypeptide expressing nucleotide sequence isolated from the Sargasso Sea
caggaggtccaaaaaatagtaaattacatgctgcacctttaacaaatggatctaaaataggaattttacatggtgctgcacaatacgtaatacaagatcatgagggacaaattggatcaacagaatctatttctgcgggtttagattatccgggtatttcacctttacattgttttcttaaggatgcaaaaagggcaagatatacctctgctaccgatgaagaggctttaaaagcttataaactagtttctagtttggaaaatatttctccatcattggaaccctcacactcatttgcggaggcgattaagatggctccaaaattaaaatcttctgatgtaataattgttaattcttgtggggacagccttaaagataaagatattattaaacaaaaacttggaagttacataagatgaa

SEQ ID NO: 281199 - DNA, 805 bp, Unknown
  Bacterial polypeptide expressing nucleotide sequence isolated from the Sargasso Sea
aataatttaacaaaatatcttgggggagctcaaatatggtgtaaagacgtttctgcaattaatggggatgcgcataaggcataccacgcaactgtaaatgcattaatttgtaaagagtctggtaaaaaatttatagctggagatacaggagctggaatgtttggaaaaaatttagctcttgcagcaaaagaaatgaaattatctgcaaaaatttttatgggtacgaaagatatttctagacaagcgccaaatgttaaatttatgcgagaagcaggtgctgaagttgtaccagttgattcaggttcaaaaaccctagttgatgcagtttcagaatgtatgaggcattatgtcagtaactgtgatacaactcatttagctgtaggatctgcaattggagcaaatatttttttaaaaatttgtgcctggagcacatctcaaatttcaagagaattaaaaagacaattaataagagagtttggagaaattcctaaactcaaactaattaatgttataggtggaggaagctcagcacttgggttttggaatgagtttatagattacgataaaaaacatgttgaacttattggggttgaagcaaaatacgcagcaccactagcgacaaatgcaaaagttgctattctccatggagctgcacaatattgtttagttgataaagagggtcaaattgcggagactcattcattgtctgcaggtttagattatccgggctcgtcgcctttgcatggtttactaaaggacacaaaaagagcaagatacacattggcttctgacaaagaggcataaa

SEQ ID NO: 281200 - DNA, 583 bp, Unknown
  Bacterial polypeptide expressing nucleotide sequence isolated from the Sargasso Sea
atgacagatacgattaaatatttcttagaagaaagcaaaatgccaaagacttggtataatattgctgcggatttaccaaaacctatggaaccgccattacatccaggaactttaaagccaattggaccagatgatctagcacctttatttccaatggctttaattggtcaagaagtatctcaagaaagagaaatagaaattcctgaaccagtaagacaaatttataaacaatggagaccatcgccattgtatagagcaagaaaattagaaaaacatttagataccccggcaaaaatttattataaatatgaaggtgttagtccttctggtagtcataaaccaaatacagcagtgcctcaggcattttataataaagaagaaggtacaaaaaaaataactacagaaacaggtgctggacaatggggaacatcattagcatttgcatgtaaattatttggaattgaattagatgtttatatggtaaaagtaagttttgagcaaaaaccatatcgaaaacttgttatgcaaacttatggtgctagatgtgttgcaagtccttcaaatgaaacagatagtgaaaagc

SEQ ID NO: 281201 - DNA, 775 bp, Unknown
  Bacterial polypeptide expressing nucleotide sequence isolated from the Sargasso Sea
aagacaaaaacctaattgtgatgcaatgaaaaaaaacggtgctgaaattgtaccagtttactcaggtagtcaaaccttagttgatgcagtgagcgagtgcatgagatattgggtatcaaattgcgataatactcatatgtgtgtagggtctacggttggtcctaatatttttgtcaaaatttgtggatggagcacttcacagatttcaaaagagctaaaaatacaattaaaagaaaaatttaaaaaaattccaaaaaaaattaaacttattaattgtgttggtggtgggagttcagcttatggtttttggagtgagtttatagattatgacaaaaaacagattgaactagttggtgtagaggcaggagggccaaagaaatcgaaacttcatgcagcacctttaagtagaaatgcaaaaattggaattttacatggggctgcttcttatgtttgtcagaataatgaaggacaaattcatgagacagaatcaattagtgctggtcttgattatccgggagttagtccaattcattgctttttaaaagatacaaaaagagcaagatacacttttgcaacagatgaagaggctttaaatgcttataaattagttacaaaatatgaaaaattgaatccaagtttagaaccaagtcatgcgtttgcagaagcaattaaaattgctcctagacttagcaatgacacaatatgcattgttaattcttgtggtgatgcaaaaaaagataaggacatattaaaaaaaagattaggaaaatattaa

SEQ ID NO: 281202 - DNA, 910 bp, Unknown
  Bacterial polypeptide expressing nucleotide sequence isolated from the Sargasso Sea
tctggggagaaaactaatggccaccgatacgggcgcaggatttaatggtaagctcatggcacttgcctgtaaacattttggaatttctttgaaagtatttatggggactcatgacgttgaaagacagtctgaaaatgtaaaagctattaaagcgctaggcgcaactatagttcctgtggacacaggaagtaagacgcttgtcgacgccgtttcggagtgcaatagatattggatggctaattgctcatcaacacatatggcgatcggatcaacggtgggggcaaatattttcactaagatttgtgcttggtcgactgcacaaatttcaagggaacttattgttcaaataaaggatgaattcggagaaattccaaagaaacttaaactacttaattgtgttggcggcggctcttcggccattggaatgtggaactcttttatggattatccaaaaagtcaagttgagtttctggggatcgaggcaggtggacctcgtaactcaccgctacacgcagcgcctttatcgaaaggtggaaaattaggaattcttcatggtgccatgcaatacgttttaatggatagtgaagcaaacataatgccgacggcatcaataagtgcgggtttagattatccgggcgtatcgagtctccattgcttccttaaagattgtggtcgtgcacgctacacaaatgtcgatgatgagtcttgtttggaagctcacaaactgttaacagaattagaaccagatgttagaccgtcactggaaccgctgcatgcgttcgcagagtgtatccgtatcgctcctaagttaaattcagaaacagttatagttataaatgcatgtggagacgttgcgaaggacattaatattattagaaaaagacttgggaataaatatgcccaaatctga

SEQ ID NO: 281203 - DNA, 640 bp, Unknown
  Bacterial polypeptide expressing nucleotide sequence isolated from the Sargasso Sea
agctagaaaagaagaaggaactagatacgccttgggtagtgttttaaatcatgttcttatgcatcaatcaattattggcttagaggctttaaaacaaatggaaatggcagaagactatccagatataattgttggctgtacaggtggggggtcaaattttactggtttattttctccgtttgcaaaaaacaatatggaatcagataaaaaaaccattatccgagctgtagagcctcaagcatgtccatctttgactaaaggtatttatacatatgattttggtgattccgtaggtatggcaccagttgtaaaaatgcacactcttggatcaagttttgtacccgatcccatacatgctggtggtttaagatatcacggtatggctccattggtaagtgctatgtatgaagataatctaattgaggctgaagcaattggacaacgagaatgtttcgaagctggtcagctttttgcaaaaactgaaggtattgtcccagcacctgaagctactcatgctatagcttcagcaattagagcagtaaaagatgctgacctaagatctgagcaggtagctgtcttgacagcaatgtgtggtcatgggcattttgacatgaaagcatatgaaaacttcttaagtggt

SEQ ID NO: 281204 - DNA, 589 bp, Unknown
  Bacterial polypeptide expressing nucleotide sequence isolated from the Sargasso Sea
tatgacagactcaattaaatatttattagaagagagcaaagctcctaagttttggtataatattaattcagatttaccaagtccaccaccgccacctcttcatccaggtactaaacaacctgcaggtccagatgattttgcacctttatttccaatgagtttaataatgcaagaagtatcaactgaaagagaaattgaaattccagaaccagttagagaagtttataaacaatggagaccatcaccattatatagagctaggagattagaaaaatttttagacactccagcaaagatttattacaagtatgaaggagttagtccgacaggcagtcataagcctaacactgcagtaccacaggctttttttaataaagaagaaggtattagtaagatatttactgaaactggcgcaggtcagtggggaagttcacttgcttttgcaggtcaaatttttggaatagatattgaagtttttatggttaaagtaagttttgatcacaaaccttatcgaaaacttatgatgcaatcttttggagctaattgtcatccaagtccatcatcattaacagactttggaaataaactt

SEQ ID NO: 281205 - DNA, 617 bp, Unknown
  Bacterial polypeptide expressing nucleotide sequence isolated from the Sargasso Sea
acttagtaactcggtgactctaactcaaatcttcgaggtagtaagtagatttagacggaaggataaggatacaccagtagtgctaatgggatatgctaatccaattgaaagaatgggttatgaaaagttcgcaagaacagcctatgacgcaggtgtagatgctgtgctaaccgtagatcttcctatagaggagatagatttctcgagcaagatctttgctaaagttggattggaaagtattttgctagttgcccctacatcctcagaggaaagaattcatcgaattactacgaaagcagaagggttcatatatagcgtcgccttaacaggggttactggagataaaaatctagattttaaccaggtgaagaatcaggtaatgtctatcagacggttttctaatttgccagtggtggttggttttggtatcaaggatgcggacatagcaaaatcgatttcgtctgtttctgatggtgttgtcattggtagtgcaattgttgattgtttggcaaacaaaacattcgcaccatcgattgcaatagacaatgtgaaaaccttggtgtcgactattagggatggaatggatggagtcgcatatgatctgcaggttgattagg

SEQ ID NO: 281206 - DNA, 805 bp, Unknown
  Bacterial polypeptide expressing nucleotide sequence isolated from the Sargasso Sea
tgtaaaatttttatgggatcaaaagatattaaacgacaaaggcctaatgttgaggctatgaaaaaaaatggagcagaaatagttcctgttacaactggaagtcagacacttgttgatgccgtgagtgagtgtatgcgttactgggttgctaactgcgatacaacgcatatgtgtgtcggatcaacagttggtcctaatatttttgtaaaaatctgtgcttggagcacagctcaaatttcacgagaattgatgatacaagtgaaagaggaatttggaaaagttccaaagaaaatgaaactccttaattgcgttggtggaggaagctccgctatgggattttggaatgaatttatggatactgatgcacaatttataggaattgaagctggcggcccgaaaaatagcaagttacatgctgccccattaactaatggctcaaaaattggcatccttcatggatcagcgcagtatgtaattcaagataatgagggacaaataggaagaacagagtcaatttcagctggactggattacccggggatttcaagtctacactgttttcttaaagactcgaaaagagctaaatatacttctgcaagtgatgaagaagctcttaacgcttataaactagtttcaaaatttgaaaatatttctccatcacttgaaccatcacatgcttttgctgaagcaataaaattagcccccaaattaaaatcgtctgatgttattattgttaattcttgtggcgatagtcttaaagataaagatattattaaacaaaaattaggttcatatacaagatgaa

SEQ ID NO: 281207 - DNA, 619 bp, Unknown
  Bacterial polypeptide expressing nucleotide sequence isolated from the Sargasso Sea
gtccaatatatttgttaaaatttgtggctggagcacagcacaaatttcaagagaattaaaaaaacaaataaaaattcaatttaaaaaaattccaaaaaaaattaaattgattaattgtgttggtggtgggagttcagcttatggattctggagcgaatttattgattttccaaagtcacaaattgaattaataggcgttgaagcgggaggtccaaaaaactcaaaattacatgccgctccattaagtataggtgcaaaattaggtgtgctgcatggagcagcttcatacgtttgtcaaaataatgaaggacaaataaatgagactgaatcgataagtgccggattggattatcctggggtaagtccaatacattgttttctaaaagacacaaaaagagcaagatatacatatgcaacagatgaagatgctttgaatgcttataaacttgtaacaaaattcgaaaaacttaacccaagtttagaacccagtcacgcatttgcagaagcaattaggattgccccaagattaaacaaagatactgttataattgtaaattcatgtggggacgccaaaaaagatagggatattttgaaaaaaagattaggaaaaagaatatga

SEQ ID NO: 281208 - DNA, 364 bp, Unknown
  Bacterial polypeptide expressing nucleotide sequence isolated from the Sargasso Sea
attggtattcttcatgggagctgcacaatacgttatacaagataaagaaggtcagatcggatcaaccgattcaatatctgcgggtcttgattatccaggaatttctcctttgcattgttttctcaaagacacaaaaagagctagatacacctctgcaagtgatgaggaagcgcttaaagcttatcgattggtttctaaacttgaaaacatttctccttcgcttgagccttcgcatgcctttgcagaggcaattaaattagctcctaaattaaaatcatcagaaattattattgtgaactcctgtggcgatagtcttaaagataaagatattattaaacaaaaattaggatcatacataagatga

SEQ ID NO: 281209 - DNA, 786 bp, Unknown
  Bacterial polypeptide expressing nucleotide sequence isolated from the Sargasso Sea
aagatatcaagagacaaaaaccaaattgtgatgctatgagaaaaaatggtgccgaaatagttcctgtatattcaggtagccaaaccttggtcgatgcagtcagtgagtgtatgagatattgggtatcaaattgtgatactacgcatatgtgtgttggaagtacagttgggccaaatatctttgtaaaaatatgtggatggagtacagcacaaatttcaagagaattaaaaattcagattaaacaagaattcaaaaaagttccaaaaaagattaaattaattaattgtgtggggggtggaagttctgcatatggtttttggagtgaatttatagattttaataaatcgcaaatagaattggttggtgtagaggctggaggtccaaaaaaatctaaacttcatgcagctcctctaagtagaaatgccaaaattggaattttacatggtgcagcttcttatgtttgtcaaaacgatgaaggtcaaattaatgatactgagtcgattagtgctggattggattacccaggtgtaagtcctatacattgctttttaaaagatacaaaaagagccagatacacttacgcaactgatgaagaagcactaaaagcacatgtgatggtaactaaatttgaaaaacttaatccaagtttagaacctagtcatgcatttgctgaggcgataaaaattgcaccaaaattaagtaaagacacaatcataatcgttaactcttgtggtgatgctaaaaaagatagagatattctaagagaaaggttgggtaaaaattaat

SEQ ID NO: 281210 - DNA, 405 bp, Unknown
  Bacterial polypeptide expressing nucleotide sequence isolated from the Sargasso Sea
aaaaaagtaaaagacacgctgcacctttaacttatggatcaaaaattggagtacttcacggagcaatgcaatatgtaaaccaggataaaatagggcaaatagaagaaacagaatctattagtgctggtctagattaccctggagtttctccacttcattgttttttaaaagatgctaaaagagcaagatacaccgcagccagcgatgaagaagcattaaaagcatatcagttagttactaaatatgaaaatttaaatcctagtttagaaccaagtcatgcatttgccgaagcaattaaaattgcacctaaattaggcaaaagtacaattataattgttaattcttgtggagatgcaaaaaaagatagggacattattaaagaaaaattaggtgtaaaaatatgaa

SEQ ID NO: 281211 - DNA, 763 bp, Unknown
  Bacterial polypeptide expressing nucleotide sequence isolated from the Sargasso Sea
taagaaaaatggtgctcaagtaatacctgtttttaccggcagccaaactttagttgatgcggtctctgaatgtatgagatattgggtatcgaattgtgatactacagcaatgtgcgttggttctactgtaggaccaaatatttttgtaaaaatatgtggctggagcacaagtcaaatttcaagagaattaaaaagtcaactcaaagaggaatttggaaatgtgccaaaaaaattaaaactttacaattgtgttggaggggggtcttcaagttatggtttttggagtgagtttatggattacagtaacagtcaagttgagtttattggagttgaagctggcggtccaaaaaaaaataataaacatgcagcgcctctaacctatggatcaaaaattggtattcttcacggagctgcacaatatgtaaatcagaactctcaaggacaaattgaggatacgcagtcaatttcagcaggactagattatcctggtgtttctccattacattgttttttaaaagatataaaaagggcaaggtatacagcagctagtgacgaggatgcattaaatgctttcaaaattgtaactaaatttgaaaatttgcgtccttctctagagcccagtcacgcttttcatgtagcaattaaagaggccaaaaaattgagtaaggaaactattgtagttgttaatagttgtggagacgcccataaagatgaaaaaatattgaaaagtaaacttggaagcaaatatgacaaacccaattag

SEQ ID NO: 281212 - DNA, 771 bp, Unknown
  Bacterial polypeptide expressing nucleotide sequence isolated from the Sargasso Sea
aagcaatgaaagaaaatggtgctgacgtaattcctgtatattcaggaagtcaaacactaatagatgctgtctctgaatgtatgagatattgggttgctaattgtgatacaacagcaatgtgtgttggtagtacagtaggacctgcaatttttgttagaatatgtggatggagtactagtcaaatatctagagagcttaaagttcaattaataaatgaatttggtgaagttcctaaaaaacttaaactatataattgtgtaggaggaggttcctcaagttttggtttttggaatgaatttatggattatgataaaaaacaagttgagtttattggggttgaggcaggaggaccagccaaaagtaaaaaacatgcagctcctttaacttatggttcaaaaatcggtatacttcacggtgcagcacaatatgtaaatcagaatagggatggtcagattgaagaaactgaatcaatatctgcgggtcttgattatcctgggatttcaccgctacattgctttttaaaagatgccaagcgggcaagatatacagcagctagtgatgaggaagcattaaaggcttaccaaatagttacaaaatatgaaaatttaagaccatcactcgaaccgagtcatgcattctcagtggcgattaaagaagcaaaaaaattgagcaaaaacacaatagtaattattaatagttgtggagacgcatataaagacagaggaattttggaaaaaaaattgggaaagaaatatgttaaatccaattagc

SEQ ID NO: 281213 - DNA, 949 bp, Unknown
  Bacterial polypeptide expressing nucleotide sequence isolated from the Sargasso Sea
aacaagatttataaactagaaaatctgaccaaaaatcttgaaggtgcacaaattgggcaaaagtttgtctcggatgcaaatggaggtgcccacaaaatttacaatgcaacagttcattgtttaattgcaaaaaaagcaggtaaaaagtttatagttggtgatactggtgctggttatgcaggcaaaatgcttagcatggctgcaaaaaaatttggtctaagatgtaaaatatttatgggtgcaaaagatattaaaagacaaaaaccaaattgtgatgcgatgaaaaaaaatggtgctgaaatagtaccagtatattcaggaagtcaaactttagtagatgcggtaagcgaatgtatgagatattgggtttcaaattgtgatacaacacatatgtgtgttggatctactgtaggtccaaatatatttgtaaaaatatgtggttggagcactgctcaaatatctaaagagttaaaattacaacttaaagaaaaatttaaaaaaattccaaaaaaaataaaattaattaattgtgttggtgggggtagttctgcctatggtttctggagtgaatttattgattataaaaaaagtcaaattgagctaattggtgtagaagcgggtgggccaaaaaaatcaaagttgcatgctgctccattaagtaaaggagcaagtttaggtattttacatggagcagcttcatatgtttgtcaaacaaaagaaggtcaaatcaatgaaacagaatcgattagtgctggactagattatccaggagtaagtccaatgcactgttttttaaaagattctaaaagagcgagatatacttttgcatctgatgaggaggctttaagtgcttatcaattagtaactaaatacgaaaaattaaatccaagcctagaaccttgtcatgcttttgcagaagcaataaaaattgctcccaagactaagtaaa

SEQ ID NO: 281214 - DNA, 530 bp, Unknown
  Bacterial polypeptide expressing nucleotide sequence isolated from the Sargasso Sea
aattccaaaaaaagtaaaattattaaattgtgttggtggaggatcttcaagcttcggtttttggaatgaatttatgcattataataaaaagcaagttgaatttattggcattgaagctgggggtccaaaaaaaagtaaaagacatgcggctcctttaacttatggctcaaaaataggaattcttcatggagcctctcaatatgtaaaccaagattttgagggtcagatagaagaaacagaatctattagcgcaggattagactatccgggagtttctcctattcattgttttttaaaggatactaaaagagcaagatacactgctgcaactgatgaggaagccttaaacgcatataagctagtgacaaagtatgaaaatttaaatccaagtttggaaccaagtcatgcatttgcagaagcaataaaattggctccaaaattaagcaaggatacagttataattgtaaactcgtgtggcgatgcgcataaagatcgagatattttaagagaaagattaggaaaaatttaat

SEQ ID NO: 281215 - DNA, 80 bp, Unknown
  Bacterial polypeptide expressing nucleotide sequence isolated from the Sargasso Sea
aatgaaagataatttacctgataaagatggattcttcggcgaatacggagggaagtttgttccagaaactctcatgtatg

SEQ ID NO: 281216 - DNA, 497 bp, Unknown
  Bacterial polypeptide expressing nucleotide sequence isolated from the Sargasso Sea
aggtggaggaagttcagcttatgggttttggagtgaatttatagattttgataaaaaacaaattgagttaattggtgttgaggctggtggaccaaaaaaatcaaaacttcatgctgcgccacttagtagaaatgctaaaattggaattttacatggcgcggcctcatatgtatgccaaaataatgagggtcaaattaatgatacagagtctataagtgctgggttagattatcccggtgtaagtccaatgcattgttttttgaaagatacgaaaagagctagatatactttcgctactgatgaggaggcacttagcgcacatgtaatggttactaaatttgaaaaactaaatccaagtttagaacctagtcatgcttttgcagaagcgattaagcttgctccaaaattgagcaaagaaacaatcataattgttaattcttgtggtgatgcaaaaaaagatcgagatatattaaaagaaagattaggtaaaaattaat

SEQ ID NO: 281217 - DNA, 861 bp, Unknown
  Bacterial polypeptide expressing nucleotide sequence isolated from the Sargasso Sea
aaatgttgagcatggctgctaaaaaatttggtttgaaatgtaaaatttttatgggtgcaaaagatattaaaagacaacaaccgaatgtcaaagcaatgaaaaagaatggtgctgatgtaattcctgtatattcaggaagtcaaacattagtagatgctgtttctgaatgtatgagatattgggttgctaattgtgataccaccgcaatgtgtgtaggtagcactgtaggacctgcaatttttgttcgtatatgcggatggagcactagccaaatctctagagaacttaaagttcaattagttgacgaatttggtgatgttcctaaaaaacttaagctatataattgcgtaggaggaggttcctcaagttttggtttttggaatgaatttatggattatgataaaaaacaagttgagtttattggagtagaagctggaggaccagccaaaagcaaaagacatgcagctcctttaacttatggttcaaaaatcggtatacttcatggtgcagctcaatatgtaaatcaaaatagtgatggtcaaattgaagaaactgagtcaatttcagctggtcttgattatcctggcatttcaccacttcattgctttttaaaagataccaagcgcgcaaggtatacagcagctagtgacgaagaagctttaaaggcctatcaaatagttacaaaatatgaaaatttaagaccatctctcgaaccgagccatgcattctcagtggcgattaaagaagcaaaaaaattgagcaaaaatacaattgtagttattaatagttgtggagatgcatataaagatagagatattttagaaaaaaaattgggaaagaaatatgttaaatccaattagc

SEQ ID NO: 281218 - DNA, 722 bp, Unknown
  Bacterial polypeptide expressing nucleotide sequence isolated from the Sargasso Sea
tatgacagactctataaaatacttacttgaagaatctaaagcaccaaaatcttggtataatattaattcagatctacctagtcctccaccaccacctttacatccaggcacgaaacaaccagcaggaccagatgatttcgcaccattatttcctatgggtttaattatgcaagaagtttcaactgaaagagagattgaaattcctgaaccagtaagagaaatttataaacaatggagaccttctcctttatatagagcaagaagattagaaaaatttttggatacacctgctaaaatttattataagtatgaaggagtaagtccaacaggaagtcacaaacccaacaccgcagtacctcaagctttttttaataaggaagaaggtgttaaaaaaatatttactgaaacaggggctggtcaatggggaagctcattagctttcgcaggtcagatgtttggaatagatattgaagtttttatggttaaagtaagttttgaccaaaagccttatagaaaacttatgatgcagtcttttggtggaacttgtcatcctagcccttcagatttgacagattttggaaaaaaacttttatctgaagatcctaataatcctggtagtctaggtattgcaatatctgaggctattgaagcagttgtaaaaagtgaaggtaaagcaaaatatgcactttgggagttgtttaggacatgtacttttacaccaa

SEQ ID NO: 281219 - DNA, 307 bp, Unknown
  Bacterial polypeptide expressing nucleotide sequence isolated from the Sargasso Sea
ggtcaaatagaagaaactgagtcaattagtgccggactagattatcccggtgtttcccctttgcattgttttttaaaagatactaaaagagcaagatatgttgctgctagtgatgaggaagctttaaatgcttataaaatagtaacaaagtatgaaaacttaaatccaagtttagaaccaagccacgcatttgcagaggcaataaaaattgctcctaaattaagcaaagatacaataataattgtcaactcatgtggagatgctcagaaagacaaagatattcttaaacagagattaggaatttaaa

SEQ ID NO: 281220 - DNA, 571 bp, Unknown
  Bacterial polypeptide expressing nucleotide sequence isolated from the Sargasso Sea
aatgtcagatagaattaaaaaaacctttgaaacaaaaggaaaaaaattggtcacctttacaactggtggggacccagattttaatacaagcttagaaattcttaaaactataattaataatggaatagatataatagaaattgggatgcctttttcggacccaatggctgatggtcctagtattcaagagtccagtgtgagatcaatagcaaatggaacaaaaattaatgatatttttgaaatagttattaacattagaaagcttaataatgaaataccaatcattctcatgggttattacaattcaatatttaatttgggaattgataatttcactgccaaatgtgcagagacaggagttgatggtcttataattgttgacttacaaccagaggaagactctgagctatatacaaaatcaaaagaaaaaaatattgatcttattagattaattacaccaacaactgatcaaaaaagactaattactattttaaataattcatctggatttttatactatgtaactattactggtataactggtcaaaattctgcaaatatagagggttta

SEQ ID NO: 281221 - DNA, 643 bp, Unknown
  Bacterial polypeptide expressing nucleotide sequence isolated from the Sargasso Sea
gctgcttaaaaaatttggtcttaaatgtaaaatttttatgggtgcaaaagatattcaaaggcaaaaacctaattgtgaagcaatgaaaaaaaacggtgctgaaattgtacctgtttactctggaagccaaactctagttgatgctgtaagtgagtgcatgagatattgggtatcaaactgtgataatacacatatgtgtgtgggctcaacagtaggaccaaatatttttgttaaaatttgtggatggagcacagcccaaatttctagagaattaaaaaatcaattaataaaagaatttaaaaaaatcccaaaaatgattaagcttatcaattgtgtcggtggtggtagttctgcttatggtttttggagtgaatttattgattatgataaaaaacaaattgaattaattggggttgaagcaggaggtccaaaaaattctaaattacatgctgcacctttaagtagaaatgctaaaattggaattctccacggcgcagcttcttatgtttgtcaaaataatgagggtcaaattcatgaaacagaatcgattagtgccggtctagactatccaggggtaagtccaatacattgttttttaaaagatacaaaaagagcaagatatacatttgcaacagatgaagag

SEQ ID NO: 281222 - DNA, 551 bp, Unknown
  Bacterial polypeptide expressing nucleotide sequence isolated from the Sargasso Sea
actaaaaaaagaatttaaaaagataccaaataaaataaaattaattaactgtgttgggggtggaagttcagcatatggattttggagtgaatttattgactatgataaaaagaagattgaattaattggtgtggaagcagggggaccaaaaaaatcaaaacttcatgcggctccattaagccgcaaaactaaaattggaatattacatggagctgcttcttatgtatgtcaaaataaagagggacaaataaatgagactgagtctataagtgctggattagattatccaggtgttagtcctatgcactgttttttaaaggacactaaaagagcaagatatacatatgcaacagatgaggaagcgttagacgcacatcaaatggtgactaaatatgaaaatttaaatcctagcttagagccaagtcacgcatttgcagaagcaattaaaattgcacctaaattaagcaaagatacaataataattgtgaattcatgtggtgatgcaaaaaaagatagagatattctaaaagaaagattaggcaaaaaatgat

SEQ ID NO: 281223 - DNA, 696 bp, Unknown
  Bacterial polypeptide expressing nucleotide sequence isolated from the Sargasso Sea
aatgcatgagatattgggttgcaaattgtgataccacagctatgtgtgttggtagcacagttggtcctgcaatttttgttcgaatatgcggatggagcactagtcaaatttctagagaacttaagttgcaattaataaatgagttcggcactgttccaaaaaaacttaaattatataattgtgtaggtggaggctcctcaagctttggattctggaacgaatttatggactatgataaaaaacaagttgagtttatcggtgttgaggctggaggtccatccaagagccagaaacacgctgctcctttaacttatggttctaaaattggtatacttcatggagctgcccaatatgtaaatcaaaatagtgatggtcaaattgaagaaacagaatctatttctgcaggtcttgattaccctggaatttctccattacattgttttttaaaagatactaaaagggcaaggtatacagctgctagtgatgaagaagcattaaaagcttatcaaatagttacaaaatatgaagatttaagaccatcacttgagccgagccatgcattctcagtagcaattaaagaagcgaaaaaactaagtaaagatacgattgtagttatcaacagttgtggcgatgcttacaaagataaaaaaattttggaaaaaaaattaggaaaaaaatatgttaaatccaattagc

SEQ ID NO: 281224 - DNA, 908 bp, Unknown
  Bacterial polypeptide expressing nucleotide sequence isolated from the Sargasso Sea
tttaaaaattggataggtgttccaaccagatttattaaatttgaaaatttaacaaatcatattggtggagctcaaatttggtctaaagtagtttcagatgcaaatggtggtgctcataaaatttacaatgctactgttcactgtttattagcaaagaaatcaggtaaaaaatttgtgataggtgacactggtgctggatacgcaggcaaaatgctaagtatggctgcaaaaaaatttggattaaaatgcaaaatttttatgggcgctaaagatattcaaagacaacaacccaatgtgaaagcgatgaaaaaaaatggagccgaagttgttcctgtttactctggaagtcaaacacttgttgacgcagtttctgaatgcatgagatattgggttgctaactgcgatcatgctcatatggccgtaggatcaactgtaggtccagctatatttgttcggatatgtgggtggagcacaagtcaaatttccagagaacttaagtctcaaattatagatgaatttggttcaatgccaaaaaagataaagctttataattgtgttggtggtggctcatctagttttggtttttggaatgaatttatggattatgataaaaaacaagtggaatttgttggtgttgaagctggtggtcctgccaaaagtaaaaaacatgcagcacctcttacttatggatcaaagatcggaatacttcatggggcagctcaatatgtaaatcaaaattctgatggacaaattgaggaaacagaatctatttcagctggacttgattatccaggtgtttctccaattcattgttttttaaaagatgttaaacgagcaagatatactgctgccagtgatgaggatgctttggaggcttataaattagttactaaatatgaaaatttaaa

SEQ ID NO: 281225 - DNA, 800 bp, Unknown
  Bacterial polypeptide expressing nucleotide sequence isolated from the Sargasso Sea
aatgactggtattgagcgaatacaatcaagattcactgataatgagtccttgtgtaaaaaagccattgctccttttgtgaccgcaggtgatccagatctgagcaccacagcggaattgctacaagtcatggacaaagctggtgcaacactcattgaattaggcgttccatacagtgatccgattgcagatggtggtgttatacaagcctcgtatgttcgagcgctagaacgtggaatgacgttggacaatctctttgagatgatccgcaatgtttctgccaagatcagtacgccagtattggcgatggtaagttattcaatcattttcaggagaggaatcaatacttttgtgaatgaggcagtcgaagctggtctcgcaggattcgtcgtgccggatcttccgatcgaagagtctggtgaactagcagatgcttcagaagcaaacgggttagccctcgtacgtcttgtgacacctacgactcctcctgaacgggccgaaattattgcccgtcagtcaacaggctttttgtactgcgtttctatagctggtgtcacaggtgctcgccacaccttgccggagggacttattgaacgagtgaagtggctgagaacaaaaacagatgttccaatcttagtgggcttcgggatttcgtctccagatcaggccaaagccattgcgtcagttgctgatggggtcattattggttctgccatcgtgaagcacctcattggagcagcagacgcttctcaagaggctttgatgacgtctgtagggcactatgtcaaggatcttgtgacag

SEQ ID NO: 281226 - DNA, 649 bp, Unknown
  Bacterial polypeptide expressing nucleotide sequence isolated from the Sargasso Sea
catgagtgataccgttaaatacatattacctgaatctgaaattccaaaaagctggtacaacattactgccgatcttccggaacctcctcctcctgttttgcatccaggtactggagaacctgtgggacccgatgatttagctcccctttttccaatggatcttatcctacaggaagtaagttccgaacgttatatagacattcctgagcctgtacgagagatatatcggcagtggcgtccaagccctctttatcgtgcaagaagattagagaaggcactcgatacgcctgcaaaaatatattacaagtatgaaggcgtcagccctacgggaagccataagccaaatactgcagttgcccaggctttttataacaaagaagctggtgtaaagaaaatttcaactgaaactggggcaggccagtggggctcttcattggcctttgccggttatatttttggattggagattgaggtttacatggtaaaagtcagtttccagcaaaaaccttatcgcaaggcaatgatggaatcttttggcgcgacgtgcattgcttctccatctgacaggactgagtttggtaaggcatacctggccaagaaccctgattctactgggagtcttgggattgccatctctgaagcagttgaa

SEQ ID NO: 281227 - DNA, 312 bp, Unknown
  Bacterial polypeptide expressing nucleotide sequence isolated from the Sargasso Sea
aagacaaaattaatgagacggagtctattagcgctggactagattatccaggggttagcccaattcattgttttttaaaagactctaaaagagcaagatacacttatgcaagtgacgaggatgctcttaatgcacatgtaatggtaacaaaatatgaaaatttaaatccaagtttagaacctagtcacgcatttgcagaggctataaaaattgcaccaaaattaggtaaggacaacattataattgtaaattcgtgtggagatgcaaaaaaagacagggatattttaagcgaaagattgggtaaaagataat

SEQ ID NO: 281228 - DNA, 898 bp, Unknown
  Bacterial polypeptide expressing nucleotide sequence isolated from the Sargasso Sea
agaggctaatggtggagctcacaagatatacaatgctactgttcacgccttaatttgtaaggcaatgggtaaaaaatttatagtgggtgacacaggtgctggatatgcaggcaaaatgttaagtatggcagcaaaaaagtttggtttaaaatgtaaaatttttatgggagccaaggatattaaaagacaaaaaccaaattgtgatgctatgaaaaaaaatggtgcagagattgtaccagtatattctgggagtcaaactttagtagatgcagtcagcgaatgtatgagatattgggtttcgaattgtgataatacccacatgtgtgtaggttcaactgttggccccaacatttttgttaaaatctgtggatggtctacagctcaaatctcaagagaactaaaaattcaaatgaaaaaagaatttaagaaaattccaaaaaaaataaaactaattaactgtgtaggaggtggaagttcggcttatggtttttggagtgaatttattgattatgataaaaaacatattgaattaattggagtagaagctggaggccctaagaaatcaaaattacatgctgctcctttaagtagaaatgctaagattggaattctacacggtgctgcatcttatgtatgtcaaaatgatgagggacaaattcaagatactgagtcaatcagtgctggtttagattatcctggagtaagtccgatacattgttttttaaaggatactaaaagagcgagatacacgtatgcaacagatgaggcagctttaaatgcatataagatgataacaaaatttgaaaaacttaatccaagtttagaaccaagtcatgcttttgctgaggctataagaattgcaccaaagttaagtaaagatacaattttaatagtcaat

SEQ ID NO: 281229 - DNA, 472 bp, Unknown
  Bacterial polypeptide expressing nucleotide sequence isolated from the Sargasso Sea
atggattatgataaaaaacaagttgaatttattggagttgaggctggtggaccagcaaagagtaagagacacgcagctcccttaacttatggctccaaaattggcatacttcatggtgcagctcaatacgtaaatcaaaatagcgatggtcaaattgaggaaactgaatcaatatctgcaggtcttgattatccaggaatatcaccacttcattgttttttaaaagatactaaacgtgcaaggtatacagcagctagtgatgaggaagctttaaaagcctaccagatagttacaaaatatgagaatttaagaccgtctctagaacctagtcatgcgttttatgtagcaatcaaagaagcaaaaaaattgagcaaaaatacaatagtaattattaatagttgtggagatgcatataaagaccgtggaattttagaaaaaaagttaggaaagaaatatgttaaatccaattagt

SEQ ID NO: 281230 - DNA, 874 bp, Unknown
  Bacterial polypeptide expressing nucleotide sequence isolated from the Sargasso Sea
ggctcttcattagcctttgccggttctatttttggattggagattgaggtttacatggtaaaagtaagtttccagcaaaaaccttatcgcaaggcaatgatggaatcatttggcgcgacatgcattgcttctccatctgacaggactgagtttggtaaggcatacctagccaagaaccctgattctacaggaagtcttgggattgctatatcggaagcagtcgaagttgcagcaactaatgatgatgttaaatattctctggggagtgtactcaaccatgtactaatgcatcagacaattgtaggtgtcgaagcgctaaaacaaatggaaatggcaggtgactatcctgatgttgtagttggctgcactggcggaggttcaaattttgctggaatgatgtttccattccttggcgaacaacttcgtggaggagctaatgtaagagtagtcgcagttgaacccgcagcatgtccgtccctaacaagaggtaaatatgcgtatgatttcggtgacactggaaatatgactccactggctaaaatgcatacacttggctccaaatttgttccgcctggcttccatgctggcggtctgcggtatcacggcatggcacccttgataagccacctcaaggagcttgatttgctggaggcatatgcatttcatcagaatgaatgctttgaggctggtgttacatttggacgtgaggaaggaattcttcctgctccggaggcaaaccatgcagtgaaaggtgccgtcgaggaagcactgcgttgcaagcgagaaggtaaatctgaaactattctctttaacctgtgcggtcatggacattttgatatgcaggcatacacggagtatttcagtggtaacctga

SEQ ID NO: 281231 - DNA, 297 bp, Unknown
  Bacterial polypeptide expressing nucleotide sequence isolated from the Sargasso Sea
ttttaagtcatctccatgatgaaaaaagggtccgatttactgcgactgcagatgacgaagttatttctgcaacaaaacacctaattcggactgaaggtataattcctgcccttgaatgtagtcacgcgtttgcttcagttattgaagaagctccccacattcctgatgggtcgcatgttttgattaacctatctggtcgtggtgacaaagatatctttaatatagctgaggctattggtgacaaaaaatgggaggaatttctgcgtcaaaaagcctcattgaatcaaagaaaataat

SEQ ID NO: 281232 - DNA, 781 bp, Unknown
  Bacterial polypeptide expressing nucleotide sequence isolated from the Sargasso Sea
gctaaagatatcaaaaggcaaaggcctaatgttgaagcaatgagaaaaaatggagcagaaattgtcccagttacaacaggaagtcaaactttagtcgatgcagtaagtgaatgtatgcgttactgggtatctaattgtgatacgacggcgatgtgcgttggctcaacagtaggacctaacatctttattaagatatgtgcttggtcaactgcacaaatatcaagagaattaatactccaagttaaagaggagtttggaagaataccaaacaaattaaaactaattaattgtgttggaggtggaagctctgctgctggtttttggaatgaatttatgaatacagatgcagaatttataggtgtcgaagctggtggacctaaaaatagtaaactacatgcagcgccattaactaatggatctaaaattggtattcttcatggagccgcccaatatgttattcaagacaaagaagggcaaataggttcgactgagtctatttcagcaggtttagattaccctggtatttcaccacttcattgttttctaaaagatacaaaaagagcgagatacacatctgcaagcgatgaagatgctctaaaagcttatcaattagtttctaaacttgaaaatatttcaccttctttagagccatctcatgcttttgcagaagctattagaattgctccaaaattaataagttcagaagttataattgtaaattcatgcggagatagtcttatagataaagatataataaaacaaaaactaggttcttatatta

SEQ ID NO: 281233 - DNA, 182 bp, Unknown
  Bacterial polypeptide expressing nucleotide sequence isolated from the Sargasso Sea
aatgacaactaataaacataattggccagataaagatggtttctttggagaatatggtggcaagtttgttccagaaactcttatgcatgcattagaggaacttgaaaaaacttataaaaactttaaagacaagcctgaattcaaagaacaattttataaagatctgtctgaatttgtaggtc

SEQ ID NO: 281234 - DNA, 793 bp, Unknown
  Bacterial polypeptide expressing nucleotide sequence isolated from the Sargasso Sea
attgggtgcaaaagatattaaaagacaaaaacctaattgtgatgctatgcgaaaaaatggcgctgaaatagttcctgtttatacaggtagtcaaacacttgtagatgcagttagtgaatgtatgagatattgggtgtcgaattgtgacactactcatatgtgtgtcggttcaactgtgggacctaatatctttgtaaaaatttgtgggtggagcacatcacaaatttctagggagcttcatcttcaaattaaaaatgaatttgggaaaattccaaagaaaataaaattaataaattgtgttggtggaggttcatcaagctttggattttggaatgaatttatgcattataacaaaaaacaatttgagtttattggtattgaagctggcggaccaaaaaatagtaaaaagcatgctgctcctctaacttacggatcaaaaattggaattttgcatggtgcagctcaatatgtaaatcaaaactctgagggtcaaatagaagaaacagaatctataagcgcaggattagattatcctggagtttctcctctacattgttttctaaaagatacaaagagggcaagatatagtgcggcaactgacgaggaagctttgaaagcttatcagctagttacaaaatacgaaaatttaaatccaagtttagaaccaagccatgcttttgcagaagcaattaaaatagcacctaaactgggtaaagatacaattataattgtaaactcttgtggtgatgcacaaaaagatcgggatattttaaaaaaaagattaggaaaataa

SEQ ID NO: 281235 - DNA, 630 bp, Unknown
  Bacterial polypeptide expressing nucleotide sequence isolated from the Sargasso Sea
gggagtgagtccgaccggaagccacaaaccgaacaccgcggtggcccaggctttttacaacaaggaggcgggagtcaaacgcatctctaccgaaaccggtgcaggacagtggggttcttcattagcctttgcaggaacaatattcggaatagaaatcgatgttttcatggtccgtgtgagtttcgaccagaaaccctaccgtaaggcaatgatggagtccttcggggcaagctgcatcgcctcgccgtctaacacaactgaatccggaaaagcaatcctggcggaaaacccggactcgaccggcagcctcgggattgcaatttccgaagcagttgaggtcgcggcgcaaaacgacgacgtgaaatacgcgctgggaagcgtattgaatcacgtgcttacccatcagtcgatcatcggtttggaatccatcaaacagatggaaatggctggagactaccctgacgtggtggtcggctgcactggtggcgggtccaacttcgcagggatcgtctttcccttcatcggggaaatgttccggggtggaagcaaaatccgagtggtcgcggttgaacctgcagcctgtccttctttgaccagaggaaaatattcctatgattttggtgacacggc

SEQ ID NO: 281236 - DNA, 862 bp, Unknown
  Bacterial polypeptide expressing nucleotide sequence isolated from the Sargasso Sea
cacagcttgatatgcaagcgattaggcaaaacttatataggtggtgatactggcgctggatatgcgggaaagatgctcagtatggcagcggcaaaatttaatttaaaatgcaaaatattcatgggtgcgaaggatgtagaaagacaatctataaatgtattttctatgcggagctatggcgctgaagtagtgcctgtaaactctggctcacaaactctagtggatgctgtgtcagaatgtatgagatggtggacaagtgagaatgaagaagcacatatgtgcgttggtagtactgttggccctactatctttgtcaaaatatgtgcatggtctaccgcgcaaatatccagagaaatgaaaaaacaagtaatagacgaatttggagaagttccaaaaaatatgaaattaattaattgcgttggtggaggatcatcagctgcaggtttttggaatgaatggattgattatgataatgttgaactcataggagtagaagctggcgggccagagggttcctcaaaacatgctgcgcctttgacaaatgactcacctatcggggttctccatggagcaactcaatatgttattcaagatgatcagggggaaattgaagaaacagaatcaataagtgctggacttgattatccgggtgtaagtccgcttcattgttttttaaaagaaactggaagagcaagatacacttctgcaagtgacgaggaagccatagaagcttttcaattagtaagtaaaaatgagggatttgtaagcccctcacttgaaccctcacatgcattcgcagaagcaatcaaaattgcacctaaattaagtaacgatacaataattgttgtagattcttgcggag

SEQ ID NO: 281237 - DNA, 753 bp, Unknown
  Bacterial polypeptide expressing nucleotide sequence isolated from the Sargasso Sea
ggagataccggagctgggtatgctggtaaaatgttaagtatggctgcaaaaaaattcggattaaaatgtaaaatatttatgggagcaaaagatattaaaagacaaaaacctaattgtgatgctatgagaaaaaatggagcagaaatagttccagtttatactggcagccagacacttgttgatgctgttagtgaatgcatgagatactgggtttcaaattgtgataccactcatatgtgtgtaggttctactgttggacctaatatttttgttaaaatttgtggatggagtacatcgcaaatttctagagaactctctgaacaaatgaaaaaagaatttggaagaattccaaaaaaagtaaaactattaaactgtgttggaggaggatcttcaagctttggtttttggaatgaatttatgcattacaataaaaaacaagttgagtttattggcattgaagctggaggcccaaaaaaaagtaaaagacatgcggctcctttaacttatggttcaaaaataggaattcttcatggagcagctcaatatgtaaaccaagattttgaaggtcaaatagaagaaacggaatcaattagtgcaggattagattatcctggagtttctccacttcattgttttttaaaggatgcaaaaagagcaagatatacagcggctactgatgaggaagctttaaatgcatataagttagttactaaaaacgaaaatttaagtcctagcttagaaccaagccatgca

SEQ ID NO: 281238 - DNA, 822 bp, Unknown
  Bacterial polypeptide expressing nucleotide sequence isolated from the Sargasso Sea
aatttggtctaaaatgtaaaattttcatgggagctaaagatataaagagacaaaaaccaaactgtgatgcaattagaaaaaatggagccgaaattgttcctgtaaccactggtagtcaaactctagtagatgcagttagtgaatgtatgcgttattgggtttcaaattgtgatactactcatatgtgtgttggatctactgttggaccaaatatatttgtgaaaatttgtggctggagcacagctcaaatatcaagagagctaaaaaatcaattatttttggaatttaataaaattccaaaaaagataaaattaattaattgtgttggtgggggaagctcagcttatggtttctggagtgaatttattgatttcccaaaaagtcaaatagaactaattggtgttgaagctggaggaccacaaaattccaaattacatgctgctcctttaagcagaggagcaaaaataggtattttgcatggggcagcttcttatgtatgtcaaaataaagaaggacaaattaatgaaacagaatctattagtgcaggcttagattatccaggagtaagtccaattcattgttttcttaaggatacaaaaagagcaaaatatacatttgcaactgacgaagaggcgctagatgcttataaattagtaacaaagtttgaaaaacttaatccgagtttagaacctagtcacgcgtttgctgaggcaattaaaattgctccgaaattaagaaaagataatattataattgttaattcttgtggagatgcaaaaaaagacagagatattttaaaacaaagattgccaataaaatgat

SEQ ID NO: 281239 - DNA, 538 bp, Unknown
  Bacterial polypeptide expressing nucleotide sequence isolated from the Sargasso Sea
aattccggaaaaattccaaaaaaaattaaattaataaactgtgttggtggcggaagctcagctatgggattttggaatgagtttatagacactgatgcagaattttatggagttgaagctggcgggccaaagaatagcaaattacatgctgccccgctatctaatggatctaaaattggaattttgcatggtgcagcacaatatgttgtgcaagacaaagaaggacaaataggatctacagagtctatttcggctggtcttgattatcctggcatctcaccgttacactgttttttaaaggatacaaaaagagcaatttatacatctgtgaatgatgaagaggcactaaatgcttatcgacttgtttccaaattagaaaatatctctccttcactagagccctctcatgcttttgctgaagcaattaagcttgctccaaaattaaaacagtcagacgtaattgtagtaaatagttgtggagattcattaaaggataaggatattattaaatctagacttggatattatattcgatgaa

SEQ ID NO: 281240 - DNA, 168 bp, Unknown
  Bacterial polypeptide expressing nucleotide sequence isolated from the Sargasso Sea
attttgtaaaaaatgtaatgaaattggaattgatggattaatcattcctgacttaccaattgattattatgaagcaaactataaatcaatatttgaagaaaatcgtctttataatatgtttttaattgctccacaaactttacaccaaagaattcaaaagattgactc

SEQ ID NO: 281241 - DNA, 638 bp, Unknown
  Bacterial polypeptide expressing nucleotide sequence isolated from the Sargasso Sea
ggcggttggaagtacagttggaccaaatatctttgtaaagatttgtggatggagtacagcacaaatctcaagagaactaaaagttcaaataaaaaaagaatttaaaagaattcccaaaaaaataaaattaattaattgtgtaggtggaggtagctcagcttatggcttctggagtgagtttatagattttaataaaaaacaaattgaattaattggagttgaagcaggaggacctaaaaattcaaaacttcatgcagctccactaagtagaaatgctaaaattggagttttacatggtgctgctgcatatgtttgtcaaaactatgagggtcaaattaatgaaacagagtctataagtgctggattagattacccaggtgttagccctattcattgctttttaaaagacacaaaaagagcaagatatacttatgcgacagatgaagaggcattaaatgcacatgtaatggtaactaagtacgaaaacctaaatccaagtttagaacctagtcacgcatttgctgaagctattaaaattgctccaaaacttagtaaagatacaattatcatcgtgaactcttgtggtgatgctaaaaaagatcgtgacattttaaaagaaagattaggtaaaaattaat

SEQ ID NO: 281242 - DNA, 718 bp, Unknown
  Bacterial polypeptide expressing nucleotide sequence isolated from the Sargasso Sea
gagatggctgcacaagatgataatacaaaatattctcttggaagtgttttaaatcatgtattgatgcatcaaacaattgtaggaaatgaagctataatgcaaatggaaatggcagatgactatccagatatattagttggttgtacaggtggtggaagtaatttttcaggattggtatttccttttcttggtaaaaaatttagagaaaaaaaagatgttagagtaatagcttgtgaaccaaaatcttgcccaactttaacaaaaggtaaattcgcatatgattttggagacacaggaatgcgtacaccattagttaaaatgcatactttaggatctcaatttatgccaccatcaacccactcaggtggtttaagatatcatggcatggcaccaatggttagtcatttaaccgatataggtgctatagaacccaaagcatttggtcaaaaagaatgctttgaagcaggagtaaaatttgcaaatgctgaaggaattgtgccagcaccagaagcgacacatgcagttaaaggagcaattgatgctgctcttgaatgtaaaaaaaatggcgaaaagaaaactattctttttaatttatgtggtcatggtcattttgatatgcaggcttatggagattatttcaataataagctttcagatgacaaatataatgaggccgatgcaaataaagctttagaaaaactacctaaaattgcataac

SEQ ID NO: 281243 - DNA, 256 bp, Unknown
  Bacterial polypeptide expressing nucleotide sequence isolated from the Sargasso Sea
tgagcactcaaatttaaaagattctggaagggctatgtatattgctgtcgatgatgatgaagttttaagttcatttcatttagcaacaaagcttgagggcattatgcctgctctagagaccgctcatgcatttgctgcattggaacatatcgctaaaaattataaatctagccaacatattgtaattaatgtttctggaagaggagataaagacattaatacagttgctactatggatggaatatctcttgactag

SEQ ID NO: 281244 - DNA, 713 bp, Unknown
  Bacterial polypeptide expressing nucleotide sequence isolated from the Sargasso Sea
tatgactgaaacaattaaatatttactagaagaatctaaagcgccaaaattttggtataatataaacgcagatttaccaagtccacctccaccacctttacatcctggcacaaagcaacctgcaggacctgatgattttgcaccattatttccaatgggattgattcttcaagaagtctcaacagaaagagaaattgaaatacctgaacctgtaagagaaatttataaacagtggagaccttcacctttatatagagctagaagactagaaaaattcttagatactccagctaaaatttattataaatatgaaggagtaagtcctacaggtagtcataaaccaaatacagctgtaccacaggctttttttaacaaagaagagggtgtaaaaaaaatatttactgaaacaggtgctggtcaatggggaagttctttggcctttgcaggtcaaatgtttggaatagatattgaagtttttatggttaaaattagttttgatcaaaaaccttatagaaaattaatgatgcaatcttttggtgcgaaatgtaattcaagcccatcatctttaactgattttggaaagaaattattagaagaaaatcctgataatccaggtagtttgggcattgctatttcagatgctattgaatctgttgttaaaagtgaaggtaaagctaagtactcattaggaagtgttttaggacatgttttaa

SEQ ID NO: 281245 - DNA, 861 bp, Unknown
  Bacterial polypeptide expressing nucleotide sequence isolated from the Sargasso Sea
aattcagatttaccaagtccaccaccaccaccattgcatccaggtacaaaacaaccagctggcccagatgactttgctcctttattccctatgggtttaattatgcaagaggtttctacagagcgtgaaattgaaattccagaacccgtgagagaaatttataaacaatggaggccgtcaccattatttagagctcgaaggttagaaaagtatttagatacgccggcaaaaatttattacaaatatgaaggagtaagtccaacaggtagtcacaaaccaaacactgctgtccctcaagcctttttcaataaagaagaaggtgtaaaaaaaatatttacagaaactggagcaggtcaatgggggagttcattagcttttgcaggtcaaatgtttggaatagatattgaagtatttatggttaaagttagctttgatcaaaaaccatatagaaaacttatgatgcagtcttttggaggaacttgtcaccctagtccatcaaacataacagattttggaaaaaaacttttatcagaagatccaaataatccaggtagtttaggtatagcaatatcagaagctatcgaagctgtagttaaaagtgaaggcaaagcaaaatatgctcttggaagtgtgcttggtcatgtgttgatgcatcaaactataaatggtaatgaagctattcttcaaatggagcaagctggtgattatccagatataattgttggatgcacaggaggaggaagtaatcttgcaggattaatgtttcctttcctaggtcaacaattaagaggaggtcaaaaaattgatattattggttgtgaacctgtttcatgcccatcttttactaaaggcaaatatgcc

SEQ ID NO: 281246 - DNA, 739 bp, Unknown
  Bacterial polypeptide expressing nucleotide sequence isolated from the Sargasso Sea
atgattttaaacttcttagaaattctaattttatcaattgttcaaggaatttcagaatttataccagttagttcttctgctcatttaataatattttctaatgttattaatttttcaaataagtcacttatatttgacgttggattacatttgggatcattacttgcaataatatattattttaaaaaagaattattaaatatttctaatgataaaaaattattcaatttacttataattggttcaattccattaatattagttggatatattttttattcaacaggtataattaattcttttagaaatctgaaagtaattgcatggacaacattaatttttggtattttaatgtattttgcagatacttttaaaattaaaaaaaatatagaaaaagatttaacaattaaaaatattttaattattggaatactacaagttcttgcaattatacctggcgtaagcagagctggagtaacaatcacagctggtagatttttaaattttgatagatatgactcaacaaaaatatcattttatttatctatcccagctttaatgggggcgagcgttctttatttaaaagatgcagtaaatgaaaatttagaatttaatttatttcttattttttcaataatattgtcttttattttttcatacctaacaattaaatattttttaatttatacaaaaaagttttctttaaaattttttgtaatttatagaattattttatcta

SEQ ID NO: 281247 - DNA, 619 bp, Unknown
  Bacterial polypeptide expressing nucleotide sequence isolated from the Sargasso Sea
aggaccaaatatatttgttaaaatatgtgggtggagtaccacccaaatatctagagaattaaaagtacaattaaaatctgaatttaaaaaaattccaaagaaaattaaattaatcaattgtgtaggtggtggaagttcggcttatggcttctggagtgaattcatagattttgacaaaaaacaaattgagctggttggagttgaggcgggtgggcctaaaaaatcaaaacttcatgctgctccattaagcagaaatgcaaaaattggagttttacatggtgcttcttcttatgtttgtcaaaataatgagggtcaaataaatgaaacagaatctataagtgctggattagattacccaggagtaagtcctattcattgcttcttaaaagatactaaaagagcaagatacacttatgcaactgatgaagaggctttgaatgcacacgttatggtaaccaagtttgaaaacttaaacccaagtttagagcctagccatgcatttgctgaagcaattaaaattgctcctaaactaagcaaagatacaattataattgtaaattcttgtggagacgccaaaaaagacagggacattttaagagaaagattgggtaaaaattaa

SEQ ID NO: 281248 - DNA, 724 bp, Unknown
  Bacterial polypeptide expressing nucleotide sequence isolated from the Sargasso Sea
agtcgaagttgctgcaactaatgatgatgttaaatattccctaggaagtgtacttaaccatgtgctaatgcatcaaacaattgtaggtgtggaagcacttaaacaaatggaaatggcaggtgactatcctgatgtaataattggctgcacaggcgggggttcaaattttgcgggcctgatgtttccattccttggcgaacagctgcgtggaggttcaaatatacgagtaattgcaattgaacctgctgcgtgtccatcccttacaaggggaaaatatgcttatgatttcggagacacggggaatatgactccattgacaaaaatgcatactctcggctccacattcgttccgccggggttccatgctggtggtctgcgatatcacggtatggcccctttgataagccatctcaaggaactcaatatactggaagcatatgcatttcatcagaactcatgcttcgaggctggggtgactttcggacgagaggaaggaattattccggctccggaagctaatcatgcagtaaagggtgccatagaggaagcacttcgttgcaagcgtgaagggaaatctgaaactattctgtttaatctatgcggacatggacattttgatatgcaggcatacacagagtacttcagtggtaaccttgaagatcgaaattatgatgaacaggaacttgctatggctctttcaggtctcccctcggttgctgcctga

SEQ ID NO: 281249 - DNA, 365 bp, Unknown
  Bacterial polypeptide expressing nucleotide sequence isolated from the Sargasso Sea
tcttcacggggcagctcaatatgttaatcaaaactctgatggacaaatagaggaaactgaatctatctctgctggactagattaccctggaatttcgccacttcattgttttttaaaagataccaaaagagctaggtatacagcagcaagtgatgaagatgctttaaatgcttacaaactcgtaacaaaatttgaaaaattaagaccatcattggagccgagtcatgctttttctgttgcaataaaagaagcaaaaaaactaagcaaggatactatagttgtagttaatagttgcggtgatgcttataaagacaaggggattttagaaaaaaaattaggcaaaaaatatgttaaacccaattagt

SEQ ID NO: 281250 - DNA, 860 bp, Unknown
  Bacterial polypeptide expressing nucleotide sequence isolated from the Sargasso Sea
taaaaaatttataattggagatacaggagctggctatgcaggaaaaatgttaagtatggcggcaaaaaaatttggattaaaatgtaaaatttttatgggtgcaaaagatattgctagacaacaaccaaatgtaagagctataaaaaaaaatggagctgaaatcatccctgtgtattctgggagtcaaacactcgtagatgctgtttctgaatgcatgagatattgggtagcaaattgtgatactaccgcaatgtgtgttggaagtaccgtcggacctgcaattttcgttcgtatatgtgggtggagtacaagtcaaatatcaagagaacttaagtttcaattaattgatgagtttggctctattccaaaaaaactaaaactatataactgtgttggaggaggatcttcaagttttggtttttggaatgaatttatggattatgataaaaaacagatcgaatttattggggttgaggccggagggccagctaaaagtaaaaaacatgcagcacccttaacatatggatctaaaattggaattcttcatggtgcagctcagtatgtaaatcaaaacaatgatggacaaatagaggaaacagaatctatatcggcaggactcgattacccaggaatttctccattacattgttttttaaaagatacaaaacgtgcaagatacactgctgcaagcgatgaagaggcgttaaaagcataccagattgttacaaggtatgaaaaccttagaccatctcttgagccaagtcatgccttttttattgcaattaaggagtctaaaaaattaagcaaggatacaatagttataattaatagttgtggagatgcttataaagacagaggga

SEQ ID NO: 281251 - DNA, 917 bp, Unknown
  Bacterial polypeptide expressing nucleotide sequence isolated from the Sargasso Sea
tgcaactgttcattgcctaatagctaaaagagctggaaaaaaatatattgttggagataccggagctggatacgcaggaaaaatgctttctatggctgctaaaaaatttggacttaaatgtaaaatttttatgggagctaaagatataaagagacaaagaccaaatgttgaagccatgaaaaaaaatggtgcaaaaataattcctgttactactggtagccagacgcttgtagatgcagtgagtgaatgtatgcgttactgggtttcaaattgtgacactacacatatgtgtgttggctcaacagttggtccaaatatatttattaaaatttgtgcttggagcactgcccaaatttctagagaattgataaagcaagttaaagatgaatttggaaaaattccaaataaactaaagcttttaaattgtgttgggggtggaagttctgctcttggtttttggaacgaatttattgataccaatgctgaattagttggtattgaagcaggaggacccagaaaaagtaatttacatgctgcgccgcttacgaatggctcaaaaataggaattcttcatggtgctgctcaatacgtagtgcaaaataaagaaggacaaataagtgcaacggagtcaatttctgctggtttagattatccaggaatctctcctctgcactgtttcttaaaagatactaaacgagcaagatatacttctgcaacggatgaagaggctttgagagcatatagaattgtatccaatttagagaatatatctccttctttagaaccatcccatgcctttgcagaagcaatacgaatagctccaaaattaaactcgtcaaacgtaattattgttaatagttgcggagactcgattaaagataaagatataattaaagataaacttggtgaatatatta

SEQ ID NO: 281252 - DNA, 316 bp, Unknown
  Bacterial polypeptide expressing nucleotide sequence isolated from the Sargasso Sea
ggtcaaatagaagaaacagagtcaatttctgctggactagattaccctggtatttctccacttcattgttttcttaaagatacgaaaagagcgagatacactgcagcaagtgatgaggaagctttaagtgctttcaagctggtcacgaagcttgaaaaattaagaccttccttggaaccaagtcatgctttctcagttgcaatagcagagtcgaaaaaattaagtaaagatacaattgttgtagtcaatagttgtggagatgcttacaaagatcgaggaattatagagagaagattgggtaaaaaatatgtctaat

SEQ ID NO: 281253 - DNA, 661 bp, Unknown
  Bacterial polypeptide expressing nucleotide sequence isolated from the Sargasso Sea
ggtatcaaactgtgatacttctcatatgtgtgttggttcaactgttggtcctaatatatttattaaaatttgtgcttggagcactgcccaaatatcaagagagttaattaaacaagttaaagaagaatttggaaaaattcctaataaattaaaattaattaattgtgttggaggcggaagttcagctgcaggtttttggaatcaatttatggatacaaatgcagaattcataggggtagaagcaggtggaccaaaaaatagtaaacttcatgctgcaccattatcaaatggttctaaaataggtattctgcatggagcagctcaatatgttatacaagataaagaaggccaaataggttctactgaatctatttctgctgggcttgactatccgggtatttctcccttacactgttttttaaaagacgcaaaaagagcaaagtatacttctgccagcgacgaacaagctttgaaagcttatcaattagtttcaaaacttgaaaatatttcaccttcacttgagccgtcacatgcttttgctgaagccattaagctggcaccaaaattaaaatcatcagaagtaattgttgttaattcttgtggagacagtctcaaagataaagatattatcaaagagaaattaggttcttacatcagatga

SEQ ID NO: 281254 - DNA, 611 bp, Unknown
  Bacterial polypeptide expressing nucleotide sequence isolated from the Sargasso Sea
tatgagcgactcaattaaatacttacttgaagaaaataaagcaccaaagttttggtataatattaatgcagacttaccaagtccaccaccaccaccattacaccctggaactaaacaaccagctggtcctgatgactttgctcctttatttccaatgagtttaattatgcaagaagtttctaccgaaagagaaatagaaattcctgagccagtaagagaagtatacaaacaatggagaccttctcctttatttagggcaagaaggttagaaaagtttttagatacaccagctaaaatttattacaaatatgaaggtgttagtcctacaggaagtcacaaaccaaatactgcagttccgcaagcatttttcaataaagaagaaggaattagtaaaatttttactgaaacgggcgctggtcagtggggaagttcattagcttttgcaggtcagatctttggtatagatatagaagttttcatggttaaggttagttttgatcataaaccttacagaaaattaatgatgcaatctttcggcgctaactgtcacgctagtccatctaatttaactgactttggtaacaagctattatcagaaaatcctaataacc

SEQ ID NO: 281255 - DNA, 289 bp, Unknown
  Bacterial polypeptide expressing nucleotide sequence isolated from the Sargasso Sea
taaaaaacagtgcgaatttattggagtggaagctggggggccaacaaaaagtaataaacatgcagcacctttaacttatggatcgaaaattggaattcttcatggtgcagctcaatatgtcaatcaagacttggatggacagattgaggaaaccgagtcaatttccgctggacttgattatcctggaatttctccgctacacggttttttaaaggatacgaaacgagcaagaaatactgcagcaagtgatgaagaagctttaagcgcttttaaaactgtgactaagtga

SEQ ID NO: 281256 - DNA, 691 bp, Unknown
  Bacterial polypeptide expressing nucleotide sequence isolated from the Sargasso Sea
tatgagatattgggttgctaattgcgatacaactgcaatgtgtgtgggtagtacggtgggacctgcaatttttgttcgaatatgcggatggagtaccagtcaaatctcaagagaacttaaagtgcaattaataaatgaatttggtgatgttcctaaaaaacttaaactatataattgtgtaggaggaggttcctcaagctttggtttttggaatgaatttatggattataacaaaaaacaagttgagttcattggggttgaagcaggaggaccaaacaaaagtaaaaggcatgcagctcctttaacttatagttcaaaaatcggtatacttcatggtgcagctcaatatgtaaatcaaaatagagatggtcagattgaagaaactgagtcaatttccgcaggtcttgattatccaggagtttctccactccattgctttttaaaagataccaagcgcgcaaggtatacagcagctagtgatgaagaagctttaaaagcttaccaaatagtaacaaaatatgaaaatttaagaccttcgcttgaaccaagtcacgcattctcagtagcaatcaaagaagcaaaaagatttagtaagaatacaatagtaattattaatagttgtggagatgcatacaaggaccgtggaattttagaaaaaaagttgggaaaaaaatatgttaaatccaattag

SEQ ID NO: 281257 - DNA, 859 bp, Unknown
  Bacterial polypeptide expressing nucleotide sequence isolated from the Sargasso Sea
ccatatagaaaacttgttatgcaaacttatggtgctagatgtgtgcaaagtccttcaaatgaaacagatagtggaaaagctattctagcaaaagatccaagtaatactggaagtttaggaattgctatttcagaagcagttgaaatggctgctaaaaatcctgatacaaaatacgcattaggaagtgttttaaatcatgttttaatgcatcaaactattgtaggaaatgaagcactattacaaatggaaatggctgatgattatccagatattttagttggttgtactggaggaggaagtaacttttcaggattagcaaatccatttttaggaaaaaattttacagaaggaaaaaaaactagagtaattgcttgtgagcctaagtcatgcccaactttaactgaaggtaaatatgtttacgactttggagacacaggaaaattaacaccattagtaaaaatgcatactttaggatcacaatttattccgccagcaactcactcgggaggattaaggtatcatggtatggcccctcttgtaagtcatttaaaagaaattaatgcacttgaagccaaagcttatggacaaaaagaatgttttgaagctggagtaaattttgctagaacagaaggtatagtgccggctcctgaagcaacacatgctgttaaaggtgctattgacgctgctttagagtgtaaaaaaaatggagagtctaaaactatattattcaatctgtgcggtcatggtcattttgatatgaaagcatatggagattacttcgatggaaatttagcagaagacaactttgataaaggaagtatggataaagctttagaagatcttccaaaaattgcttaat

SEQ ID NO: 281258 - DNA, 763 bp, Unknown
  Bacterial polypeptide expressing nucleotide sequence isolated from the Sargasso Sea
gttagagcaatgaaaaaaaatgctgcagaaattattccagtttatacaggtagtcaaacacttgttgatgctgtgagtgaatgcatgagatactgggtgtcaaattgtgatacaactcatatgtgtgtaggatctacagttggtcctaatatttttgtaaaaatctgtggttggagtacatctcaaatttctagagaactttctattcaaattaaaaaagaatttagaaatatgccaaaaaaaataaaattaataaattgtgttggaggtggatcttcaagttttggtttttggaacgaatttatggattatgacaagaagaaagttgaatttattggtgtcgaggctggcggaccaaaaaaaagtaaaagacacgccgctcctttaacttatggttcaaaaattggagtactgcatggcgcaatgcaatatgtaaatcaagataacatgggtcaaatagaagaaacagagtctatcagcgctggactagattatcctggagtttctcctcttcattgctttcttaaagatgtaaaaagagcgagatatacttctgcaagtgatgaagaggcattaaaagcataccagttggtaactaaatatgaaaatttaaatcctagtttagagcctagtcatgctttcgccgaagcaattaagattgcacctaaaaatagcaaagatacaattataattgtcaattcttgtggagatgcaaaaaaagataaggatattttaagaagaagattaggaataagtatatgat

SEQ ID NO: 281259 - DNA, 889 bp, Unknown
  Bacterial polypeptide expressing nucleotide sequence isolated from the Sargasso Sea
aaatacataattggagacacaggcgcgggatatgctggaaagatgttaagcatggctgcaaaaaaatttggtttaaaatgtaaaatattcatgggagcaaaagatattaaaagacaaaagcctaattgtgatgcaatgaaaaaaaatggtgctgaaatagttcctgtttacacaggtagccaaacccttgtagatgctgttagcgaatgtatgagatactgggtatcaaattgtgatactgctcatatgtgtgtaggttctacagtaggacctaatatatttgttaaaatttgtggttggagcacatcacaaatttctagagagctttcgatacaaataaaagaggagtttggaaaaattccaaaaaaattaaagttatataattgtgttggaggaggaagttctagctttggattttggaatgaatttatgcattacaacaaaaagcaaattgagtttattggtgttgaggctggtggaccaaaaaatagtaaaaaacatgctgcacctttaacttatgggtcaaaaattggaatattgcatggagcagctcaatatgtaaatcaagatacagaaggtcaaatagaagaaacagaatctataagcgcaggtctggattaccctggagtttctccgctacattgttttttaaaagatacaaaaagagcaagatatactgcagctagtgatgaagaagctttgaaggcatataaattagttaccaaatatgaaaatttaaacccaagcttagaaccgtgccatgcgtttgctgaagcaataaaagtagctccaaaattaagcaaggatacaattataatcgtaaattcatgtggagacgcattaaaagatagagatattttaaaagcaagattaggaaaatttaaatgat

SEQ ID NO: 281260 - DNA, 566 bp, Unknown
  Bacterial polypeptide expressing nucleotide sequence isolated from the Sargasso Sea
catgatacgtaaaataactttagaagaaaatgaaattccagataagtggtataatattattgctgatatgccaaataaacctcttcctccattaaatcctggaactcttgagccaattggacctgaagctttagctcctttatttccaatggaattaattaaacaagaggtgtctcctgagaaatggattgatattccagatgaggttcgaaatatatactcaatgtggaggccaactcctttatttagagcatataattttgaaaaggcattagataccccagcaaaaatttattataaatatgaaggtgtaagtcctacaggatcacataaaccaaatactgctgtcgctcaagcttattataataagcaagaaggagtaaaaaaaataacaactgaaacaggagctggacaatggggaagcgctttgagttttgcttgtcaacattttggaattgattgtgaagtttttatggttaagttatcatatgaacataaaccttatagaaaagttatgatgaatacatggggggctaaagttcacccatctccttcgaatgcaacag

SEQ ID NO: 281261 - DNA, 736 bp, Unknown
  Bacterial polypeptide expressing nucleotide sequence isolated from the Sargasso Sea
cgtatattcaggaagtcaacattagtagatgctgtatctgaatgtatgagattttgggttgctaattgtgatacaacagcaatgtgtgtaggcagtactgtaggacctgcaatatttgttcgaatatgcggatggagtactagtcaaatctctagagagcttaaagttcaattaattaatgaatttggagatgtccctaaaaaacttaaattatataattgtgtaggaggaggttcctcaagttttgggttttggaatgaatttatggactatgataaaaaacaagttgagtttattggggtcgaagctggaggtccagctgaaagtaagaagcacgcagctcccttaacttatggttctaaaattggtatacttcatggtgcagcacaatacgtaaatcaaaatagcgatggtcagattgaagaaactgagtcaatttctgctggtcttgattatcctggaatttcaccacttcattgctttttaaaagagacaaagcgcgcaaggtatacagcagctagtgacgaagaagctttaaaggcctatcaaatagttacaaaatttgaaaatttaagaccatctctcgaaccgagccatgcattctcggttgcaattaaggaagcaaaaaaattgagcaaggatacagttgtaattattaatagttgcggagatgcatacaaagaccgtggaattttagaaaaaaagttgggaaagaagtatgttaaatccaattagc

SEQ ID NO: 281262 - DNA, 592 bp, Unknown
  Bacterial polypeptide expressing nucleotide sequence isolated from the Sargasso Sea
ggatggagtactgcacaaatttcaagagagttaaaaatgcaaattaaacaagaatttaaaaaaattccaaataaaattaaattaattaattgtgtaggtggtggaagttcagcatatggcttttggagtgagtttatagattacaataaatcacaaatagagttgattggagttgaggctggtggtccacagaaatcaaaacttcatgctgctcctttaagcagaaatgctaaaatcggaattttacatggtgcagcatcttatgtttgtcagaacaatgaaggtcaaattaatgacactgagtcaataagtgctggattggattatccgggtgtaagcccaatacattgttatttaaaggatacgaaacgagctagatatacttttgcaactgatgaagatgcattaaatgcccatgtgatgataactaaatttgaaaaacttaatccaagtttagaacctagtcatgcatttgcagaagcaataaaaattgccccaaaattaggtaaagacacaattataatcgttaactcttgtggtgatgctaaaaaagatagagatatattaaaagaaaggttgggtaaaaattaat

SEQ ID NO: 281263 - DNA, 340 bp, Unknown
  Bacterial polypeptide expressing nucleotide sequence isolated from the Sargasso Sea
acccaacaaacagatgaaaaaagactaaacacaattttaagtaatgcatccggatttttatattacgtaactattactggtattactgggcaaaactctgcagatatagataatttaaaaaaatcaattaattcaattaaatctttcacaaaactacctgtagtagcgggttttggaataaagaataaacaagacgtggaacaaattagtacctttacagacggtgtagttgttggctcaagtattgttaatattataaaacaaaatcttgatgataaaaataaaatgataaatgaaattgatatttttacaaacggcctaaaagaaggtgtgagataat

SEQ ID NO: 281264 - DNA, 508 bp, Unknown
  Bacterial polypeptide expressing nucleotide sequence isolated from the Sargasso Sea
gggggttcatctagtttcggattttggaatgaatttatggattacgataaaaaacaaattgaatttattggggttgaagctggtggacctgcaaaaagcaaaagacatgccgctcctttaacatatggatctaaaattggtatacttcatggggctgctcaatatgtaaatcaaaatgatgacggtcaaattgaagagactgaatcaatatctgcaggacttgattacccgggtatctctccattgcattgttttttgaaagatactaagagagcaagatatacggctgcaagtgatgaagaagcattgagagcttaccaaattgttacgaagtatgaaaatttaagaccatctcttgagccaagtcatgcattctccgtggcaattaaagaggccaaaaaactaagtaaagatactgttatagttataaatagttgtggtgatgcttataaagataagaaaattttggagagaaaattaggaaaaaaatatgttaaatccaattagc

SEQ ID NO: 281265 - DNA, 811 bp, Unknown
  Bacterial polypeptide expressing nucleotide sequence isolated from the Sargasso Sea
tatgggtgcaaaagacataaaaagacaacagccaaatgtgaaagcaatgaagaaaaatggtgctgaagtagttcctgtgtattcaggaagtaaaacacttgtggatgctgtttctgaatgtatgagattttgggttgcaaattgtgatacaacagcaatgtgtgtgggaagtacggtaggacctgcaatttttgttcgaatatgtggttggagtactagtcaaatatctagagagcttaaagttcaattaataaatgaatttggtgaagttcctaaaaaacttaaattatataattgtgtaggaggaggttcctcaagttttggtttttggaatgaatttatggattataataaaaaacaagttgagtttattggggtcgaagcaggaggaccaagaaaaagtaaaagacatgcagctcccttaacttatggttccaaaattggcatacttcatggtgcagctcaatatgttaaccaaaatagcgatggacagattgaagaaactgaatcaatatctgcaggtcttgactatcctgggatttctccactccattgcttcttaaaagatactaagcgtgcaagatatacagcagctagtgatgaagaagctttaaaagcttatcaattagtaacaaaatatgaaaatttaagaccatctctcgaaccaagtcatgcattctcagttgcaatcaaagaagcaaaaaaattaagcaagaatacaatagtaattgttaatagttgtggagatgcatacaaagaccgaggaattttagaaaaaaagttaggcaagagatatgttaaatccaattag

SEQ ID NO: 281266 - DNA, 603 bp, Unknown
  Bacterial polypeptide expressing nucleotide sequence isolated from the Sargasso Sea
tatgagcgactcaattaaatacttacttgaagaaaataaagcaccaaagttttggtataatattaatgcagacttaccaagtccgccaccaccaccattacaccctggaactaaacagccagctggtcctgatgactttgctcctttatttccaatgagtttaattatgcaagaagtttctactgaaagagaaatagaaattcctgagccagtaagagaagtatacaaacaatggagaccttctcctttatttagagcaagaaggttagaaaagtttttagatacaccagctaaaatttattacaaatatgaaggtgttagtcctacaggaagtcacaaaccaaatactgcagttccgcaagcattttttaataaagaagaaggaattagtaaaatttttactgaaacgggcgcaggtcagtggggaagttcattagcttttgcaggtcagatctttggtatagatatagaagttttcatggttaaggttagttttgatcataaaccttacagaaaattaatgatgcaatcgttcggtgctaactgtcacgctagtccatctaatttaactgacttcggtaacaagttattatcagaaaatcc

SEQ ID NO: 281267 - DNA, 640 bp, Unknown
  Bacterial polypeptide expressing nucleotide sequence isolated from the Sargasso Sea
atgaatcgaataagaaatttatttaaaaaagacaaagataagctcatagtttttctaactgcaggctatcctgagatcaacagcacagaaaaacttgttttgacagctgtagaatctggagcggacatgattgaaattggaatacctttttcagaccctcaggcagatgggcccataatacaaaaagcaagtgaaaaggctttaagcaatggtattacacttgatattatttttcaacaggtaaaatcaattagaaaaaagactaatattccaatctcgttgatgggttattacaatccaattttaaaaagagggatagataggttcttagcagattgtgttgtgaatgaaattgatggaatcattttaccagatctgccatatgatgaaggaaaagaattttgcaataaagctaaacaattagggatttctccaattttgcttgtcgcacctaatacgtcaaataaaaggattgaggaaatttctaatttatcaaatgatttaatatacgctgttagcattcttggaattactggaaacgacttaagctcaaaaaaagaacttattaaatatttaaatcgagttaaagcaaatagttcatgtccatttattgttggctttggaattaaaactaatgatg

SEQ ID NO: 281268 - DNA, 334 bp, Unknown
  Bacterial polypeptide expressing nucleotide sequence isolated from the Sargasso Sea
tcgatcgtattatgcagggatgaagtggggcagattcaaatgacccacagtgtctcggcggggctagattatgcggcggtgggaccggagcacgcgtggctacgtgatcagggccgtgtcgaatacacctacgccaccgatgatcaggcattggaggccttttttagattgtctaagctggagggaattattcctgcgctggaatcctcccatgcagtggcagaggtgatcgtgcgcgcgccgcagatgtccaaggatcagatcattatttgcaatctctccggtcgcggagacaaggacgtgcagcaagtggctgagaaggtggagatgtagc

SEQ ID NO: 281269 - DNA, 604 bp, Unknown
  Bacterial polypeptide expressing nucleotide sequence isolated from the Sargasso Sea
tggagcactagtcagatttcaagggaacttaaaattcagttaattgatgaatttggatctattccaaaaaaacttaaactttataattgtgtaggtggtggtagctcaagctttggattttggaatgaatttatggattatgataaaaagcaatgtgaatttataggagtcgaggctggaggacctacaaaaagtaaaaaacatgcagcaccactaacctatggatcaaaaattggaattctacatggagcagctcagtatgtaaatcaaaactcagatggacaaatagatgaaaccgaatctatttccgcaggacttgattatcctggagtttctccacttcattgttttttaaaagatactaaaagagcaagatatactgcggcaagtgatgaggaagctttaaatgcatataaacttgttactaaatttgaaaaattaagaccatctttggaaccaagtcatgcttttgcagttgcaataaaagaagcaaaaaaattcagtaaagatactattattgtagttaatagttgtggggatgcttacaaagataggggaattttagagaaaagattaggaaaaaaatatgttaaatccaattagt

SEQ ID NO: 281270 - DNA, 811 bp, Unknown
  Bacterial polypeptide expressing nucleotide sequence isolated from the Sargasso Sea
taaaaaatttattgttggtgatactggagcaggttacgcaggaaaaatgctttcaatggccgctaaaaaatttggtcttaagtgtaaaattttcatgggagcaaaggatattaaaagacaaagaccaaatgtcgaggctatgagaaaaaatggagcaaaaatagtgcctgttaatactggaagtcagacacttgttgatgctgtgagtgagtgtatgcgctactgggtagctaattgcgatacaacgcatatgtgtgttggatcgacggttggtcctaacatttttgtaaagatctgtgcatggagtacagcccaaatttcaagagaattaatgatacaagtaaaagaggaatttggtaaagtgccaaggaaaatgaaactccttaattgtgttggtggaggaagctctgctatgggattttggaatgaatttatggatactgatgcagaatttattggtattgaagctggaggtccaaagaatagcaaacttcatgctgcaccattaactaatggttcaaagctaggcatacttcatggatctgctcagtatgtaattcaagatagagaaggacaaataggagggacagaatcaatttcagcaggattggattacccagggatttcaagtttacattgttttcttaaagacacaaaaagagctaaatatacttccgcaagtgatgaagaggctcttaaagcttatcagctagtttcaaaatttgaaaatatttctccatcactcgagccgtctcatgcttttgcagaagctataaaactagcgcctaaattaaaaacatctgacataatt

SEQ ID NO: 281271 - DNA, 217 bp, Unknown
  Bacterial polypeptide expressing nucleotide sequence isolated from the Sargasso Sea
atgaataatctagactctcttcctaagaagaaaatactctcgttatttatgacgtgtgggtttcctacattaaatcaaagtaaaaaggtttttaatgaaatgttatctcatcaaccagatattattgagtttgggcttcccttttctgatcctatggcagatgggcctattatccaagaggcaaacaaacttgcacttagatcaaaattatcaacac

SEQ ID NO: 281272 - DNA, 388 bp, Unknown
  Bacterial polypeptide expressing nucleotide sequence isolated from the Sargasso Sea
atgaatagaataaaagaactttttggtacagattctaaaaaattaattgtatttattactgcaggttttccaaataaagatagtacgaaggatttagttttggaagctattaaaggaggagccgatatgattgagataggtattcctttttcggatcctcaagcagatggaccagttattcaagaagcaaacgaaatagcattaaaaaatggaattacactacttgaaatttttgaacaagtaaaggagattagagaggaaactgatgtccctattgcgctaatgggttattataatccaattcttaggatgggtacaaaggatttcataaaaaaatgtaatgatgcagaaatcgatggggttattcttccagaatttacctcttgat

SEQ ID NO: 281273 - DNA, 611 bp, Unknown
  Bacterial polypeptide expressing nucleotide sequence isolated from the Sargasso Sea
ttttgtaaaaatctgtggatggagtacatctcaaatttctagagaactttatatcaaaattaaagaacaatttgaaaaaatcccaaaaaaattaaaattaataaattgtgttggtggaggctcatcaagttttggattttggaatgagtttatggattatgataaaaaacaggttgaattaattggtgttgaagctggaggacctaaaaaaagtaaaaaacatgctgcacctttaacttacggatcaaaaattggagtacttcatggagctatgcaatatgttaaccaagataaaatgggacaaatagaagaaacggagtcaataagtgcaggactagattatcctggagtttcaccattgcattgctttttaaaagatacaaatagagctagatacactgccgctagtgatgaggatgctctaaaagcatatcaattggtaactaaatatgaaaatttaaatccaagtttagagccaagccatgcttttgctgaagcaataaaaattgcaccaaaattaagtaaagatacaattattgttatcaattcttgtggtgacgcaaaaaaggatagagatattttaaaaaaaagattaggtagcaaaatatgat

SEQ ID NO: 281274 - DNA, 457 bp, Unknown
  Bacterial polypeptide expressing nucleotide sequence isolated from the Sargasso Sea
atgcattatgataaaaagcaagttgaatttgttggtattgaagccggaggaccaaaaaaaagtaaaagacatgctgctcctttaacttatggatcaaaaattggtatattgcatggtgcagctcaatatgtgaatcaaaacagtgaaggccaaatagaagaaactgagtcaattagtgctggattagattatccaggagtttctccacttcattgttttttaaaagacactaaaagggcaagatatactgctgcctctgatgaggaagctttaaatgcatacaaattgataactaggtatgaaaatttaaatccaagtttggaaccaagtcatgcatttgctgaagcaataaaattagctccaaaattaagtaaggatgtaattataattgtaaactcatgtggtgatgcacataaagatcgggatattttaagacaaagattaggaaaattgtaat

SEQ ID NO: 281275 - DNA, 715 bp, Unknown
  Bacterial polypeptide expressing nucleotide sequence isolated from the Sargasso Sea
gcggttgaggtggcggcacagaacgacgacgtgaaatatgcgctgggaagcgtattgaatcatgtacttacccaccagtcgatcatcggtttggaagccatcaagcagatggaaatggccggagactaccctgatgtggtggtgggctgcaccggaggcgggtccaacttcgccgggatcgtctttcccttcatcggggaaatgttccggggtggaagcaaaatccgggtggtcgcggttgaacccgcagcctgtccttctttgaccagaggaaaatacgcctacgattttggggacacggcgcatcttaccccattggccaaaatgcataccctgggttcaacttttgttcccccgggattccacgccggaggactgcgttatcacggcatggcaccgatgatcagccacctgcgggaattggatgttctggaagccaccgcgtatcaccagaatgcctgctttgagtccggggtaatgtttgggcgcaccgaagggatccttcctgcccccgaagcgaaccatgcggtcaagggagcgatcgaagaggctttacgctgtaaacgtgagggtaaaagcgaaaccatcctctttaatctctgcggacatggtcatttcgacatgcaggcctacaccgattacttcgcgggtaatctggaggaccggaactacgacgaacaggaactggcgatggccctcgccggcctgccttccg

SEQ ID NO: 281276 - DNA, 479 bp, Unknown
  Bacterial polypeptide expressing nucleotide sequence isolated from the Sargasso Sea
ttatgggttctggagtgagtttattgattatgataaaaaacaagttgaattaattggagtagaggcaggaggtccaaaaagatccaaattacatgcagctcctttaagtagaaatgcaaaaattggaattttacatggagcagcatcttatgtatgtcaaaataaagaggggcagatccatgaaacagagtcaattagtgctggtttagattatcctggagttagtccaatccattgttttttaaaagatacaaaaagagctaaatacacttatgcaacagatgaagaagctttgaatgcttataagttagttactaaatatgaaaaattaaatcccagtttagaaccaagtcacgcttttgcagaagcaattaaaattgcacctaaattaagcagagatacaatttgtattgtaaattcatgtggagatgcaaaaaaagatagagacattttaaaacaaagattaggaaaattttaat

SEQ ID NO: 281277 - DNA, 971 bp, Unknown
  Bacterial polypeptide expressing nucleotide sequence isolated from the Sargasso Sea
caaactattcgcaaagttaagaatagataaaaaatttttaaaagagagagatgaatattttaaatcatatataggttcacccactccatttattaaattagaaaatttaacagattatctcaaaggcgctcaaatttatgcaaaagtagtatctgaagccaacggtggggcccataaaatatataatgctacagtccactgcctaatcgcaaaaaaagcaggcaaaaaatttatagtaggtgatacgggggctggatacgctggaaaaatgttgtctatggcagcgaaaaaatttggtcttagatgtaaaatatttatgggcgcaaaagatattaaaagacaaagaccaaatgttgaagcaatgaaaaaaaacggagcaataattgtgcctgtcaccacaggtagtcaaactttagtcgatgcagtcagcgaatgtatgagatattgggtttctaactgcgatactactcacatgtgtgtaggatcaacagtaggtcccaatatatttattaaaatttgtgcttggagcactgctcagatatcaagggagcttttcgaacaagttaaagaagagtttggaaaaattccaaaaaaaataaaacttcttaattgtgtgggtggtggaagttccgcaataggattttggaatgaatttatggatacagatgctgagttcattggcgttgaagctggtggtccaaaaaatagcaaacttcacgccgctccattaacaaacggatctaaaattggaattttgcacggagccgcgcagtatgtgattcaagataaagaagggcaaataggatcaactgaatctatttctgctggtttagattatcctggaatttcacctttacattgttttttaaaagatacaaaaagagcaagatacacatctgcgaatgacgaagaagcattaggagcctatcaattggtttctaaattaaaaatatatctccttctttggagcc

SEQ ID NO: 281278 - DNA, 586 bp, Unknown
  Bacterial polypeptide expressing nucleotide sequence isolated from the Sargasso Sea
gagtacagcgcaaatttcaagagaattaaaaattcaaattaaacaagaattcaaaaaaattccaaaaaaaattaaattaattaactgtgtgggtggtgggagttcagcatacggtttttggagtgaatttgtagattttaataaatcacaaatagagttcgttggtgtagaggctgggggtccaaaaaaatcaaaactccatgctgctcctttaagtaaaaatgccaaaattggaattttacatggtgcagcatcttatgtttgccaaaacaatgaaggtcaaattaatgacactgaatcaattagtgctggattagattacccaggtgtcagtccaattcattgttttttaaaagatacaaaacgagctagatatacttatgcaactgatgaagatgcattaaaagcacatgtgatggtaactaaatatgaaaaacttaatccaagtttagaacctagtcatgcattcgctgaggcaataaaaattgctccaaaattaagtaaagacacaattataatcgttaactcttgtggtgatgctaaaaaagatagagatatcttaaaagaaaggttaggtaaaaattaa

SEQ ID NO: 281279 - DNA, 589 bp, Unknown
  Bacterial polypeptide expressing nucleotide sequence isolated from the Sargasso Sea
tccagaagatctagcccctttattcccaatgggtctgattttacaagaagtgtctcaagattcttttatagatataccaaagcctgtcttagatttatataagctttacagaccttctgctttatttagagcagttcgactggagaaagctctaggtacaaattcaagaatatactacaaatatgaaggtgggtccccatctggctcacataaaccaaacactgcaatccctcaagcgttttataactcggaagaaggtgttacaaaaatggttacagaaacaggtgctggtcagtggggctctgctttggcttttgcatgccaggcttttggaattgaattagaggtatttcaagtagctgcgtcatacttagcaaaaccttatagaaaaaccatgatggagatatacggcgcaaaagtatattcaagcccgtctgaaagaacagatattggtaaaaagtttctctcagaagaccctgaaactccaggaagtcttggcattgccatttcagaagctattgaagttgctgctaaagatgagaaaacaaggtacgcgcttggaagtgttttgaaccatgtcctaatgcat

SEQ ID NO: 281280 - DNA, 694 bp, Unknown
  Bacterial polypeptide expressing nucleotide sequence isolated from the Sargasso Sea
tatgactgactcaattaaatatttattagaagaaagcaaagctccaaaattttggtataacattaattctgatttaccaagtccacctccacctcctttacatcctggaacaaagcaaccagctggtccagacgattttgcacctttattccctatgagtttaataatgcaagaggtgtctacagaaagagaaattgaaattccagaaccagtcagagaggtttataaacaatggagaccttcaccattatttagagctagaagattagaaaaatttttagatacaccggcaaaaatttattacaaatatgaaggagtaagtcctacaggtagtcataaaccaaatacagcagtgccacaggctttttttaataaagaagagggtataagtaagattttcactgaaactggcgcaggtcagtggggaagttcactagcttttgcaggtcagatttttggaatagatatagaggtatttatggttaaggttagttttgatcacaaaccatatcgtaaactaatgatgcaatcatttggagcaaattgccatccaagtccttcaacattaactgattttggtaataaacttctttctgaaaatccagataaccctggcagtttaggcatagctatttctgaagccattgaagctacagtaaaaagcggagggaaagctaagtattctttaggtagt

SEQ ID NO: 281281 - DNA, 805 bp, Unknown
  Bacterial polypeptide expressing nucleotide sequence isolated from the Sargasso Sea
atgacagactctataaaatatattcttgaagaatcaaaagctcctaaaacttggtataatattaatgctgatttaccaagcccaccaccaccacctttacatcccgggactaaacaaccagcaggaccagatgattttgctcctttatttcctatgggtttaatcatgcaggaagtttccacagaaagagaaattgaaatccctgaacctgttagagaaatatataaacagtggagaccatctcctttatatagagctagaagattagaaaaatttttagatactcctgcaaaaatttattataaatatgagggtgttagtccaactggtagtcacaaacctaatacagcagtgcctcaagctttttataacaaagaagagggtgttaaaaaaatatatactgaaacaggagctggacaatggggaagctctttagcttttgctggtcagatgtttggaatagatattgaagtatttatggttaaggtaagctttgatcaaaaaccttacagaaaactaatgatgcagtcatttggcggtatttgtcatccaagtccatcagaattaactgattttggaaaaaaacttttgactgatgatcccaataatccaggtagtttaggtatagctatttctgaagctattgaagcagtagtaaaaagtgaaggtaaagctaaatatgctcttggaagtgttttagggcacgtgcttatgcatcaaacaataaatggcaatgaggctatacttcaaatggaacaagcaggagattatcctgatataattgttggttgtacaggaggaggaa

SEQ ID NO: 281282 - DNA, 805 bp, Unknown
  Bacterial polypeptide expressing nucleotide sequence isolated from the Sargasso Sea
ctctagtgaaacgaatacaggaaaagcaattctaaaaaaagatccaaaaaataccgggagtcttggaatagctatttcagaagctgttgaaatggccgcgcaaagtaaaactactaaatactctttaggaagtgttttaaaccatgtgttaatgcatcaaactatagtaggcaatgaggctataatacaaatggaaatggcaggagattatcctgacatactaattggatgtactggagggggaagtaatttttctggcttagtatttcctttccttggaaaaaaatttcgcgataaaaaagatataaaagttatagcttgtgaaccaaaatcttgtccatctttaacaaaagggaaatatacttatgattttggagacaccggaaatcttactccattagttaaaatgcatactttaggttcttcatttatgcctccagcaactcactctggaggattaaggtatcatggcatggctccaatggtgagtcatttaaaagaaatcggtgcactcgaagcaaaagcatatggacaaaaggaatgttttgaggctggtgtaaaatttgcaaatgtagaaggtattgttcctgcgcctgaggctactcatgctgttaagggtgctattgatgctgctttagaatgtaaaaagaatggaaaatcaaaaaccattcttttcaatttatgtggtcatggtcattttgatatgcaagcttatggtgattattttgataataaacttgaagaagatgtttataatgaggctgaagtaaataaagccttacagtccttacctaagattgcgtag

SEQ ID NO: 281283 - DNA, 316 bp, Unknown
  Bacterial polypeptide expressing nucleotide sequence isolated from the Sargasso Sea
ctatgaaggacagatagaagaaacagagtcaattagcgcaggattagactaccctggagtttctccacttcattgttttttaaaagatacaaaaagagccagatatacagctgcctctgacgaggatgctttaaatgcatataaaattgtaacaaaatatgaaaatttaaatccaagtttagaaccaagtcatgcttttgctgaagcaataaaattagctccgaaactaagtaaggatgtaattataattgtaaattcgtgtggtgatgctcataaagatagagacattttaaaacaaagattaggaaaatattaa

SEQ ID NO: 281284 - DNA, 1246 bp, Unknown
  Bacterial polypeptide expressing nucleotide sequence isolated from the Sargasso Sea
tatgaaattaaaaaagaaaattccagtaattgatcaaacagataaacttggtttttggggtggaaagtttggaggaaatttttgtgcagaaactttaaaaaaacccatagaagatttagaaattttatttaacaaactaaaaaataataaaagttttattaaagagagagatgaatattttaaaaattggataggtgccccaacaagattcattaaacttaaaaatttgacagatcatattggaggggctcagatttggtcaaaagtagtttcagatgcaaatggtggagcacacaaaatttataatgctactgttcattgcttactagcaagaagatcgggtaaaaaatttgtgataggtgacacaggtgccggatacgcaggaaagatgttgagtatggcagcaaaaaaatttggattaaaatgtaaaatttttatgggtgctaaagatatcaaaagacaacaacctaatgtaagagcaatgaaaaaaaatggtgctgaagttgttccagtttattcaggaagtcagacacttgttgatgcggtctctgaatgtatgaggtattgggttgctaactgtgatcacgctcatatggcagtaggctcaaccgtaggtccctctatctttgtccaaatatgtggatggagtacaagtcaaatttctagagagcttaaatctcaaatcattgatgaatttagatcaatgccaaaaaaaataaaactatataattgtgttggtggtggctcatccagttttggtttttggaatgaatttatggattataacaaaaaacaagttgagtttattggtgttgaggctggtggtccaaccaaaagcaaaaaacatgctgcacctctcacttatggatcaaaaattggtattcttcatggagcggctcaatatgtaaaccaaaactctgatggacaaattgaagaaacagagtctatttcagcaggtcttgattacccaggtgtttctccgcttcactgttttttaaaagatgtaaaacgagcaagatatacagctgctagtgatgaagatgctttaaaggcttataaattggtcactaaatatgaaaatttaaaaccatcattggaaccaagccatgctttttctgttgcaattaaagaggctcgtaaacttagcaaagatacaatagtaattgttaatagttgtggagatgctcataaagataaagctattttagaaaaaagattaggaaaaaaatatgccaaatttaattga

SEQ ID NO: 281285 - DNA, 1105 bp, Unknown
  Bacterial polypeptide expressing nucleotide sequence isolated from the Sargasso Sea
ttgaaaaactatagaaaaaataagaattttattagaaaaaaagatttttattttaaaaattatatcggatctcctacttcatttattaaactagaaaacctatcaaatcatttaggaggagctcaaatttgggcaaaagttgtttctgaggccaatggtggagctcataagatatataatgcaaccgtacatgctttgatttgtaaagctatgggtaaaaaatatattataggagacaccggggcaggatatgcaggtaaaatgctaagtatggcagccaaaaagtttggcttaaagtgtaaaatttttatgggggcgaaggatataaaaagacaaaaacctaattgcgatgcaataagaaaaaatggagctgaaattatacctgtttattcaggaagtcagacgttggttgatgcagttagtgaatgcatgagatattgggtatcaaattgtgataacacacatatgtgtgtaggttcaactgtaggtccaaatatttttgtgaagatatgcggttggagtacatcacaaatttcaagagagctcaaaactcaaataaaaaaagaatttaaaaaatttccaaaaaaattaaaacttattaattgtgtaggtggtggaagttcagcttatggtttttggagtgaattcattgattatgacaaaaaacatattgaattaataggtgtagaggctggaggtccaagaaaatccaaacttcatgctgctcctttaagtagaaatgctaaaattggaattttacatggtgctgcttcatacgtttgtcaaagtagtgaaggtcaaattcatgaaacagagtcaattagtgctggactagattacccaggagtaagccctattcattgttttttaaaagacacaaaaagagcaaggtatacgtatgctactgatgaagaagctttgaatgcatatcaaatggtcactaaatttgaaaaacttaatccaagtttagagccaagccatgcttttgctgaatctataaggattgcaccaaaattaagtaaggatacaattataatagtaaattcttgtggtgacgccaaaaaagacaaggatattttaaaagaaagattgggtaaatattaat

SEQ ID NO: 281286 - DNA, 1021 bp, Unknown
  Bacterial polypeptide expressing nucleotide sequence isolated from the Sargasso Sea
tctgaaattagaaaatttatctaaacatttgggaggtgctcaaatttgggcaaaagttgtttctgatgctaatggtggagcccataaaatttataatgcaactgttcatgctctaatttgtaaaagtatgggaaaaaaatatatagttggtgacacaggtgctggatatgctggaaaaatgttaagtatggctgcaaaaaaatttggtcttaaatgtaaaatatttatgggtgctaaagatattaaaagacaaaaacctaactgtgatgccatgagaaaaaatggagctgaaataattcctgtatatacaggaagtcaaactttagttgatgctgtaagcgagtgtatgaggtattgggtttcaaattgtgatacaacacatatgtgtgtgggttcaactgttggaccaaatatatttgtgaaaatatgtggatggagtactagtcaaatttccaaagaattaaaaattcaaattaaaaatgaatttggaaaaataccaaaaaaaataaaactaattaattgtgtcggtggtggaagctccgcctatggattttggagtgagttcgttgattacccgaaatctcaaattgaatttattggagttgaagctggaggtccaaaaaattctaaattacatgctgctcctttaagtagaggagcaaaattaggtattttacatggagcagcttcgtatgtttgccaaaataacgatggacaaataaatgaaacagaatctataagtgccggtttagactatccaggagtaagtccgattcattgctttcttaaagatgttaaaagagcaaaatatacttttgcaactgatgaagaggctctcgaagcatataaattagtaactaaatatgaaaaaataaatccaagtcttgaaccaagtcatgcttttgcagaagcaattaaaattgcaccaaagttaaaaagagaaaacattataattgttaattcatgtggtgatgcaaaaaaagatagagatattttaaaagaaaagattaaaaaaatatga

SEQ ID NO: 281287 - DNA, 754 bp, Unknown
  Bacterial polypeptide expressing nucleotide sequence isolated from the Sargasso Sea
atgagaatgaggttgctaggtgctgaaatacacgtagttaaaagtgggtcacgacaattagttgacgctgtctccgaaagcattagatattttgtagctaactgtgacaaggttcacctcgcagtaggatcgagtgtgggcccaagtatttatactcggatctgtgcgtacgcccagtctgtaatttcaaaagagctaaaaaaacaagttcaagatgaattcggaagaattccaaagaacctgagtcttgtggcagccgttggtggcggtagctcgagtcttgggttctggatgcatatgattgatagtggatgcagattaattggttgcgaggctggaggaccaaaaaaatttaaaaataaacatgcagctccattaacatatggttcaaaacttggaattttacatggagcagctcaatatgtaatgcaagataaaaattttcaaattgctgatacagaatcggttagtgcgggtttggattatcctggctgctcagcgatccattcatggttaaaacaacaaaaaagagcaacatatgttgcgcctagcgatgaggaaacattggaagcttttaaactttgttcaagattagagggaattcaagcatctctagagccctcacatgctctagcccatgtttgtaaaattgctccaaaaatgaagaagacagataaaattattactctgatttgtggaaatgcgatgaaagattttggaataatagcagaaaaattaggagttaaaatttgac

SEQ ID NO: 281288 - DNA, 1051 bp, Unknown
  Bacterial polypeptide expressing nucleotide sequence isolated from the Sargasso Sea
tatgaaaaaaataaaaaagggaattcctttaattgatcaacataataaaaatggtttttggggaaaatttggtggaaattttatacccgaaactttaaaaaaacctgtagaagaccttactattttatttaaaaaattaagaaatgataaaaaatttattcaagaaagagattattattttgaaaattgggttggggctcctacttcatttataaaattagaaaatttaacaaactatttaaatggtgctcaaatatgggccaaggtagtctcggaagctaatggtggagctcataaaatttataatgctactgttcatagtcttatagctaaaagagcagggaaaaaatacatagttggagacaccggagctggatatgctggaaaaatgttgagcatggctgctaaaaaatttggtttgaaatgtaaaatatttatgggtgcaaaagatataaaaaggcaaaaaccaaactgcgatgcaatgcgtgcaaatggtgctgaaatagttccggtttatacaggaagtcaaactcttgtagatgccgttagcgagtgcatgagatactgggtttcaaattgtgacacaactcatatgtgtgtcggatctacagttggacccaatatatttgtaaaaatttgtggatggagcacttcgcaaatttcaagagagctctttatacaaatgcaagaagagtttggaaaaattccaaaaaaattaatattaataaattgtgtcggaggtggctcctcaagctttggcttttggaatgaatttatgcattatgataaaaaacaagttatgtttattggtgttgaagctggtggacccaaaaaaagtaaaaggcatgctgctcctcttacctatggatcaaaaataggaatattacatggagctgctcaatatgtgaatcaaaacacagaaggtcaaatagaagaaacagaatctattagtgctggattggattacccgggagtctcgcctctacattgtttttttgaaagatgcgaaaaagagcgaaatatactgcagccagcgatgaagaagctttaa

SEQ ID NO: 281289 - DNA, 1011 bp, Unknown
  Bacterial polypeptide expressing nucleotide sequence isolated from the Sargasso Sea
tatgagaataaaaaaaggtgttccgttaattgatcaacatgacaaatacggattttggggcggaaaatttggtggtagtttcattcctgaaactctaaaaaaaccaattgaagacttaaccataaaatttgaaaaattaagaaaaaataaaaattttttaaaaaaaagagatttttacttccaaaattatatcggttctcctactccatttataaaattagaaaatctatctaaccatcttggaggagctcagatttgggcaaaagtagtttcagaagctaatggtggagctcataaaatatataatgctactgttcacgctttaatatgtaaagccatgaataaaaaatatatcgttggggatacaggggcaggatatgcgggtaagatgttaagtatggctgctaaaaaatttggccttaagtgtaaaatttttatgggagcaaaagatattaaaagacaaaaacctaattgtgatgcaatgagaagaaatggtgctgaaattgtgcctgtctattctggaagtcaaactttagtagatgcagtaagtgaatgcatgagatattgggtatcaaactgtgataatacacatatgtgtgtgggctccactgttggaccaaatatttttgtgaaaatttgtgggtggagtactgctcaaatttctagagaattaaaatatcaattaaaaaaaaaatttaaaaaaatgccaatcaaaattaagcttatcaattgtgtagggggtggtagttctgcttatggtttttggagtgaatttattgattataataaaaaacaaattgaattaattggtgttgaagcaggcggaccaaagaattcaaaattacatgccgcacctttgagcagaaatgcaaaaattgggattttacatggtgctgcatcttatgtttgtcaaaataatgaaggtcaaattcacgaaacagaatcaattagtgctggtctagactatcctggagtaagtccaatacattgttttttaaaagatacaaaaag

SEQ ID NO: 281290 - DNA, 1144 bp, Unknown
  Bacterial polypeptide expressing nucleotide sequence isolated from the Sargasso Sea
gaaactttaaaaaaacctgtagaagatctcgaagtattatttcaaaaattaagaaaagataaaaattttataaaagaaagagacagatattttaaaaattgggtcggatctcctacaagatttataaaattagaaaaactaagtaaaaaactaggtggagctcaaatttgggctaaagttgtctccgatgctaatgggggtgctcacaaaatttataatgctacagtccattgcttgatagccaaaaaagctggaaaaaaatttgtagtaggtgatacaggggcaggatatgcaggaaaaatgcttagtatggcagcaaaaaaatttggcctaaaatgtaaaattttcatgggtttaaaggatattaagagacaaaaaccaaattgtgatgcgatgagaaaaaatggtgctgaaatagttccagtctatactggaagtcaaacattggtagatgctgtaagcgaatgtatgagatattgggtttcaaattgcgatacaacacacatgtgtgtaggatctacagttggtccaaacatatttgtaaaaatatgtggctggagcactgctcaaatatctagggagcttaaaactcaaattaaattacaatttaaaaaaatccccaaaaaaataaaattaattaattgtgttgggggcggaagttctgcttatggtttttggagtgaatttattgattttagtaagaatcaaattgaactaattggtgttgaagcagggggtcctaaaaaatctaaattacatgctgctcccttaagtagaggagccaaattaggtattttacatggtgcagcttcatatgtgtgccaaaataaggaaggtcaaattaatgaaactgagtcaattagtgctggattagactatcctggtgttagtccaattcactgtttcttaaaagatagtaaaagagcaagatacacttttgcaactgatgaagatgctctcaaagcataccagatgataaaaaaatatgaaaaattaaatccaagccttgaaccaagccatgcgtttgctgaggctataaggatagctccaaaattagataaaaatgtaattataattgttaactcttgtggagatgcaaaaaaagatagggatattttaaaaaaaagattaggaaaaatatgac

SEQ ID NO: 281291 - DNA, 925 bp, Unknown
  Bacterial polypeptide expressing nucleotide sequence isolated from the Sargasso Sea
tttgcatgtcaaatatttaggaatcgaattagacgtatatatggttaaagttagttttgagcagaagccttacagaaaattaattatgcaaacatatggtgctagttgttttgcaagtccatctgatagaacagacagtggaaaagctatactagctaaagatcctaataatacaggtagtttaggtatcgctatttcagaagcagttgaaatggcagcaaaagatcctaatacaaaatattcacttggaagtgtattaaaccatgtattgatgcatcaaactatagttggcaatgaagcattgttacaaatggagatggctggagattatccagacattttagttggttgtactggtggaggaagtaatttttcaggtttggtttttcctttcttaggtaaaaaatttagagaaaataaaaatacaagggtaattgcttgtgaaccaaaatcgtgtccttcattaacaaaaggtaaatatgtttacgattttggtgatacaggaagacttactcctcttgtaaaaatgcacacattaggttcgcaatttattcctccggcaacacattctggtggtttgagatatcatgggatggcacctatggttagtcacttaaaagaaattggagcaatagaagcacaatcatttggtcaaaaagaatgttttgaagcaggtgtaagttttgcaagagctgagggaattgttcctgctccagaagctacacatgcagttaaaggtgctattgcagctgctatggaatgtaaaaaaaatggaaagtcaaaaacaatcctatttaatttatgtggccatggtcattttgatatgaaagcttatggagattattttgagaataacttatctgaagacaaatacgatgaagctggagttaataaagctttagaagaactgcctaaaattgcatag

SEQ ID NO: 281292 - DNA, 1234 bp, Unknown
  Bacterial polypeptide expressing nucleotide sequence isolated from the Sargasso Sea
atgaagttaaaaaaaaaaatttcagttttagatcaacatgacaaatttggattttggggaggtaaatttggaggcaattttgttcctgaaactctgaaaaaacctattaacgatttggaattattatttaatagacttaaaaaaaataagaagtttttgagcgaaagagataattattttaagaattgggtaggagctcctactagatttattaaattaagtaatctcacagagcatgtaggtggggctgaaatatggtcgaaagtagtatctgacgcaaacggaggggctcacaaaatttataacgctacagttcattgtctgttagctaaaaaatctggaaaacgaattatttgtggagatacaggggctggttatgcaggaaaaatgcttagcatggctgcaaaaaaattcggcctaaaatgtaaaatatttatgggtgcaaaagatattgaaagacaacaaccaaatgttaaagcaattaaaaataatggcgccgaaattgtaccagtttactcgggtagtcaaaccttagtggatgctgtctcagaatgtatgagattttgggtagctaattgtgatacaacagcaatgtgtgtgggttcaacagttggacctaatatatttgtaaagatttgcggctggtctactagtcaaatttcaagagaattaaaaattcaaatacttgatgaatttggaaaaataccaaaaagattaaaactttataattgtgttggtggaggaagttctagttttggtttttggaacgaatttatggattatgataaaaaacaggttgaatttattggagttgaggcaggagggccgtctaaaagtaaaaaacatgcagcaccattaacttatggatctaagataggtatattacatggagctgcacaatacgttaatcaaaactcagagggtcaaattgaagaaactgagtcaatttcagctggactggattatccaggagtgtctccgcttcactgttttttgaaagatactcggagagcaagatatactgctgcaagtgatgaagatgccctaaaggcttttaaaattgtatcaaaatatgaaagcataagaccttcattagaacctagtcatgctttttcagttgctatttcagaagcgaaaaaactctctaaggatacaatagttattgttaatagttgtggcgatgcttacaaagatagaaaaattttaaaaaaaaaattaggcataaaactatgat

SEQ ID NO: 281293 - DNA, 1234 bp, Unknown
  Bacterial polypeptide expressing nucleotide sequence isolated from the Sargasso Sea
aatgaaaattaaacgaaacatacctttaattgatcaacatgataaaaaaactggactttggggtggaaaatttggtggaagctatatccctgaaactttaaaaaaaccagtagaagacttaacaaatttatttgaaaaattaaggcatgataaaaaatttataagggaaagagactactacttcaaaaattgggttggatctccaacttcttttatcagattagataatttaacaaatcatttaggtggggcgcaaatttgggcaaaagttgtatccgaggctaatggtggtgctcataagatatataatgctacagttcattgtcttattgcaaagagagcaggtaaaaaatttataataggagatacaggcgcaggttatgcaggaaagatgttaagtatggctgcaaaaaaatttggacttaaatgtaaaatattcatgggtgctaaagatatcaaaagacaaaaacccaattgtgatgcgatgaaaaaaaatggagcagaaatagttcctgtttatactggaagccaaacacttgttgatgcagtaagtgaatgtatgagatactgggtatcaaattgcgatacgacgcatatgtgtgttggatcaactgttggtccaaatatttttgttaaaatttgcggttggagtacatcgcaaatttctagggaacttattaaacaaattaaaaaagaatttggaaaaataccaaaaaaaatcaaattattaaattgtgtcggtggaggctcatcaagttttggattttggaacgagtttatgcattatgataagaggcaagttgagtttgtgggcatagaagccgggggaccaaaaaaaagtaaaagacacgctgctcctttaacttatggatcgaaaattggtatattgcacggtgcagctcaatatgtgaatcaaaatcatgaaggtcaaatagaagaaactgagtcaatcagtgctgggctagactaccctggagtttcaccgcttcattgttttttgaaagatacaaaaagagcaagatatacggcagcatcagatgaagaagccttgagtgcctttaaattggtaactaaatttgaaaatttaaatccgagtttagaacctagtcacgcgtttgcagaggcaataaaattagctccaaagttagataaaaatataattataattgttaattcatgcggtgatgcacacaaagatagagatattttaaaacaacgattaggaaaattttaa

SEQ ID NO: 281294 - DNA, 1129 bp, Unknown
  Bacterial polypeptide expressing nucleotide sequence isolated from the Sargasso Sea
atgaaaattaaaaagggtgttccattaatagaccagcacgacaaaaactatatttatggtggtaaatttggtggaaattttattcctgaaacattgaaaaagcctattgatgatttaactaaactattttctaagttgagaaaagataaaagatttcttaaagagagggattattactttaaaaattatattggagtgccaactccttttattaaattagaaaacttaacaaaatatttaggtggagctcaaatatatgcgaaggttgtttccgaagctaatggaggtgcacataaaatttacaacgcaaccgttcattgtttaatagctaaaagagctggaaaaaagtatattgtaggagatactggagctggttacgcaggtaaaatgctatcaatggcagctaaaaaatttggtcttaaatgtaaaatatttatgggagctaaagacattaaaagacaaagaccgaatgttgaagcaatgagaaaaaatggagcaataattgtacctgtaacaacaggcagtcaaacattagttgatgctgtaagcgagtgtatgagatattgggtttcaaattgtgacactacacacatgtgtgtaggatcaacagtcggtcctaacatttttataaaaatttgtgcatggagtacggcacaaatttccagagaacttttaacacaaataaaagaagagtttgggaagattcccaaaaagatgaagctactcaattgtgtaggcggtggaagttctgcgatgggattttggaatgagtttatggacacaaacgcagaatttgttggtatagaagctggtggtccaaaaaatagcaaattgcacgcggctccactcactaatggatcaagaattggaattctgcatggagcagcacaatatgttgtacaagataaagaggggcaaatcagtccaacggagtcaatttctgcaggtttagattatccaggaatttcgccattacattgttttttaaaagacacaaaaagagcaaagtatacatccgcaagtgacgaagatgctttagatgccttccagttagtttctaaattagaaaatatttcaccatctctcgaaccatcacatgcttttgcagtgtgctgtaaaattgctccaa

SEQ ID NO: 281295 - DNA, 829 bp, Unknown
  Bacterial polypeptide expressing nucleotide sequence isolated from the Sargasso Sea
gcagctaaaaaaatttggtcttaaatgtaaaatttttatgggtgctaaagatattaagagacaaagacctaacgttgaagctatgagaaaaaacggagcagaaatagttcctgttactactggaagtcaaacactagttgatgccgtgagtgaatgtatgagatactgggtttcaaattgtgacactacacatatgtgtgtaggttcaacagtaggtcctaacatatttattaaaatttgtgcatggagcacagctcaaatttcgagagaattaatgaagcaaattaaagaggaatttggaagaattcctaataaattaaaattgattaattgtgtgggcggtggaagttctgcggcaggtttctggaatgaatttatggacactcgtgctgagttcattggtgtagaagctggcggtcctaaaaatagtaagttacatgcagcaccacttaccaatggatctaaaataggtattcttcatggggctgctcagtatgttatacaggacaaagaaggtcaaataggttctactgactcaatatctgcaggtcttgattaccctggaatttctcctcttcattgttttctcaaagatgcgaaaagagctaaatacacatctgcaagtgatgaagaagctctaaaagcttatcaattagtttcgaaacttgaaaatatttctccctcactcgaaccctcacatgcttttgctgaagcaattaaattagcccctaaattaaaaccctccgaagttattgttgtaaattcctgcggtgatagtcttaaggataaagatattattcaacaaaaattaggatcatacgtaagatga

SEQ ID NO: 281296 - DNA, 1231 bp, Unknown
  Bacterial polypeptide expressing nucleotide sequence isolated from the Sargasso Sea
aatgaaacttaaaaaaggtgttccattaattgatcaacatgaccaatttggtttttggggagaaaaatttggaggtagcttcattcctgaaactctaaaaaaacctgtagaggacttaacagaagaatttaagaaattacgaaaaaataaaaaatttattaaaaagagggactattattttaaaaattacattggcgctccaacctcttttgtaaaattagagaatttatctagtcatctgggtggtgctcaaatatgggcaaaagttgtctctgaagctaacgggggggctcataaaatatataatgcgactgtgcatgcacttctttgtaaagcgatgggtaaaaaatatatcgttggtgacacaggagctggttatgcaggaaaaatgttaagtatggctgcaaaaaagtttggcttgaaatgtaaaatatttatgggtgctaaagatattaaaagacaaaaaccaaactgtgatgcaatgaaaaaaaatggggctgagattgtccctgtttattctggcagtcagaccttggtagatgcagtaagtgaatgcatgagatactgggtatcaaactgcgataatactcatatgtgtgttggtagtacagtaggaccaaatatatttgttaaaatatgtgggtggagtactgcccaaatatccagagaattgaaggtacaattaaaatctgaatttaaaaaaattccaaaaaaaattaaattaattaattgtgtaggtggtgggagttcggcttatggcttctggagtgaatttatagattttaacaaaaaacaaattgagctgattggagttgaagcaggtgggcctgaaaaatcaaaacttcatgcagctccattaagccgaaatgcaaaaattggagttttacatggtgctgcttcttatgtttgccaagataatgaaggtcaaataaatgaaactgaatctattagtgctggattagattatccaggtgtaagtcctattcattgtttcttaaaagataccaaaagagcaagatacacttatgcaactgatgaggaggctttgaatgcacacgttatggtaaccaagtttgaaaaccttaatccaagtttagagcctagtcacgcatttgctgaagcaattaaaattgctcccaaactgagtaaagatacaattataattgtaaattcttgtggtgacgccaaaaaagatagagatattttaaaagaaagattgggtaagaattaa

SEQ ID NO: 281297 - DNA, 775 bp, Unknown
  Bacterial polypeptide expressing nucleotide sequence isolated from the Sargasso Sea
atgaccagtcatgccgacataacacgcagcttaaagcatgccaaaagtaaatcaggtgtagcactgattcctttctttacggccggttatccatcaatggataaattcaagactgatctaatcaatatcagcagagtcggagacgttgttgaagtaggcattccattttctgatcccatgtcagatggaatgactatccagagatcgagccatgaggcactgcagaatggcgtgtctttgtcatggattttcgatgaaattgattccatcaaatcgcaattaaaatcacccattgtttttatgtcctatctaaacccactaatggcatttggttatgacaaattggtagatagggccaaaaaagcaggtgtttgcgggtttatagttccagatcttccattagaggaaagtgatgaattcagagatgcgcttgaaaataaagatttaggtttgattcaattaatttctcctgcaacaccagaaaaaagaatggctaccttgagtaaagcctcaaaaggctttatttatgcggtcacaatgacaggcataacaggcagtgaacaaggtcttgcaaaaaatttgacctcttatttaagcaaaatatcagatatgagtgatttgccagtgtgtgcaggatttggtgtacgaaccgcaaaagatgtctcgctgatcagcaagcacgcagatggtgcaatagtgggctcagcactggttgagacaatggaaaaaaaacaagatatcattcaatttttagagggtttacgtaaattttaaa

SEQ ID NO: 281298 - DNA, 763 bp, Unknown
  Bacterial polypeptide expressing nucleotide sequence isolated from the Sargasso Sea
tatgaatagaataaaagaacttttttcaaacgattctaaaaaattaatcgtatttattactgcaggttttccaaaaaaagacagcacaaaggatttagtcttggaagcaattaaaggaggagctgatatgattgagataggtattcctttttcagatcctcaagcagatggtccagttattcaagaggcaaatgaaatagctttaaataatggtatttcattgcttgaaatttttgaacaagtaaaagagattaggaagcaaactgatgtccctattgcattaatgggttattataatccaattctcaagatgggtacaatggattttataaaaaaatgtaacgatgcagaaatagacggggttattcttccagatctacctttggacgaatcagttgaattttgtaataatttaaaggacaaaaatatatctccaatacttctagttgctccaaatacttcgaaaaaaagaattaagaagatttctaaacttgcaggagatctcatatatgctgtaagtattttaggtattactggaaatgatttgagttcaaaaaataatttggaaaactacttagcaagagtaaaagaaaatagtgaaacaccatttatggtaggttttggtataagttcaaatgaagacgttaaatggtttaatagcttttcagatggggctgtagttggatctgcggttataaaaaaagtacttaaagatagaaaaaagggtgttgttgaaaattttgtaaaaaacctaaaaaaataa

SEQ ID NO: 281299 - DNA, 1096 bp, Unknown
  Bacterial polypeptide expressing nucleotide sequence isolated from the Sargasso Sea
acttgggattttgggggaggaaaatttggaggaaactttgttcctgaaacactaaaaaaacctatcgaagatttagaagtactatttaacaaacttaaaaaagataaaaaatttatacaagaaagagacagatattttaaaaattggattggtgtacctactcgatttattaaattagaaaatttgacaagacatgttggcggagctcaaatttggtctaaagttgtttcagatgcaaatggtggggcacacaaagtctacaacgcaactgttcattgtttacttgcaaaacgctctggtaaaaaagttataattggggacacaggcgccgggtatgcgggtaaaatgttaagtatggctgcaaaaaagtttggtcttaaatgtaaaattttcatgggtgcaaaagatattgcaagacaacaaccaaatgtaaaagcgatgaaaaaaaatggtgccgaggtagttccggtttattcaggaagtcaaacacttgtggatgctgtttcagaatgtatgaggttctgggttgctaattgcgatactacagcaatgtgtattggaagcacagttgggccagctgtttttgttcgtatttgtggatggagtactagtcagatttcaagagacttaaaggttcaattaattgaagagtttggatcaattccaaaaaaacttaaactttacaattgtgtgggcggtggaagttcgagttttggtttttggaatgagtttatggattatgataaaaagcagtgtgaatttattggcgtagaagctgggggacctgcaaaaagtaaaaaacatgcagcacctttaacttatggttctaaaattggaattctacatggtgcagcccagtatgttaatcaaaactcagatggacaaatagaagagacagaatctatttcagcaggtttagattaccctggaatttctccgcttcattgttttttaaaagacacaaagagagctagatatactgcagcgagtgatgaacaagcattagaagcttacaaacttgttacaaaatttgaaaaattaagaccatctctcgaacctagccatgcattcgctgttgctatatctgattctaaaa

SEQ ID NO: 281300 - DNA, 1130 bp, Unknown
  Bacterial polypeptide expressing nucleotide sequence isolated from the Sargasso Sea
ttatgcttcaaaagtaagagaagctgaaagagaaaaaattgtcgaacaatttagatcccaaaacaataagcttgtatctggttcagttaaaagagtcactagagataatataatcgtggatattacccatgaagctgaagctctcttaccaagagataaattaatgcctggggaaatttacaaaattaatgacagaatcagagcggttcttcagattgttgaggtcgaaggtcgtggcccacaattaatgttgaatagatcttgccctgaaatggtaactgaactttttaacatcgaggttccagaaataaacgaggatgttattgaaataagaggaatagcaagagatgctggatctagatcaaagattgcagttaaaacaaatgatggtcgaattgatcctgtaggtgcatgtgttggtatgagaggatctagggtccaggctgtatcatcagagttaggtaacgaaagaattgacataattatttatgacgataatccagctcagcttgttataaatgctctttctcctgcaaaagttgaatctattgtaatggatgaagactctagatcaatggatattgcagttaatgaggataatttagctttagcaattggttctagagggcaaaatataagacttgcttccagattagttggatgggatctcaatattattagcaatgaagaagctgaggcaaaagttaaagtggatgaaacagaatttttagccaagattattgatactcttgagataaaagacgaagttgcggaaaaaataatatcttctggctttttatcttttgatgaaattgcttatgtagaagattcaaaattaaaagagtttattgaatcagatgaggaagttttaagaataaagtcagcctcagaggatgcagcattacttgaggcaatgggagcagttactgaagaagaaggtaacgttgaatcattatcagatttaaatcttgatgaagaaaaaattggtaaattatctaacaaaggcatcaaaaataaagatgatctagcagagctttctatagatgaactgcaagaaattattgaaatttcttcagatgatgcttcaaaaatgattatgaaggcaagagaacattggtttaatgaatagg

SEQ ID NO: 281301 - DNA, 796 bp, Unknown
  Bacterial polypeptide expressing nucleotide sequence isolated from the Sargasso Sea
cattaaaagacaacaaccaaatgttaaagcaatgaaaaaaaatggagcagacgttattcctgtatattcaggaagtcaaacactagtagatgctgtatcagaatgtatgagacattgggttgctaattgtgatacaacagcaatgtgtgtaggtagtactgtgggcccagctatttttgttagaatatgtggatggagcactagtcagatatctagagagcttaaatttcaattattgcatgaatttggggatattccaaaaaaacttaaattatataattgtgtaggaggtggttcctcgagtttcggcttttggaatgaatttatggattatgacaaaaaacaagttgagtttattggggttgaggctggaggaccagctaaaagtaaaaggcatgcagctcctttaacatatggctccaaaataggtatacttcatggtgcagctcagtatgtaaatcaggatagcgatggtcagattgaagaaactgaatcaatatctgcaggtctagattatccaggaatttcaccacttcattgttttttaaaggatacaaagcgcgcaagatatacggctgctagcgatgaagaagcactagaagcctaccaaattgttacaaaatatgaagatttacgaccttctcttgaaccaagtcatgcattctcagttgcaattaaagaagcaaagaaattgagcaaggatacaatagtaattattaatagttgtggagatgcatataaagaccgaggaattttagaaaaaaaattaggaaggagatatgttaaatccaattag

SEQ ID NO: 281302 - DNA, 1231 bp, Unknown
  Bacterial polypeptide expressing nucleotide sequence isolated from the Sargasso Sea
atgaaacttagaaaagatattccattaattgatcaacacgatcattttggtttttggggaggaaaatttggaggtaatttcattcccgaaactctcaagaaacctatagaagatctaacaaaagaatttcaaaagttaagaaaagataaaaaatttattaaaaaaagagatttttattttaaaagttatattggctctccaacttcatttgtaaaattagaaaacttaaccaatcatttaggtggtgctcagatatgggcaaaagttgtatccgaagctaatggtggtgctcataaaatatataatgcaactgttcatgctcttatttgtaaaactatgggtaagaaatatatcgtaggtgatactggggctggttatgcaggaaaaatgctaagtatggctgcaaaaaagtttggtctcaaatgtaaaatatttatgggtgcaaaagatattaaaagacaaaagccaaactgtgatgcaatgaaaaaaaatggagcagagatcgttcctgtttactctggtagtcaaactttggtggatgccgttagtgaatgtatgagatattgggtctctaattgtgataatacacacatggcagttggaagtacagttggaccaaatatctttgtaaaaatttgtggatggagtactgcgcagatttcaagagaattgaaaaaacaaattttgcaagagtttggtagaattccaaaaaaaataaaacttataaattgtgttggtggaggaagttctgcttatggtttttggagtgagtttattgattatgataaaaatcaaattgaattaattggtgtcgaagctggcggacctaaaaattcaaaattacatgctgcacccttaagtaaaggtgctaaaattggaattttacatggtgcagcctcatatgtttgtcaaaataaagaaggtcaaataaatgagacggaatcaattagtgctggattagattatccaggtgttagcccaattcattgtttcttaaaagatacaaaaagagcaaaatatacatatgcttacgatgaagaagcattaaatgcccatgttttagtgaccaagtttgaaaaattaaacccaagtttagaaccaagtcatgcatttgctgaggccattaaaattgcacctaatttaagtaaagatacaatcataattgttaattcttgtggagatgcaaaaaaagatcgtgatattttgagagaaagattgggtacaaaataat

SEQ ID NO: 281303 - DNA, 1195 bp, Unknown
  Bacterial polypeptide expressing nucleotide sequence isolated from the Sargasso Sea
atgtggggtaataaatttggaggaaactttgtacctgagactttaaaaaaaccaatagaggaactggaaatactttttaataaaatgagaaataataaaacgtttattcaagaaagagacaattactttgaaaattggattggttcaccaacaaggtttatttatttaagaaatctgacaaatcatattggtggtgctcaaatatgggcaaaagtagtttcagatgctaatggtggtgcacataaaatctataatgcaacagtacattgcctcttggccaaaaaagcaggaaaaaaatttataattggagatacaggtgctggttatgcaggaaaaatgttaagtatggctgccaaaaaatttggcctgaagtgtaaaatttttatgggagcaaaagatattagaagacaacaaccaaatgttaaagctatgaaaagaaatggcgcagaagtagttcctgtttatactggaagtcaaacccttgttgatgctgtatctgaatgtatgagattttgggtagcaaattgtgatacaacagcaatgtgtgttggttctacagtaggaccaaatatttttgttaaaatttgtggttggagtactagtcaaatatcacgagaattaaagaaacaaataaatgaagaatttggatctattccaaaaaagttaaaactatataattgtgtgggcggtgggtcatcaagttatggtttttggagtgagtttatggactataataaacaacaagttgaatttattggagttgaggctggtggacccaaagctggtaaaaaacacgcagctccactcacttatggatcaaaattgggaattttacatggtgcagcgcaatatgttaatcaaaacatcgagggacaaattgaagaaaccgaatccatttcagctggcttagattatccgggagtttcgcctcttcactgttttttaaaagatattaaaagggcaaggtatactgcagctagtgatgaggatgccttaaatgcttataaacttgttacaaaatttgaaaacttaaaaccttctcttgaaccaagccatgcattttcagtcgcaataaaagatgcaaaagaattaagcaaaaatactattattgttgttaatagttgtggtgatgctcataaagataaaaatattttaatttcaaaactaggtaaaaaatatgacaagtttaattagt

SEQ ID NO: 281304 - DNA, 622 bp, Unknown
  Bacterial polypeptide expressing nucleotide sequence isolated from the Sargasso Sea
ttttgtacgtatatgtggttggagtactagtcaaatatccagagagcttaaggttcaattaataaatgaatttggtcatgtccctaaaaaacttaaattatataattgtgtgggaggaggttcttcaagttttggtttttggaatgaatttatggattatgataaaaagcaagttgagtttattggggttgaagcaggaggaccagctaaaagtaaaagacatgcagctcctttaacttatggttcaaaaatcggcatacttcatggtgcagctcaatatgtaaatcaagatagcgatggtcagattgaagagaccgagtcaatttctgctggtctagattatcctggaatttcaccacttcattgttttttaaaagatacaaagcgcgcaaggtatacagcggctagtgacgaagaagctttaaaggcctatcaaatagttacaaaatatgaaaatttaagaccatctctcgaaccgagccatgcattctcagttgccatcaaagaagcaaaaaaatttagcaaaaatacaattgtaattattaatagttgcggagatgcatataaagatagaggtattttagaaaaaaaattgggaaagaaatatgttaaatccaattag

SEQ ID NO: 281305 - DNA, 217 bp, Unknown
  Bacterial polypeptide expressing nucleotide sequence isolated from the Sargasso Sea
atatgactcggttaccgacgatgaagcaatgagtgcctttaggatgttaaataatctagaaggtatattgcccgctcttgaatcgagtcacgcgttggcttgggtgatcaagaaggctccggcaatgtctgaagaagatattgttgttatgaacttatcaggcagaggagataaagacattctcactgtcgcagaaatggatgggatcctcgtctag

SEQ ID NO: 281306 - DNA, 1107 bp, Unknown
  Bacterial polypeptide expressing nucleotide sequence isolated from the Sargasso Sea
aatgaaacttaaaaaaggaattccagttatagatcaaggagataggcttggcttttggggtggaaaatttggtggaaattttgtgcctgagacactaaaaaaacctatagaagatcttgaaatccaatttaataaactcaaaaaagacaaagaatttataaaaaaaagagatcggtactttaaaaattggattggaacaccgacaagatttattaagttaaataatttaacaaaatatgttggtggagcacagatttggtcaaaggttgtttctgatgctaacggtggagctcacaaaatatataatgcaactgtacattgtttattagcaaaaaggtcaggaaaaaaagtaataattggagacaccggtgccgggtatgctggcaagatgttaagcatggctgctagaaaatttggtcttaaatgcaaaatttttatgggagcaaaggatattaaaagacaacaaccaaatgttaaggcaatgaaaaaaaatggtgcagatgtaattccagtatactcaggaagtcaaacacttgtagatgcagtatctgaatgcatgagatattgggttgcaaattgtgatactactgcaatgtgcgttggtagtacagttggtcctgcaatttttgtacgtatatgtggatggagtaccagccaaatttctagagagctcaaggttcaattaataaatgaatttggtgaagtcccaaaaaaacttaaattatacaattgtgtaggaggaggttcctcaagttttgggttttggaatgaatttatggattttgataaaaaacaagttgagtttattggggttgaagcaggtggaccagctaaaagtaaaagacatgcggctccattaacctatggttctaaaattggtatacttcatggtgctgctcaatatgtcaatcagaatgatgatggtcaaattgaagaaacagagtcaatttcagctggacttgattatccgggtatttctccactacattgttttttaaaagatactaaaagagctagatatactgctgccagtgatgaagaggcattaaaagcctatcaaactgttacaaagtacgaaaatttaagaccatctcttgagccaagcca

SEQ ID NO: 281307 - DNA, 588 bp, Unknown
  Bacterial polypeptide expressing nucleotide sequence isolated from the Sargasso Sea
aatgtctagaattaaatcaatattctcttctttaaaggaaagaaataaaaaagctctaatagcttacatagtttgtggagatccaaataattcttcgacattagaagccatggaatacatgtcccaaaatggagtagatataattgaaattggagtgcctttctctgacccaatggcagaaggcccttctattcaaagagcacatgaaagatccttaaaaaataatacttctttagaaaatatcttagatttaataggtgattttagaaaaaaaaataaaacagtaggaattgtcctgatgggttatatgaataattttgagtccatgggagcaaaagaattctccttaaaggcatctgaaaacggggttgatggaataattgtagtagatatgccgcctgaagaaagtaatgaatttacagaacatacagaattaaatgatatcgatatcattagattaatagcacctacaactgaaaaggaaagaatacaaaaaatttgtaattctgcttctgggtttatttatttcatttctttaaaaggaacaacaggatctgaaaagtttaaccctattgatgtcaaagaaaa

SEQ ID NO: 281308 - DNA, 716 bp, Unknown
  Bacterial polypeptide expressing nucleotide sequence isolated from the Sargasso Sea
aacaagtggaagtcaaacactagttgatgctgtaagtgaatgtatgaggtattgggtatcgaattgcaatttagctcacaattgtattggttcgacagtaggtccaaatatatttataaaaatttgtgcgtggagtacagctcaaatttcaagagaattaatgaaacaaattaaagaggagtttggaaaaattccgaataaattaaaactaattaattgtgttggtggaggaagttcggctgctggcttttggaatgaatttatggatacaagtgcagaattcattggtgttgaagcgggaggcccaaaaaatagtaggctccacgcagcaccattaactaatggatctaaaattggtattcttcatggtgcagctcaatatgttgttcaagataaagaaggtcagataggttcgaccgagtctatatcagcaggtttagattaccctggcatatctccattacattgttttttaaaagatactaaaagagcaaaatatacatcagcgactgatgaagaggcattaaaagcataccaattagtttctaaattggaaaatatttctccctcacttgaaccttcgcatgctttttctgaagctatacgtattgcgccaaaattaaaatcttcagaaattattgtagtcaattcttgcggagacagtttaaaagataaagatataattaaacaaaaattaggatcttatattagatgaa

SEQ ID NO: 281309 - DNA, 205 bp, Unknown
  Bacterial polypeptide expressing nucleotide sequence isolated from the Sargasso Sea
tcagttctgctgtgcgcaggaggggatcatccccgcgctggaacccagccacgccatggcgcacgtcatgaagatcgcgcccgaattgccccgcgatcacatcatctgcatgaacatgtgtggccgcggcgacaaggatatcttcaccgtcgccaagcaccttggcttcgacatgggcgataccgagggccgcgacgccgattaa

SEQ ID NO: 281310 - DNA, 1147 bp, Unknown
  Bacterial polypeptide expressing nucleotide sequence isolated from the Sargasso Sea
gacacttaaaaaacctatagaagatttagagaaactattctcaaaacttagaaaagacaaaagttttattaaagaaagagatcattattttgaaaattacgttggtgccccaactccatttataccgctatatggtttatctgaccatttaggaggtgctcaaatatgggcaaaagtagtatcagagaaccccggcactgcacataaggtatacaatgttctagttcattgtcttatagcaaaacgtgcaggtaaaaaatatgtttgtacggacaccggcgcaggcatgaatggaaaaaatttggcgatggttgcaaaaaaatttggtttaaaatgtaaaatattcatgggtacaattgatataaaaaggcaacaggaaaatgttaaagttatgaaaaaatatggagccgaagttgttccagtgaattcaggaagcaaaactttggttgatgcagtttcagagtgtattcgattttttgtggccaattgtgatacgacacatctagtaattggatccgctgtgggacctagcgtctgggctcgaatctgtgcttggagtgcctcccaaatttctaaagaactgattattcaaataaaagacgagtttggaaaaattccaagaaaattaaagcttttaaattgtattggtggaggttcctcggcgctaggtttttggaatgaatttattgattataacaaaaatcaagttgagctcataggagtagaggctgggggaagtaaaaaatcaaaaaaacatgctgctccattaacaaatggatcaaaaattggaatacttcatggctcagctcaatatgttattcaaaataaagatggtcagatagaggaaacagaatcaatttctgcaggacttgattacccgggtgtatctcctatacactgttttttaaaggatgctaaaagggcaagatatacatcagccactgatgaagaagcattagacgcttttcaaattgtctcaaaacttgagaatatttctccgtcgcttgagccttgccatgcttttgcagaggcaataaaaattgcaccaaaactaagcaaagatacagttttatgtataaattcttgtggatcaagtttgaaggattcgcatataattaaaagtagattaggttattaccaagaatga

SEQ ID NO: 281311 - DNA, 82 bp, Unknown
  Bacterial polypeptide expressing nucleotide sequence isolated from the Sargasso Sea
atggagctgatattatggaaaattggaatgcccttttctgatccaatggctgatgggtcaacaattcaactatcaagtaata

SEQ ID NO: 281312 - DNA, 1044 bp, Unknown
  Bacterial polypeptide expressing nucleotide sequence isolated from the Sargasso Sea
gggtaggatcaccaacttctttcataaaattagataacttaacaaaacacttaggtggtgctcagatttgggcaaaagtcgtttctgaggctaacgggggtgctcataaaatttacaatgctactgttcattgtcttatagcaaaaagagcagggaaaaaatatatcgtaggagatacaggagcaggatatgcaggaaaaatgcttagtatggcagcaaaaaaatttggtttaaaatgcaaaatatttatgggtgcaaaggatattaaaagacagaaacccaactgtgatgctatgagaaaaaatggagctgagatagttccagtttatacaggaagccaaacgcttgttgatgctgttagtgagtgcatgagatactgggtatcgaactgtgataccactcatatgtgcgtgggttcaactgtgggtcctaatatttttattaaaatttgtggatggagcacatcacaaatttctagagaactttttatacaaatgaaaaaagaatttggaaaaattccaaaaaaagtcaaattattaaattgtgtcggtggaggttcatcgagttttggtttttggaatgagtttatgcattataataaaaaacaaattgagtttattggtattgaagctgggggaccaaaaaaaagtaaaaggcatgcggcacctttaacttatggttcaaaaataggaattctccatggagctgctcaatatgtaaaccaagatttcgagggtcaaatagaagaaacagagtctattagcgctgggttagattacccaggagtttctcccatccattgttttttaaaggatacaaaaagagcaagatatacagtagccactgatgaggaatctttaaatgcgtataagctagttacaaaatatgaaaatttaaatccaagtttggaaccgagtcacgcatttgctgaagcaataaaattggcaccaaaattaagcaagaatacaattatgattgtaaactcatgtggtgacgcacataaagataaagatattttgagagaaagattagggaaattttaat

SEQ ID NO: 281313 - DNA, 560 bp, Unknown
  Bacterial polypeptide expressing nucleotide sequence isolated from the Sargasso Sea
gttaatgatacaggttaaagaggaatttggaagagttccaaaaaaaatgaaattattaaactgtgtggggggaggtagttctgctatgggattttggaatgagtttatggatactgatgctgaatttattggtatagaagcaggcggacccaagaatagcaaacttcatgctgcacctttaaccaatggttcaaatattggaattttacatggtgctgcacaatacgttgttcaaaataaagaaggacaaataagttctacggagtctatatctgctggtttagattatcctggtatttcacctttacattgttttctcaaagatgcaaaaagagctaaatatacttcagcaactgatgaagaagctttgaaagcttatcaattagtttctaaattagagaatatttctccatctttagaaccttcacacgcttttgctgaagcaattaaaatagcacctaaattaaaatcatctgatgtaattgttgttaattcttgtggagatagcattaaagacagagacattattaaacaaaaattaggatcttacgtaagatgaa

SEQ ID NO: 281314 - DNA, 805 bp, Unknown
  Bacterial polypeptide expressing nucleotide sequence isolated from the Sargasso Sea
aatgaaatcatctttaattgattttactttcaaaaaatgtaggaaagaaaaaaggccagctttaataacctttacggtagctggggataatacgaaaaaaaattcattaaaaatattaaactcaatttcaaaatatgttgatattcttgaactctcatttttacacaattgtcctatagcagatggaggtcaaatccaaaacagtacatatagatctttagaaaacggtactacgttaaaagatacttttaaaattgcaaaaagttttaaaaataaaaatcctcaaaaacctctaattttaatgggatattataatttgatttatcaaagtggtgaaaataattttattaaaaattgtaaatcatctaaagtagatggattaattgttgttgatttgccatggccagaaaataaaatatttgccgagaagtgtaagaaaaaatcaataagttttgtgcagcttttgtcacctacaacctcaaaagttagaatgaaaaaaattattaaggattcacatgatatgatttattatataagcatgttgtctacaactggtggaaagttgaaaattccacctaaaaaaattttagaaaactacagtaaaattaaaaaaattaataaaaataaaaactgtgttattgggtttggtatcactaataatacaataggatccttcaaaaaagctgatggagttgtcgttggaagcgagatatgtaaagaaataactaaaagtttaaaaaaaagacaaaatcctgtcacaaatgtaaataaaatggtaaaaaagatgaaagacaaaattttatga

SEQ ID NO: 281315 - DNA, 883 bp, Unknown
  Bacterial polypeptide expressing nucleotide sequence isolated from the Sargasso Sea
aaagaaagtggtaaacgctatattgcaggtgatacaggtgcaggaatgtttgggaaaaatcttgcaatggcagcaaaaaaaatgaacctcaaatgcaaaatttttatgggtacaaaagatatttctagacaagcacctaatgtaaaatttatgcgtgacgcaggtgctgaagttgtgcctgttgactcaggttcaaagactttggtagatgctgtttctgagtgtatgcgccattatgtttcaaactgtgacaatacacatctcgctgtaggctcggcaattggctgcaatatttttttaaaaatttgtgcatggtcaacttctcaaatttcaagagaattaaaaaaacaactaataaaagagtttggtgaaataccaaaacttaaattaatcaatgtcataggcgggggaagtagcgcactaggattttggaatgagtttatagattacgaaaaaaaacatgttgagcttattggtgttgaggcaaagtatgctgcacctctatctacaaatgcaaaagttgctattttacatggggctgcacaatattgtttgactgataaagaaggccaaatagcagaaactcattcattgagtgcgggtttagattatcccggctcaagtcctttacatggattgttaaaagactctggtagagcacgatacactaatgcttcagacaaagaagcattagctgctttcaagttaattactaaattagaagatataagaccaagtttggaaccagcacatgcatggagtgaatgcattcgtttagctccaaaattgaaaaaaagtgatgtacttgtagtcaacaattgtggaaaaggttacaaagataaaaagatttatattgaacaattaggatactaccctaaatgaa

SEQ ID NO: 281316 - DNA, 595 bp, Unknown
  Bacterial polypeptide expressing nucleotide sequence isolated from the Sargasso Sea
ttgtggatggagtacagcacaaatttcaagagaattaaaaattcaaattaatcaaaaatttaaaaaaattccaaaaaaaataaaactaattaactgtgttggtggtggtagttcagcatatggtttttggagtgaatttatagattttaaaaaatcgcaaatagaattagtaggtgtagaggctggaggtccaaaaaaatcaaaactccatgctgctcctttaagtagaaatgctaagattggaattttacatggtgcagcttcttatgtttgtcaaaataatgaaggtcaaattgatgacactgaatcaattagtgctggattggattacccgggtgtcagtccaatacattgttttttaaaagatacaaaacgagctagatatacttatgcaactgatgaagaagcgctaaaagcacatgtgatggtaactaaatttgagaaacttaatccaagtttagaacctagtcatgcatttgcagaagcaataaaaattgctccaaaattaaaaaaagacacaattataatcgttaactcttgtggtgatgctaaaaaagatagagatatcttaaaagaaaggttgagaaaaaattaa

SEQ ID NO: 281317 - DNA, 688 bp, Unknown
  Bacterial polypeptide expressing nucleotide sequence isolated from the Sargasso Sea
gatgtttaaaaagggagagcaggatgtactttctgcattagaccaaactaattatgaaaatgaaagagttaaaatacttttaaatgagcatgaaatgccaacccattggtataatatttgctcagatttaaaaaacccgttagcgcccccattaaatcctgggactggtgagccaattggtccagaggatctagcaccattgtttccaatggaattaattatgcaagaggttagcacggatagagaaattgaaattccagaccaagtcagagaaatttatagacaatggaggcctagccccctttacagagcaagaaaattggaaaaagctttagatactccagctaaaatttattataaatacgaaggagtaagtccttcaggaagtcataaacctaatacagctgttcctcaagcttattataataaagaagaaggagtaaaaagacttactacagaaacaggagcaggacaatgggggtcatcattagccttcgctggttccatatttggtttagaagtagatgtatatatggttaaagttagcttcaatcaaaagccttacaggcgtgctttaatggagagttttggtgcaaggtgtgtagcaagtccaagtgatgaaacagaatcaggaaaagctattttaaaggacagtccagatagtactggaagtcttggtattgctaaa

SEQ ID NO: 281318 - DNA, 733 bp, Unknown
  Bacterial polypeptide expressing nucleotide sequence isolated from the Sargasso Sea
tatgaatattaaaacaatcctctctgaggatagtatcccagagaacttttacaatataggtgctgatctagtagaggcactttcaccggtcttgcacccaggtacaaaagagccagtagggcctgatgatctttcccctttatttccaatggaactgatagggcaagaagttagtcaggataggtatataaccatcccagatgaagttagggacatctacagactttacaggcctacacccctttatagagctagatcccttgaaaaggccctagacacaccagcgaaaattttttataaatacgagggtgtcagtccaacaggtagccacaaacctaatacagcaattgcgcaagcgtattacaacaaaaacgaaggaatagataaactgactacggaaaccggagcaggacaatggggatgttcgttggcctttgcatgctcaaagttcggtattgatcttgatgtgtttatggtaaaaataagctacaaccaaaaaccatacagaaaagctatgatggaggcatttggcgctaactgcatcgcaagtccatctgaatacacagaggttggaagagatatactgtctaaagatccaaattctacaggaagccttggcattgcaatttcagaggctgtagagaaatgcgtttcagattctaatacaaaatacgcattgggatcggttttgaataaagtcctcactcaccaaacaataatgggcaagaggcga

SEQ ID NO: 281319 - DNA, 1050 bp, Unknown
  Bacterial polypeptide expressing nucleotide sequence isolated from the Sargasso Sea
aatgaaactagaaaaaggaattcctctcattgaccaacatgacgaaaatggatattggggcggtaaatttggtggaaaccaaatagctgaaagtctcaattatccaattgaagaattaactcgtgaatttgaaaaattaagaaacgatgagacatttattgctgagagagattattattttaaaaattttgttggagcgccaactccatttataaaattagagaatcttacgaaacatcttggtggagctcaaatttattgcaaactagtttctaaagcaacaggcggagcgcacaaagcttataatgcagttgttcatagcttaatctgtaagcgattaggaaaaacttacataggcggtgacactggcgccggatatgcgggaaagatgctaagtatggcagcagcaaaatttaatttaaaatgtaaaatattcatgggtgcgaaggatgtagaaagacaatcaataaatgtattttctatgcggagctatggcgctgaagttgttcctgtaaactctggctcacaaactttagtagatgccgtgtcagaatgtatgagatggtggacaagtgagaatgaagaagcgcatatgtgtgttggtagcacagtgggccctactatttttgtcaaaatatgtgcatggtctaccgctcagatatccagagaaatgaaaaaacaagtaatagatgaatttggtgaagttccaaaagatatgaaattaattaattgtgttggtggaggatcgtcagctgcaggtttttggaatgaatggattgatcatgataatattgaactcataggagtagaagctggcggaccagaaggttcctcaaaacatgctgcgcccttgacaaatgactcacctatcggggtccttcacggagcaactcaatatgttattcaagacgaccagggggaaattgaggaaacggaatcaataagtgctggacttgattatccaggtgtaagtccgcttcattgttttttaaaagaaactggaagagcaagatacacttctgcaagtgacgaggaagccatagaagcttc

SEQ ID NO: 281320 - DNA, 304 bp, Unknown
  Bacterial polypeptide expressing nucleotide sequence isolated from the Sargasso Sea
tgaagagactgaatctattagcgcaggactagattatcctggggtttcccctctccattgttttttgaaagacactaaaagagctaggtacacggctgccagtgatgaagatgcattaaatgcatatcaactggtaactaaatatgaaaatttaaaacctagcttagagccaagtcatgcttttgctgaagcaataaaaatagcaccaagattaagtagagatacaattataatagtaaattcttgtggtgatgcaaaaaaagataaagatattctgaaaaaaaaattaggtaaaaaaatatga

SEQ ID NO: 281321 - DNA, 556 bp, Unknown
  Bacterial polypeptide expressing nucleotide sequence isolated from the Sargasso Sea
acagcttgagaacgaattcataaagattccaaagaaaataaaattaattaattgtgttggtgggggaagttcagcttatggattttggagtgaatttattgattatgataaaaaacaaattgaattagtgggcgtagaagcaggaggaccaaaaaaatcaaaattacacgctgctcccttaagtagaaatgaaaaaattggaattttacatggtgcagcttcttatgtttgtcaaaataatgagggacaaattcatgaaaccgagtcaattagtgctggtttagattatccaggagttagccctatccattgttttttaaaagatgctaaaagagcaagatatacctacgctactgatgaagatgctcttaacgcttataagattgtaactaaatatgaaagacttaatccaagtttagaaccgtgtcacgcttttgctgaagctataaaaattgctccaaaattaagtaaggatacattatgcatagttaacagctgtggagatgcaaaaaaagatagggatattttaaaaaagagattgggaaaatttagatga

SEQ ID NO: 281322 - DNA, 523 bp, Unknown
  Bacterial polypeptide expressing nucleotide sequence isolated from the Sargasso Sea
atgtctgatcaatttaaatatttcttagaagaaagtaaaatgccaaaaacatggtataatatttctgcagatcttccaaaaccaatggaaccacctcttcatcctggtacattaaaacctatagggccagatgatttagcaccattgtttccaatggctttaattggtcaagaagtttcacaagaaagagaaatcgaaattcctgaaccggtaagaaatatatataaacaatggagaccatcacctctatttagagctagaaatcttgaaaaatttttagatacacctgcaaaaatttattataaatatgaaggtgtaagtccaacaggaagtcacaaacctaacacagctgtagctcaagctttttttaacaaagaagaaggaactaaaaaaataactactgaaactggtgctggacagtggggaagttctttggcatttgcatgtcaaatatttggtatcgaattagatgtttacatggttaaaattagctttgaacaaaagccttatagaaaattaatta

SEQ ID NO: 281323 - DNA, 290 bp, Unknown
  Bacterial polypeptide expressing nucleotide sequence isolated from the Sargasso Sea
catgacgccgccgagcggagatatctctcaacaggctcgaccggacgccgacggacgatacggttcgtacggtggtaagtacgtgcccgagacgttgattcccgcgctcatcgcgctcgagaaggagtacgaaaccatcaaagaggatccagagtttcaagcggaactgcaaagcatcctcaaggattacgtcgggagagaaaatccgttgtactacgccgagcgattgagcgaggagttcaaggacgcgaacgggaacggtccggatatttaccttaagcgcgaagacc

SEQ ID NO: 281324 - DNA, 452 bp, Unknown
  Bacterial polypeptide expressing nucleotide sequence isolated from the Sargasso Sea
tgtagaagaattttgtaaaaaatgtaatgaaattggaattgatggactaattatacctgaccttcctatggattattatgaagaaaattataaatcaatatttaagaaatatgagatttataatatgttcttaatagcccctcagacttcagatgaaagaattaaaaagattgattctatatctgatggttttatttatatggttagttcttcaagtataactggatctaaagactcatttagttctgaacagttagaatattttgaaagaatcaaaaagatgaatcttaaaactccgagaataactggttttggtgtggcgaataaaaaaacatttgaagctgcagtaaaattttcaaaaggagcaattataggatcagcatttattaaaagtctccatttaaacggaatagattctataagtaagtttattcactctataaaagattaga

SEQ ID NO: 281325 - DNA, 238 bp, Unknown
  Bacterial polypeptide expressing nucleotide sequence isolated from the Sargasso Sea
attgaaaaataaaggttattttggtgattatggaggtctgtttattccagaaaccttatctcatgcattgaatgaattggatagtctatatctagacataaaagataatgctaattttcaagaagaacttacaaatatatataaatactatgtaggtagaccatcacctttatattttgctgaaaaatattctgaattagtcaaagccaaggtttggtttaagagagaggatctaaat

SEQ ID NO: 281326 - DNA, 475 bp, Unknown
  Bacterial polypeptide expressing nucleotide sequence isolated from the Sargasso Sea
atgtcagatagaattaaatattttcttgaagaaagcaaaatgccaaaaacttggtataatattgcagccgatcttccaaaacctctttcaccagttcttcatccgggtactcttaaaccaattggaccagatgatttggctccgctatttccaatggcacttattgggcaagaagtttcacaagatagagaaattgaaattccagaaccagttagagaaatttataaacaatggagaccttcaccattgtatagagcaagaaaattagaaaaggcattagatacaacagccaaaatttattataaatatgaaggtgttagtccaacaggaagccacaaaccaaacacagccgtagctcaagctttttttaataaagaagaaggtacaaaaaaaattacaactgaaacaggcgcaggtcagtggggaagctctctagcatttgcatgttcaatttttaaaatcgaacttgatgttt

SEQ ID NO: 281327 - DNA, 1156 bp, Unknown
  Bacterial polypeptide expressing nucleotide sequence isolated from the Sargasso Sea
aagttttattcctgaaactttaaaaaaacctgtagaggatctaacacaggagttttcaaaattaagaaataataagaaatttttaaaaaagagggattattactttaagaattatataggatcacccacatcatttgtaaaattagaaaatttgtctaatcacctaggtggtgctcaaatatgggccaaagttgtatcagaggctaatggaggtgctcacaaaatttacaatgcaactgttcatgctttaatttgtaaggcaatgggtaagaaatatatcgttggagatacaggcgcaggttatgctggtaaaatgttgagtatggctgctaagaaatttggtctgaaatgtaaaatttttatgggtgcaaaagacatcaagagacaaaaaccaaactgtgatgctatgagaaaaaatggtgctgaaataattcctgtatattcaggtagtcaaaccttagttgatgcagtcagtgagtgtatgagatattgggtatcaaattgtgacactacacatatgtgtgttggaagcacagttggtccaaatatatttgtaaaaatttgtggatggagtacagcacaaatttcaagagaattaaaaatacaaattaaacaagaattcaaaaaaattccaaaaaaaattaaattgattaactgtgtaggaggtggaagttcagcatatggtttttggagtgaatttatagattttaataaatcgcaaatagaattagttggtgtagaggctggaggtccaaaaaaatcaaaactccatgccgctcctttgagtagaaatgctaaaattggaattttacatggtgcagcttcttatgtttgtcaaaacaatgaaggtcaaattaatgatactgaatcaattagtgctggattggattaccctggcgtaagtccaatacattgttttttaaaagatacaaaacgagctagatacacttatgcaacagatgaagaggcattaaaagcacatgtgatggtaactaaatttgaaaaacttaatccaagtttagaacctagtcatgcatttgcggaggcaataaaaattgcaccaaaattaagtaaagatacaataataattgttaactcttgtggtgacgctaaaaaagatagagatatcttaaaagaaagactgggaaaaaaataa

SEQ ID NO: 281328 - DNA, 604 bp, Unknown
  Bacterial polypeptide expressing nucleotide sequence isolated from the Sargasso Sea
tatgactaaaaattcattaaaaaatgggccagacgaatttggatattatggagaatttggatcaagatatgcacctgagatccttatgcccaatttaatagagctagaaaaagcttttaacgatgcgattaaagataaaaaatttattgatgaatttgaatattatttaaaagaatggataggaagaccaaatccactttattttgctgaacagttaacaaaacaaattggtggtgcaaaaatttattttaaatcagaccatttaaatcatcttggagcgcataagggaaataatgcgctttttcaaatattgttagctaagagaatgggtaaaactaaagtgctatgtgaaacaggtgcaggagcacatctaatagctacagccgctgcaggagcattcaaatcattacctgtaattgggtacatgggaaaagatgacatttttaaacaatcaaccaatgtccttaaagcaaaactttttggtgccaaagttattgaatgtgttgatggaactggagaaaaaggtgtgcttaaagatgcatgtacagcggtacttaaggcgtggtcaaatgaccccgatgctttttattgttgtgggagcgcc

SEQ ID NO: 281329 - DNA, 1228 bp, Unknown
  Bacterial polypeptide expressing nucleotide sequence isolated from the Sargasso Sea
aatgataaaaataaaaaaaggtataccactaatagaccagcatgataaaaatggtttctggggaaaattcggtggtaacttcatacctgaaactttgaaaaaacctgtagaggatctcactattttatttgaaaaattgagaagagataaaaaatttattcaagagagagattatcatttcaacaattgggtcggggcacctactccatttataaaactaaaaaacttaactgagcatttgggtggagcccaaatatgggcaaaagttgtatctgaagctaatggaggagctcataaaatttataatgctactgtacatagccttatagccaaaagagcaggaaaaaaatatatagttggagacactggggcgggttatgcaggaaaaatgctaagcatggctgcaaaaaaatttggtttaaaatgtaaaatatttatgggtgcaaaagacattaaaaggcaaaaaccaaattgtgatgctatgcgtgctaatggtgctgaaatagtgccagtttatacaggcagccaaacccttgttgatgctgttagtgaatgtatgagatactgggtatctaattgcgatactactcatatgtgtgtgggatctactgttggacctaatatctttgtcaaaatttgtgggtggagtacatcacaaatttccagggaacttttaattcaaataaaggaagagttcggaacaattccaaaaaaattaaaattatataattgtgtaggaggaggaagctcaagttttggattttggaatgaatttatgaattatgataaaaaacaaattgagttcgttggtattgaggctgctggaccaaaaaaaagtaaaagacatgcagctcctttgacttatggatcaaaaattggaatattgcatggtgctgcccaatatgtaaatcaaaataaagaaggccaaatagaaaaaacagagtcaattagtgctggtctagactatccaggagtatctcctttacattgttttttaaaagatacgaaaagagctagatatactgctgctacagatgaggaagctttaaatgcatataaaatagttaccaaatttgaaagtttaaaccctagtttagaaccaagtcatgcatttgcagaagcaataaaaatagctccaaaattaagcaaaaatactattgtttgtgtaaacagctgtggtgatgcgctaaaggaccgagatattttaaaacaaagattgggaaaataa

SEQ ID NO: 281330 - DNA, 897 bp, Unknown
  Bacterial polypeptide expressing nucleotide sequence isolated from the Sargasso Sea
gtggccctcaacttatgttgaatagatcctgccctgaaatggtaactgaactttttaacattgaggtcccagaaataaacgaagatgttattgaaataagaggaatagcaagagatgctgggtcaagatcaaaaattgcagtaaaaacaaatgatggtcgaattgatcctgtaggtgcttgtgttggtatgagagggtctagggttcaagctgtatcatcagagctaggcaatgaaaggattgacataattatttatgacgataatcctgctcaacttgtcataaatgcactttctccagcaaaagttgaatctattgtaatggatgaggactctagatcaatggatattgctgttaatcaggataatttagccttagcaattgggtctagaggtcaaaatataagacttgcatcaagattggttggatgggatctcaatattattagtaacgaagaagctgaagcaaaagttaaagttgatgaaacagaatttttagctaagatcattgatactcttgaagttaaggaagaagttgcagaaaaaataatatcttctggctttttgtcatttgatgaaattgcttatgcagaagattcaaaattaaaagagtttattgaatcagatgaggaagttttaagaattaagtcagcttcagaggacgcagcacttcttgaagccatgggcgcagtgactgaagaagaagataatgttgaatcattatcagatttgaatcttgatgaagacaacatagctaaattatctaataaaggtattaaaaataaagatgatttagcagagctttcaatagatgaactgcaagaaataattgaaatttcttcagatgatgcttcaaaaatgattatgaaagcaagagaacattggtttaacgaatagg

SEQ ID NO: 281331 - DNA, 423 bp, Unknown
  Bacterial polypeptide expressing nucleotide sequence isolated from the Sargasso Sea
aatgagccacagaattaaaaaagtttttgcatctaataaaaagaaattaattacatttgttacaggtggtgatccagatattgattcatctaataaaattcttgaaactatcgaaaaaaatggtgctgatataattgaaataggcatgcctttttctgatccaatggcagatggtccaataattcaattatcaagcaaaagagcaataaaaaagggagtaactctagataatattttctcaatatgtaaaaaacttagatcaaataatgatgaggttccaataattttaatgggatattataatgttatctataattatggagtaaaaaattttgttaactcttgtaaatctaatggtgtagatggattaattgttgttgatttgcaaccagaagaagatccagatttattaatagaaattca

SEQ ID NO: 281332 - DNA, 268 bp, Unknown
  Bacterial polypeptide expressing nucleotide sequence isolated from the Sargasso Sea
atgacttctaaaaatataaataaaccttcatcaaacggtagatttggaaaatttggtggtaaatttgttcctgaaactctaatgtcttctttaaaagaaatagaagaggcatttgaaaaatattctaaagatgaatctttttgggaagaattaactactttacagaatgattttataggtaggccaacacctttatattatgcaaaaaatttatctgaaaagctgaatcaaagaatatggataaaaagagaagatttagctcataccg

SEQ ID NO: 281333 - DNA, 1246 bp, Unknown
  Bacterial polypeptide expressing nucleotide sequence isolated from the Sargasso Sea
aatgaaacttaaaaaaggaattccggttatagatcaaggagataagcttggcttttggggcggaaaatttggaggaaattttgtacctgaaacactaaaaaaacctatagaagatctagaaatacaatttaataaattaaaaaatgacaaaaactttataagagaaagagataaatatttcaaaaattggattggaacaccgacaagatttattaagttaaataatttaacaaaacatgttggtggagcacagatttggtcaaaggttgtttctgatgctaacggtggagctcacaaaatatataatgcaactgtacattgtttactggcaaaaaggtctggaaagaaagtaataattggagacaccggcgccgggtacgctggcaagatgttaagcatggctgctaagaaatttggtttaaaatgtaaaatttttatgggtgcaaaagacataaagagacaacaacctaatgttaaagcaatgaagaaaaatggtgcagatgtaattcctgtatattcaggaagtcaaacacttgtggatgctgtttctgaatgtatgagattttgggttgcaaattgtgatacaacagcaatgtgtgtaggaagtactgtaggtccagcaatttttgttcgaatttgtggttggagtactagtcaaatatccagagagcttaaggttcaattaataaatgaatttggtgaagtccctaaaaaacttaaattgtataattgtgtgggaggaggttcctcaagttttgggttttggaatgaatttatggattatgataaaaaacaagttgagtttataggggttgaggctggaggaccaagtaaaagtaaaaggcatgcagctcctttaacttatggttcaaaaatcggcatacttcatggtgctgcgcaatatgtaaatcaaaatagcgatggtcagattgaagaaactgaatcaatatctgcaggtcttgattatcctggaatttcaccacttcattgctttttaaaagatacaaagcgcgcaaggtatacagcagctagtgacgaagaagctttaaaggcctatcaaatagttacaaaatatgaaaatttaagaccatctctcgaaccaagtcatgcattctctgtggctcttaaagaaagcaaaaaatttagcaaggacacaatagtaattattaatagttgtggagatgcatataaagaccgtggaattttagaaaaaaagttgggaaagaaatatgttaaatccaattag

SEQ ID NO: 281334 - DNA, 898 bp, Unknown
  Bacterial polypeptide expressing nucleotide sequence isolated from the Sargasso Sea
atgggaaaaaaatatatagttggggatactggagctggatatgctggaaaaatgctaagtatggcagctaagaagtttggacttaagtgtaaaatttttatgggagctaaagatattaaaagacaaaagcccaattgtgaagccataaaaaaaaatggtgctgaaatagttccagtttatagtggaagtcaaactctagttgatgcagtaagtgagtgtatgagatattgggtttctaattgtgatactactcatatgtgtgttggatcaactgttggtccaaatatttttgtaaaagtttgcggatggagcacatctcaaatttcaaaagaacttaaattacaaattaaaaaagaattcgggaaaattcccaacaaagtaaaattaataaattgtgttggtggaggaagttcggcatatggattctggagtgaatttgttgattttccaaaaaagcaaattgaacttataggagttgaagcgggaggtcctaaaaattctaaattacatgcagcgccactaagtaagggggcaaagttaggaattctgcatggtgcagcatcttatgtttgtcaaaataaagagggacaaattaatcaaacagagtcaataagtgcaggtttagattatccaggcgtcagtccaattcattgctttttaaaagatacaaaaagagcaagatatacatatgctactgatgaggaggctttaaatgcttataaacttgtaacaaaatttgaaaaacttaatcctagtttggaaccaagtcatgcttttgcagaagcaattgcatgtgcacctaaatcagacaaaaatacaattataattgtaaattcttgtggagatgcaaaaaaagatagagatattttaaaaaaaagattaggaaacagaaaatgat

SEQ ID NO: 281335 - DNA, 793 bp, Unknown
  Bacterial polypeptide expressing nucleotide sequence isolated from the Sargasso Sea
aatgtctagcagaataaaaaaaatatttgaagatagctcaaaaaaactagtaacatttgttactggtggagatccagattatgtaacttccaaagaaattctggataaaattattgaaaaaggagctgatattattgaaattggtatgcctttttcagatccaatggctgatggaccaataattcaacttgcaagcaaaagagcaatagataatggtactaacttagaaacaatatttaaaatttgtaatcatattagagaaaagaatctgtccattcctattgttcttatgggttattataatgttattctccactatggtataaaaaattttgttgataaaataaattcaataggtgtagatggcttaataatagttgatttacagcctgaagaagatcgggagctttatgataacttaaaatctaaaaatattgatttaataagattgattacaccaaatacaaattcaaaaagattatctacaattactaatcaagcatctggttttttatattatgtaacaataaccggaattactggacaaaaaagtgcaaatattcaagaattaaaaaaaatcattcctaatataagaaaatattctaaattacctataattgcaggttttggcataaaagataaaaatgatgtatctgaaatttgtaaaactgctgatggggcagtagttggatcatctattgtaaaaattatagaaaataatttaaataataaagaaaaaatgatgaatgaagttagctcttttattgaagaactaaaaaaaggaacaaaataa

SEQ ID NO: 281336 - DNA, 361 bp, Unknown
  Bacterial polypeptide expressing nucleotide sequence isolated from the Sargasso Sea
aattttacatggagctgctcaatattgtttgactgataaaaatggtcaaataaaagaaactcactcaatttctgcaggtttagattatccaggcgtctcgcctctccattgttttttaaaagatacaggtcgcgcacgctattgttctgcaagtgacgaacaagctctagcagcttttaaactagttacaaagcttgagccatcagttaaacctagtctagaacccgctcattgtttgcatgaggttataagacttgcacctaaattaaatcaggatgaaattataatttataataattgtgggcacgcttacaaggatcaaaaaattattaaggatagaataggatattttccatcatga

SEQ ID NO: 281337 - DNA, 1030 bp, Unknown
  Bacterial polypeptide expressing nucleotide sequence isolated from the Sargasso Sea
caagttttataaaactgaaaaacttaacaaatcatcttgtggagcccagatatggtcaaaagttgtatctgatgcaaatggtggcgcacataagatatataatgctaccgtacattgcttaatagctaaaagagcaggaaaaaaatatatagttggcgatactggtgccggatatgcaggaaaaatgttgagtatggccgcaaaaaaatttggattaaaatgtaaaatatttatgggtgctaaagatattaggagacaaggacctaacgtaagagcaatgagaaaaaatttagcagaaattgtacctgtttatacgggcagccagacacttgttgatgctgttagcgaatgtatgagatattgggtttcaaactgtgacaccactcatatgtgcgtaggatctactgttggtccaaatatttttgtaaaaatttgtggatggagtacatcacagatttcaagagaactttttatacaaattaaaaaagagtttggaagaatcccaaaaaaattaaaattaataaattgtgttggaggaggttcgtcaagttttggtttttggaatgaatttatgcattacaataaaaatcaagttgagtttattggtgtagaggctggtggaccaaaaaaaagtagattacacgctgctcctttaacttatggatcaaaaattggagtacttcatggcgcaatgcaatacgtaaatcaagataaaatgggtcaaatagaagaaactgaatcaattagtgcaggactagactatccgggagtttctccactacattgttttttaaaagatgcgaaaagagcaagatatacagctgccactgatgaagaggctttgaatgcttataagctagttactaaatatgaaaatttaaatccaagtttagagccaagtcacgcatttgcggaagcaataaaaataactccgaaattaaataaagatactgtggtgtgtgtaaatagctgtggagatgctcgaaaagaccaagatattttaaaaaaaagattgggtaaaaaaatatga

SEQ ID NO: 281338 - DNA, 703 bp, Unknown
  Bacterial polypeptide expressing nucleotide sequence isolated from the Sargasso Sea
gatgatacaaagtacgctttaggtagtgtattaaatcatgtgcttctacaccaaactataattgggcaagaaagtatgaaacagcttgaaattgcaggtgatgagccagatgttatagttggttgtacaggtggaggttcaaattttgcaggcatagcttttccatttataggaagaaatttaagaggagagagtaaaactaggattgttgcagtagaacctgctaattgtccaacattaaccaaaggtaaatacgcttatgactttggcgatactggtcatttaacaccattagttaaaatgcatactttaggctctgcgtttgtgcctccaggatttcatgctggtggattaaggtatcatggtatgtctccattagttagccatttggcaaacgaaaatgaaatagaatgtacatcttataaacaattagaatgttttgaagcaggagttacttttgcaaaagctgaaggtatacttccagctccagaagcaaaccatgctgtaaaaggggctattgttgaagcattaaaagcaaaagaagaaggtgaaagtaagactattttatttaatttatgcggacatggtcattttgatatgcaagcttatacagactattttggtggtaagttgaaagatcaagactatgatgaaagtgaagtagcaatggctttggcaaatttaccatctgtttcagcctaat

SEQ ID NO: 281339 - DNA, 1102 bp, Unknown
  Bacterial polypeptide expressing nucleotide sequence isolated from the Sargasso Sea
tatggttgaaatttatttttttatagtccaatatacttttattatgagtgactcaattaaatacttacttgaagaaaataaagcaccaaagttttggtacaatattaattcagacttaccaagtccaccaccaccaccattacaccctggaactaaacaaccagctggtcctgatgactttgctcctttatttccaatgagtttaattatgcaagaagtttctaccgaaagagaaatagaaattcctgagccagtaagagaagtatacaaacaatggagaccttctcctttatttagagcaagaaggttagaaaagtttttagatacaccagctaaaatttattacaaatatgaaggtgttagtcctacaggaagtcacaaaccaaatactgcagtcccacaagcattttttaataaagaagaaggaattagtaaaatatttactgaaacgggcgcaggccagtggggaagttcattagcttttgcaggtcagatttttggtatagatatagaagttttcatggttaaggttagctttgatcataaaccttacagaaaattaatgatgcaatcattcggcgctaactgtcacgctagcccatctaatttaactgatttcggtaacaagttattatcagaaaatcctgataaccctggtagtttgggaatagctatatcagaagcaatagaagcaactgttaaaagcggaggcaaagcaaaatactcacttggaagtgttttaggtcatgttttaatgcatcaaactataaatggtaatgaagccattatgcaaatggagatggctggagattatcctgatataattgttggctgtacaggtggcggcagtaatctttctggattgatgtttccattcttaggacaacaattaagaggcggtcaaaaaattgatataattggttgcgagcctgcatcatgtccttcatttacgaagggtaagtatgcttatgatcatggtgatatggcaaaaatgactccattaattaaaatgcatactcttggatctgatttcttaccgccggctaatcactctggtggattaagagatcatggcatgtcttatcatttaagccacttatat

SEQ ID NO: 281340 - DNA, 844 bp, Unknown
  Bacterial polypeptide expressing nucleotide sequence isolated from the Sargasso Sea
atgttcaattttaaaatcgaacttgatgtttacatggttaaagttagttacgaacaaaaaccatatagaaaaatgattatgcaaacttttggtgcaaattgttatgctagcccatcaaatagaactccaacaggtaaagcaattttagaaaaagatccaaacaacactggaagtttaggtatagctatatctgaagcagttgaaatggctgcacaagacgatcatacaaaatattcacttggaagtgttttaaatcatgtattgatgcatcaaacgattgtgggaaatgaagcaataatgcaaatggaaatggccgatgattatccagatatattagttggatgcacaggtggaggaagtaatttttctggattagcttttcccttccttggaaaaaagtttagagaaaaaaaagatattaaagtaattgcttgtgaaccaaaatcttgtcctactttaactaaaggaaaatttgcttatgattttggagatacaggaatgcgtacaccattagttaaaatgcatactttaggatcttcatttatgccaccatcaactcattcaggtggtttaagataccatggtatggctcctttagtcagccatttaacagatctaggtgctattgaacctaaagcatttggccaaaaagaatgttttgaagcaggagtaaaatttgcaaatgcagaaggtattgttccagcaccagaagctactcacgctgttaagggcgcaatagacgcagcacttgaatgtaaaaaaaatggagaaaagaaaacaattcttttcaatttatgtggtcatggacattttgatatgcaagcatacggagattatttcaata

SEQ ID NO: 281341 - DNA, 896 bp, Unknown
  Bacterial polypeptide expressing nucleotide sequence isolated from the Sargasso Sea
tactataatattctttcggatttgaaagaacctttacccccagtcttacatcctggaactaaagaaccggtaggacctgatgatctgtcacctctctttccgatggagctcatcaaacaggaagtctcaactgatccccaaattataattcccgatcaggtacgagatatttatcgcttgtacagacctacacctttatatcgagcaagatctttggaaaaagccttagggacgccagcaaagattttctataaatatgaaggagttagtccaacgggaagtcacaagccaaatactgcaattccccaagcatactacaataaaatggagggagttgataagattactacagaaactggtgccggacagtggggatcttcccttgcatttgcctgttcaaagtttgatatagatcttgacatatatatggttaaggtaagctatgaacaaaaaccgtatcgtaaagcaatgatggaaacatttggcgctagatgtattgctagcccttcgcatgaaacagaggttggaagaaaaattctcgctgaaacaccagattcaacaggtagcctgggtattgctatatcggaggctgttgaaatgtgtgtcagtagttcagggacaaaatatgcccttggttcagtgcttaatcatgttttgacgcatcaaacaattatcggtcaagaagcgatgcagcaaatgagccaaattgatgagaatgttgatatcgttgttggttgcactggaggcggtagtaatttcagtggtattgcaatgccttttttaggtaaagccatacgtaataatgaaaaactcgatcttgttgccgttgagccttcagcttgcccaacactcacaaagggtaaatatgcatatgattttggagacactgggcaaat

SEQ ID NO: 281342 - DNA, 763 bp, Unknown
  Bacterial polypeptide expressing nucleotide sequence isolated from the Sargasso Sea
tatgtttggcggtcaatacatagaggacagaataaaggctcccaaagcgcctggacccgcgatcatcccattcataactgcaggttatcctaatgctgaggactttaaacagacactctatgatctcgcaaagaaagcggatgtgattgaaattggggttccattttctgaccccatggcagatggggtgactattcagagatcaagccatatggccatagaaaatggggtgacgttgacatggattttcagtcaacttaaagaaattaaactagacaccccaattgttctgatgagctatttaaatccactttatgtatttggcttgaaagagcttgtcgaggcttccattgaatctggagttgacggctatattgttccagacttgccaattgaagaaagcaaggaactcaatgatcaactgacagacgctggtctagcattgattcaattggtcacaccagcgacaccatcagatagaattgaaatgattaccaaacaaagctcaggatttatttatgcagtgactgttaagggcgttacagggggagaaaatgctttgtctgctgatgtgacggattacttggaacaagttcatgagatttcaaaaatacccgtatgcgccggctttggtatcagagataagtctgatgttgaaatgattgctgagcatgtcgatggcatcattgttggctctgcaattgttgaaacaattgagcaaggcaatagcccaacagaatttttagatcggcttaaaaattaa

SEQ ID NO: 281343 - DNA, 947 bp, Unknown
  Bacterial polypeptide expressing nucleotide sequence isolated from the Sargasso Sea
tgccaaacctttaagtccagtgcttcatccaggaacactcaaaccagttgggccagatgatttggctcctttatttccaatggctttaataggacaggaagtttctcaagaaagagaaattgaaattccagaaccagttagagaaatctataaacaatggagaccttcaccattatatagagcaagaaaactagaaaaagcattagatacaacagctaaaatttattataaatatgaaggtgttagtccaacaggaagtcacaaaccaaatactgctgtggctcaagctttttacaataaagaagaaggtacaaaaaaaattacaactgaaacaggcgcaggtcaatggggaagttctcttgcttttgcatgttcaatttttaaaatcgaacttgatgtttatatggttaaagttagctttgaacaaaagccatatagaaaaatgattatgcaaacttttggagcaaattgttatgctagtccatctaacagaactccaacaggtaaagcaattttagaaaaagaaccaaatagtactggaagtttaggtatagccatatctgaagcagtagaaatggctgcacaagatgatgctacaaaatattctcttggaagtgttttaaatcatgttttaatgcatcaaactattgtaggtaatgaagcaatcatgcaaatggaaatggccaatgattatccggatatattagttggatgtacaggtggaggaagtaattttgctggattagcttttccttttcttggaaaaaaatttagagaaaaaaaagatattaaagttatagcttgcgaaccaaagtcttgtccatcattgacaaaaggtaaatttgcatatgattttggagatactggaaatcgtacaccattagttaaaatgcatactttaggatcttcattcatgccaccagcaacccactctggaggtttaagat

SEQ ID NO: 281344 - DNA, 195 bp, Unknown
  Bacterial polypeptide expressing nucleotide sequence isolated from the Sargasso Sea
ataattaataatggggctgatattatggaaattggaatgcccttttctgatccaatggctgatgggccaacaatccagttatcaagtaatagagcgataagtaaaggaattgatttagagaatattttctctttagcctccgaggcaaagaaaacaaaaagtgatctccctgttattttaatgggttactataat

SEQ ID NO: 281345 - DNA, 685 bp, Unknown
  Bacterial polypeptide expressing nucleotide sequence isolated from the Sargasso Sea
tatgaaaggtaacaaaatgcaaattactaaaaatgaatctttatctaaggtagatgagatgttttatgagttaaaaaataaaaaaaaatttgctctaatgccttttataatggcaggggatcccaatattgaaataacgtctgagatcttattaaagttacaagaaaatggagccgatcttattgaattaggtatcccgtatagtgacccccttgcagatggacctgttattcaagtggctgcctctcgcgccttaaagtcaggtactagcttaaaaaaagtaattaaacttttagagtctttaaaaggtaaattaaatatccccatcatccttttttcttacttgaatccattactatgttttggctttaaaaggttttgtgagatggcatctgatgctggagtttctggactaatagttcctgacctccctttggaggaagcttataaattttctaaaatagttagtaaccattctatggacttaattttattggtagcgccaactactccttttgaaagaatgaaacaaatatcaaatcagacaaaaggctttacttatttagtaagtgttacaggtgtcactggtgagagaaacaaaatggaaaatagagtagaaaatcttattgctaaattaaaaaatgtaaatagcaatccaattgctgttggttttggaatatcaact

SEQ ID NO: 281346 - DNA, 772 bp, Unknown
  Bacterial polypeptide expressing nucleotide sequence isolated from the Sargasso Sea
aagttttttcaacattaaagccgaaaagagaaaagcgctaataacatatattgtttcgggtgatcctgatactgaaactacaattgaggtcatgaattctatggtccgacaaggcactgatatcattgagttaggtatacctttttcagacccgatggcagaaggaatatcaattcaaaaaggtcatgagagagcattggaaaagggagcctctttgatgggtacttttgaattacttaaaaaattcagggcaaatgataaaaaaacacctattgtctttatgggatatatgaatacatttgaatctctgggtgcaaaacaatttatgttagaagctgtaaaagcagatttagatggcatattaattgtagatatgcctcctgaagaaagttcaaactttagtagtgaagccgacaaggttggcatagatataataagattgatagctcctacaacaagctccttaagagctaagaaaatttgttctctgtgctcaggttatgtttactatatatctgttaaaggtattactggggcatccaatataaatcctgaagaagttaaggtaaaagtaagtgagcttagatctcatacagacttaccaatagctataggatttggaattaaagatgctgcctcagcctcttctgtaaaagatatcgctgatggagttgttataggaagtgtatttgttgatttaattggagagggtggcaatataattgaaaaggtcgaatctaaaacaagagagctttctgaagtattgaattaa

SEQ ID NO: 281347 - DNA, 922 bp, Unknown
  Bacterial polypeptide expressing nucleotide sequence isolated from the Sargasso Sea
aatgttactgaaacaggtgcaggtcagtggggttctgcgttatctttcgcatgtcaagcgtttggtattgatcttgaagtttttcaagtagcagcttcgtatgcatctaaacctcatagaaagacaatgatggaaatttatggtgcaacagttcaccctagtccatctgaaagaacagatattgggaaacaattcttatctcaggatccaaatacacctggaagcttaggtattgcaatttctgaggctatagaggtagctagaaaagaagaaggaactaggtatgccttgggtagtgttttaaatcatgttctaatgcaccaatcaattattggcttagaggctttaaaacaaatggaaatggcagaagactatccagatataatagtcggttgcacaggtggcggatcaaactttactggattattttctccttttgcaaaaaacaatatggagtcaaataaaaaaaccattattagagctgtggaacctcaagcgtgtccatctttgactaaaggtgtttatacgtatgattttggagattctgtaggtatggcaccagttgtaaaaatgcatactcttggatccagttttgtgcctgaccccatacatgctggtggtttaagatatcatggcatggctccattggtaagtgctatgtatgaagataatctgatcgaggccgaagcaattggtcaacgagaatgttttgaagctggtcagctctttgcaaaaactgaaggtattgtcccagcacctgaagctactcacgctatagcttcagcaatcagagcagtaaaagatgctgatcaaagatctgagcaagtagctgttttgacagcaatgtgtggtcatggacattttgacatgaaagcatatgagaacttcttaagtggtgaaataattgattatgatttcccag

SEQ ID NO: 281348 - DNA, 454 bp, Unknown
  Bacterial polypeptide expressing nucleotide sequence isolated from the Sargasso Sea
atgaatcgtataaaagaaacttttgataaattaaaaaaaaataataaaaaggctttaggaatttttgtaactgctggtgatcctaattttgaaagttccttgaaactcattactaatttacctgataatggagcaaattttatagaaattggcatgccgttttcagacccaatggcggatggaccatctatacaattatcgagtcaaagagctcttaagtcaggaatgaaccttaataaatgtttatcactaattaaaatttttagagaaaaaaataatcatactccgataattttgatgggttattataatccaatatataagtttggaaaagaaaaatttattaaaaattgtatagagttaggtgtagatgctcttatcattgtggacttgccacccgaagaagatgatgagttctattttgaagctgaaaaaaataacctttctatgataa

SEQ ID NO: 281349 - DNA, 861 bp, Unknown
  Bacterial polypeptide expressing nucleotide sequence isolated from the Sargasso Sea
ttgcatccaggaactttaaaacctatagggccagatgatttagcgcctttatttccaatggctttaatcggtcaagaagtgtctcaagatagagagatagaaataccagagcctgttagagaaatttataaacaatggagaccatctccattatatagagcgagaaaattagaaaaacatttagatacacctgctaaaatctattataagtacgagggtgtaagtccatcaggtagccataaacctaatacagctgtggcccaagcattttataacaaagaagaaggtacaaaaaaaataactaccgaaacaggagctggtcaatggggtacatctttagcttttgcgtgtaaattgtttggcattgaattagatgtttacatggtaaaagtaagttttgaacaaaaaccatacagaaaacttgtgatgcaaacttatggtgcaagatgtgtagccagtccatcaaatgagacggatagtggaaaagctatattagccaaagatccaaacaatacaggaagtttaggtatcgcaatttcagaggctgtagagatggcagcaaaaaatcctgacactaaatatgctcttggaagtgttttaaatcatgttcttatgcatcaaactatagttggaaatgaagctttattacaaatggaaatggcagatgattatccagatattttagttggttgtacaggtggtggaagtaacttttcaggattagtaaacccatttttaggaaaaaattttagagaaggtaaaaaaacaaaagtaattgcgtgtgaacctaaatcttgtccaactcttacgcaaggtaaatatgtttatgattttggtgatactggtaaattaactccttta

SEQ ID NO: 281350 - DNA, 476 bp, Unknown
  Bacterial polypeptide expressing nucleotide sequence isolated from the Sargasso Sea
ggcattaggtttattctacccatttttagatgatgatgtagatatgtatggggttgaatcagctgggatggggttagacgggaatgagcatgctgcttcattatctaaaggagtaccaggaattttgcatggcaatagaacctacttactccaagacaatgaaggtcagattagagaaggacattcaatttctgctggtcttgattatcccggtattggaccagaacactcctggttaaatgatcaaggaagagtaaattatgtgtcttcaacagataatgaagcgttaaatgcttttgaaatatgttcaaaatacgaaggaattatacctgctttagagccttctcatgccttagcattcgttttcaagcttgcaaaggatatgaaaaaagaccagatcattatagttaatttatgtggtagaggcgataaagatattgaaacggtagcagattatcttggtgtagaagtataat

SEQ ID NO: 281351 - DNA, 487 bp, Unknown
  Bacterial polypeptide expressing nucleotide sequence isolated from the Sargasso Sea
aatggctacaagaattttaagaacctttgatgaattaaaatcaaattctcaaactggtttaattacatatcttacagctggatttccaaatcaagacttatgttttgatataattgatgagctttcaaaatcaggaagtgatttaatagaaattggcatgcctttttctgatcccatggctgaagggcctataattcaacaatcatcaaagcttgcattggacaatggtcatacaatggaattaacttttgatcttataaaaaagtttagaaataaaaattctcaaacacctattatattgatgggttattacaatcctatttatcaatatgggaatgagagttttataaaaagatgcctagattatggcgtggatggtttaattgttgttgatttacctcctgagcatgattctgaattatgtgatctcacaatagatattgatcttgattttataagacttgctacacctactactaacaagaaa

SEQ ID NO: 281352 - DNA, 160 bp, Unknown
  Bacterial polypeptide expressing nucleotide sequence isolated from the Sargasso Sea
agtagaaggaattatccctgcccttgaaacagctcatgccatttcatacgcttgtgatttagcgcctaccctcagacctgaagacatcataattatttgtttaagtggcagaggagacaaagacatctctatagtggctgagcaagaatctctattttag

SEQ ID NO: 281353 - DNA, 382 bp, Unknown
  Bacterial polypeptide expressing nucleotide sequence isolated from the Sargasso Sea
ttgaataatcccaagaatggtttttacggagatttcggaggtaaatttatacctgagacactgtcgtacgcaatcgaagaattagatcaaaactacaagcaaatagcacaatcagatgatttccaaaagcaatttcacctgttactgaaagaatttgttggcaggccaacagctctatattttgctaaaaatttaaccgaacattatggtggagctaaaatatactttaagagagaagatttagcacatctaggtgctcataaaatcaacaatgctgtaggtcagggattgctagcaaaattgatgggtaaaaaacgaataattgctgaaacaggagctggacaacacggtgttgcaacggcagcaatatgcgcaaagctag

SEQ ID NO: 281354 - DNA, 232 bp, Unknown
  Bacterial polypeptide expressing nucleotide sequence isolated from the Sargasso Sea
atgccagataaaaatggtagatttggaatatatggtggcagatatgttgctgagacacttgtcccagctctagaagagttatctgagcaatatgaattaataaaaaaggatgagaaattccttaaagagtttgaagacgatctgaaagattatgtcggaagaccttctcctttatattttgcaaatacgttggacagaattacttggtggcgcagaagatttatcttaaaag

SEQ ID NO: 281355 - DNA, 543 bp, Unknown
  Bacterial polypeptide expressing nucleotide sequence isolated from the Sargasso Sea
gatgagcaaaagtcccttgcgaattgaagaatctcttcgtaaacgaataggtggaggcgggaagtgcttagtgccatacattactggtggttttgaggggtatgttgaagctatctacgcagctgccgaagcaggggcagacgcaattgagataggtatacctttctctgacccagtgatggatggccctacgatacaaaaggcaaatgatgttgtgttagcccaaaaaatttctccactagatatccttcaggaaattcgcgacttagacatcggaattcctttagccgtaatgacttattacaacatcgtgtaccgttttggtcttgagcgattcgcaaatgcactttctgaatcgggtatttccggtgcgattcttcctgatctcccgttaaatgaggctggcgcatgggttgatgcagcttctgcaaatggtactgagactattttattagctgccccaaccactactgatgaacgtttagaagctctgtgtggacaaagtaaaggctttgtctacgctgtggggcttcttggtattac

SEQ ID NO: 281356 - DNA, 272 bp, Unknown
  Bacterial polypeptide expressing nucleotide sequence isolated from the Sargasso Sea
ttttccaggagtagggtgcgagcatagttatttaaaggatttaggacgcgccacctatgccaccattacagatgaggaggcacttgaaggttttaaacttctatcgagcaaagaaggaattattccagccttggagtcagcgcacgcgattgctcatgtggctaagttggcacctgaaatgaaaaaggatgagatcattctggtttgtctttcgggacgtggtgataaagatgtcaatcaaatcgcggataggatgggagtttctctgtgag

SEQ ID NO: 281357 - DNA, 793 bp, Unknown
  Bacterial polypeptide expressing nucleotide sequence isolated from the Sargasso Sea
tttgacttctaggataaaagaagttttttcaaaaattaaagccgaaaaaagaaaagcgctaataacatatattgtttcgggtgatcccgatactgagaccacaattgagatcatgaactctatggttcaacaaggcactgatatcattgagttaggcatacctttttcagacccgatggcagaaggtatatctattcaaaaaggtcacgagcgggcattggaaaagggagtctctttgaaaggtacttttgaattacttaaaaaattcagggcaaatgatgaaaaaacacctattgtctttatgggttacatgaatacatttgaatctctgggcgcaaaacaatttatgtcagaagctgtaaatgccaatttagatggcatattaatagtagatatgcctcctgaagagagttcagactttagtactgaagctgaaaaggttggcatagatataataagattgatagcacctacaaccagctctttgagagctaagaaaatttgttctcagtgctcaggttatgtttactatatatctgttaaaggtattacaggggcatccaatataaatgctgaggaagttaaggcaaaagtaagtgagcttagatctcatacagacttacctatagctataggatttggaattaaagatgctgcctcagcgtcttctgtaaaagatgttgcagatggagtagttgcaggaagtgtatttgttgatttaattggagagggtggcaatataattaaaaaggtcgaatctaaaacaagagagctttctcaagtattgaattaa

SEQ ID NO: 281358 - DNA, 241 bp, Unknown
  Bacterial polypeptide expressing nucleotide sequence isolated from the Sargasso Sea
ttgaaagactctgaaagggctgaatatgttgctgtaagtgacgatgctgcactaaaagcatttcacgaagtttctgagctggagggaataatacctgcgcttgaaacagctcatgcctttgcatatctagatactttaatgaaagagtttgataagaattccaatatcattgtgaatgtatcgggacgtggtgataaagatattaacactgttgcaaatattgatggaataaagatttgaa

SEQ ID NO: 281359 - DNA, 790 bp, Unknown
  Bacterial polypeptide expressing nucleotide sequence isolated from the Sargasso Sea
tggagaccatcaccattgtatagagcaagaaaattagaaaaacatttagatacaccagcaaaaatttattataaatatgaaggagttagtccttctggtagtcataaaccaaatacagcagtacctcaggcattttacaataaagaagaaggtacaaaaaaaataactacagaaacaggtgctggacaatggggaacatcattagcatttgcatgtaaattattcggaattgaattagatgtttatatggtaaaagtaagttttgaacaaaaaccatatagaaaacttgttatgcaaacttatggtgctagatgtgttgcaagtccttcaaatgaaacagatagcggaaaagctattttagcaaaagatccaagtaataccggaagtttaggaattgctatttcagaagcagttgaaatggctgctaaaaatcctgatacaaaatacgcattaggaagtgttttaaatcatgttttaatgcatcaaactattgtaggaaatgaagcattattacaaatggaaatggctgatgattatccagatattttagttggttgtactggaggaggaagtaacttttcaggattagcaaatccatttttaggaaaaaattttacagaaggtaaaaaaactagagtaattgcatgtgagcctaagtcatgcccaactttaactgaaggaaaatatgtttacgactttggagacacaggaaaattaacaccactagtaaaaatgcatactttaggatcacaatttattccaccagcaacacactctggaggattaaggt

SEQ ID NO: 281360 - DNA, 337 bp, Unknown
  Bacterial polypeptide expressing nucleotide sequence isolated from the Sargasso Sea
atgaatagtaaaaatacttacaaacatttgccagatgaaaaaggatattttggaaaatttggtggtcggtacgtatcagaaaccttgatgccattaatacaagaagtggaaaatgaatataataaaattaaaaatgatcaaaaatttttacaagaattagaatattattttaaaaattatattggaagaccaagtcctcttttttttgcaaaaagaattagtgaagatcttaaaggtccaaaaatttattttaaaagagatgagttaaatcatacaggggcacataaaattaataattgtatgggtcaaatattactagccaaaaaaatgggtaaaa

SEQ ID NO: 281361 - DNA, 370 bp, Unknown
  Bacterial polypeptide expressing nucleotide sequence isolated from the Sargasso Sea
atgataggcggtaaatacattgagaaaaaaataaggacttcgaaggcgccgggaccagcaattatcccattcatcactgcaggatacccaagcactgaggacttcaagcaaatgcttcatgaaatcgcaaagaaagctgacgtgattgaaattggcgttccattttctgatccgatggcagacggggttacaatccagagatcaagccaattggccatagagaatggagtaacgcttacatggatatttaatcagctaaaaaaaattaaactagacaccccaattgttttgatgagctatctaaatccactccatgtattcggcatggaacagcttgttgaagcttcaattgcatctggcgtggatggtt

SEQ ID NO: 281362 - DNA, 840 bp, Unknown
  Bacterial polypeptide expressing nucleotide sequence isolated from the Sargasso Sea
tacaagaaagagataaatattttaataattggattggtgtacctactcgatttattaaattagagaatttatcgaaacatgtaggtggagctcaaatttggtctaaagttgtttcagatgcaaatggtggggcacacaaggtatataacgcaacagtccattgtttacttgcaaaacgatctggtaagaaagttatatgtggggacacaggtgccgggtatgcaggtaaaatgttaagtatggctgcaaaaaaatttggtcttaagtgtaaaattttcatgggtgcaaaagatattgcaagacaacaaccaaatgtaaaagcgatgaaaaaaaatggtgccgaagtaattccggtttattcaggaagtcaaacccttgtggatgctgtttcagagtgtatgaggttctgggttgctaattgtgatactacagctatgtgcgttggaagcacagtagggccagctgtttttgttcgtatttgtggatggagtactagtcaaatttcaagagagttaaaagttcaattaattgatgagtttggatcaattccaaaaaaacttaaactttacaattgtgtgggtggtggaagttcgagttttgggttttggaatgagtttatagattatgataaaaagcagtgtgaatttattggcgtagaagctggaggacctgcaaaaagtaaaaagcatgcagcacctttaacttatggttctaaaattggaattctacatggtgcagcccagtatgttaatcaaaactcagatggacaaatagaagagacagaatctatttcagcaggtttggattaccctggaatttctccgcttcattgtttttaaa

SEQ ID NO: 281363 - DNA, 817 bp, Unknown
  Bacterial polypeptide expressing nucleotide sequence isolated from the Sargasso Sea
atgtcagatactattaaatattttcttgaagaaagcaaaatgccaaaaacttggtacaatattgctgcagatttacccaaacctatggagcctccacttcatccaggtactttaaaaccaattgggccagatgatctggctcctctgtttccaatggctttgataggacaagaagtttctcaagatagagaaatagaaataccagagcctgtgcgagaaatttataaaaaatggagaccatcaccattatatagagctagagcattagaaaaacatttagatacacctgcaaaaatttattataaatatgaaggtgtaagtccttcaggtagtcacaaaccaaatacagcggtcgctcaagcattttataataaagaagaaggaacgaaaaaaataactacggaaacaggcgcgggacaatggggaacttccctagcatttgcatgtaaattgtttggaattgaattagatgtttacatggtaaaagttagttttgaacaaaagccataccgaaaacttgtaatgcaaacttatggtgctagatgtgtagctagtccatctaatgaaacagatagtgggaaagccattttagcaaaagatccaaacaatacgggaagtttaggtatagcaatctcagaagcagtagaaatggctgcaaaaaatccagatacaaaatatgcattaggaagtgttttaaatcacgtattaatgcatcaaactattgtaggtaatgaggcgatacttcaaatggaaatggcagatgattatccagatattttagttggttgcacaggtggtggaagtaatttttcaggat

SEQ ID NO: 281364 - DNA, 541 bp, Unknown
  Bacterial polypeptide expressing nucleotide sequence isolated from the Sargasso Sea
tcgtgaggacaattcgataacgcctgtagttctaatgggatatcttaatcccatagaatcaatgggctacgatgaatttgccgaggctgcggctctggcgggagtcgatggaactattattgttaattttccacctgaagaagcgggtgaattcggtgatcggctagccgagcgcgaagtcgagactgtctatttactttccccaacgacaaccgatgaacgtgctcgaaagatctgcggagcctctaaaggattcgtctactacgtctcactgaagggaacaacaggagcagcgacgctcgatctggccgatgttgcagagaaaacgtcaaggttcagagcttttagcgacttgccgatactcgttggcttcggtatcaaagatggagccagcgcgaaagctattgcagagttatcggatggggcggtagtagggtcggcgatcgtcaagattatgggagataatgcagataatccgaagctgctaaaagaacgtgttcaagccctcattagagagctaaggtcggcactggacgggtga

SEQ ID NO: 281365 - DNA, 856 bp, Unknown
  Bacterial polypeptide expressing nucleotide sequence isolated from the Sargasso Sea
attgaaagacaacaaaatgcaaattactaaaaatgaatctttatctaaggtagatgagaagttttttgatttaaaaaataataaaaaattagctttgatgccttttataatggctggggatcccaatattgaaataacttctgagatattattaagtttacaagaaaacggggctgaccttatcgaattaggtataccttacagtgacccactagcagatggacctgttattcaagtgtcggcctctcgcgccttaaagtcaggtactagcccaagaaaagttattaaacttttagagtctttaaagggtaaattaaatattcccatcatccttttttcttacctaaatccattactatgttttggctttgaaaagttttgtgagatggcatctaatgctggagtttcaggactaatagttcctgatctccctctagaggaagcttataaattttctaaaatagttagcaatcattccatggacttgattttattggtagctccaactactccttttgaaagaatgaaacaaatatctaatcatacaaaaggctttacttatttagtaagtgttacaggggtcactggtgagagaaacgaaatggaaaatagggtagaaaatcttattgctaaattaaaagatgtaaatagcaatccaattgctgttggttttgggatatccactccagaacatgttaataaagttcgtgagtggggagcagatggagtaattattgggagtgcatttgtaaaacgaatttctagttcaagtgaaaaagatgtcgtcgatcatgttggtgaattttgtaaggaaatgcgtttagctgcagataaaaaaaaatacatacaaaaatag

SEQ ID NO: 281366 - DNA, 867 bp, Unknown
  Bacterial polypeptide expressing nucleotide sequence isolated from the Sargasso Sea
aaatactgcagtagcacaagccttttttaataaagaagaaggaactaaaaaaattactactgaaacaggtgctggacaatggggtagttctttagcatttgcatgtcaaatatttggaatcgaattagatgtgtatatggttaaagttagttttgaacagaagccttatagaaaattaattatgcaaacatatggcgctagttgtttcgcaagtccttcgaatagaacagatagtggaaaagctatactagccaaagatcctaacaatacaggtagtttaggtatagctatttctgaagctgttgaaatggcagcaaaagatcctaatacaaaatactcgcttggaagtgttttaaaccatgtattaatgcatcagactatagttggtaatgaagctttactacaaatggaaatggccggagattatccagacatattagtcggttgcacaggtggtggaagtaatttttcaggattagtatttccttttttaggagaaaaatttagagaaaataaaaatacaagagttattgcttgtgaaccaaaatcttgtccttcgttaacaaaaggtaaatacgtttatgattttggtgacacaggaagacttactcctcttgtaaaaatgcacacattaggatcgcaatttattcctccagcaacacattctggtggtttaagatatcatggaatggcacctatggttagtcatttaaaagaaattggcgcaatagaagctcaagcttttggtcaaaaagaatgttttgaagctggtgtaaactttgcaagatcagaaggaatagttcccgctcctgaagcaacacatgcagtcaaaggtgctattgctgctgcaatggaatgtaaaaaaaa

SEQ ID NO: 281367 - DNA, 583 bp, Unknown
  Bacterial polypeptide expressing nucleotide sequence isolated from the Sargasso Sea
ctcgtcgttttcgtctttgcaaaatggaaccaaggtcgagaatgtactggccgagctcagtctctttcgcgccgagcgagagatcccagtggtgctgtttacttacctgaatccagtccttcgttatggattggaagattttcttttagatgccaccgaatctggggccagcggacttcttttgaccgacctccctgttggagcggactacggagtcgagcgcgcggtagctgagagtccgctcgattttatccgactggtagctccgacgacccgagaggagcgggtgccggaaatcgccgagagtggttcaggatttctttactacatctcgcgagccggggtgacaggtgttcgttcccaacttcgagagagcctaggtgatgaagtagctgcgctccgctctcaggtagggttacctgtagctgtgggttttggcatttcgacgcctgaacaggcacgcgaagttgggcgtgcttccgacggagttgttgtcggcagtgccctcgtccgaattatggatgaatctggtgtggaagcaggagctcgcttcgttgctcggttgagggccgcgctagactga

SEQ ID NO: 281368 - DNA, 439 bp, Unknown
  Bacterial polypeptide expressing nucleotide sequence isolated from the Sargasso Sea
gatgaaccgtattaaacaaacttttaatgaacttaaaaaaaataatcaaaaagctgttggaatttttttaacagctggagatcctgattttaaaagctctcttaatctaataaaaaaattaccagaaaacggtgtagattttattgaaattggaatgcccttttctgatccaatggctgacggaccttcaattcaactatcaagtcaaagagcccttaaatcaggcacaaacttaacaaaatgtttgtctctagtagaaaactttagaaaaaaaaataatcatacaccaattatcttaatgggatattacaaccctatatatagatttggtaaaaaaaattttataaataaatgccttgaaattggagttgatggcctaattattgttgatttaccaccagaagaagatgaagaattttatattgaagctgaaagaaat

SEQ ID NO: 281369 - DNA, 611 bp, Unknown
  Bacterial polypeptide expressing nucleotide sequence isolated from the Sargasso Sea
tatgaaagataacaaaatgcaaattactaaaaatgaatctttatctaaggtagatgagatgttttgtgaattaaaaaataaaaaaaaatttgctttaatgccttttataatggctggggatcccaatattgaaatcacgtctgagatcttattaaagttacaagaaaatggagccgaccttattgaattaggtatcccgtatagtgacccacttgcagacggacctgttattcaagtggcggcatctcgcgccttaaagtcaggtactagcttaagaaaagtaattactcttttagagtctttaaagggtaaaataaatatccccatcatccttttttcttacttgaatccattactatgttttggctttgaaaggttttgtgagatggcatctgatgctggagtttctggactaatagttcccgacctccctttggaggaagcttataaattttctaaaatagttagtaaccattctatggatttaattttattggtagcgccaactaccccttttgaaagaatgaaacaaatatcaaatcatacaaaaggctttacttatttagtaagtgttacaggtgtcactggtgagagaaacaaaatggaaaata

SEQ ID NO: 281370 - DNA, 649 bp, Unknown
  Bacterial polypeptide expressing nucleotide sequence isolated from the Sargasso Sea
tatgtctgacaaaattaaatattttctcgaagaaagcaaaatgccaaaaacttggtataatattgctgctgatattccaaaaccactttcgccagttcttcatcctggtacacttaaaccaattggaccggatgatttagctccattatttccaatggcacttattggacaagaagtttcacaagatagagaaattgaaattccagaaccagttagagaaatttataaacaatggagaccttcaccattgtatagagcaagaaaattagaaaaggcattagatactacagctaaaatttattacaaatatgaaggtgttagtccgacaggaagtcacaaacctaatactgctgtagctcaagctttttttaataaagaagaaggtacaaaaaaaattacaacagaaacaggcgcaggacagtggggaagttctctagcatttgcatgttcaatttttaaaatcgaacttgatgtttatatggttaaagttagttacgagcaaaaaccatatagaaaaatgattatgcaaacttttggagcaaattgttatgcaagcccatcaaatagaactccaacaggtaaagcaattttagaaaaagatccaaacagtactggaagcttaggaatagctatatctgaagcagtggaa

SEQ ID NO: 281371 - DNA, 91 bp, Unknown
  Bacterial polypeptide expressing nucleotide sequence isolated from the Sargasso Sea
tttggaatcatttggatctttgcccgatattttgcttgcttgtgtaggtgggggatcaaatgcaatgggagcttttccatccttttgttaa

SEQ ID NO: 281372 - DNA, 156 bp, Unknown
  Bacterial polypeptide expressing nucleotide sequence isolated from the Sargasso Sea
aatgcaatgggagcttttccatccttttgttaaagacactaatgtgcggcttattggagttgaagccgcaggaagcggagttgatactgacaaacatgctgccactatcactaaagggtcagttggaattttgcatggatcaatgagtcttctctt

SEQ ID NO: 281373 - DNA, 303 bp, Unknown
  Bacterial polypeptide expressing nucleotide sequence isolated from the Sargasso Sea
attcggtgtccgcaggcctcgactactcgggtgttgggccggagcactgctacctgcgagattacgaccgggtcgaatacgcttatgcgacggatgaagaggcgcttgaagcgttccaacttctgagccagcttgaagggatcatacctgcgctcgagagttcgcacgcgatagctgaagtctgcaagatggcgccgaccatggattcagatcaggttgtcattgtgaatctctcgggaaggggagacaaggatgtgcagcaggctgcagtaatgatagacggtatagacgaggtaggatgag

SEQ ID NO: 281374 - DNA, 244 bp, Unknown
  Bacterial polypeptide expressing nucleotide sequence isolated from the Sargasso Sea
cttggctgaagattctggaagggctgaatatgttgctgttagtgacgatgccgcactaaaagcatttcatgaagtttctgagctggagggaataatacctgcgcttgaaacagctcatgcttttgcatatctagatactctaatgaaagagtttgataagaattccaatatcattgtgaatgtatcgggacgaggtgataaagatattaacactgttgcaaatattgatggaataaagatttga

SEQ ID NO: 281375 - DNA, 195 bp, Unknown
  Bacterial polypeptide expressing nucleotide sequence isolated from the Sargasso Sea
gatgacaagaatagatcagacctttaaaaagcttaaatctgagggcacaaaagcttttgtttcatatattatggcaggagatcctgatttcgaaacatctttagaattggtaatgggacttccagctgctggtgttgacataatagagttaggtttgcccttcactgacccgatggcggatggcccaacaattca

SEQ ID NO: 281376 - DNA, 335 bp, Unknown
  Bacterial polypeptide expressing nucleotide sequence isolated from the Sargasso Sea
aatgactaatttaattagtcaggcatttaaaaatgatggaaaaaaactagtaacatttgttacaggaggtgatcctgatttcgaaacaagtttaaaaattattaagacaataattaataatggagctgatattatggaaatcggaatgcctttttctgatccaatggctgatggtccaacaattcagttatcaagtaatagagcaataaataaaggaattgatttagaaaaaattttctctctagcctccgaggcaaagaaaataaaaggtgatctccctattattttaatgggttactataatttgattctatattttggaattgagaagtttg

SEQ ID NO: 281377 - DNA, 858 bp, Unknown
  Bacterial polypeptide expressing nucleotide sequence isolated from the Sargasso Sea
tcggtagtcctactcgtttcatcaaattagagaatttaacagaacatgtaggtggggctcaaatttggtctaaagttgtatctgatgcaaatggaggtgcgcataaaatttataatgcaactgttcactgtttactggcaaagcgttctggaaaaaaagttatttgtggagacactggtgctggatatgcgggtaaaatgttaagtatggcagccaaaaagtttggtttaaaatgcaaaatattcatgggtgcaaaagatattcaaagacaacaaccaaatgtaagagcgatgaaaaaaaatggagcagaagttattcccgtatactctggaagtcaaactctcgtagatgcagtatctgaatgcatgcgttactgggttgcaaattgtgataaagttgcaatgtgtgttggtagcactgttggtccagctgtctttgttcgtatttgtggatggagtacaagtcaaatatcaagagaattaaagactcaattgattgataagtttggatcgattccaaaaaaactcaaactttataattgtgtcggaggaggaagctctagttttggtttttggaatgaatttatggattacgataaaaaacaatgtgaatttattggtgtagaagctggtggtccagagaaaagtaaaaagcacgcagcaccgctgacatatggatctaaaataggaattctccatggtgcagctcaatatgtaaatcaaaattccgatggtcaaatagaagaaactgagtcaatttctgctggactagattatcctggcatctctccacttcattgttttcttaaagatacgaaaagagcgagatacacagcagcaagtgatgaggaagcttaaa

SEQ ID NO: 281378 - DNA, 517 bp, Unknown
  Bacterial polypeptide expressing nucleotide sequence isolated from the Sargasso Sea
tgataacattaccccagtagttttgatgggatattttaaccctatctacaacctgggtattttcaactttttagagcgctgtaaatctgttggtgtagatggtttaatagttgtcgacctaccacctgaggaagacgaggaactatgcattccggctattaatcacggtctaaattttattcgattagcaaccccaaccagcgatgataaaagattacaaaccgttttaaaaaatacatccggctttctttattatatttctatgactggtataactggagcactgattgaaaaaaccaactctataaatcagaaagtaagaaatttaaaaactttgactccactcccagtatgcgttggcttcggggtaagagacaaaaaaatggtaaagcagttgtgctcagtggcagatggcgttgtggtaggatcagcaatagttagacagatagaaaaaaataaatcggtagacgagatattaaagttttgcaaagaacttgctgatggtactaatctttag

SEQ ID NO: 281379 - DNA, 745 bp, Unknown
  Bacterial polypeptide expressing nucleotide sequence isolated from the Sargasso Sea
tatgtcagaccagctaaaatatttcttagatgaaagtaaaatgccaaaaacttggtataatattgctgctgatttgccaaaaccaatggagccacctcttcacccgggtactttaaagcctattggaccagatgatttagctcctttatttccaatggcattaattgggcaagaagtttcacaagatagagaaattgaaattccagaacctgtaagaaaaatatacaaacaatggagaccttcgccattgtatagagcaagaaatttagagaaatttttagatacaccagcaaaaatttattacaaatatgaaggggttagcccaacaggaagtcacaaaccaaatactgcagtagcacaagctttttttaataaagaagaaggaactaaaaaaattactactgaaacaggtgctggccaatggggtagttctttagcatttgcatgtcaaatatttggaatcgaattagatgtatatatggttaaagtcagctttgaacagaagccttatagaaaattaattatgcaaacatacggcgctagttgtttcgcaagtccttcgaatagaacagatagtggaaaagctatattggccaaagatcctaacaacacaggaagtttaggtattgctatttcagaagcagttgaaatggcagcaaaagatcctaatacaaaatactctcttggaagcgttttaaaccatgtattgatgcatcaaactatagtggaaatgaagcattactgc

SEQ ID NO: 281380 - DNA, 628 bp, Unknown
  Bacterial polypeptide expressing nucleotide sequence isolated from the Sargasso Sea
tatgacctcgcgcataccaaatatttttaacaaaaacaaaagcaaaaacaaaaaaacatttattagttatttggtttgtggtgatccatcaaatgacattacattgtctgctatgcatacaatgtctaaatccggtgtagatattattgagttgggtattccttttacagatcctatagcagatggtcctactatacaaaaaagcatagatagatctctaaaaaataatacttcattacatgacgtaatttcagttgttaaggaattcagaaaagataacagcgatacagccgttgtgttaatgggctatatgaaccctgtgcacaaaatgggtattgctaaatttgccaaacaaattaatgatactggcattgacggagtattaattgttgattcaccacctgaagaatcggtgatgttaaataaatatcttacgaagtataaaaaatcacacatttatcttgcatcgccaacaactactgatcagaggatgaaaaatatttctaagatgtcatctggatatgtctattatgtaactatcaaaggaataacaggatccaagttgtccaatgtgaacagtatccgaacgaatgtgaataaaattaagaaatattctaataatagttta

SEQ ID NO: 281381 - DNA, 238 bp, Unknown
  Bacterial polypeptide expressing nucleotide sequence isolated from the Sargasso Sea
ctcaaagatttaaaaagagttgagtacactgcagtcacagatgacgaggcattagatgcttttttcacactcactcagaaagaaggtattatcccggcacttgaaacagcacatgctttggcatatgcatttcaacttgcaaaaaaacttaaaaataaaaaaatcctcctcaatttatctggccgtggggataaggatattgatacgattgcaaaactgaaaaacattaagctatgac

SEQ ID NO: 281382 - DNA, 850 bp, Unknown
  Bacterial polypeptide expressing nucleotide sequence isolated from the Sargasso Sea
tttaataggacaagaagtttctcaagaaagagaaatagaaataccggaacttgtaagagaaatttataaacaatggagaccatcaccattatacagagctagaaaattagaaaaacatttagatactcctgcaaaaatttattacaaatatgaaggtgttagtccttctggcagtcacaaaccaaatacagctgttgctcaggcattttataataaagaagaaggtacaaaaaaaataactactgaaactggcgcaggacaatggggaacttctctagcatttgcgtgtaaattatttggaattgaattagatgtttacatggttaaagttagttttgaacaaaaaccataccgaaaacttgtaatgcaaacttatggtgctagatgtgtagctagtccatctaatgaaactgatagtggaaaagcaattttagcaaaagatccaaacaatacaggtagtttaggtatagcaatttcagaagcggttgaaatggctgcaaaaaatccagatacaaaatatgcattaggaagtgttttaaatcatgtattaatgcaccaaactattgttggtaatgaagcgctacttcaaatggaaatggcagacgattatccagatattttagttggatgtacaggtggtggaagtaatttttcaggtttagctaatccttttttaggaaaaaattttagagagggaaaaaagacaagagttatagcgtgcgaacctaagtcttgcccaacattgactgaggggaaatatgtatatgattttggtgatactggtaaattaacacctttagtaaaaatgcatacacttgggtcacaatttattcctccagcaactcattca

SEQ ID NO: 281383 - DNA, 649 bp, Unknown
  Bacterial polypeptide expressing nucleotide sequence isolated from the Sargasso Sea
ctcggaatcccctacagcgatccgcttgcagatggccctgtgattcaggccgctgccagccgagcacttcatgccggtacaactccagccaaagtcatggagatgttgtcgacgcttccggatgactttgacttacccctcattctcttttcctacagcaatcctctgctcaatcttggtatgcagcgattctgtgagcaggctgctggcgctggtgcatcagggttggtgattcccgatctccccctggaagaagcagatcgtctttcaccgattgcaacacagcatggtcttgatctggttctgcttgttgcgcccaccactccggaagctcggatggccagaatcgctgagagcagccgaggtttcacttacctcgtcagtgtgacgggtgtcaccggtgagcgagctcagatggaaaccagagttgagggactggtgcagcagctgaaacaaagttcaccagttcctgttgccgttggtttcggtatttcaggaccagaacaggtcaaacaggttcgtcgttggggggctgacggtgcgattgttggcagcgctctcgtcaaaaggatggcggcggcgggagcagccaacatggcctcagaggcagaaagcttttgccgcgaactccgggaggcatgtcattgat

SEQ ID NO: 281384 - DNA, 765 bp, Unknown
  Bacterial polypeptide expressing nucleotide sequence isolated from the Sargasso Sea
aaacaatggagaccatcaccattgtacagggcgagaagtttagaaaaacatttagatactccagcaaaaatttattacaaatatgaaggagttagtccttctggtagtcacaaaccaaatacagcagttgctcaagcattttacaataaagaagaaggtacgaaaaaaataactactgaaacaggtgctggtcaatggggaacttcattagcatttgcatgtaaattatttggaattgagttggatgtttatatggtaaaagtaagctttgaacaaaaaccatatagaaaacttgttatgcaaacttatggagcaagatgtgttgcaagcccttcagacgaaacagatagtggaaaagcgatattggcaaaagatcctaacaatacaggtagcttaggaattgcgatttcagaagcagttgaaatggctgctaaaaatccagatataaaatatgcgttaggaagtgtgttaaatcatgttttaatgcatcaaactattgtaggaaatgaagcaatattacaaatggaaatggctgacgattatccagatattttagttggttgtacaggaggtggaagtaatttttcaggtttagtaaatccatttttaggaaaaaactttagagaaggaaaaaaaacaagagtaattgcatgtgagccaaaatcatgcccaacattgactgaaggtaaatatgtttacgattttggggatactggaaaattaacaccactagtaaaaatgcatactttgggatcacaatttatt

SEQ ID NO: 281385 - DNA, 745 bp, Unknown
  Bacterial polypeptide expressing nucleotide sequence isolated from the Sargasso Sea
atgtctgataaaattaaatttttactagaagaaagcaaaatgccaaaaacttggtataatattgctgctgaccttccaaaacctctatctccagttttacatcctggaacacttaagcctattggaccagatgatttagctccattatttccaatggcacttattggtcaagaagtttcacaagaaagagaaattgaaattccagaacctattagagatatttacaaacagtggagaccttctccattataccgagcaagaaaacttgaaaaagctttagatacacctgcaaaaatttattacaaatatgaaggtgtgagtcctactggaagtcataaacctaatactgctgttgctcaggcattttacaacaaagaagaaggaacaaaaaaaattacaactgaaactggtgcgggacaatggggaagctctcttgcttttgcatgttcaatttttaaaatcgagctagatgtttatatggttaaagtaagctatgagcaaaaaccatacagaaaaatgattatgcaaactttcggtgcaaactgttatgcaagtccatctaaccgaactccaacaggtaaagcaattttagaaaaagatccaaataattcaggaagtttaggtatagctatttctgaagctgtagaaatggccgcgcaggatgaatcaactaaatattctcttggtagtgttttaaatcatgtattaatgcatcaaaccatagtcggaaatgaagcaataatgc

SEQ ID NO: 281386 - DNA, 706 bp, Unknown
  Bacterial polypeptide expressing nucleotide sequence isolated from the Sargasso Sea
gatccgtcaaccaggtatgctcttggtagcgtgttaaaccatgtccttcttcaccaaacgatcatcggcgaagaagcgctactgcaacttgccaaagtaggagagacccctgatatcttggtaggctgcaccggaggcggttccaattttggtggattgtcatttcctttcttgagagagaagctagctgggagaatgaatccaacgataaggtgtgtggagccagcagcatgtccaacactaaccaagggagagtaccgttatgatttcggagatactgctggcctgactccactaatgaaaatgcacactctcggacatcaatttatccccgagcccatccacgctggcggactgagataccacggcatggctcctctggtatcccacgtctatgatctgggtctggtcgaagccacgtcggtgccacaaactgcctgttttgaggcggctgtccaatttgcacgatccgagggcattgtgcccgcaccggaacctactcacgccatagcctcggcaatcgatgaagcccttaagtgcaaagagaccggcgaagaaaaggtcatcttaaccgctctatgcggtcacgggcatcttgatcttcctgcttatgaaaaatttctttctggcgagatcacagacctagatctccctgaagagagcatctcagaatcgatgaaaagcgtccccgttatagacgggtgaa

SEQ ID NO: 281387 - DNA, 251 bp, Unknown
  Bacterial polypeptide expressing nucleotide sequence isolated from the Sargasso Sea
tccgttcatctgcgcgggtgatccgaatttggacgcgacgaagaaggcgctgaaggtgttggacgacgccggggcggatatcatcgagctcggcgtgccgtacagcgacccgttggcggatggaccggtgattcaagcgtcggcgacgcgagcgttggcgaacggggcgacgctgaataaagtgatcgatctggtgcgagaggtgtcgccgacgatcgcggcgccgatcgtgatgatttacgtattataat

SEQ ID NO: 281388 - DNA, 661 bp, Unknown
  Bacterial polypeptide expressing nucleotide sequence isolated from the Sargasso Sea
tatgtttggcggtcaatacatagaggacagaataaaggctcccaaagcgcctggacctgcgatcatcccattcataactgcaggttatcctaatgctgaggactttaaacagacactctatgatctcgcaaagaaagcggatgtgattgaaattggggttccattttctgaccccatggctgatggggtgactattcagagatcaagccatatggccatagaaaatggggtgacgttgacatggattttcagtcaacttaaagaaattaaactagacaccccaattgttctgatgagctatttaaatccactttatgtatttggcttgaaagagcttgtcgaggcttcgattgaatccggagttgacggctatattgttccagacttgccaattgaagaaagcaaggaactcaatgatcaactgacagacgctggtctagcattgattcaattggtcacaccagcgacaccatcagatagaattgaaatgattaccaaaaaaagctcaggatttatttatgcagtgactgttaagggcgttacagggggagaaaatgctttgtctgctgatgtgacggattacttggaacaagttcatgagatttcaaaaatacccgtatgcgccggctttggtatcagagataagtctgatgttgaatga

SEQ ID NO: 281389 - DNA, 778 bp, Unknown
  Bacterial polypeptide expressing nucleotide sequence isolated from the Sargasso Sea
gatgaataatttagacacacttcctaagaaaaaaatactctccttatttatgacatgtgggtttcctacactaaaccaaagtaaaaaggtttttaatgaaatgttatctcatcaaccagatattattgagtttgggcttcccttttctgatccgatggcagatggccctattatccaagaggcaaataaacttgcacttagatcaaaattatcaacacaacaatcacttaatttaattaaagaattaagtaaatctaaaaataatacttcatttgttattatgtgttatttaaatactgttcgtaaatttggattaaataaattcatcaaaaatattaaaagtattgttgatggtataataattgttgatttgccttttgaagaagaagatgcaatcaaaaagtcgttgtctaaaaataacatccacttgattaagttaatctctccaatgacagataagaaaagatctaaaaaacttttaaaaaattcaaaaggattcatctattatatatcagcaactggaatcactggttcaaataaattagattacaaagaaataaataaaaatgttaaatctataaaaaaaatgtcttctgttcctgttttagttggatttgggatcaagtctaaaaaagatgtaattgatatatccaaaaaaacaaatgcggatggtgttataattggctcagctcttattcaaaaatattttgatctaaaaatggattttgataagtacattaaaaaccttaaaaaatttattaaagaggttaaggtttaa

SEQ ID NO: 281390 - DNA, 208 bp, Unknown
  Bacterial polypeptide expressing nucleotide sequence isolated from the Sargasso Sea
ttctgaccaagaggtcattgaggcgttccaactattgtctaaaacagaaggcattattcctgctcttgagtcggcgcacgccttagcttgggtagtgcgcgaagcagcatcgcttcagggacaagtagttcttctgaacctttcaggtcgaggcgacaaagatgtggaccaaatgatggaggttttgggaatggacgaagtcgggtga

SEQ ID NO: 281391 - DNA, 535 bp, Unknown
  Bacterial polypeptide expressing nucleotide sequence isolated from the Sargasso Sea
catgaaagataataaaatgcaaattaataaaaatgaagtcttatcaaaggtagatgaaaagtttcatgagttaaaaaataataaaaaattagctttgatgcctttcatcatggctggggatcccaatattgaaataacctctgaaatcctattaaaattacaagaaaatggggctgaccttattgaattagggataccatatagcgatcctctcgcagacggacctattattcaattagctgcttctcgtgccttaaagtcaggtactacttcaagaaaagtaattacacttttgggatctttaaaaggtaaattaaatattcccatcatacttttttcttacttaaatcctttattatgttttggatttgaacagttttgtgagatggcatccaatgctggagtttctggactaataattcctgatctccctttagaggaagcttataaattttctaaaatagttagtacttattctatggatttgattttattggtggctccaactactccttttgaaagaatgaaaaaaata

SEQ ID NO: 281392 - DNA, 738 bp, Unknown
  Bacterial polypeptide expressing nucleotide sequence isolated from the Sargasso Sea
ttactggtggcgatccagatatcgacacttcagaaaatattctaagtgccattatttcaagcggtgcagatattattgaaataggaatgcccttttctgaccctatggcagatggtcctacaattcaattatctagcaatagagctataaaacaaaatattgatctggataaaatatttttaatttgtaagaatattagaaaaaaaaatgacaatatacctattattcttatgggatattataacgtaatatttagttatggagtaaacagattcgttgaagaatgtaaaaataatggcatagatggtttaatagtagtagatttacaacctgaagaagataaagatttgttaaatgcattgaatgaaactgaattagatttaattagacttgtcacgccgacaacagataataaaagattagaaaaaatattagaaaattcttccgggtttttatattatgttaccattactggaattacaggacaacattctgcaaatataaatgagttaaaattatcaatagaaaaaattaataaaaaaacaaatttaccaatagtttctggatttggtataaaagatgaaaaacaagtatctgaaatatgtaaaatttgtgatggcgctgttgtgggctcttctttagtaaaaattattgaagaaaatttgaataataaatctaaaataattaaacttgtttcagaatttgttaaaaaattaaaacaaggaactaaaatatgaa

SEQ ID NO: 281393 - DNA, 832 bp, Unknown
  Bacterial polypeptide expressing nucleotide sequence isolated from the Sargasso Sea
cggtttaaatgtaaaattttttatgggggcaaaagatataaagagacaacaacctaacgttagagcaataaaaaaaaatggagctgaagttataccagtttactctggtagccagacacttgttgatgctgtttctgaatgtatgcgattttgggtagcaaattgtgatacaacagcaatgtgcgttgggagcaccgtaggtccagctgtttttgttcgtatctgtggatggagcacaagtcaaatatctagggaactaaaagtccaattaatagatgaatttggttcaattccaaaaaaacttaaactttacaattgtgttggaggtggtagttcaagttttgggttttggaatgaatttatggattatgacaagagacagtgtgaatttattggagtggaggctggtggacctaaaaaaagtaaaaagcatgccgcacctctaacttacggatctaaaataggtattcttcacggtgctgctcaatatgttaatcaaaactcagatgggcaaatagaagaaacagaatcaatttctgcaggacttgattacccaggaatttctcctcttcattgttttttaaaagataccaaaagagcaagatatacagctgcaagtgatgaagatgctctatgggcttacaagatggttaccaagtacgaaaaattaaagccttcattagaacctagccatgcattctcggtagcaataaaagaatcaaaaagatttagtaaagatacgattgtagtagttaacagctgtggtgatgcatataaagatcgaggaattttgcaaaaaaaattaggaaaaaaatatgttaaatccaattag

SEQ ID NO: 281394 - DNA, 534 bp, Unknown
  Bacterial polypeptide expressing nucleotide sequence isolated from the Sargasso Sea
aaataaatatccccatcatccttttttcttacttgaatccattactatgttttggctttgaaaggttttgtgagatggcatctgatgctggagtttctggactaatagttcctgacctccctttggaggaagcttataaattttctaaaatactcagtaactattctatggacttaattttattggtagcgccaactactccttttgaaagaatgaaacaaatatcaaatcagacaaaaggctttacttatttagtaagtgttacaggtgtcactggtgagagaagtaaaatggaaaatagagtagaaaatcttattgctaaattaaaagatggtaatagcaatccaattgctgttggttttggaatatcaactccagaacatgttaataaagttcgtgagtggggagcagatggagtaattattgggagtgcatttgtaaaacgaatctcgagttcaagtgaaaaagatgttgtcgatcatgttggtgagttttgtaaagaaatgcgtttagctgctgatcaaaaaaaataaa

SEQ ID NO: 281395 - DNA, 475 bp, Unknown
  Bacterial polypeptide expressing nucleotide sequence isolated from the Sargasso Sea
cctaggtctttttcatgaatttttagacgactcaaatgtagaaatgattgctgtagaagcagctggacatggtatcactagcaataaacatgcagcaagtttaactggaggcaaaccaggtgtacttcatggtaataaaacatatttgctacaatcaaatactggtcaaattcaagaagcccattctatttctgctggattagattatccaggtattggacctgagcattcatttttatttgaagaaaaaagagtaacttacatgtctgcaacagatacagaggctttagaggcttttcagtattgttgcaaattagagggaataattcctgccttagaaccagcgcatgcactggctgtattaaaaagaatagcaaaaaactataataaagaaaaaattattgtcatgaatatgtgtggcagaggtgataaagatatttttactatagctgatgaattgaaaataaaaatttaa

SEQ ID NO: 281396 - DNA, 419 bp, Unknown
  Bacterial polypeptide expressing nucleotide sequence isolated from the Sargasso Sea
aatgactaatttaattagtcaaatatttaaaaataaagaaaaaaaattagtgacatttgttactggaggtgatcctgatctagatactagtttagaaattataaaaactattattagtaatggagctgatataattgaaattggaatgcctttctctgatccaatggctgatggtcctacaattcaattatcaagtaatagagcaataagtaaaggaattgatttagaagatattttctatttagctaccgcggcaaaaaaaataaaaagtgatctccctattattttaatgggttactacaacttgattttatattttggaattgagaggtttgtaaaaagatgtaaagaaaatggggttgatggattaattattgttgatctacaaccagaagaagatggagatttgatcaatgaac

SEQ ID NO: 281397 - DNA, 595 bp, Unknown
  Bacterial polypeptide expressing nucleotide sequence isolated from the Sargasso Sea
agaggcacgacaacagatgcttgataccacagggaaacttcctgaccggatttatgcgtgtgtaggaggtggatcaaacgcaagtggaatcttcctcccttttctggatgatgatacagttgaattagttggagtagaagcgggcggaagaggagtggatacgggttcacatgcagcacgcttttgtggcggaaacgttggtatagctcaaggatataaaacttattttttccaggacgaagaaggacaaatgcgccacactcattcaattgctgcaggtttggactacattggagtaagtccgattttgagtcatctccatgataaaaaaagggtgcgatttacagcgactactgatgaggaagttatttctgcaacaaaacatctaattcgtactgaagggataattcctgccctagaatgtagtcacgcttttgcttcagttattgaagaaactcctcatatacctaatggatctcatgttcttattaacctctcaggccgtggtgacaaagatatatttaatatagctgaggctattggcgacaaaaaatgggataaattcctgcgcgaaaaagccttattgagtcaatga

SEQ ID NO: 281398 - DNA, 973 bp, Unknown
  Bacterial polypeptide expressing nucleotide sequence isolated from the Sargasso Sea
gcagatctcccaaaaacctatggagccacctcttcaccctgcacattaaagccaataggaccagatgatttagctccattatttccaatggcattaattgggcaagaagtttcacaagatagagaaattgaaattccagaacctgtaagaaaaatatacaaacaatggagaccatcaccattgtatagagcaagaaatttagagaaatttttagatacaccagcaaaaatttattacaaatatgagggggttagcccaacaggaagtcacaaaccaaatactgcggtagcacaagctttttttaataaagaagaaggaactaaaaaaattactaccgaaacaggtgctggccaatggggtagttctttagcatttgcatgtcaaatatttggaatcgaattagatgtatatatggttaaagttagttttgaacagaagccttatagaaaattaattatgcaaacatacggtgctagttgttttgcaagtccttcgaatagaactgatagcggaaaagctatactagccaaagatcctaataatacaggcagtttaggtatagctatttcagaagcagtagaaatggcagcaaaagatcctaatacaaaatattcacttggaagtgtattaaaccatgtgttaatgcatcaaactattgttggtaacgaagcattgctgcaaatggagatggcagatgattaccctgatattttagttggctgtactggtggcggaagtaatttttcgggactagttctacctttcttaggaaaaaaatttagagaaaacaaaaatacaagagtaatagcatgtgaaccaaaatcttgtccttcgttaacaaaaggtaaatatgtttatgattttggtgacacaggaagactaactcctttggtaaaaatgcatacattaggatcacaatttattcctccagcaacgcattctggtggtttgagatatcatggaatggcacctt

SEQ ID NO: 281399 - DNA, 805 bp, Unknown
  Bacterial polypeptide expressing nucleotide sequence isolated from the Sargasso Sea
atgtctgatcagttaaaatattttctagaagagggcaaaatgccaaaaacttggtataatattgctgctgatctaccaaagccaatggagccacctcttcaccctggtacgttaaaacctataggaccagatgatttagctccactatttccaatggctttaattggccaagaagtttcgcaagatagagaaattgaaattccagaacctgtaagaaatatttacaagcaatggagaccttcgcctttatttagagcaagaaatttagaaaaatttttagatactccagcaaaaatttattacaaatatgaaggagttagcccaacaggaagtcacaaaccaaacactgcggtagcacaagccttttttaataaagaagaaggaacaaaaaaaattactaccgaaactggtgctggtcagtggggaagctctttggcatttgcctgccaaatatttggaatcgaattggatgtatatatggttaaagttagctttgaacaaaaaccttatagaaaattaattatgcaaacttatggcgctagttgttttgcaagtccttcggatagaactgatagtggaaaagctatactagccaaagatcctaacaatacaggtagtttgggtattgcaatttcagaagctgttgaaatggcggcaaaagatcctaatacaaaatattcgcttggaagtgttttaaatcatgtattaatgcatcaaactattgttggtaatgaagcattactgcaaatggaaatggcaggggattatccagatatcttagttggctgtaccggtggggaagtaa

SEQ ID NO: 281400 - DNA, 796 bp, Unknown
  Bacterial polypeptide expressing nucleotide sequence isolated from the Sargasso Sea
atgactgatacattaagtcagatctttaaatataatagcaaaaaattagtaacatttgtcactggtggagatcctgattttaatacaagtaataaaattataaaaaaaatgattgataacaaaatagatataatagaaattggcatgcctttttccgatccgatggcagatggccctacaatacaattatcgagtaatagagctcttaaaaatgatataaatttagatcatatttttaaattagcttcaaatgctaaaaataaaaatattaaattgccaataatattaatgggttattataatttaataatgcattatggtattaaagaatttgtaaaaaattgtgttattaatggagtggatggattaattattgttgatttgcaaccagaggaagatcaagatttagttaatgaattaaataaaaataatattaatttaattagattaattacaccaacaacaaatgaaaatagacttaaattaatacttaaaaatgcaagtggttttttatattatgttagtgtcatgggtacaacaggtcaaaaatcagctaacatagatgagttaaaaaaatcaataagtttcataagaaaatttactgatttacctattattccaggttttggtgtaaaagataaaacagatgtaaataatatctgcaagattgcagacggtgctgttgtaggttctagtattataaaaataatagaaaaaaacttagatgataaagttttaatgttaaaaaaaattgataattttacaaaagaattaaaagaaggaacaaaaatatgaa

SEQ ID NO: 281401 - DNA, 648 bp, Unknown
  Bacterial polypeptide expressing nucleotide sequence isolated from the Sargasso Sea
ccttttccgatccgctggcggatggactgaccaatcagttggccgctcaaagagctttggaggcggggacgacgcgcgaagatgttttcgatctggtgagaaaaattcgagagaaagacgggcaaacgcccattgtattctatacttactacaacctgatgttcagcggtggattagaggcctacattgctgaggcaaaggaggctggggtggacggactgctcgttttagatctcccaccagaggaagctggagactttatggaagcctgtcggaagatcgaaatgaagacagtattcctcctggctccaacgacacccgaggagcgagtcgaatacatcgctcaaaacgctacaggattcatttattacgtatctagaactggtgtgaccggtgttcgcaaagatctagcttccgatttgcaggaaatggtcgatatgatcaagcgtcactcggataactcgcttgtggttggatttggaatacagaatcctgatcaagtgaatgctgtagcccgactcgcggatggcgttgttgtgggcagtgcgattgtgaacactataaaggacaatctcgaagacgaaaagaaaatgcttgagcgaatcgaatctctggtgaccgatctcgtcgggggaacgcagctttaat

SEQ ID NO: 281402 - DNA, 873 bp, Unknown
  Bacterial polypeptide expressing nucleotide sequence isolated from the Sargasso Sea
tatagagcaagaagactagaaaagtatttagatactccagctaagatatactataaatatgagggagttagccctacaggtagtcataagcctaatacagcagttcctcaagcgttttttaataaagaagaaggggtaagtaaaatttttactgaaactggagctggtcagtggggaagctcacttgcttttgcaggacaaatgtttggtatagatattgaagtatttatggttagggtaagttttgatcaaaaaccctatagaaaactaatgatgcaatcctttggaggaacttgccacccaagtccatctgatcttactgattttggaaaaaagcttttggctgaagatgcaaataatcctggaagtttgggaattgcaatatctgaagcaattgaagctgttgtaaaaagtgaaggtaaagcaaaatacgcacttggaagtgttttaggacatgttcttatgcatcaaactataaatggtaacgaagcaataatgcaaatggaacaagctggtgactatcctgatataattgtaggttgtacgggaggagggagtaatttagcaggtttaatgttcccatttcttggacaacaattaagaggtggaaaaaaaatagatataataggttgtgagcctctttcgtgcccttcatttactaagggtaaatatgcatacgatcatggagatatggcaagaatgacacctttaattaaaatgcacacactaggatcagattttttaccacccgctaatcattctggaggtttaagataccatggaatgtcttatcatttaagtcatctatatgatttaggattaatgagggctaaagcttatggtcaaaaagactgttttgaagctggtgtgatt

SEQ ID NO: 281403 - DNA, 863 bp, Unknown
  Bacterial polypeptide expressing nucleotide sequence isolated from the Sargasso Sea
aatggcacttataggccaggaagtatctcaagacagggaaatagaaatcccagaaccagtgagagaaatctataaacagtggagaccatctccattatatagagcaagaagacttgaaaaggctttagatacaacggcaaaaatttattataaatatgaaggtgtgagtccaacaggtagtcacaagcccaatacagcagtagcgcaagctttttacaacaaagaagaaggtacaaaaaaaattacaactgaaacaggtgctggacaatggggcagttcacttgcatttgcatgttcaatttttaaaatcgaacttgatgtttatatggttaaagtcagttatgaacaaaaaccatatcgaaaaatgattatgcaaacttttggtgcaaattgttatgctagtccatcaaatcgtactccaacaggtaaagctattttagaaaaagatccgaataattctggaagtttaggaatagctatatccgaggccgtagaaatggcagcacaagacgaatcaacaaaatattctctaggaagtgttttaaaccatgtattaatgcaccaaacaattgttggtaatgaagcaataatacaaatggaaatggcaaatgattatcccgatattttagtaggatgcacaggtggaggaagtaatttttcaggactagtatttccattccttggaaaaaaatttagagaaaaaaaagatgttagagtaatagcttgtgaaccaaaatcttgtccttcattaactaaagggaaatttgcttatgattttggagatactggtaatcgtacaccactagttaagatgcatacattaggatcttcatttatgccgccgtcaacccattcgggtggtt

SEQ ID NO: 281404 - DNA, 218 bp, Unknown
  Bacterial polypeptide expressing nucleotide sequence isolated from the Sargasso Sea
atatgtttcagttacagacgacgaagcaatccaagcatttcatgatttatgtcaaatagagggtataattcctgcactagaatcgagccatgctctcgcctatacatcaaaaattgcacctaagatggataaaagtgagataattgttgttaatttatcaggtcgcggggataaagatattcagacagtagctgtgcacgagggaataacgatctaaa

SEQ ID NO: 281405 - DNA, 514 bp, Unknown
  Bacterial polypeptide expressing nucleotide sequence isolated from the Sargasso Sea
gatttattaatggcatgtattggtggtgggtcaaacgcactaggcttatttcatgaatttctcgatgataagcaaattcaaatgattgctgttgaggcggctggtcacggtattgactcgggtaatcatgctgctagtctaagtggtggtaagcctggaatcttgcatggaaataaaacttacctcttacaatcaagtgatggtcaaatagatgaagctcactctatttcagcgggccttgattatccagggataggacctgaacactcatatttgtttgagcaaaaaagagttaaatatatgtctgcaacagataaagaagcaattgaagcatttcaatactgttgtaatttagagggtattataccagcattagaaccatctcatgctcttgctgttttaaaaaaaatagcaaaaaattatagtaaagataaaattgttgttatgaatatgtgtggaagaggagataaagatatttttacaatagcagaagaacttaatattaaactgtaat

SEQ ID NO: 281406 - DNA, 274 bp, Unknown
  Bacterial polypeptide expressing nucleotide sequence isolated from the Sargasso Sea
atgtcagatagaataaaaaaaacatttgaaagcaaaagaaaaaaacttgttacttttactactgctggtgacccagatttagatacaagtttagaaattcttaatactataattaataatggtgtagatgtaatagaaattggaatgccattttctgatcctatggcagacggcccaacaatacaagaatcaagtgttagatctattactaatggcactgaaattgatgacatttttgaaattgttaaaaaagtaagagaactgaataatgaaa

SEQ ID NO: 281407 - DNA, 862 bp, Unknown
  Bacterial polypeptide expressing nucleotide sequence isolated from the Sargasso Sea
gattttgttggtggagctcaaatttggtctaaagttgtgtctgatgcaaatggtggtgcacataaaatttataatgcaacagttcattgtttgttagctaaaagatcaggtaaaaaagttatttgtggtgatactggtgcgggttatgcaggtaaaatgttaagcatggctgcaaggaaattcggattaaaatgtaaaattttcatgggtgcaaaagatattgaacgacagcagccaaacgtaaaagctatgaaaaaaaatggagctgaggtaattccagtttatactggaagccagacattagtcgatgcggtttccgagtgtatgagattttgggtagcaaattgtgacacgactgcaatgtgtgttgggtcaactgtaggaccaaatatttttgtaagaatatgtggatggtcaaccagccaaatttcaagagaacttaaaactcaaattttagaagaatttggaaaaatgccaaaaaaattaaaactatataattgtgttgggggaggaagttcaagttttggtttttggaatgagtttatggactatgataaacgacaagttgaatttataggtgttgaagctggaggaccttcaaagagtaaaagacatgcagcaccattgacctatggatcaaaaatcggtgttcttcatggtgcagcgcaatacgttaatcaaaattcggaaggtcaaatagaggaaacagaatctatttctgcaggtttagattatccgggtgtatcaccgctgcattgttttttaaaagatactaaacgtgcaagatacactgcagctagtgatgaagatgctttaaatgcttttaaaatagtttcaaaatatgaaaatttaagaccttctt

SEQ ID NO: 281408 - DNA, 673 bp, Unknown
  Bacterial polypeptide expressing nucleotide sequence isolated from the Sargasso Sea
attgataaaaggtattccggttatagatcaaggagataaacttggtttttggggtggtaaatttggtggaaattatgtacctgaaactcttaaaaaacctatagaagatttagaaattttatttaataaattaaaaaaggataaaaactttattaaagagagagatagatattttaaaaattggataggttctcccactcgctttataaaacttaataatttgacaaaatatttaggtggagcacagatctggtctaaagtagtatctgatgcaaatggtggtgcccataaaatttataatgccacagtacactgtttattagcaaaacgatcgggtaagaaagttattataggcgacactggagcaggatatgctggcaaaatgttaagtatggctgcaaaaaaatttggactaaaatgtaaaatttttatgggggcaaaagatataaaaagacaaaaaccaaacgttaatgctatgaaaaaaaatggagcagaagttattccagtttattcgggaagccaaacattggttgatgctgtttccgagtgtatgagatattgggtagctaactgtaatacgactgcaatgtgtgttgggagtaccgttgggccgtctgtatttgttcgcatatgtggatggagtacaagtcaaatttctagagaacttaagagt

SEQ ID NO: 281409 - DNA, 897 bp, Unknown
  Bacterial polypeptide expressing nucleotide sequence isolated from the Sargasso Sea
ttttatttagatgagactatagaaaatttaaaatgggctgatacaataaaatatttcttagaagagagcaaaatgccaaagacttggtataacattgctgctgatttaccaaaacctatggaacctccgctacatccaggtactttaaaaccgattggaccagatgatctagcgcctttatttccaatggctttaattggtcaagaagtttctcaggatagagaaatagaaatacctgagccagttagagaaatttataaacagtggagaccatcgccattatacagagcaagaaaattagaaaaacatttagataccccagcaaaaatatattataaatacgagggtgttagtccttctggtagtcacaaacctaacacagctgtagcgcaagcattttataataaagaagaaggtacaaaaaaaataactacagaaactggtgctggtcaatggggaacctcattagcatttgcatgtaaattatttggaattgagttagatgtttatatggtaaaagtaagttttgaacaaaaaccatatagaaaattagtaatgcaaacttatggtgcgagatgtgttgctagtccatcgaatgaaacggatagtggtaaagcaattatagcaaaagatccaaataatacaggaagtttaggtatagcaatttcagaggcggttgaaatggctgcaaagaatcctgatacaaaatatgcattaggaagtgttttaaatcatgttttaatgcaccaaactattgttggaaatgaagcattacttcaaatggaaatggcagatgattatccagacattttagttggatgtacaggtggtggaagtaatttttctggattagcaaatccttttttaggaaaaaattttagagaaggaaaaaaaaca

SEQ ID NO: 281410 - DNA, 847 bp, Unknown
  Bacterial polypeptide expressing nucleotide sequence isolated from the Sargasso Sea
gctcctttatttccaatggcattaattggacaagaagtttcacaagatagagaaattgaaattccagaacctgtaagaaaaatatacaaacaatggagaccttcgccattgtatagagcaagaaatttagaaaaatttttagatacaccagcaaaaatttattacaaatatgaaggggttagtccaacaggaagtcacaaaccaaatactgcagtagcacaagctttttttaataaagaagaagggactaaaaaaatcactaccgaaactggtgctggtcagtggggaagctctttggcatttgcatgccaaatatttggaatcgaattagatgtatatatggttaaagttagctttgaacagaaaccttatagaaaattaattatgcaaacatacggcgctagttgtttcgcaagtccttctaatagaacagatagtggaaaagctatattggccaaagatcctaacaacacaggaagtttaggtattgctatttcagaagcagttgaaatggcagcaaaagatcctaatacaaaatactctcttggaagtgttttaaaccatgtattgatgcatcaaactatagttggaaatgaagcattactgcaaatggagatggcagacgattaccctgatattttagttggttgtactggtggtggaagtaatttttcaggattagttttgcctttcttaggtaaaaaatttagagaaaataaaaatacaagagtgatagcatgtgagccaaaatcttgtccttccttaacaaaagggaaatatgtttatgattttggtgatactggaagacttactcctttagtaaaaatgcacacattaggatcacaat

SEQ ID NO: 281411 - DNA, 623 bp, Unknown
  Bacterial polypeptide expressing nucleotide sequence isolated from the Sargasso Sea
tgggcttagggcgaaaagtgcgggagcaaatctccaccagacattatcaatggttagggaatttcgcaaagtagatgatataacgccgattatcctgatgggctattacaatccaatatacatatatggaaacgaaaaatttttgatagatgctaagaattcaggtgtggatggtttgattgtagtggatttaccaccggaagaagataaagaattgtgtctaccatccctggaaaaagggctacattttataaggttggcgactccaacaactgacgagaatagaatatcaactgttctgacaaatacatcagggtttgtgtattacgtatcaattgctggcgttacaggtagcaaatcagctagaagtgatgaagtgcgtgcagcagttaagaacataaagaaatatacggaactacccgttgctgttggttttggtattaaaacccctgaacaggcagctatcgttgctcgttctgctgatgctgctgttgttggttcagctatcgttaaggttatagaaaacaatattgatgaaacaggtgcgccttcggataacctagttgataatgtgctggaatttgttagctctctttctagaggggttcgtgaatccagataat

SEQ ID NO: 281412 - DNA, 560 bp, Unknown
  Bacterial polypeptide expressing nucleotide sequence isolated from the Sargasso Sea
taaacttttaaagtctttaaaaggtaaattaaatattcccattatccttttttcttatttgaatccattactatgttttggctttgaaaggttttgtgagatggcatctgatgctggagtttctggactaatagttcctgacctccctttggaggaagcttataaattttctaaaatagttagtaaccattctatggacttaattttattggtagcgccaactactccttttgaaagaatgaaacaaatatcaaatcatacaaaaggctttacttatttagtaagtgttacaggtgtcactggtgagagaaacaaaatggaaaatagagtagaaaatcttattgctaaattaaaagatgtaaatagcaatccaattgctgttggttttggaatatcaactccagaacatgttaataaagttcgtgagtggggagcagatggagtaattattgggagtgcatttgtaaaacgaatctcgagctcaagtgaaaaagatgttgtcgatcatgttggtgagttttgtaaagaaatgcgtttagctgctgatcaaaaaaaataaa

SEQ ID NO: 281413 - DNA, 676 bp, Unknown
  Bacterial polypeptide expressing nucleotide sequence isolated from the Sargasso Sea
aatggctacaagaattttaagaacctttgatgaattaaagtcaaattctcaaactggtttaattacatatcttacagcaggattcccaaatcaagacttatgtcttgatataattaatgaactttcaaaatcgggaagtgatttgatagaaattggcatgcctttttctgatcctatggctgaagggcctataattcaacaatcatcaaagattgcattggataatggccatacaatggaattaacttttgatcttataaaaaagtttagaactaaaaattctcaaacaccaattatattgatggggtattacaatcctatttatcaatatggaaatgagagctttataaaaagatgccttgattatggcgtagatggtttaattgttgttgatttgcctcctgagcacgattctgaattatgtgatctcacaatagatattgatcttgattttataagactcgctacacctacaactgacaaaaaaagattaaatatagttttaaataaaagctcaggttttctttattatgtctcaattatgggtataacgggaacgaaagaacctaatctagaaattttaaaggagcaagttattaaattaaaaaaagaaaccgacattcctattggtgtcggatttggcattaaaagacagaacaggctcaaagatatctga

SEQ ID NO: 281414 - DNA, 289 bp, Unknown
  Bacterial polypeptide expressing nucleotide sequence isolated from the Sargasso Sea
aatttctgccggtctagattatcctggtattgggccagagcactcctggttaaatgatcaaggaagagtaaattatgtatcttcaacagatgatgaagcgttaaatgcttttgaaatatgttcaaaatacgaaggaattattcctgctttagagccttctcatgccctagcatttgttttcaaacttgcaaaggatatgaaaaaagatcagataattatcgttaacttatgtggtagaggtgataaagatattgaaacggttgcagattatcttggtgtagaagtataa

SEQ ID NO: 281415 - DNA, 388 bp, Unknown
  Bacterial polypeptide expressing nucleotide sequence isolated from the Sargasso Sea
catggctgctccactaaatgacggaaaggaaggagtgcttcacggtatgagaacatatctgatgcaggatgatgcaggtcaggttatcgaaacacattctgtttcggcaggattagattacccaggagtaggacccgaacacgcatggctgaaagatattggaagagccgaatatgaagctgcagatgatgaggaggctctagacgcatttaaggaattaactagagtagaaggcataatgcctgctcttgaaacagctcatggaattgcttatgtaaaaaaagtagctccaacaatgagtaaagacagctctattgtagtaaatgtttctggtcgaggagataaagatataaatactgtagcttcgatagagggaatagaactttga

SEQ ID NO: 281416 - DNA, 543 bp, Unknown
  Bacterial polypeptide expressing nucleotide sequence isolated from the Sargasso Sea
tttgagttccaagattaaagaagtcttttctaacattaaagctcaaaaaagaaaggctttaattacttacatagtatctggagatccagatatacaaacaacccttaatatcatgcaccgcatggttgaagagggtgccgatataatcgagcttggaatacctttttctgatcctatggccgaaggagtatcaatacaaagaggtcatgaaagagctttagagaaaggagcttctttgcatgatgcatttgaattagtaaaagagtttaggctcactaacaagctaacacctattgtctttatggggtatatgaatacttttgaatctctaggtgcagacctttttatgcaaaatgcctcttcatcagagttagacggaatccttatcgtagatatgcctcctgaggaaagttctgaatttagtctcgcagctaaaaaggccaatatagatataatcagactaatagcaccaaactacagttattcaagagccaaaaagatttgctcgcaatgctctggttatgtttattacatatctgttaa

SEQ ID NO: 281417 - DNA, 814 bp, Unknown
  Bacterial polypeptide expressing nucleotide sequence isolated from the Sargasso Sea
tgtaaaatttttattgggtgcaaaagatattcaaaggcagcagccaaatgtgaaagctatgaaaaaaaatggagctgaagtcatacctgtatactcaggaagtcaaactctagtagatgcagtctctgagtgcatgcgttactgggttgctaattgtgataaagttgccatgtgcgttggtagcacagttggtccagctgtctttgttcgtatctgtggatggagtacaagtcaaatatctagagaactaaaaattcaattaattaatgagtttggttcagttccaaaaagactcaaactttataactgtgttggaggaggtagttctagttttggattctggaatgagtttatggattacgataaaaaacaatgtgaatttattggtgtagaagctggtggacctgcaaaaagtaaaaagcatgctgcaccactcacttatggatctaaaattggaattcttcatggagcagctcaatatgttaatcaaaatactgatggtcaaatagaagaaactgagtctatttctgctggactagattatccaggtatttctccacttcattgttttctcaaagatacaaaaagagcaagatacactgcggtaagtgatgaggaagctttaaacgcctataaacttgtcacaaaatttgaaaaattaaaaccatctttagaaccaagtcatgctttctcggttgcaatagcagagtcaaaaaaattaagtaaagatacaattgttgtagtcaatagttgtggagatgcatacaaagatcgaggaatcctaaaaaaaagattaggaaaaaaatatgtctaa

SEQ ID NO: 281418 - DNA, 808 bp, Unknown
  Bacterial polypeptide expressing nucleotide sequence isolated from the Sargasso Sea
atggctactagaattttaagaacctttgatgaattaaaatcaaattctaaaactggtttaattacatatcttacagctggatttccaaatcaagacttatgtcttgatataattaatgaactttcagaatcgggaagtgatttgatagaaattggtatgcctttttctgatcctatggctgaagggccaataattcagcaatcatcaaagattgcattggataatggtcatacaatggagttaacatttgatcttataaaaaaatttagaactataaattctcaaacgcctattatattgatgggttattacaatccaatttatcaatatggaaatgagaactttataaaaaaatgcttagattatggtgtggatggtttaattgttgttgatttacctcctgagcatgattctgaattatgtgatctcacaatagatattgatcttgattttataagactcgctacacctactactgatcaaaaaagattaaatatagttttaaataaaagctcaggttttctttattatgtttcaattatgggtataacaggaacgaaagaacctaatctagatattttgaaggagcaggtaattgaactaaaaaaagttactaatattccaattgctgttggatttggtatcaaaagatcagatcaggctcaaaagatatctgaattttctgatgcaatagttgtaggttcgtctttaatagaaaaaataatgggaaattatcaaaataataaagaagatttagttttatcggagatttctgagtatataaaaagccttaaggctgtgatatagt

SEQ ID NO: 281419 - DNA, 949 bp, Unknown
  Bacterial polypeptide expressing nucleotide sequence isolated from the Sargasso Sea
aaaaagctggtacaacattaccgccgatcttccagaacctgctcctccagttttgcatccaggaactggagaacctgtaggacctgatgatttagctccacttttcccaatggatcttattctgcaggaagtaagttcggaacgttatatagacattcctgaacctgtacgagagatatatcagcagtggcgtccaagccctctttatcgggcaagaagactcgagaaagcactcgatacccctgcaaaaatttattacaaatatgaaggcgtcagccctacgggtagccataagccgaatactgcagttgcccaagctttttataacaaggaagctggtgtaaagaaaatttcaactgaaactggagcaggacagtggggatcctcattagcatttgctggttctatttttggattggagattgaggtttttatggtaaaagtcagtttccaacaaaaaccttatcgcaaggcaatgatggaatcatttggagcaacatgcattgcttctccatctgataagactgagtttggtaaggcatacctagccaaaaatcccgattctacaggtagtcttgggattgcaatctcagaagcagttgaagttgcagcaactaatgatgatgttaaatattccttgggaagtgtccttaaccatgtgctaatgcatcaaacaattgttggtttggaaacgctgcaacaaatggaaatggctggtgactatcctgatgtagtagttggctgtacagggggaggttctaattttgcggggttgatgtttccattccttggtgagcaattgcgtggaggtgctaatgtgcggatagtagcagttgaacctgccgcatgcccatctctgacaaaggggaaatatgcttatgatttcggtgacactggaaatatgactccattaactaaaatgcatacacttggctccaccatttgtgcc

SEQ ID NO: 281420 - DNA, 829 bp, Unknown
  Bacterial polypeptide expressing nucleotide sequence isolated from the Sargasso Sea
cttaaatgtaaaatatttatgggtgcaaaagatatttcgagacaacagccaaatgtaaaagctataaaaaaaaatggagcagaagtcataccagttaattctggaagtcagacgcttgtggatgctgtctctgaatgtatgagatactgggttgctaattgtgatacaacagctatgtgtgtaggaagtactgtaggaccagctgtgtttgttcgtatctgtggatggagtactagccaaatctcaagagagttgaaagatcaattgattgataaatttggttcaattccaaaaaaactaaaattatataattgtgttgggggtggaagctcaagttttggattttggaacgaatttatggattatgataaaaatcaatgtgagtttattggtgtagaagctggagggcctgcaggaagcaaaaagcatgcagcaccattaacttatggttctaaaattggtatccttcatggtgcagctcaatacgttaatcaaaattcagatggccaaattgaagagactgagtcaatttctgcaggacttgattatcctggaatttctcctcttcattgttttttaaaagacacaaagagagcaagatatacagctgcaagtgatgaagaagctttaatcgcttacaaacttgtaacgaaatttgaaaaattaaaaccttctcttgaaccaagtcatgctttttctgttgcaattaaagaagcaaaaaagtttagcaaggatactatcattgtagttaatagttgtggagatgcatataaagataagggaattatagaaaaaaaattaggaaagaaatatgtcaaatccaattagt

SEQ ID NO: 281421 - DNA, 649 bp, Unknown
  Bacterial polypeptide expressing nucleotide sequence isolated from the Sargasso Sea
gtttgggcttcccttttctgatccgatggcagatggccccattatccaagaggcaaataaacttgcacttagatcaaaattatcaacacaacaatcacttaatttaattaaagaattaagtaaatctaaaaataatacttcatttgttattatgtgttatttaaatactgttcgtaaatttggattaaataaattcatcaaaaatattaaaagtattgttgatggtataataattgttgatttgccttttgaagaagaagatgcaatcaaaaagtcgttgtctaaaaataacatccacttgattaagttaatctctccaatgacagataagaaaagatctaaaaaacttttaaaaaattcaaaaggattcatctattatatatcagcaactggaatcactggttcaaataaattagattacaaagaaataaataaaaatgttaaatctataaaaaaaatgtcttctgttcctgttttagttggatttgggatcaagtctaaaaaagatgtcattgatatatccaaaaaaacaaatgcggatggtgttataattggctcagctcttattcaaaaatattttgatctaaaaatggattttgataagtacattaaaaaccttaaaaaatttattaaagaggttaaggtttaa

SEQ ID NO: 281422 - DNA, 268 bp, Unknown
  Bacterial polypeptide expressing nucleotide sequence isolated from the Sargasso Sea
atgaatagaattaataaagtatttgaaaaagatggagttattatgtctatttattttactgctggttttccaaagaaaaatgataccctttcaatcattaaagaattggattccgctggagttgaaatgattgaaatagggctcccttttagcgatcctctcgcagatggaccaacgattcaaaaaagttcaaccgttgcattaaataatggcatgaacacgagcttattatttgagcaattaaaggatttgagaaaaatcacagatg

SEQ ID NO: 281423 - DNA, 366 bp, Unknown
  Bacterial polypeptide expressing nucleotide sequence isolated from the Sargasso Sea
catcaattcttggcacagagggaattattcatggttcaaaaacacttctaatgcaaacccaagatggtcaaattactgaaccttattcaatttcagcaggtcttgattatcctggaatcggaccaatgcatgcaaatttatttaaatcaaaaagaggaaaatttatttctattgatgatgatgatgccatgaaatgggggcttatgctttcacaaattgaagggataattccagcaattgagacttcacatgcatttgctgttttagagaaaatggattttaataaagatgacattattatatttaattgctcaggaagaggtgacaaagacttagatacttatattgattattttaaattatgag

SEQ ID NO: 281424 - DNA, 736 bp, Unknown
  Bacterial polypeptide expressing nucleotide sequence isolated from the Sargasso Sea
cgaaggagctagcccgtcaggtagtcacaaaccaaacactgcactagctcaggctttttataataaagaagcaggtgtaaaaaaaatagcaactgagaccggtgcaggtcaatggggaacagcattgagttatgctggagcagtatttggaatagagataaaagttttcatggtaaaagtgagctatgatcaaaaaccttatagaagagctataattgaaagttacggtggtagtgttgttgctagcccgtcaaatgaaacaaattcaggaagagccatactcgaaaaggatccaaatagttcaggctcgcttggtatagcaatctctgaagcagcagaagttgcagctacaaatgatgatacaaaatatgctttaggtagtgttcttaaccatgtcttaatgcatcagtctataattgggcaagaggcacttctacaaatggaaatggctaatgattatcctgatattgtcataggttgtaccggtggaggtagtaatttctcaggtttatgtaatccttttttaggaaaaaagtttagaggagaacaggatgttcatgctattgcagttgagccatcctcttgtccttctttgaccaaaggtaaatattcctatgactttggtgatactctaaaatctgcaccattgttaaagatgcatacattaggttctgattttataccatcacctactcatgtaggtggattaagatatcatggaatgtctccaatgcta

SEQ ID NO: 281425 - DNA, 298 bp, Unknown
  Bacterial polypeptide expressing nucleotide sequence isolated from the Sargasso Sea
aatgactaatttaattagtcaaatttttaaaaataaaaataaaaaacttgtaacttttgttacaggaggagatcctgattttaaaacaagtaatgaaattttaaaaataattattgaaaatggtgttgatatcattgaaattggaatgcccttctcagatccaatggcagatggtccgacaattcaactctctagcaacagggcattagaaaataatattgatttagatcaaatttttgaattagcaagaaatgcaaaaaaaattaaagaaaaattacctataattcttatgggctat

SEQ ID NO: 281426 - DNA, 652 bp, Unknown
  Bacterial polypeptide expressing nucleotide sequence isolated from the Sargasso Sea
ctggacttcgagagattgtgggggataccaggcgccggttacgctggtaaaatgctttcaatggctgcaaaaaaatttggtcttaagtgtaaaatttttatgggagcaaaagatatcaaacgccagaaaccaaatgttgaagctatgaaaaaaaatgatgctgagatagttactgtgactactggcagccagactctggtagacgcagttagtgaatgtatgagatactgggtatctaattgtgatactacacatatgtgtgttggttcaacagttggtccaaatatatttgttaaaatttgtgcttggagcactgcccagatatcaagagaattaattaaacaagtaaaagatgaatttggaaaaattccagataaattaaaactaattaactgtgttgggggtggcagttcagcagcaggtttttggaatgagtttattgatacaaatgctgaatttattggagttgaggcgggtgggccgaaaaatagtaagcttcatgcagcgccattatcgaatggttctaaaataggtattctacacggagccgctcaatacgttattcaagatgaagaaggtcaaataggttctactgagtctatttctgctggactggattatccaggtatttctcctctacactgtttttgaa

SEQ ID NO: 281427 - DNA, 617 bp, Unknown
  Bacterial polypeptide expressing nucleotide sequence isolated from the Sargasso Sea
tattcaagtggcggcctctcgcgccttaaagtcaggtactagcttaagaaaagtaattaaacttttaaagtctttaaaaggtaaattaaatattcccattatccttttttcttatttgaatccattactatgttttggctttgaaaggttttgtgagatggcatctgatgctggagtttctggactaatagttcctgacctccctttggaggaagcttataaattttctaaaatagttagtaaccattctatggacttaattttattggtagcgccaactactccttttgaaagaatgaaacaaatatcaaatcatacaaaaggctttacttatttagtaagtgttacaggtgtcactggtgagagaaacaaaatggaaaatagagtagaaaatcttattgctaaattaaaagatgtaaatagcaatccaattgctgttggttttggaatatcaactccagaacatgttaataaagttcgtgagtggggagcagatggagtaattattgggagtgcatttgtaaaacgaatctcgagctcaagtgaaaaagatgttgtcgatcatgttggtgagttttgtaaagaaatgcgtttagctgctgatcaaaaaaaataaa

SEQ ID NO: 281428 - DNA, 217 bp, Unknown
  Bacterial polypeptide expressing nucleotide sequence isolated from the Sargasso Sea
aatgagctcgagaataaataaaacttttgcgaataaagataaaaaattagtaacttttgttactggtggtgacccagatatgggaacttcagaaaaaattattaatgcaatcgccttaagtggtgcagatattattgaaattggtatgccgttttcagatccgatggcagacggacctactatacaactatctagccatagagcaataaaaaaaaaa

SEQ ID NO: 281429 - DNA, 355 bp, Unknown
  Bacterial polypeptide expressing nucleotide sequence isolated from the Sargasso Sea
ggggataaatttcataagattagccactcctacaacagacgataggagactaccacgcgtattgcagaacacgtctggttttgtttattacgtctcaataaccggtataacaggtgcagcgtcggcgaaggcaaacaatgttggacccgaagtagcccgaattaaatcaaaaacagatttgcctgtagttgtaggctttgggataaaaaccccagaaaattcccatgaaatcgcatccatagcagatggagctgtggtaggatctgcaattgtagaaaagtttgctgatggagcatcggtggatgaaatttgtgaatttgttgaaagtttagcaagtggcgctcacgctgcctga

SEQ ID NO: 281430 - DNA, 973 bp, Unknown
  Bacterial polypeptide expressing nucleotide sequence isolated from the Sargasso Sea
gatacaattaaatatatattacctgaatctaaacttccaaaaagctggtacaacattactgccgatcttccagaacctactcctccagttttgcatccgggaactggtgaacctgtgggacctgatgatttagctccacttttcccaatggatcttatactacaggaagtaagttcggaacgctatatagacattcctgaacctgtacgagagatatatcggcagtggcgtccaagccctctttatcgagcaagaagactagagaaggcactagatacgcctgcaaaaatttattacaaatatgaaggagtcagccctacgggtagccataagccaaatactgctgttgcccaggctttttataacaaagaagctggtgtaaagaaaatttcaactgaaactggagcaggacagtggggatcttcattagcatttgctggttctatttttggattggagattgaggtctatatggtaaaagtcagtttccaacaaaaaccttatcgaaaggcaatgatggaatcatttggagcaacatgcattgcttctccatctggcaggactgagtttgggaaagcatacctagccaaaaacccagattctacaggcagtcttgggattgcaatctcggaagcagttgaaattgcagcaactaatgatgatgttaaatattccttgggaagtgtacttaaccatgtgctaatgcatcaaacaattgttggtttagaaacgctgcaacaaatggaaatggctggtgactatcctgatgtagtagttggctgcacaggaggaggttctaattttgctgggctgatgtttccattccttggcgaacaattgcgtggaggtgctaatgtgcgggtagtcgcagttgaacctgcagcatgcccatctctgacaagggggaaatatgcttatgatttcggtgatactggtaatatgactcctttgactaaaatgcatacacttggct

SEQ ID NO: 281431 - DNA, 913 bp, Unknown
  Bacterial polypeptide expressing nucleotide sequence isolated from the Sargasso Sea
aatttactataaatacgagggagtaagcccatcaggtagtcacaaaccaaatacagcagttgcacaagcattttataataaagaagaaggtacaaaaaaaataactactgaaactggagctggccaatggggaacatcgcttgcttttgcgtgcaaactatttggaatagaattagatgtttatatggttaaagttagttttgaacaaaaaccatatagaaaattagttatgcaaacatatggtgcaagatgtgttgcaagtccatcggatgagactgacagtggaaaagctatattggcaaaagatccgaataatactggtagcttaggtatagctatttctgaagctgttgagatggctgctaaaaatcctgatacaaaatatgctcttgggagtgtcttaaatcatgttctaatgcatcaaacgatcgttggtaacgaagctttgattcaaatggaaatggctgatgattatccagatattttagttggttgcactggtggaggaagtaatttttcaggattagtttttcctttcataggtaaaaattttagagaaggaaaaaatactaaagtaatagcttgcgaaccaaaatcatgtccttcacttacaaaaggtaagtttgtttatgattttggggatactggaagactaacaccattaatgaaaacacacactttgggatctcaatttattccaccagctacacattctggaggattaagatatcatgcaatggcaccaatggttagtcatcttaaagaaattggcgcaatagacgcaaaagcatatggtcaaaaagaatgttttgaagcaggagttaattttgcaagaactgaaggaatagtgcctgcgcctgaagcaactcatgcagttaaaggtgctgtagatgcggcactagaatgtaaaaag

SEQ ID NO: 281432 - DNA, 895 bp, Unknown
  Bacterial polypeptide expressing nucleotide sequence isolated from the Sargasso Sea
cttagcgcctttatttccaatggaattaataatgcaagaagttacccaagagagatatattgatataccgggaccagttttagaggcctacagtcgttggagatctacaccgctagtaagggctagagctttagagaaggcattagatactccagccagaatttattacaaatacgaaggagcaagtccttcaggtagccataaaccaaatactgcattagctcaggctttttataataaagaggcaggcgtaaaaaagatagcaactgagactggtgctggtcaatggggaacagcattaagttatgccggagccgtgtttggaatagaaataaaagtattcatggtaagagtaagctatgatcaaaaaccttacagaagagctataattgaaagttacggtggtagtgttgttgctagtccgtcaaatgaaacaaattcaggaagagctatacttgaaaaggatccaaatagttcaggctcgcttggtatagcaatctctgaggcagcagaagttgcagctacaaatgatgatacaaaatatgcattaggtagtgttcttaatcatgtcttaatgcatcagtctattattgggcaagaggcacttctacaaatggaaatggctaatgattatcctgatattgttatcggatgtactggcggagggagtaatttctcaggtttatgtaatccttttttaggaaaaaaatttagaggagaacaagatgttcatgctattgcagttgagccatcatcttgtccttctttaacaaaaggtaagtattcctatgactttggtgatactctaaaatctgcaccattgttaaagatgcacactttaggttctgattttatgccatcacccactcatgtaggtggcctaagatatcatgga

SEQ ID NO: 281433 - DNA, 370 bp, Unknown
  Bacterial polypeptide expressing nucleotide sequence isolated from the Sargasso Sea
atgtctagtagaataaaaaagatatttgaaaataactcaaaaaaactagtaacatttattactggtggagatccagattatgcaacttccactgaaattctcgataaaattattgaaaaaggagctgatgttatcgaaattggtatgcctttttcagatccaatggctgatggaccaacaattcaacttgcgagtaaaagagcgatagataacggtacaaacttagaaacaatatttaatatttgtaatcatattagagaaaaaaatctttctattcccattgttcttatgggttattataatgttattcttcactatggtataaaaaattttgttgataaaataaattcaataggggtggatggtttaa

SEQ ID NO: 281434 - DNA, 274 bp, Unknown
  Bacterial polypeptide expressing nucleotide sequence isolated from the Sargasso Sea
aatgtctagcagaataaaaaaaatttttgaaaatcactccaaaaaactagttacatttgttactggtggagacccagattatataacttccaaggaaattttggataaaattgttgaaaaaggagctgatattattgaaattggtatgcctttttcagatccaatggcagatggaccaactattcaacttgctagtaaaagagccatagatagtggcacaaatttagaaacaatctttaaaatttgtcatcatattagagaaaaaaatttttca

SEQ ID NO: 281435 - DNA, 760 bp, Unknown
  Bacterial polypeptide expressing nucleotide sequence isolated from the Sargasso Sea
atgactgacagcatcaaatattttcttcctgaatcggaaatgccgaaaagctggtacaacatcgccgccgatttgcctcaacctcctcctcctgttctccatcccggaactggacagccgatcgggcccgatgatctggccccactgtttccgatggatctgatcctccaggaagtcagtaccgagcgcgaaatcgaaatccctgaaccggtccgtgaaatctaccgtcagtggaggccgagtccgttgtaccgtgcccgcaggctggaaaaggtattggatactccggccaagatctactacaagtacgagggagtgagtccgactggaagccacaaaccgaacaccgcggttgctcaggctttttacaacaaagaggcgggagtcaaacgcatctccaccgaaaccggcgcgggacagtggggttcttcattggcctttgcaggaacgatattcgggatagaaatcgacgtcttcatggtccgtgtgagtttcgaccagaaaccttaccgcaaggcaatgatggagtccttcggggcaagctgcatcgcctcgccttcgaacacaaccgaatccggaaaagcaatcctggcggaaaatccggactcgaccggcagcctaggaatcgcaatttcagaagcggttgaggtcgcggctcaaaacgatgatgtgaaatatgcgctgggaagcgtattgaatcacgtgcttacccaccagtcgatcattggttggaagccatcaagcagaggaaaggccggag

SEQ ID NO: 281436 - DNA, 259 bp, Unknown
  Bacterial polypeptide expressing nucleotide sequence isolated from the Sargasso Sea
atggtaagtggaaaagaaaatagtttaagaaatatgccagatataaatggtcgttttggtgattttggtggtagatttgtagctgaaacactcatgccactgattttaaaagttgagtcatcttatgaaaaagctattaagaacgaaaaatttataaataaacttgatgcttatagaagagattttattggtcgtccaagtccgctttattttgccgaaagactaactaaatttttggaggagcaaaaatttatttaaa

SEQ ID NO: 281437 - DNA, 753 bp, Unknown
  Bacterial polypeptide expressing nucleotide sequence isolated from the Sargasso Sea
aaaaaatagataccggaaagaaggcactagtcgtttatataacaggtggattaggaaatgagtggatccagacgatgcattctgttatagatgccggcgcagacgtagtcgaaattggaattccattctctgacccagtgatggatggtcccgtaatccaattggctaatgaatcctcaatgaaatctggcaccacacccgtgagtatcctgaatgacttaagaggagaaaatcctgcggcacctcttgctgcaatgacttactacaatcttgcctacaggatgggtcatgaaaggtttgcttcaggtctttcttcggctggaatatctggctgcatacttcctgatttacccttggaagagttagatgcttggtcggactcggccgcaaagtcaaatattgaaacaattttgttagctgctcccacgacacccgatgagagactttctgaaatatgcgaaagaagttatggattcgtttatgcagttgggcttctgggagtgaccggagtgcgttctgaactcgctgatagcgcaattaagattgcatctcgcttaaaaaaagtaacttcgaaacctgttttagtaggcgtggggattggtaatcctgaacaagctgtgaaggcttcagaagttagtgatggtgtcatcgtagggtcagctgttgttcaagaaatgatcgatggttcttcgccagaaaaggtgggagaattggttgcaacatttagaaattctttagataagaattgctaaa

SEQ ID NO: 281438 - DNA, 396 bp, Unknown
  Bacterial polypeptide expressing nucleotide sequence isolated from the Sargasso Sea
tatgacaattaaaaactcttttaaacagctaccaaatgaaagaggttattttggaacctttggtggaagatatgtctcagaaactctaatgcctttaatattagaagtagaaaaggaatatgaaaaaattaaaagtgaagataagtttaaaaaggagttaaatcattatatggaaacatatattggtagaccaagtccacttttttttgctgagagaattacaaaagatttaggtggtccaaaaatatattttaaaagagatgaattaaatcacactggtgcacacaaaattaacaattgtatgggtcaaatacttttagcaaaaaaaatgggtaaaaaaagaataattgctgaaactggagcaggacaacatggagtagcaactgcaactgtatg

SEQ ID NO: 281439 - DNA, 301 bp, Unknown
  Bacterial polypeptide expressing nucleotide sequence isolated from the Sargasso Sea
atctacacattctgtttcagcagggttggattatccaggagtaggacccgagcattcttatttaagggattctggaagagttgtttacgaagctgccacagatgaagaagcgctggatagttttcacgatttaacaaaaacagaagggattatgcctgctctcgaaactgcacacgctttagcatatgctaaaaaaattgcacctgatttagataaagaagaaattttagttgtaaatttatcaggaagaggggataaggatatggctaatgtcgcgaaagttgaaggtcttactttgtga

SEQ ID NO: 281440 - DNA, 700 bp, Unknown
  Bacterial polypeptide expressing nucleotide sequence isolated from the Sargasso Sea
aattattaagacaataattaataatggagctgatattatagaaattggaatgcctttttctgatccaatggccgatggtccaacaattcaattatcaagtaatagagctataagtaaaggtattagcctagaagatattttttatttagcttctgaggcaaagaaaataaaaagtgatctgcctattatcctaatgggttattataacttgattttatattttggtattaagaagtttgtcaaaaaatgcaaagaaaatggtgtagatggtttgattattgttgatttgcaaccggaagaagatgaggatctaattaatgaactaaataaaaacaaaatagatctaataagattaattactccaacaactgatgagggcagacttaaactaattctaaaaaatgcaagtggttttttgtattttgtaagtgttatgggtataacaggtcaaaaatctgctgatcttaatgaacttgaaaaatcagttatatttatcaagaagcacacaaatctacctgttgttccaggatttggaattaaaaactcaactgatgtaaataatatatgtaagatagctgatggagctgttgttggatcaagtattattagaattattgaagaaaatttgaatgatagacaaaaaatgttatcacagattgataaattctcaaaagatttaaagaatggaactaaagtatga

SEQ ID NO: 281441 - DNA, 931 bp, Unknown
  Bacterial polypeptide expressing nucleotide sequence isolated from the Sargasso Sea
aacatcatcccagacttgccaaatccactaccgccaccattgaatccacaaacaatggaaccaattggtccagaggatttagctcccttatttccaatggggttaattttacaagaagtatctcaagattcttttatagatataccgaagcctgtcttagatttatacaagctttataggccttctcctttatttagagcagttcgacttgaaaaagctctaggtacaaaatcaaggatatattacaaatatgaaggtggatccccgtctggttcgcataaacctaacactgcaatcccccaagcgttttataacgcggaagaaggtgttacaaaaatggttacggaaacaggtgctggtcagtggggttctgctttggcttttgcatgccaggcttttggaattgaattagaagtatttcaagtagctgcgtcatatttagcaaaaccttacagaaaaaccatgatggagatatatggcgcaaaagtttactcaagcccctctgaaagaacagatattggtaaaaagtttctttcagaagaccctgaaactccaggaagtctaggcattgccatttcagaagctattgaagttgctgctaaagatgagaaaacaagatacgcacttggaagtgttttgaatcatgtcctaatgcatcaaaccattattggagaagaagcactaaaacaattggcactggcagacgactatccagatgtaattgttgggtgtactggcggtggttcaaactttgctggtctttttacaccttttgcgagagaaaatatgcaaaacaacaaatctactgtcattagagctgttgagccacaggcttgtccatctttgactaagggaacgtatgcatatgattttggggattcagtaggaatggcccccgtagtcaagatgcatacccttggtcattcttttg

SEQ ID NO: 281442 - DNA, 502 bp, Unknown
  Bacterial polypeptide expressing nucleotide sequence isolated from the Sargasso Sea
atgaaagataacaaaatgcaatttactaaaaatgaatctttatcaaggatagatgagaagttttatgaattaaaaaagaataaaaaattggctttgatgcctttcataatggctggggatcccaatattgcaataacctctgagatcttattaaagttacaagaaaatggagctgatcttattgaattaggcatcccatacagtgatccacttgcagacggacctgttattcaagtagctgcctctcgcgccttaaagtcaggtactaccccaaaaaacataattatacttttagagtctttaaaaggtaaactaaatattcctatcatacttttttcttacttaaatcctttactatgttttggctttgaacagttttgtgatatggcatctaatgctggagtttctggactaataattcctgatctccctctagaggaagcttataaattttctaaaatagttagaaagcattctatggacttgattttattagtgctcc

SEQ ID NO: 281443 - DNA, 331 bp, Unknown
  Bacterial polypeptide expressing nucleotide sequence isolated from the Sargasso Sea
aatgagaaatagaattgatataaaatttgatgaacttagaaataaaaatcaaaaagcgctgataacatttattacttctggcgatccaaatcaaaaattatcaaaaaaaattttagatgtccttcgtcttggtaaaatcgatataatagaaattggatttccattttcagaccctatggctgacggacctactattcagaagtccagtcaaagagcaattatttctggctcaaatctggatagtacctttgaccttgttgctgactttaggattaaagagaaaaaagttccaattatcttaatggggtatttcaatcccaatttttcagta

SEQ ID NO: 281444 - DNA, 286 bp, Unknown
  Bacterial polypeptide expressing nucleotide sequence isolated from the Sargasso Sea
tactgcctaggttcagtaatgggaccgcacccttacccctggatggtcagaacatttcaccacgtgatcggtgatgaggcacccgaacaatgcctaaatctgatgattcaactgccagacgtggtcgtcgcgtgcgttggcggcggaagcaacgcagcgggattcttctcgggcttctccgacagcgatgctcggctagtgggagttgagccagcaggtggagcagcagtgggaagaggcgtgccaggtgtcgtccatggtatgacctcgtacttgatgcaagacg

SEQ ID NO: 281445 - DNA, 574 bp, Unknown
  Bacterial polypeptide expressing nucleotide sequence isolated from the Sargasso Sea
ttaagaaaagtaattaaacttttagagtctttaaaaggtaaattaaatattcccatcatccttttttcttacttgaatccattactatgttttggctttgaaaggttttgtgagatggcttctgatgctggagtttctggactaatagttcctgacctacctttggaggaagcttataaattttctaaaatagttagtaaccattctatggatttaattttattggtagcgccaacaactccttttgaaagaatgaaacaaatatcaaatcatacaaaaggctttacttatttagtaagtgttacaggtgtcactggtgagagaaacaaaatggaaaatagagtagaaaatcttattgctaaattaaaagatgtaaatagcaatccaattgctgttggttttggaatatcaactccagaacatgttaataaggttcgtgagtggggagcagatggagtaattattgggagtgcatttgtaaaacgaatctcgagctcaagtgaaaaagatgttgtcgatcatgttggtgagttttgtaaagaaatgcgtttagctgctgatcaaaaaaaataaa

SEQ ID NO: 281446 - DNA, 508 bp, Unknown
  Bacterial polypeptide expressing nucleotide sequence isolated from the Sargasso Sea
gatgggttattacaatcctatttatcaatatggaaatgagaactttataaaaagatgcttagatgatggcgtggatggtttaattgttgttgatttgcctcctgagcatgattctgaattatgtgatctcacaatagatattgatcttgattttataagacttgccacacctactactgacaaaaaaagattaaatatagttttaaataaaagttcaggttttctttattatgtctcaattatgggtataacgggaacgaaagaacctgatctagatattttaaaggagcaggttattaaattaaaaaaagaaaccgatattcctattggtgtcggatttggtattaaaagaccagaccaagctaaaatgatatctgaattttctgatgcaatagtagtaggctcgtctttgatagaaaaaataatgggaaattatcaaaataataaagaaaatttagttttatcagaggtctctgagtatataaaaagtcttaaggccgtgatttaa

SEQ ID NO: 281447 - DNA, 897 bp, Unknown
  Bacterial polypeptide expressing nucleotide sequence isolated from the Sargasso Sea
ttggtggtgctcagatctggtgcaaagatgtatcggctattcatggacaagcacacaaaggttatcatgcaacagtgaatgctcttatatgtaaagctgcaggtaaaaaatatattgtaggcgacacgggggccggtatgtttggtaagaacttagcaatggctgcccgtgaactgaagcttaaatgcaaaattttcatgggaacaaaggatataaaacgtcaagcacctaacgttaaatttatgagagaggctggggcggagattgttcctgttaatactggtagtgctacattggttgatgccgtatcagaatgtatgagatactatgttagtaattgtgatacaactcacctagcagtagggtctgcgattggagcaaacgtatttttaaaaatttgcgcatattcaactgcacaaatctcaaaagaattaaaaaatcagttaattgaagaatttggtgaaatacctaaaatgaagctggtgaatgttatagggggtggttctagcgctatcggattctggtccgaatttatagattatccaaaaaaacatgttgagcttatcggtgttgaagcaaaatattgtgctccacttacaacaaatgcaaagctagcaattttacatggtgctgctcagtattgtttgactgataaaaatggtcaaataaaagaaacccactcaatttcagcaggtttagattatcctggagtttcacctcttcattgttttttaaaagatgcgggtcgcgcacgctattgttctgcaagtgatgaacaagctttagcagcttttaaattagttacaaagcttgaaccatcagttaaacctagtttagaacccgctcattgtctgcatgaagttataagacttgcaccaaagttaaaatcaggatgaa

SEQ ID NO: 281448 - DNA, 575 bp, Unknown
  Bacterial polypeptide expressing nucleotide sequence isolated from the Sargasso Sea
tgacagtacaggaaaactgcctgatctgatttatgcctgtgtaggcggaggatcaaatgcaagtggaatctttctcccttttctgaatgatgaatcagttgagttggttggagtggaagcagggggaagaggagtcgatacgggttcacatgctgcacgcttttatggtggtaaagttgggatagctcaaggatataaaacatatttttttcaagatgaagaaggccaaatgcttcacactcattcaattgctgcagggttagattacattggagtaagtccgattttaagctatttgcatgatgaaaaacggatcagatttgttgctagtacagatgatgcagttatttctgcaacaaaacacctgattcgcactgaaggcataattcccgctctcgaaagcagtcacgcttttgcttcagttattgaagaagcttctcacattcctgaggggtctcaggttttgattaatctttccggtcgtggagacaaagatatctttaatatagctgaggctattggcgacaaaaaatgggaggaatttttacgccaaaaagcttcatcaaagaaatgaa

SEQ ID NO: 281449 - DNA, 890 bp, Unknown
  Bacterial polypeptide expressing nucleotide sequence isolated from the Sargasso Sea
tatggttaaagttagctatgaacaaaaaccttatagaaaaatgattatgcaaacttttggtgcaaactgttatgcaagcccgtcaaatcggacgccaacaggcaaagcaattttggaaaaagatccaaataataccggaagtttaggtattgctatatctgaagctgtagaaatggctgcacaagacaagaatacaaaatattcattgggaagtgttttaaatcatgttttgatgcatcaaactatagttggcaacgaagctatattacaaatggaaatggcagatgattatccagatatattagttgggtgcacaggtggaggaagtaatttttctggattagtttttccatttctaggaaaaaaatttagagaaaagaaagatattagagtaattgcatgtgaaccaaaatcttgtccttctttaacaaaaggtaagtttgcatatgattttggtgatacagggaatagaactcctttagttaaaatgcatacactaggctcttcttttatgcctccatcaactcattctggtggcttaagatatcatggtatggctccaatggtgagtcatcttgtagacataggagctgtggaagcaaaagcatttggtcaaaaagaatgttttgatgcaggagtaaaatttgcaaattcagaagggattgttccagctccagaggcaactcatgcagtaaaaggagctatagacgctgctcttgaatgtaaaaaaaatggtgaaaagaaaacaattcttttcaatttatgcggtcatggtcattttgatatgcaagcttacggagattattttaataacaaactttccgatgataaatataatgaggcagaagtaaattcagcattggaaaattacctaaaattgcttaataagg

SEQ ID NO: 281450 - DNA, 805 bp, Unknown
  Bacterial polypeptide expressing nucleotide sequence isolated from the Sargasso Sea
atgtcagacaaaactaaatttttcttagaagaaagtaaaatgccaaagacttggtataatatttcttcagatttgccaaaaccactaagcccagtacttcatccaggtacacttaagcctattggacctgacgatttagcacctttgtttcctatggctttaattggacaagaagtttctcaagaaagagaaattgaaattccagaacctgttagagaaatttataaacaatggagaccatctcctctctatagagcaagaagacttgaaaaagctttggatacttcggcaaaaatttattataaatatgaaggtgtaagcccaactggaagtcacaaaccaaatacagctgtagcacaggctttttttaataaagaagaaggtacaaaaaaaatcacaacagaaacaggcgcaggacagtggggaagttctcttgcctttgcttgttcaatttttaaaatcgaacttgacgtttatatggttaaaattagttatgagcaaaaaccatatcgaaaaatgattatgcaaactttcggtgccaattgttatgctagtccatctaaccgtacaccaacaggtaaagcaattttagaaaaagatccgaacaatactggaagtttaggtatagctatatctgaagcggtagaaatggcagcacaagatgagggtacgaaatattcccttggaagtgttttaaaccatgtattgatgcatcaaacaattgttggcaatgaagcgataatacaaatggaaatggcaaatgattatccagatatactggttggatgcacaggaggaggaagta

SEQ ID NO: 281451 - DNA, 904 bp, Unknown
  Bacterial polypeptide expressing nucleotide sequence isolated from the Sargasso Sea
tgcaacagtaaatgctcttatatgtaaagctgcaggtaaaaaatatattgtaggcgacacgggagccgggatgtttggaaagaatttggctatggctgctcgtgaactcaaactaaaatgcaaaatttttatgggaactaaggatataaaacgtcaggcacctaacgtaaagtttatgaaagacgctggtgcagaaattattcctgtcgatactggtagcgctactttagttgacgctgtatcagagtgcatgagatattatgttagtaactgtaatactacacacctcgcagtcggatcggcaatcggggcaaacgtgtttttaaaaatttgtgcttactcaactgctcaaatttcaaaagaattaaaaactcaagtaattgaagaatttggtgaaattcctaaaatgaagctggtgaatgttatagggggtggttctagcgctataggattttggagcgaatttatagattatccaaaaaaacatgttgagcttataggtgttgaagcaaaatattgcgccccacttacaacaaatgcaaaattagcaattttacatggagctgctcaatattgtttgactgataaaaatggtcaaataaaagaaactcactcgatttctgcaggtttagattatccgggcgtctcgcctctccattgttttttaaaagatacaggtcgtgcacgctattgttctgcaagtgacgaacaagctctagcagcttttaaattagttacaaagcttgagccatcagttaaacctagtttagaacccgctcattgtttgcatgaggttataagacttgcgcctaaattaaatcaggatgaaattataatttataataattgtgggcacgcttacaaggatcgaaaaattattaaggatagaataggatatttccat

SEQ ID NO: 281452 - DNA, 859 bp, Unknown
  Bacterial polypeptide expressing nucleotide sequence isolated from the Sargasso Sea
ggctttaattggacaagaggtttctcaagatagagaaattgaaattcctgaacctgtaagagatatttataaacaatggagaccttctcctctatatagagctagaaaattagaaaaatttttagatacgcctgcaaaaatttattataagtatgagggtgtaagcccatcaggtagtcacaaaccaaataccgctgttgcacaagcgttttataacaaagaagaaggtacaaaaaaaataactacagaaacaggggctggtcaatggggaacctcacttgcttttgcatgtaaattatttggaatagaattagatgtttatatggttaaagttagttttgagcaaaagccatatagaaagctagtaatgcagacatatggagcaagatgtgttgctagtccatcaaatgaaacagatagtggaaaagctatattagcaaaggatccaaataacactggaagcttaggtattgctatttctgaggcggtagaaatggcagcgaagaatcctgatactaaatatgcgcttggtagtgttttaaatcatgttcttatgcatcaaacaattgttggtaatgaggctttacttcaaatggagatggctgatgattacccagatatactagttggttgtacaggtggtggaagtaatttttcaggattagtttttcctttcataggtaaaaattttagagaaggaaaaaaaactagggttatagcatgtgaaccaaaatcttgtccctcacttacaaaaggtaaatttgtttatgattttggtgacactggaagactaacaccattaatgaaaacacatactttaggctctcaatttattccaccggcaactcactcaggtgga

SEQ ID NO: 281453 - DNA, 571 bp, Unknown
  Bacterial polypeptide expressing nucleotide sequence isolated from the Sargasso Sea
tgggacatccttaactaatatttttcatttagttaaagaaattagaaaagtagatgaaaaaataccaattattttaatgggatattataatccaatttattcgatgggagtaagtaaattcttagaacaatcaaaaaaatctggtgtagatggatttatcatagttgatttacctcctgaagaggatgaagaattttgtctgccagcaagaaaaatggggatgagtttcataagactcgctactccaacaactagtaataaaaggataccaaaagttctaaataatacttctggttttatatattatgtttcggtaactggaataactggatcaaaaaatcttgatattaaaaatgtagaagaacaagtaaaaacaattaaaaatcatacaaaaataccgatttgcgttggttttggaataaatacacctgaagatgcaaaaaatgtagcagaaatcgcagatggcgtagttgttggttcatctatagttaaacttatcgaagaaaaaaattcattagatagtgtttttaaatatatagaaaaattagcaaatgctgttcatggaaaataa

SEQ ID NO: 281454 - DNA, 940 bp, Unknown
  Bacterial polypeptide expressing nucleotide sequence isolated from the Sargasso Sea
agcaaaaatttaccttaagtctgatcacttgaatcatttaggagctcataaaattaataactcattatttcaaatcttattggcaaaatatatgggtaaaacaaaaatttattgtgaaacaggtgcgggggcacatttaattgcaacggcagcatgtggtgctaggttcaattttccagtaattggttacatgggtaaagatgacatttttctccaatcaacaaatgttttaaaagcaaaattgtttggtgctgaagtagttgagtgcgttgatggtacgggagaaaaaggtgttttaaaagatgcttgcacttctgtccttaaagcatggtcgagtgacccagaagctttttactgttgtgggtccgctattggaccacatccatttcctaaaattgtacagtatgcgcaatcaataattggaaaagagattaaaaaacaaattttagaaaaagagaataggctgcctgatgctattgttgcatgtatcggtggaggttctaatctaataggctgtattcacgattttctagatgataaagaagttgcgctttacggggtagaagcagaacatagctcagccctaaccaatggctctattggcataatgcaaggttttaaatcttttatgcttcaatccaatgatggctccgcaaccttggatactaaaagccttgcatccggaattaacttttactcatgtggacctgagcattcttatttaaagagtattggtagagtcaattatacctatgcaactgacgaagaggcattttcagcttttcagttactttgtaaaactgagggaatacttccagcttttgaaccaagctttgcgatagctcaagctataaaaatagctaaagagatggatagcgataagattgtagttataaatatttgtggcaggggtgataaagatattgatacagctgaaaga

SEQ ID NO: 281455 - DNA, 336 bp, Unknown
  Bacterial polypeptide expressing nucleotide sequence isolated from the Sargasso Sea
aatgcttaaaaatagttataaaaaatttcctgacgaaaaagggtattttggtcaatttggtggtagatatgtatctgaaacgttaatgccattaatattggaagttcaaaatgaatatgaaaaaattaaaaatgatgaaaactttattagtgagtttaattattatttggaaacatatgttggaaggccaagcccacttttttttgcagaaagaataactaaagaccttaatggtcctaaaatttattttaaaagagatgagctaaatcatactggagcacataaaattaataattgtatgggtcaaattttattggcaaaaaaaatgggtaaaac

SEQ ID NO: 281456 - DNA, 628 bp, Unknown
  Bacterial polypeptide expressing nucleotide sequence isolated from the Sargasso Sea
atgaaagttgaaggtcgaataaaaaataaatttgtaaaacttgaagaacaaaataagaagggattaataacctttattactgcaggagaccctaactataatatttctcttgaaattttaaaaggtcttcctggttctggagcagatgttatagaaattggaatgccttttacagacccaatggcagatggcccttctattcaagcctcatatttaagagctttgcaagaaggtcaaaatataaaaaaaactatcgaactagttaaaaattttagagtttcaaatcaagatattcctatagtgttaatgggttactataatcctatttataaatatggagttaaaaattttttaaaagaagccaaagctgtaggtgtagatgggttaattattgtagacttgcctccagaagctgatgatgaagtatgcataccagcaagtaaaatgggtatagattttattcgtttagcaactcctacttcaagtattaataggttgccaaaaataataaaaaattcctctgggttcctatattacatttcggtattaggaattacaggttctaaaactcctaaaattgaaaatataaataaaaacataaaaataataaaaagtttaacagatatcc

SEQ ID NO: 281457 - DNA, 805 bp, Unknown
  Bacterial polypeptide expressing nucleotide sequence isolated from the Sargasso Sea
aaacattatattggaagaccatcaccactatattttgctgaaaatcttaccaaaaatttaggaggtgcaaaaatattatttaagcaagagcatcttaatcatacaggaagtcataagattaataatagtctcttccaaatattattagcaagaagaatgggtaaaaaacatcttatttgtgagtctggagctggacagcattattctgcaacagcagctgtagctgctaaattcaatatgccactgattggagtgatgggagagattgacataaaaagggtaaatcaaaatataattaaagctaaacactatggagcaaagttaaaatcagtacctggatcattaaaagaagcaattacattcgcaataaagacctggaccagtaatcctgattacgcatatattattggatcttgtgtttcaagtgcaccgttccccaaaatagtaacatttgcacaaagtataattggtaaagaaatcagggaacaatcaatggctcaagaaggaaaaattccagatatgatagtagggtgtctgggtggaggatcaaattttgcaggcagtatttatgagtttttagatgaaccgagtgttaaaaaaattggtgtagaagcagctgaaacagcggcattgagtaatggaacactaggaataatgcagggtatgaaaacatatatgttgcaatctaatgatggctctaaatctttaggaggttcttctctcggagctggaatacaatatttcagtgtcggacctatgcattcatatcttaaaaatttgaaagctgttgattatacttttgcaa

SEQ ID NO: 281458 - DNA, 907 bp, Unknown
  Bacterial polypeptide expressing nucleotide sequence isolated from the Sargasso Sea
atgcacttttccaatattgttagctaagagaatgggtaaaactaaagtgctatgtgaaacaggtgcaggagcacatctaatagctacagccgctgctggagcattgaaatcattacccgtgattggatacatgggaaaagatgacatttttaaacagtcaaccaatgtccttaaagcaaaactttttggtgccaaagttatagaatgcgttgatggaactggagaaaaaggtgtgcttaaagatgcatgtacagcggtacttaaggcgtggtcaaatgaccccgatgctttttattgttgtgggagcgccataggtccccatccttttccgaggatagttcaatatgctcaatcggtaattggaagagagataagagaacaaattttagaaaaagaaggaagattaccagatgctattgctgcgtgcatcggtggtgggagcaacctaattggggcagttcatgaatttttagatgacaaggaagttgaattacatggtgtagagccagaacacagcgctgctttaacaaatggtacagttggcattatgcagggatttaaatccttcatgttgcaatcagacacgggtgacgcaacactttctactcaaagtttagccagtggaataaatttttactcagctggacctgagcatgcctacttaaagtctataaaaaggattttgtattcacatgtttctgacaaagaagcttttgatgcttttcaattaatttgtaaaacagaaggtatacttatcgcatttgagccagcttttgcagttgcccatggaattaaattagccaagaaaatgggcaaggataaaattttagttctgaatatttgtggtagaggcgacaaggatatcgatacagctgaaagaatgttaggtgataaccttgacaaatag

SEQ ID NO: 281459 - DNA, 712 bp, Unknown
  Bacterial polypeptide expressing nucleotide sequence isolated from the Sargasso Sea
aacattattgtctgtaagaggattggtaaaaggcggagctgatattattgaacttggattcccattttctgatcccatagctgatggtccaacaatacaaaaagcaagcactggttcattaaataatggaattaaaattgcaaaatttttcaaacttgtaaaaaaaattcgaagtgagaccgatattcctctcatattgatgacatacaccaacattttgtataaacaaggatatcaaaaattcattaaaaacgcaaaaaatgccggcatagatggattgattttgccagatatggcaatcgaagaagcaaaaaactatctttctgcagcaaaatcacaaaaaatggacacaatatttctcgtttcacctaacacacaaaaaaatagattagcaaaaattgccaaagccacttctggttttctctatatggttgcagtttttggaaccacaggcgttcaaactaaaatccatcagtacacaattgatgctttaaaatctacaaagcgttctgtgaaatcaatccctgttggtgtgggttttggaatatctaatgcaaaagatgtgaaaaaatatgtctccgtaggtgctgatgcagtaattgttggtagtgctaatatcaaaattatggaaaacacgcctatctcaaaactagaaaaggagattctctcattcacaaaaaaattgaaaagtgagactaggcagagcgaatag

SEQ ID NO: 281460 - DNA, 547 bp, Unknown
  Bacterial polypeptide expressing nucleotide sequence isolated from the Sargasso Sea
atggtaacaaggatttctaaaacttttgatgaattaaagttaaattctcaaacgggtttaataacatatcttacagctggttttccaaaccaagaattatgtcttgatataattaatgtgctctcaagatcaggaagtgatttaattgaaattggtatgcccttttcagatcctatggctgagggacctattattcaacaatcctctaagatgtctttggataatgggcatacgatggaattaacctttgatttgataaaaaaattccgaaataaaaatattacaacacctattattttaatgggttattacaatcctatttaccaatatggaaatgataactttataaagaggtgtcttgattatggcgttgatggtttaattgttgttgatttgcctcctgagcatgattctgaattatgtgatctcacaatagatattgatcttgattttataagactcgctacacctaccactgataaaaaaagattaaatatagttttaaataaaagctcaggttttctttattatgtctcaattatgggta

SEQ ID NO: 281461 - DNA, 310 bp, Unknown
  Bacterial polypeptide expressing nucleotide sequence isolated from the Sargasso Sea
caaattagagaaggacattcaatatctgcaggccttgattatcctggtatcggtccagaacattcctggcttaatgatcaaggtagagtaaattatgtatcatcagcagatgatgaagctctaaatgcctttgaaatatgttctaaatatgaaggtattattccagctttagagccttcacatgctttagcattcgtttttaaacttgcgaagaaaatgaaaaaagatcagataattattgttaatctatgcggaagaggtgataaagatattgagacagtcgcaaattatctcggtgtggatgtttaat

SEQ ID NO: 281462 - DNA, 194 bp, Unknown
  Bacterial polypeptide expressing nucleotide sequence isolated from the Sargasso Sea
aatgacaaacagaataaaaaaaacttttgaaaatttacaattgaataataaaaaagggattatactatatttaacaactggtattcccgataataaaacaacagcagaattagctttggaactattcaattctggagccgatatcattgaattgggtattccatttagcgaccctttagctgacggtgtgacta

SEQ ID NO: 281463 - DNA, 553 bp, Unknown
  Bacterial polypeptide expressing nucleotide sequence isolated from the Sargasso Sea
agtaagagaacaaattttaaaattagaaaataaacttccaaatttattgatagcctgtatcggtggtggatcaaatgctcttggtttatttcatgagtttcttgatgatgaacaaatagagatgattgctgtagaggcagctggtcacggtattgagtcaggaagtcatgcggctagtttgagtggtgggaaaccaggtattttacatggaaataaaacttatctattacagtcaaaagatggtcaaatagatgaagcgcattccatttcagctggtcttgactatccaggaattggtcctgaacactcatatttatttgaacaaaaaagagttaaatatatgtcagcaacagacaaagaagcaattgaagcttttcaatattgttgcaacttggaagggattataccagcattagaaccatctcatgctcttgccgttttaaaaaaaatagcaaaaaattacagtaaagataaaatcgttgtaatgaatatgtgtggcagaggagataaagatatttttactatagctgaagaactaaatattaaattataa

SEQ ID NO: 281464 - DNA, 385 bp, Unknown
  Bacterial polypeptide expressing nucleotide sequence isolated from the Sargasso Sea
gctgcaagtttaagtggcggaaaaccaggaatattacatggcaacaagacatatcttttacaatctgaagatggacaaattgatgaagcgcattctatatccgctggactcgattatcctggaattggtcctgaacattcatatttattcgaacaaaaaagagtagaatatatgtctgcaacagataaagaagcaatagaggcatttcaatattgttgcaatttagaaggtatcataccagcacttgaaccttcccacgcacttgcagttttaaaaaaaatagcaaaaaaatatactaaagataaaattgttgttatgaatatgtgtggcagaggtgataaagatattttcacgatagcaaaagaactaaatattaaattataat

SEQ ID NO: 281465 - DNA, 328 bp, Unknown
  Bacterial polypeptide expressing nucleotide sequence isolated from the Sargasso Sea
atgactaatttaattagtcaggtatttaaagataataaaaaaaaacttgtaacatttgttactggaggtgaccctgattttgaaacaagtttacaaattattaagacaataattaataatggtgttgatattatagaaattggaatgcccttttctgatccaatggctgatggtcctacaattcaattatcaagcaatagggctataaataaaggaattgatttagaaaatattttctctttagcctccgaggcaaagaaaacaaaaaaagatgtccctattattttaatgggttattataatttgattctatattttggaattgaga

SEQ ID NO: 281466 - DNA, 928 bp, Unknown
  Bacterial polypeptide expressing nucleotide sequence isolated from the Sargasso Sea
tggaggaactttgttcctgaaacattaaaaaaacctattgaggatttagaaatactatttaataaactaaagaaagataagaaatttatcgctgaaagagataaatatttcaaaaattggattggtactcctactcgtttcataaaattagagaatcttacaaatcatatcggaggagcccaaatttggtctaaagttgtatctgatgcaaatggaggagcacacaaaatctacaatgctactgttcactgtctgctagcaaaacgttcggggaaaaaaattatttgtggggatacaggtgcaggatatgcgggtaagatgttgagtatggcagcaaaaaagtttggtttaaaatgtaaaattttcatgggtgcaaaagatattgcaagacaacaaccaaatgtaaaggctatgaaaaaaaatggagctgaagtaatacctgtctattcgggaagtcaaactcttgtagatgctgtttcagaatgtatgaggttttgggttgcaaattgcgatacgaccgcaatgtgcgttggaagtacagttggaccatcagtctttgttcgtatatgtgggtggagcactagtcaaatttctagagaactaaaagttcagctaatagatgagtttggatcaattcctaaaaaagtaaaactatacaattgtgtaggaggaggaagctcaagttttggcttttggaatgaatttatggattatgataaaaagcaatttgagttcattggagtagaagctggaggacccacagaaagtaaaaaacatgctgcacctttaacttatggatcaaaaattggaatacttcatggtgcggctcaatatgtaaatcaaaattcagatggacaaatagaagaaactgagtctatttctgctggacttgattatcctgggaatttctccacttcattgtttttta

SEQ ID NO: 281467 - DNA, 289 bp, Unknown
  Bacterial polypeptide expressing nucleotide sequence isolated from the Sargasso Sea
cctgccgacaagcgctagcccggaccccgccggactggaaccatccgcccgccccggtgcgcatggccggttcggtcgctttggtgggcagtatgtgccggaaaccctgatgccggccttggcagagctggagcaggctgcagcgcaggcgtggaaagacccgtcattcaccggtgaactgaaccggctgctgaagaattacgtcggtcgtgccacgccgttgtacgaggccgagcggctcacgtcccattaccgacgtgccgacggaggtccgcgcatctggctcaag

SEQ ID NO: 281468 - DNA, 204 bp, Unknown
  Bacterial polypeptide expressing nucleotide sequence isolated from the Sargasso Sea
gtgctactgacgatgaagctcttgaggcattttcatggatgtcaaaaatggaaggtattattcctgctttagaaactgctcatgctatatcatatattaaaaaactgaaaaatgttaaaaatgaggatatcattctgaacctttcgggaagaggtgacaaagatataaatactgttgctaaggagttaggtatacatctatgaa

SEQ ID NO: 281469 - DNA, 868 bp, Unknown
  Bacterial polypeptide expressing nucleotide sequence isolated from the Sargasso Sea
ttgcaagcttgtttcaaaagctactggtggagcacataaagcatataacgccgtagttcatagtctcatctgtaagagattaggaaaaacttatattggcggagatacaggtgcaggttatgcaggaaagatgttgagtatggctgctgcaaaattcaatttgaaatgtaaaatatttatgggttctaaagatattgagcgacaatcgatcaatgtattttcaatgagaagttatggtgccgaggttattcctgttgattcaggatctcaaacacttgtggatgctgtttcagaatgtatgagatggtggactagtgaaaacgatcaggcgcacatgtgtgttggcagtacggttggaccaacaatatttgtaaaaatatgtgcatggtctactgcgcaaatttctcgggaaatgaaaaaacaagtgattgatgaatttggtgagatccctaaagacatgaaactgattaactgtgttggaggaggatcctctgcagctgggttttggaatgaatggatagatcatgataatgttgaattaattggagtagaagctggtggacctgaagggtcttcaatgcatgcagcccctcttactaacaattctcctttaggagttcttcacggggcaacacaatatgtaattcaagataatcagggagagattgaagaaacagcatctattagcgctggattagactatccaggtgtttctccactgcactgttttcttaaagaaactggaagagctaggtatacatcggcatctgatgaagaagcaattgatgcttttcaattagttagcagaatggaaggttttgtaagtccttcattagagccttctcatgcctttgctgaagcaataaaa

SEQ ID NO: 281470 - DNA, 381 bp, Unknown
  Bacterial polypeptide expressing nucleotide sequence isolated from the Sargasso Sea
aatgactaatttaattagtcaggcattcaaaaataaagaaaaaaaattggtaacttttgtcaccggaggtgatcctgatctagatacaagtttagaaattataagtactattattaataatggagcagatataattgaaattggaatgccattctctgatccaatggctgatggtccgacaattcaactatctagtaatagagctataagcaagggtactgatttagaaagtattttcactttagcttcagaagcgaaaaagataaaaggtgatcttcctataatcctaatgggttactataatctgattctatattatgggataagcaagtttgtaaaaaaatgtaaagaaaatggcgttgatggcttaatcgttgttga

SEQ ID NO: 281471 - DNA, 812 bp, Unknown
  Bacterial polypeptide expressing nucleotide sequence isolated from the Sargasso Sea
gatgtggttggatccgccgacgcgcgctgcgctgctcgcctgcgccggacatgccgactataagacgcgccaacaggcgattcgggcgctctgcgacctcacacgtgatgatgagaccgggcgcgagatgtggttggacccgccgacgcgcgctgtgctgctcgcctgcgccggacgcgccgactatgtgaccacaccttgggcgattcgggcgctctgcgacctcacacgtgatgatgagaccgggcgcgagatgtgggcggatccgccgacacgtgctgtgctgctcgcctgcgccggacacgccgactatgtgacgcaccaacaggcagtttttacactgcgtaagatgtggttggatccgccaacgcgcgctgcgctgcttgcctgcgccggggacgacgacgatgagacgcgccgcaaggcgatttttgcgctctcctacgtagtaaagcagctcgtcggcgagcgcgcgcgaaaacacctcatacgtgatgatgagacctggcacgagatgtggttggatccgccaacgcgcgctgcgctgctcgcctgcgcgcacgagatatgggcggacccgccgacgcgtgctgtgctgctggcctgcgccggacacgacgacgatgagacgcgccgctgggcggttcgggcactctgcgatctcacacgtgatgatgagaccgggcacgagatgtgggcggacctgccgacgcgcgctgtgctgctctcctgcgccggacacgacgatgaagagacgcgccaacaggcggttgaggcgctctgcaacctcacacgtgatgacgcgaccaggc

SEQ ID NO: 281472 - DNA, 664 bp, Unknown
  Bacterial polypeptide expressing nucleotide sequence isolated from the Sargasso Sea
atggatgctgtgcctgcgaaccaaggccgcatcgcagctgaatttgcacggttagcacagcacggcaagaaagccctcgtgacatttatcaccgcaggtgatccgggcatcgacttcaccgtgccggccatgcatagcctggtcgctggcggtgcaaacctgctggaactgggtatcccattctctgatccagaggccgaaggtcctgcaattcaagcggcgaacgagcgcgcgcttgccaatggtatgacgttggccaaggtacttgaaatggtggtcgaatttcgcgcctcaaacagtacgacacctgtggtgctgatgggttatctgaattcggttctggctatgacgaatttcgcccagcgcgccaaggacgctggcgtcgacggattgatcatggtgaacctacctcaggaagaagcggcggatttacgccaaacactcagcgctgtgggtatggatctagtatcactcatcgcaccgacgacggcggacccgcgagcgcaagaaattgtcacgacggcgagcggttttttgtactacgtatcactgaagggcactacgggcagcggggcactggcggttgacgaagtggccgagcgcatgagtttcttgcagacactgaccgatgtgccgatctgtgtcggattcggcatcaaagacg

SEQ ID NO: 281473 - DNA, 625 bp, Unknown
  Bacterial polypeptide expressing nucleotide sequence isolated from the Sargasso Sea
atgaaagataacaaaatgcaaattactaaaaatgaatctttatctaaggtagatgagatgttttgtgagttaaaaaataaaaaaaaatttgctttaatgccttttataatggctggagatcccaatattgaaattacgtctgagatattattaaagttacaagaaaatggagctgaccttattgaattaggtatcccttatagtgatccacttgcagatggtcctgttattcaagtggcggcttctcgcgccttaaagtcaggtactagcttaagaaaagtaattaaacttttagagtctttaaaaggtaaattaaatattcccatcatccttttttcttacttaaatccattactatgttttggctttgaaaggttttgtgagatggcatctgatgctggagtttctggaataatagttcctgacctccctttggaggaagcttataaattttctaaaatagttagtaactattctatggacttaattttattggtagcgccaactactccttttgaaagaatgaaacaaatatcaaagcatacaaaaggctttacttatttagtaagtgttacaggtgtcactggtgagagaaacgaaatggaaaatagagtagaaaatctta

SEQ ID NO: 281474 - DNA, 790 bp, Unknown
  Bacterial polypeptide expressing nucleotide sequence isolated from the Sargasso Sea
gatcttccaaaacctctttctccagtacttcatccaggtactttaaaaccaataggtccagatgatctagctccattatttccaatggcactaattggacaagaagtatctcaagaaagagagatagaaataccagaaccagttagaaatatttataaacaatggagaccatcaccattgtatagagcaagaaaattagaaaaagcattggatacatcggcaaaaatttattacaaatatgaaggtgtaagtcctactggtagtcacaaaccgaatacagctgttgctcaagcattttataataaagaagaaggaacaaaaaaaattacaacagagactggagctggacaatggggaagttcacttgcatttgcttgttcaatttttaagattgagcttgatgtttatatggtcaaagtaagttatgaacaaaaaccatatagaaaaatgattatgcaaacatttggtgcaaattgttatgctagtccatcagatagaactcctactggaaaagctattttagaaaaagatccaaataatacaggaagcttaggtatagcaatttcagaagccgttgaaatggcagctaatgacgaaaatacgaaatactctttaggaagtgttttaaatcatgttttgatgcaccaaactattgtagggaatgaagcaatacttcaaatggaaatggcaaatgattatccagatattttagtaggatgcacaggtggtggaagcaacttttcaggattagcttttccatttttgggcaaaaaatttaaagaaaataaag

SEQ ID NO: 281475 - DNA, 535 bp, Unknown
  Bacterial polypeptide expressing nucleotide sequence isolated from the Sargasso Sea
agaaaaaaaactaccttcaaaaattattgcgtgtattgtaggtggatcaaatgctatgggcttatttcatagctttttagatgatgataaagttgagataattggtgttgaggcaggtggaaaaggtttaaattccaaacttcatgctgcttctttaacaggtggaaaaccaggaattttgcatggaaacaaaacctatttaattcaagacttggatggacaaattatagatgcccattcaatatctgctggtttagactacccaggaataggtcctgaacattcttggcttaatgatattggtagagttcagtataaagcttgtactgatgatgaagcgcttgaagcttttcatttatgttcaaaacttgaaggaattattcctgctcttgaacctgcacatgctttacatattacaatccaagaagcaaaaaaaatgaaacacgatgatattataattatgaatatgtgtggtcgcggcgataaagatttaagtgctgttttgcccaaattaaaagagatgggcaaaatataa

SEQ ID NO: 281476 - DNA, 675 bp, Unknown
  Bacterial polypeptide expressing nucleotide sequence isolated from the Sargasso Sea
gatttgccccaacctcctcctcctgttctccatcccggaaccggacagccgatcgggcccgatgacctggcccccctgtttccgatggatctgatcctccaggaagtcagcactgaacgtgaaatcgaaattcctgaaccggttcgtgaaatctaccgtcagtggaggccgagtccgttgtaccgcgcccgtaggctggaaaaggcattggataccccggccaagatctattacaagtacgagggagtgagcccgaccggaagccacaaaccgaacactgcggtggcccaggctttttacaacaaggaggcaggagtcaaacgcatctccaccgaaaccggcgcgggacagtggggttcttcactggcttttgcaggaacgatattcgggttagaaatcgacgtctttatggtccgtgtgagtttcgatcagaaaccctaccgcaaggcgatgatggagtccttcggggcaagttgcatcgcctcgccttcgaacacaaccgaatccggaaaagcaatcctggcggaaaacccggattccaccggcagcctcggaatcgcgatttcagaagcggttgaggtggcggcacagaacgacgacgtgaaatacgcgctgggaagcgtattgaatcatgtgcttacccaccagtccatcatcggtttggaagccatcaaa

SEQ ID NO: 281477 - DNA, 379 bp, Unknown
  Bacterial polypeptide expressing nucleotide sequence isolated from the Sargasso Sea
agtgcagcaacttctgcccttggaaaagatggggtcatacatggaagtaaaacgcttttgatgcaaacccatgatgggcaaattacagagccatattctatttcagcaggactggactatccgggtgttggacctcttcattctcacctttttcgaacaggaagggcagaatttatttcaattacagacgaaaatgcaatgcagtcaggtctagaattaactcaacttgaaggaattatacctgcaattgagacctcacatgcatttgcggtttttgaaaaccgaaaatttgagacaaatgatatagtggttgtaaatttgtctggtagaggtgataaagatcttgacacttttattaattttttcaaactacagtgaa

SEQ ID NO: 281478 - DNA, 736 bp, Unknown
  Bacterial polypeptide expressing nucleotide sequence isolated from the Sargasso Sea
gctgggggatcccaatattcaaataacgtctgagatcttaataaaattacaagaaaatggggctgaccttattgaattaggtataccttacagtgacccacttgcagacggacctgttattcaagtgtcggcctctcgcgcattaaagtcaggtactagcccaagaaaagtaattaagcttttagagtctttaaaaggtaaattaaatattcccatcatccttttttcttatctaaatccattactatgttttggctttgaaaagttttgtgagatggcatctaatgctggagtttctggactaatagttcctgatctccctctagaggaagcttataaattttctaaaatagttagtaaccattctatggacttgattttgttggtggctccaacaactccttttgaaagaatgaaacaaatatctaaacatacaaaaggttttacttatttagtaagtgtcacaggggtcactggtgaaagaaacaaaatggaaaatagggtagaaaatcttattactaaattaaaagatgtaaatagtaatccaattgctgttggttttggaatatccactccagaacatgttaataaagttcgtgagtggggagcagatggagtaattattgggagtgcatttgtaaaacgaatttctagttcaagtgaaaaagatgtcgtcgatcatgtcggtgaattttgtaaagaaatgcgattagctgcagatcaaaataataaataa

SEQ ID NO: 281479 - DNA, 723 bp, Unknown
  Bacterial polypeptide expressing nucleotide sequence isolated from the Sargasso Sea
tatgtctgacagaattaaatattttcttgaagagagcaaaatgccaaaaacttggtataatatttcagctgatcttccaaaaccactttcaccagttcttcatcctggcacacttaaaccaattggaccagatgatttagctccattatttccaatggcgcttattggacaagaagtttcacaggatagagaaattgaaattccagaaccagttagagaaatttataaacaatggagaccttcaccattgtatagagcaagaaaactagaaaaggcactagatacaacagctaaaatttattataaatatgaaggtgttagcccgacaggaagtcacaaaccaaatactgctgtagcccaagctttttttaataaagaagaaggaacaaaaaaaattacaaccgaaacaggtgcaggacaatggggaagttccctagcttttgcttgttcaatttttaaaatcgaacttgatgtttatatggttaaagttagttacgaacaaaaaccatatagaaaaatgattatgcaaacttttggagcgaattgttatgctagcccatcaaacagaactccaacaggtaaggcaattttagaaaaagacccaaacaacactggaagtttaggcatagctatatccgaagcagttgaaatggctgcacaagatgaccatacaaaatattcacttggaagtgttttaaatcatgttttaatgcaccaaacaat

SEQ ID NO: 281480 - DNA, 505 bp, Unknown
  Bacterial polypeptide expressing nucleotide sequence isolated from the Sargasso Sea
atgagtaaaacttcaatctcctcttctatccttgaaagtaaagcgagaaaagggataggaataattccctttctaacttcaggatatccatctatagatgaaagtgaagaaatagttaaatctcttatagaagaaaaattagcatctgcaattgagattggaattccattcagcgatccaattgctgaggggaaaacaattcagaagtccagctcaattgctttagaaaatggagtagatataaaaactacactagatttaattgaaagaataaattcatttaaagatcataatgttccaattattacaatgggttattacaatccgatacttaaaatgggtcttgaaaatttcttttctgcctctagttcagtgggtgtaaaaggaataataattgcagatgttcctaatgatgagttgaataaaattcaaaaaacagctaacaactacaacattgacacaataccacttgtaccacttaattctagcgaagaaagagttaatg

SEQ ID NO: 281481 - DNA, 318 bp, Unknown
  Bacterial polypeptide expressing nucleotide sequence isolated from the Sargasso Sea
aagatggtcaaattatagaaccacattcaatatcagcaggacttgattatcctgggatagggcctgaacatgcatggttaaaagatgttaaaagagttaaatatgtaagtgttacagataatgaggcactaggcgcttttaaactttgcacaaaaattgaaggtattattccagccttagaaccttctcatgcacttgcttatttaattaaggaagctccgagaatgccaaaaaaaaatattgtcataatgaacatgtgtggtagaggagataaagatatttttactgttgcaaaaaaattaaaaattaacatctaaa

SEQ ID NO: 281482 - DNA, 752 bp, Unknown
  Bacterial polypeptide expressing nucleotide sequence isolated from the Sargasso Sea
aatttttgtaactgctggtgatcctgattttcaaagttccttggaactaattaaaaattttcctgaatatggcgtcgactttatagaaattggcatgcctttttctgacccaatggcagatggaccttctatacagttatctagtcaaagagctcttatgtcaggcatgaacttaaaaaaatgtttatctctaattaaaatttttagagaaaaaaataatcataccccgataatattaatgggatactacaaccccatttataaatttggtaaagaaaagtttatcaagaattgtgttgatttgggtgtagacgctcttatcattgtagacttaccacccgaagaagataatgagttctatttagaagctgagataaacaaactttctatgatcaggttagttacgcctactactgataaaaaaagacttaaaaaaatattattgaatgcaactggatttgtttattatgtttctataacaggtattactggaacccaagcccctgatattataaatgttaagagcaatatagaaaaaataaaacaaacaactgacttaccaattgttattgggtttggaatccgatcacccgctcaagcttctttgatggcagatacttgcgatggtattgttataggttctgctgtagttgatataattagagaatcattagatgataataataatacaagagataaaaaacttatttcatgtcttgattttgttaaagagatttcaaaaactctataac

SEQ ID NO: 281483 - DNA, 578 bp, Unknown
  Bacterial polypeptide expressing nucleotide sequence isolated from the Sargasso Sea
aatgaatagaatagataaatattttaataatttgagagaaaataaaaaaaaagcgtttggaatttttcttacagcgggctaccctacaattaatttttcagaaagacttttgaaacaaattacgaattctgacattgatttcattgaaataggattaccattttccgatccaatggcagatggtcctctaatacaagaatctagtgaagtagcgttaaaaaataatgcctcagtttcaacatgtttaaatattgtaaaaaatattagaaaaaaaaataatgatatacctattatcttaatgggttattataacccgatttttcattatggtaatttgaaatttataaagaattgtaaaaattcaggtattgatggtttaataattgtggatctacccatggaagaggatgaagaattttttaacttatcaattagaaacaatttgccggtaattcgttttgttacccctacaactaatgttgatagactgaaaaaaatagtaaaaactgcaaaaggatttatttactatatagctgttacaggtattacgggtaccaagagtgcatcattagatgaag

SEQ ID NO: 281484 - DNA, 235 bp, Unknown
  Bacterial polypeptide expressing nucleotide sequence isolated from the Sargasso Sea
aatgactgatttaataaatcagacttttaataataaagataaaaaattagttacatttgttactggtggagatcctgattttgacactagtaatgaaatcataaaaacaataattagcaataacattgatattttagaaataggaatgcccttttcagatcctatggctgatggtcctactattcaattatcaagtaatagagcattggaaaatgatattaatttaaaagatatt

SEQ ID NO: 281485 - DNA, 856 bp, Unknown
  Bacterial polypeptide expressing nucleotide sequence isolated from the Sargasso Sea
agcaagaagattagaaaagtttttagatacaccagctaaaatttattataaatatgaaggcgttagtcctactggaagtcacaaaccaaataccgcagtcccacaagcattttttaataaagaagagggaattagtaaaatatttacagaaacaggtgcaggccaatggggaagttcattagcttttgcaggtcagatctttggtatagatattgaagtattcatggttaaggttagttttgatcataaaccttacagaaaattaatgatgcaatcatttggtgctaactgtcacgctagtccatctaatttaactgattttggtaacaagttattatcagaaaatcctgataaccctggcagtttgggaatagctatatcagaagcaatagaagcaactgttaaaagtggaggtaaggcaaaatactcacttggaagcgttttaggacatgttttaatgcaccaaactataaatggtaatgaagcaattatgcaaatggaaatggctggagattatcctgatataattgttggctgtacaggcggtggaagtaatctttctggattaatgtttccgtttttaggacaacaattaagaggtggtcaaaaaattgatataattggttgcgagcctgcctcatgtccttcatttacaaagggtaaatatgcttatgatcatggagatatggcaaaaatgactccattaattaaaatgcatactcttggatctgatttcttaccacctgctaatcactctggtggattaagatatcatggcatgtcttatcatttaagtcatttatatgaattaggtttaatgagagcaaaggcttacggtcaaaaagattgttttgaa

SEQ ID NO: 281486 - DNA, 670 bp, Unknown
  Bacterial polypeptide expressing nucleotide sequence isolated from the Sargasso Sea
atgtcactacgtattaaaaaagtttttgaaaataaaagtaaaaaattagttacttttacaactggtggtgatcctgatcttaaaataagcataaaaatacttgaaacaatcataaataataaggttgatataattgaaattggcatgcctttttctgatccaatggctgatggtccgactattcaattatcaagtaatagatctattaaaaatggaacaaaacttaatgatatattttttattgtaagagaaattagaaaaaaaaataaagaaattccaattatattaatgggttattataatgttattttttattatggcattaataaatttgtaaatgaatgtaaaaataatggtgtagatggtttaataattgttgatctacagccagaagaagatggtgaactctttaaagaattaaaaaaaaataatataagtttaatcagacttattactcctacaacgaacgaatcaagattaaaattaatactaagtaatgcaagtggctttttatattatgtaactattacaggtataacaggtcagaactcagctgatttaaatgaattggaaagatctataaaatttattaagtctcattccaatttacctataatagcaggttttggtattaaagattcaaatgatgtaaaagaaatttgtaatatta

SEQ ID NO: 281487 - DNA, 709 bp, Unknown
  Bacterial polypeptide expressing nucleotide sequence isolated from the Sargasso Sea
atgtcagatagaattaaatattttcttgaagaaagcaaaatgccaaaaacttggtataatattgcagcagatcttccaaaaccactttcaccagttcttcatcctggaacacttaaaccaattggaccagatgatttagctccattatttccaatggcacttattggacaagaagtttcacaagatagagaaattgaaattccagaaccagttagagaaatttacaaacaatggagaccttcaccattgtatagagcaagaaaactagaaaaggcattagatacaacagccaaaatttattataaatacgaaggtgttagtccaacaggaagccacaaaccaaatacagctgttgctcaagctttttttaataaagaagaaggtacaaaaaaaattacaactgaaacaggcgcaggtcagtggggaagctctctagcatttgcatgttcaatttttaaaatcgaacttgatgtttatatggttaaagttagttatgaacaaaaaccatatagaaaaatgattatgcaaacttttggagcaaattgttatgctagcccatcaaatagaactccaacaggtaaagcaattttagaaaaagatccaaacaatactggaagcttaggtatagctatatctgaagcagttgaaatggcggcacaagatgatcatacaaaatattcacttggaagtgttttaaatcatgttttaa

SEQ ID NO: 281488 - DNA, 635 bp, Unknown
  Bacterial polypeptide expressing nucleotide sequence isolated from the Sargasso Sea
gatgtcgagccagaagttgtcacccatcgctcagcgttttgagcagctcaagcaggagaagcgtctggccctgatgccatttctgatggctggcgacccagatctggtaacaacctctgaggtcctgctgagcctgcaggcggctggggccgacatggtggagttgggcatgccttacagcgatcctctggcggatggtcccgtcattcaggccgctgcatcaagagcccttgctgccggaacaacgccggggaacgtgttggagatgctgagctctttgaaggggcgcctcaccattcctgtgattctttttacgtactccaacccattgctgaatgtgggcatggaagtgttctgtgaacgcgctgcagcggccggagccgctgggcttgtggttccggacctgccgttggaggaggcagaacggctgtcgcctctggcggaacgacagggactggatctggttctcctcgttgcacccacgacccctgctgatcgcatggtgcggattggtcaacgcagtcgtggtttcacttatctggtcagcgtgacgggtgtcaccggagaacgggcccagatggaaaacagagtggaggggcttgtcaaaaagctgaagcaatcctctgctgctccag

SEQ ID NO: 281489 - DNA, 1048 bp, Unknown
  Bacterial polypeptide expressing nucleotide sequence isolated from the Sargasso Sea
gttggtagtcctacctcgttttatcaaactaaaaaatttaacaaagcatgtgggtggggctcaaatttggtctaaagttgtatctgatgcaaatggaggtgcacataaaatttataatgcaactgttcactgtttgcttgcaaaacgttctgggaaaaaagttatttgtggagacactggtgctgggtatgcaggtaaaatgttaagtatggcagccaaaaaatttggtttaaaatgcaaaattttcatgggtgcaaaagatattcaaaggcaacaacccaatgtaagagcaatgaaaaaaaatggagcagaagttattccggtatactctggaagtcaaactcttgtagatgcagtatctgagtgcatgcgttactgggttgcaaattgtgataaagttgcaatgtgtgttggcagtactgttggcccagctgtctttgttcgtatctgtggatggagcacaagtcaaatatcaagagaattaaaaactcaattagttgatgagtttgggtcagttccaaaaaaactaaaactttataattgtgttgggggaggaagttctagttttggtttttggaacgagtttatggattacaataaaaaacagtgtgaatttattggtgtagaagctggtggaccagcaaaaagtaaaaaacacgcagcaccactaacatatggatctaaaataggaattcttcatggtgcagcccaatatgtaaatcaaaatactgatggtcaaatagaggaaacagagtcaatttctgctggactagattatccaggtatttctccacttcattgttttcttaaagatacaaaaagagcaagatacactgcagcaagtgatgaggaagctttaaacgcttacaaactcgtaacaaagtttgaaaaattaagaccttctctggaaccaagtcatgctttctcaattgcaataacggagtcaaaaaaatttagtaaagatacaattgtcgtagtcaatagttgtggagatgcttacaaagatcgaggaattatagaaaaaaaattgggaagaaaatatgtctaa

SEQ ID NO: 281490 - DNA, 1363 bp, Unknown
  Bacterial polypeptide expressing nucleotide sequence isolated from the Sargasso Sea
tatgtctaatcaaagaaaattttttcttgaagaaagcaaaatgcctaagacttggtataatattgctgcagatttacctaaaccaatggagccaccactacacccaggcactttgaaaccaattggaccagatgacctagctcctttgtttccaatggctcttattgggcaagaagtttcccaagatagagatattgaaataccagagcctgtaagagaaatttataaacaatggagaccatcaccattgtacagggcaagaagtttagaaaaacatttagatactccagcaaaaatttattacaaatatgagggagttagtccttctggtagtcacaaaccaaatacagcagttgctcaagcttttttcaataaagaagaaggcacgaaaaaaataaccactgaaacaggtgctggtcaatggggaacatcactagcgtttgcatgtaaattatttggaattgaattagatgtttatatggtaaaagtaagctttgaacaaaaaccttacagaaaacttgttatgcaaacttatggagcaagatgtgttgcaagtccttctgatgaaacagatagtggaaaagcgatattggtaaaagatcctaacaatacaggtagtttaggaattgcaatttctgaagcagttgaaatggctgctaaaaacccagatacaaaatatgcattaggtagtgtgttaaatcatgttttaatgcatcaaactattgttggaaatgaagcaatacttcaaatggaaatggctgacgactatccagatattttggttggttgtaccggaggaggaagtaatttttcaggtttagtaaatccatttttaggaaaaaactttagagaaggaaaaaaaactagagttatagcgtgtgagccaaaatcatgtccaactttaactgaaggtaaatatgtttatgattttggagatactggaaaattaacaccgttggttaaaatgcatacattaggatcacaatttattccacccgcaacacactcaggaggattaagatatcatggtatggcgccacttgtgagtcatttgaaagaaattaatgctattgaagcaaaagcttatggtcaaaaagaatgttttgaggcaggtgtaaattttgcaagaacagagggtatagtccctgcgcccgaagcaactcatgcagttaaaggtgctattgatgcagctttagaatgtaaaaaaaatggagagtctaaaacaatattattcaatttatgtggtcatggtcatttcgacatgaaggcatatggagattacttcgatggaaatttagctgaagataagtttgatagaggaagtatggataaagctttagaagatctgccaaaaattgcttga

SEQ ID NO: 281491 - DNA, 808 bp, Unknown
  Bacterial polypeptide expressing nucleotide sequence isolated from the Sargasso Sea
atggttacaagaatatctaaaacatttaatgaacttaagttagaatctcaaactggattaattacttatcttacagctggatttcctaatcaagatctatgtctagaaataattaacgaattatcgaaatctggaagtgatctaattgaaattggtatgccattttcagatccaatggctgaagggcctattattcaacattcttctaaattatcattggataatggtcatactatggaattaacttttgaactaattaataagttcagagaaaataattcaaagacacctattattttaatgggttattacaatccaatttatcaatatggaaatgaaaactttataagaagatgtcttgatgatggtgttgatggtctaattgttgttgacctacctccagagcatgattctgagttgtgcgatcttactacggaaatcgaccttgattttataaggcttgcaacacctaccactgataagaaaagattaaatactgttttaaataaaagttctggttttctttattatgtttcagtaatgggaataacagggacaaaagaacctgatcttgagcttttaaaaaaacaggttcttaatttaagaaaagaaactgatattccgattggcgttggatttggcataaaaagaccagatcaagctaaaaaaatatccgagttttctgatgcaatcgttgtaggttcatccttaatagaaagtataataaaaaattataaaaataataatgaagatgatgttttattagaaatttctgaatatataaaaagtctcaaggcagtgatttagc

SEQ ID NO: 281492 - DNA, 1114 bp, Unknown
  Bacterial polypeptide expressing nucleotide sequence isolated from the Sargasso Sea
atgtcagatactattaaatactttttggaagaaggcaaaatgccgaaaacttggtataatattgctgcagaccttcctaagcctctggatccagttttacatccaggaactcttaaacctataggtccggacgatttagctccattatttccaatggctttaattgggcaagaagtgtctcaagaacgagaaatagaaattcctgaaccagtaagagatatttataaacaatggagaccttctccactttacagagctagaaaattagaaaaatttttagatacacctgcaaaaatttattacaaatatgaaggtgtaagtccttcaggtagtcacaaaccaaatacagctgtagcgcaagcattttataataaagaagaaggaacaaaaaaaataactactgaaaccggtgcaggtcaatggggaacttcacttgcttttgcgtgtaaactgtttggaatagaattagatgtatatatggttaaagttagttttgaacaaaagccatatagaaagttagtaatgcaaacatatggagcaagatgtgttgcaagtccatcaagtgaaactgatagcggaaaagctatattagctaaagacccaaacaatacaggtagcttaggtatagctatttctgaagctgttgaaatggctgcaaaaaatcctgatacaaaatatgcgctaggaagtgtattaaaccatgtacttatgcatcaaacgattgttggtaatgaagctttacttcaaatggagatggctgacgattatccagatattttagttgggtgtactggtggtggaagcaacttttcagggttagtttttcctttcattggtaaaaattttagagaaggaaaaaatacaagagtaattgcttgtgagccaaaatcttgtccgtcacttacaaaaggtaaatttgtttacgattttggtgatactggaagattaacaccattaatgaaaacacatacattaggctcccaatttattccaccagcaacacactcaggtggattgagatatcatgctatggcaccaatggtcagccatcttaaagagattggcgcaatagaagcaaaggcttatggtcaaaaagaatgttttgaggcaggag

SEQ ID NO: 281493 - DNA, 1216 bp, Unknown
  Bacterial polypeptide expressing nucleotide sequence isolated from the Sargasso Sea
tatgtctgatcaaagaaaatacttcctagaagaaagcaaaatgccaaaaacttggtataatattgctgcagatttaccaaaaccaatggagccaccactacacccgggtactttaaaaccaatcgggccagatgatctagctcctttgtttccaatggctctgatcggtcaagaagtttctcaagacagagatatcgagataccagagcctgtaagagaaatttataagcaatggagaccatcacctttatacagagcaagaagtttagaaaaacatttggatactccagcaaaaatttattacaaatatgaaggagttagtccttctggtagtcataaaccgaatacagcagttgctcaagctttcttcaataaagaagaaggtacgaaaaaaataactactgaaactggtgctggtcaatggggaacttcattagcgtttgcatgtaaattgtttggaattgagttagatgtttatatggtaaaagtaagctttgaacaaaaaccatatagaaaacttgttatgcaaacttatggtgcaagatgtgttgcaagtccttctaatgaaacagacagtggaaaagcgatattagcaaaagatccaaacaatactggtagtttaggaattgcaatttctgaagcagttgaaatggctgctaaaaatccagatacaaaatatgctctaggaagtgtgttaaatcatgttttaatgcatcaaactattgtaggaaatgaagcaatattacaaatggaaatggctgacgattatccagatattttagttggttgtacagggggtggaagtaatttttcggggttagtaaatccttttttaggaaaaaattttagagaaggcaaaaaaacaagagtaattgcatgcgagccaaaatcatgcccaacactgactgaaggtaaatatgtttacgattttggtgatacaggaaaattaacgcctttagtaaaaatgcatactttaggatcacaatttattccaccagcaacacactcaggaggattgagatatcatggtatggcgccacttgtgagtcatttgaaagaaattaatgcgatcgaagcaaaagcttatggtcaaaaagaatgttttgaagctggagtaaattttgcaagaacagaaggtatagtacctgcgcctgaagcaacacatgcagttaagggtgctattgatgccgctttagaatgtaaaaaaaatggagag

SEQ ID NO: 281494 - DNA, 808 bp, Unknown
  Bacterial polypeptide expressing nucleotide sequence isolated from the Sargasso Sea
aatggttacaagaatatctaaaacatttaatgaacttaagttagagtctcaaactggtttaattacttatcttacagctggatttcctaatcaagatctatgtctgaaaataattaatgaactatcaaaatcaggaagtgatctaattgaaattggtatgccattttcagatccaatggctgaaggccctattattcaaaattcttctaaattatcattggataatggtcatactatggaattaacctttgaactgattaacaagtttagaaaaaataatacaaagacacctattattttaatgggttattacaatcctatttatcaatatggaaatgaaaattttataagcagatgtcttaatgatggtgttgatggtctaattgttgttgacctacctccggagcatgattctgagttgtgcgatcttactacggaaattgatcttgactttataaggcttgcaacccctactactgacaagaaaagattaaatactgttttaaataaaagttctgggtttctttattatgtttcagtaatgggaataactgggacaaaagaacctgatctcgagcttttaaagaaacaggttattaatttaagaaaggaaactgatattccgattggcgttggatttggaataaaaagaccagatcaagctaaaaaaatatctgagttttctgacgcaatcgttgtaggctcatccttaatagaaaagataataatcaattataaaaataataatgaggatgatgttttattagaaatttctgaatatattaaaagtctcaaggcagtgatttag

SEQ ID NO: 281495 - DNA, 1213 bp, Unknown
  Bacterial polypeptide expressing nucleotide sequence isolated from the Sargasso Sea
atgagtaaggatagtaaattttttctaaaagacagtgacgtgccgaaacaatggtacaatctggtagcggatttaaaagagccaatgagcccacccttaaatcctggaacaaaacaacctttaggacctgatgatttagcgcctttatttccgatggatttaattatgcaagaggtttcacaagagagatatatcgatatccccggtcctgttttagaggcctatagtcgatggagatgcactcctttagtaagagctagagctttagagaaagctttagatacgcctgctaggatttattacaaatatgaaggtgctagtccttcaggtagtcacaaacctaatactgcattagcacaagcattttataacaaagaggctggtgtaaagaaaatagcaactgaaacaggtgcaggtcaatggggtacggctctaagttatgcaggagctgtatttggaattgagattaaggtttttatggtaagagtaagctatgatcaaaaaccatatagaagagcaataattgaaagttatggtggtagtgtagttgctagtccctcgaatgaaacaaactctggtagggctatcttagaaaaagatcctaatagtgctggttctcttggtattgccatatctgaagcagcagaagtagccgctaccaatgaagatactaaatatgcactgggaagtgtgttaaatcatgtattaatgcatcaatctattattgggcaggaagcgcttcttcaaatggaaatggctgacgactatccagatatagttataggttgcactggtggtggaagtaatttttcaggtttgtgtaatcctttcttaggtaaaaaatttagaggagaacaagatgtgcatgctattgcagttgaaccatcctcttgtccttcattgaccaaaggtaaatactcttatgactttggagatactctaaaatctgctcctttgttaaagatgcacacattaggctctgattttatgccatcacctactcatgttggtggtttaaggtatcatggaatggctccaatgttatctcacctggttcacaatggacatatggaacccagagcttacggtcaaaaggaatgtttagaggctggtatacagtttgctagaactgagggtattatgcctgctcctgaagctacacatgctattaaaggtgctgtagatgaagctcttaaatgtaaagctgaaggta

SEQ ID NO: 281496 - DNA, 751 bp, Unknown
  Bacterial polypeptide expressing nucleotide sequence isolated from the Sargasso Sea
gctgattacttttgtaactggtggagatccagattttgaaacaagtaaagatataataaagaccataataaataataatatagatattattgaaattggaatgcccttttcagatccaatggctgatggtccaacaattcaacttgcaagtaatagagctataaaaaaagaaataaatttagataaaatattttctctgtctaagtttgctaaaaatttaaaaaataatttaccaattatattaatgggttattataatatgatacttcattatggagtaaaaaactttgtaactaattgtgtaaaaaatggtgttgatggactcatagtagtagatcttcaaccagaagaagatgaggaacttatagaaaacttaaaagatagtaatattgatttaataagattgataacacccacaactaatgaagagcgtctaaagttaatattacaaaatgctagtggatttttatattttgttagtgttactggaattacagggcaaaaatctgcaaatctaattgaactagaaaaatcaattagaaagataaaaaatttcactggcttaccagtagtacctggctttggtattaaaaattcaacagatgtcaaaaatatatgtaaaatttctgatggagctgttgttggctcaagtattattaaaataatagaggataatttggctgataaaaaagaaatgataagaaaaatagatttatttacaaaagatttaaaagaggcaacaaatatatga

SEQ ID NO: 281497 - DNA, 1363 bp, Unknown
  Bacterial polypeptide expressing nucleotide sequence isolated from the Sargasso Sea
tatgtctgatcagctaaaatatttcttggaagaaagtaaaatgccaaaaagttggtataatatttctgcagatcttccaaaaccaatggatccacctcttcatcctggtactttaaagcctattggtccagatgatttggctccgttatttccaatggctttaattggacaagaagtttctcaagaaagagaaattgaaattcctgaaccagtgagaaaaatatataaacaatggagaccatctcctttgtttagggctagaaatttagaaaaatttttagatactcctgcaaaaatttattacaaatatgagggtgttagtcccacaggaagtcataaaccaaacactgctgtagctcaggctttttttaacaaagaagaaggaacaaaaaaaattactactgaaactggtgctggacagtggggaagctctttagcatttgcgtgccaaatatttgggatcgaattagatgtttacatggttaaagtaagctttgaacaaaagccttatagaaaattaattatgcaaacatacggtgcaagttgttttgctagcccttcaaatagaactgatagtggtaaagctatactagctaaagatcctaacaatacaggtagtttgggtattgctatttcagaagctgttgaaatggctgcaaaagatccaaatacaaaatattctcttggaagtgttttaaatcacgttctaatgcaccaaactatagttggtaatgaagctttgcttcaaatggagatggcaggagattatcccgacatattagtgggctgcactggtggtggaagtaatttttcaggattagtgtttccatttttaggtaaaaagtttagagaaaacaaaaacacaagagttatagcttgtgaaccaaaatcttgtccttcattaacaaaaggtaagtatgtttatgattttggtgacacgggaagattaacaccattagtcaaaatgcatactttaggatcccaattcattccgcctgccactcattcaggaggcttgagatatcatggaatggctcctatggttagtcatttgaaagaaattggtgctattgaagctcagtcatttggtcaaaaagaatgtttcgaagctggcgttaattttgcaagatcagaaggaatagttccggctccagaagcaactcatgcagtaaagggtgcaattgcggctgctatggagtgtaaaaaaaatggagagtcaaagacaattctttttaatctttgtggtcatggacactttgacatgaaagcttatggtgattattttgacaacaatctagctgaagataagtatgatgagtctggagtaaacaaggctttagaagaacttcctaaaattgcatag

SEQ ID NO: 281498 - DNA, 1102 bp, Unknown
  Bacterial polypeptide expressing nucleotide sequence isolated from the Sargasso Sea
aataaaaaatttattagcgagagagataagtactttttaaattgggttggatctcctaccagatttataaaactagaaaatcttacaaatcacattggtggtgctcaaatttggtccaaagttgtatcggatgctaatggaggagcccataaaatttacaacgccactgttcactgtttacttgcaaaacgatctggtaaaaaaattatatgtggtgatacaggtgctggatatgctggaaaaatgttgagtatggctgctaaaaagtttggtttaaaatgcaaaatatttatgggcgcaaaggatattgctagacaacagccaaatgtaaaagcaatgaaaaaaaatggagctgaagtcatacccgtctattcagggagtcaaacgcttgttgatgctgtatcagaatgtatgcgattttgggttgctaattgtgatacaacagcaatgtgtgttggaagtacagtcggaccagcagtttttgttcgaatatgtggatggagcactagccaaatttcaagagagttaaaagcacaactaattgatgagtttggatcaattccaaaaaaactgaaattatacaattgtgtaggaggtggaagttcaagctttggtttttggaatgaatttatggattatgataaaagacaagttgagtttattggagtagaggctggtggacctaaaaaaagtaaaaaacatgcagcgcctttaacctatggctcaaaaattggtatacttcatggtgcagctcaatatgttaatcaaaactctgatggacaaatagaagagacagagtcaatttcagcaggacttgattatccaggaatttctccacttcattgttttttaaaggatactaagagagcaaggtatactgcagctagtgacgaagaagccctaagtgcctataagcttgttactaaatttgaaaaattaagaccctccctggaaccaagccatgctttttttgttgcacttaaagaggcaaaaaaacttagtaaagatacagtggtagtaattaatagttgtggtgatgcttacaaagatcgtggaattttagagaaaagattgggcaaaaaatatgttaaatccaattagt

SEQ ID NO: 281499 - DNA, 1357 bp, Unknown
  Bacterial polypeptide expressing nucleotide sequence isolated from the Sargasso Sea
aatgaaagaacagtataaatatctactaaatgaggatgatttaccaaagcagtggtacaacattgttccggatttaccaaatccgttaccacctcagctaaatcctcaaacaatggagccaattggtcccgaagatttagccccattatttccaatgggattaatactacaggaggtttctgatcaaaattatattgatattccagaacctgttttagaactttataagctttacaggccttcgccgatgtatagagctctaagacttgaaagagctataggtacaaactcaagaatatattacaagtatgagggtggatcaccttcaggatctcataagcctaacacagctattccacaagctttttttaatgctgaggaaggaataaaaaaaatggtcacagagactggagcgggtcaatggggttccgctttatcatttgcttgccaggcatttggtattgaacttgaggtatttcaagtagcagcatcttacgaatcaaaaccttacaggaagacaatgatggagatctacggagcaaaagtttatccaagtccatctgataaaacagatattggtaagaaatttttaacagaagatccgaatacgcctggaagtttagggatagctatttcagaagcaattgaagttgcccggaaagaagaaggtacaagatatgcgcttggaagtgttttaaatcatgtacttatgcatcaatctgtaattggtcttgaggcattgaagcaaatggaaatggctgaagattacccagatgttattgttggctgcacaggaggtggatcaaactttactggtttattttcaccatttttaagaaataatatattaacggatcaaaaaacaacaatccgcgctgttgagccagaggcttgtccttcgttaactaaaggcgtgtatacatacgactttggcgattcagttggtatggctcctgttgtaaaaatgcacactctaggatctagttttgttccagacccaatacatgctggaggattgcgatatcacggtatggcaccactggtaagcgcgatgtatgaagagaatctaatagaagcagaagcaattggtcaaaaagaatgttttgaggctggtcagctttttgctaaaactgaaggtattgtaccggccccagaagccactcacgcaattgcctcagcaataagagcagccaaagatgctgaccaaaattcaaaagaaattgctgtgttaactgctatgtgtggccatggacattttgatatgaaggcatacgagaactttttaagtggtgaaatgattgactatgaatttcctgctgacaaagtgaaagttgctttggagtcagttaagaaatag

SEQ ID NO: 281500 - DNA, 763 bp, Unknown
  Bacterial polypeptide expressing nucleotide sequence isolated from the Sargasso Sea
aatgataggcggaaaatatattgagaaaaaaataaggactccgaaagcagggggacctgcgattatcccattcattactgcagggtatccaaacactgaggacttcaagcaaacactccatgaaattgcaaaaaaagctgatgtgattgaaattggcgttccattttctgatcccatggcagacggggttacaatccagagatcaagccatcttgcaatagaaaatggagtgacgcttacttggatcttcgatcagctaagagaaattaaattagacaccccaatcgttttgatgagctatttaaatccactttatgtatttggcatgaaagagcttgttgaagcttcaatcgcatctggcgtggatggttttattgttcctgacttgccaattgaggaaagcaaagaactcaatgagcaattgatggatgctgaccttgctttgattcaattggttacgccggcgacaccactggataggatcgaattgatttctaatcaaagtacaggatttatatatgctgtcactatcaagggagttacaggcggagaagatgctttatctgcagatgtaacagactacctgaagcaggtccaagagatctctagaatacccgtttgtgctggatttggtattagagaaaagtctgatgtagaaatgattgccgattatgttgatggcgtcattgttggttctgcaattgtagaaacaattgaaaagggaaacagcccaacggaattcttagatcaacttaaaaattaa

SEQ ID NO: 281501 - DNA, 1024 bp, Unknown
  Bacterial polypeptide expressing nucleotide sequence isolated from the Sargasso Sea
aaatctaacaaaacatgttggaggagctcaaattggtctaaagttgtgtcagacgcaaatggtggagcgcacaagatatataacgctacagttcattgtttgcttgcaaagcagtcaggtaaaaaatttataattggtgatactggtgctgggtatgctggcaagatgttgagtatggctgctaaaaagtttggtttaaaatgcaagattttcatgggtgctaaagatattgcaagacaacaaccaaacgtaaaagctatgaaaaaaaatggtgctgaagtcattcctgtttattcaggaagtcaaacacttgttgatgctgtttcagaatgtatgagattctgggttgctaattgtgatacaacagcaatgtgtgtcggaagcaccgtcggaccggctgtttttgtccgtatctgtgggtggagcactagtcaaatttctagagaattaaaagtccagttagttgacgagtttggatctatccccaaaaaactaaagttatacaactgtgtagggggtggaagctcaagttttggtttctggaatgaatttatggattatgataaaaaacagtgtgagtttattggtgtagaagctggtggaccagaaagaagcaaaaaacatgctgctccattaacctatggttcaaaaattggaattcttcatggagcattacaatatgtaaatcaagattcagatgggcaaatagaggaaacagagtcaatttctgctggacttgattatcctggaatttctccacttcattgttttttaaaagatacaaaaagagcaagatatacagcagcaagcgatgaagaagctctgagagcttataaaattgttacaaagtttgaaaaattaagaccatctttagagccaagccacgcattctcagttgcaataaaagaatcaaaaaaatttagtagagatacagtggtagtagttaacagttgtggggatgcatacaaagataaaggaattttagagaaaaaattgggcaaaaagtatgttaaatttaattagt

SEQ ID NO: 281502 - DNA, 641 bp, Unknown
  Bacterial polypeptide expressing nucleotide sequence isolated from the Sargasso Sea
tttgatcagttttattacagcaggggatcctagcgctgagcacactattcctgcccttcatgcgctggttcggggaggggttgacgtgattgagcttggaattcctttttctgatcctgaagccgagggcccaagtatccagagatccagtgaaagggcgttggaaaacggtgttgggttggattctgttttacggatggttcaagaatttcgagagaaggacacagaaaccccgattgtcttgatgggctatttgaattcaatactggcaatggctaatttcactgagaaggcttccaagagtggagtggatggtttgattgttgtgaatttgcctcctgaagaagcggaagatttgcagttaagcctgaagcagaatgatattgatctaatctatttgctcgcaccaacgaccacagaaaagcgatcggcttttatcgctgagaaagcctccggttttctttactatgtctcgctgaagggcatcacgggagcgggccatatagaggtagacgaagttgcatcaagaattgaaagtctaagagaaataacggatcttccgctttgtgttgggtttgggattaaaaatgcgacaactgcaacggagatcggtaaattttctgatggagttgtcgtgggga

SEQ ID NO: 281503 - DNA, 1363 bp, Unknown
  Bacterial polypeptide expressing nucleotide sequence isolated from the Sargasso Sea
atggctgatacaataaaatatttcttagaagagagcaaaatgccaaagacttggtataacattgctgctgatttaccaaaacctatggaacctccgctacatccaggtactttaaaaccgattggaccagatgatctagcgcctttatttccaatggctttaattggtcaagaagtttctcaggatagagaaatagaaatacctgagccagttagagaaatttataaacagtggagaccatcgccattatacagagcaagaaaattagaaaaacatttagatacgccagcaaaaatttattacaaatatgagggtgttagtccttctggtagtcacaaacctaacacagctgtagcacaagcattttataataaggaagaaggtacaaaaaaaataactacagaaactggtgctggtcaatggggaacctcgttggcatttgcatgtaaattgtttggaattgagttagatgtttatatggtaaaagtaagttttgaacaaaaaccatatagaaaactagttatgcaaacttatggagcaagatgtgttgcaagtccatcgaacgagacagatagtggtaaagcaataatagcaaaagatccaaataatacaggaagtttaggtatagcaatttcagaagcagttgaaatggctgcaaaaaatcctgatacaaaatatgcattaggaagtgttttaaatcatgttttaatgcaccaaactattgttggaaatgaagcgttacttcaaatggaaatggcagatgattatccagacattttagttggatgtacaggtggtggaagtaatttttcaggattagcaaatcctttcttaggaaaaaattttagagaagggaagaaaacaagggttattgcatgtgaacctaagtcttgtcctacattaactgaaggtaaatatgtttatgattttggtgatactggtaaattaacaccattagtaaaaatgcatacacttggatcccaatttattcctccagctacacattcagggggtttgaggtatcatggaatggctccgttggttagtcacctaaaagaaattaatgctctagaagcaaaagcatatggtcaaaaagaatgttttgaagctggagtaaattttgcaagaacagaaggtatagttcctgcgccagaagcaacacacgctgttaaaggtgcaattgatgcagctttagaatgtaaaaaaaatggtgagtcaaaaacaatattattcaatttatgtggtcatggtcattttgatatgaaagcatatggagattactttgagggaaatctagcagaagataaatttgataaaggaagtatggataaagcattagaagaccttccaaaaattgcctaat

SEQ ID NO: 281504 - DNA, 268 bp, Unknown
  Bacterial polypeptide expressing nucleotide sequence isolated from the Sargasso Sea
aatgttggataatagaataaattcttttaaagaaggcccagatgaaaacggaagatttggtaattttggtggtaggtttgtttctgaaacattaatgcctttaattttattactagaaaaagaatatgagaaagcaaaaagtgatgataacttttggaaggaaatggaattttttcttaaagattatgttggtagacccagccctctttatttttcagaacgcctaacgaaccattttggtggtgctaaaatatatcttaaaccgtga

SEQ ID NO: 281505 - DNA, 299 bp, Unknown
  Bacterial polypeptide expressing nucleotide sequence isolated from the Sargasso Sea
gatgaatagaattgatcaaatttttttaacaaaagaaaaactactttctatttattttactgcaggatatcctaatctaaatgacactattccaattttaaaaaaattacaagaagcgggagtagatataattgaaattggacttccttttagtgatccgcttgcggatggtccaaccattcaagaaagttctaaaattgctctaaataatggaatgaatagtgaaaaattatttaatcaactaaaaaatgttagaaatgaagttgatgttccccttattattatgggatattttaatc

SEQ ID NO: 281506 - DNA, 1263 bp, Unknown
  Bacterial polypeptide expressing nucleotide sequence isolated from the Sargasso Sea
aatgaaaaaacaatacaaatatctactaaatgaaagtgatattcctaaacagtggtacaacatagtcccagatcttccaaaccctttaccaccgcaattaaaccctcaaactatggagcctattggtccggaggatttagcacctttatttccaatgggtcttatattgcaggaggtatctgaccaaaactatattgatattccagagcctgttttggaattatataagatatacagaccttctccaatgtatagagctttaaggttggaggaagcattaggtacaaaatcaagaatatattacaagtatgaaggtgggtctccttctggttcacataagccaaatactgcaattcctcaggctttttacaacgctgaagagggtgttaagaaaatggttactgaaacgggtgcgggtcagtggggttctgctttatctttcgcatgtcaagcgtttggtattgagcttgaagtttttcaagtagcagcttcgtatgcctctaaacctcatagaaagacaatgatggaaatttatggtgcaacagttcaccctagtccatctgaaagaacagatattgggaaacaattcttatctcaggatccaaatacacctggaagcttaggtattgcaatttctgaggctatagaggtagctagaaaagaagaaggaactagatatgccttgggtagtgttttaaatcatgttctaatgcaccaatcaattattggcttagaggctttaaaacaaatggaaatggcagaagactatccagatataattgttggttgcacaggtgggggatcaaactttactggattattttctccttttgcaaaaaacaatatggagtcaaataaaaaaaccattattagagctgtggaacctcaagcgtgtccatctttgactaaaggtgtttatacgtatgattttggagattctgtaggtatggcaccagttgtaaaaatgcatactcttggatccagttttgtgcctgaccccatacatgctggtggtttaagatatcatggcatggctccattggtaagtgctatgtatgaagataatctgatcgaggccgaagcaattggtcaacaagaatgttttgaagctggtcagctctttgcaaaaactgaaggtattgtcccagcacctgaagctactcacgctatagcttcagcaatcagagcagtaaaagatgctgatcaaagatctgagcaagtagctgttttgacagcaaatgtgtggtcatggacccattttga

SEQ ID NO: 281507 - DNA, 475 bp, Unknown
  Bacterial polypeptide expressing nucleotide sequence isolated from the Sargasso Sea
atgacaattaaaaattctttcaagaacctcccaaacgaaaaagggtattttggttcctttggtgggagatatgtctcagaaactctgatgcctttaattttagaggtagaaaaggaatatgaaaaaataaagaatgaaagtgagtttaaagaaaaattaaaccattacatggaaacatatataggaaggcctagtccccttttttttgcagagagaattaccaaagatttaggtggcccaaaaatttattttaaaagagatgaattaaatcacactggtgcacacaaaattaataattgtatgggtcaaatacttttagcaaagaaaatgggtaaaaagagaatcattgctgaaactggcgcaggtcaacatggtgtcgcaacagcaacagtgtgtgcattatttggattaccatgcatagtttatatgggtgaaaaagatattaaaaggcaatcgcctaattttttagaatgaa

SEQ ID NO: 281508 - DNA, 793 bp, Unknown
  Bacterial polypeptide expressing nucleotide sequence isolated from the Sargasso Sea
ttgagttccaagatcaaagaagtcttttctaacattaaagctcaaaaaagaaaggctttaattacttacatagtatctggagatccagatatacaaacaacccttaatatcatgcaccgcatggttgaagagggtgccgatataatcgagctcggaatacctttttctgacccgatggccgaaggagtatcaatacaaagaggtcatgaaagagctttagagaaaggggcttctttgcatgatgcatttgaattagtaaaagagtttaggcttactaacaagctaacacccattgtctttatggggtatatgaatacttttgaatctctaggtgcagacctttttatgcaaaatgcgtcatcatcaaagttagatggaatccttatcgtagacatgcctcctgaggaaagttctgaatttagtctcgcagctaaaaaggccaatatagatataatcagactaatagcacccactacaagttcttcaagagccaaaaagatttgttcgcaatgctctggttatatttattacatatctgttaagggcataactggagcaggcaatatggatgcagctgatgtaaagaataaagttggggaactaagaaaacatactgatctacctattgctattgggtttggaattaaagatgcagcttcagcttcctctgtaatggaagtagctgatggtatagttgtaggtagtgtttttgttgatttaataggtgaaggtggcaatattattgagaaagttagtgcaaaaaccaaagaactttccgaagtactacattaaa

SEQ ID NO: 281509 - DNA, 208 bp, Unknown
  Bacterial polypeptide expressing nucleotide sequence isolated from the Sargasso Sea
ttgcaccgatgatgaagcattatatgctttcaacatactatgtaaaactgaaggcattattcctgccttagaaactagccacgctatacactatgctatggagctagcaaaaaatatgagttcaggtaaaaatattgtagtgaacttatctggaagaggtgataaagacttaaatactgtatcaaagattgaaggaataaaaatttga

SEQ ID NO: 281510 - DNA, 411 bp, Unknown
  Bacterial polypeptide expressing nucleotide sequence isolated from the Sargasso Sea
gcgtagaatctggactgcatgcggcttctttgacgggaggacgccctggtatccttcatggaaaccggacgtatctattacagaacgaagacgggcaaattaccgaagctcattcaatttcagctggcctggattaccccgggatagggccagaacactcgtggctttttgaaaatggtcgtgttgattatgtttgcgccacagacgaagaagcacttgaagcttttgccctatgctcacgacttgagggaataataccagcattagaaccaagtcacgccttagcttatatcagcactattataggggcgttaccgagagaacacatcattatcatgaatatgtgtggcaggggcgataaagacttggaggccgttttaccactgctagaaaaaatgggaaagctgtgac

SEQ ID NO: 281511 - DNA, 754 bp, Unknown
  Bacterial polypeptide expressing nucleotide sequence isolated from the Sargasso Sea
atgaaagataacaaaatgcaaattactaaaaatgaatctttatctaaggtagataagatgttttgtgagttaaaaaataataaaaaattagctttgatgccttttataatggctggggatcccaatattgaaataacgtctgagatcttattaaagttacaagaaaatggagctaaccttattgaattaggtatcccttacagtgacccacttgcagacggacctgttattcaagtggcggcctctcgcgccttaaagtcaggaactaacccaagaaaagtaattaaacttttagagtctttaaaaggtaaattaaatattcccatcatccttttttcttacttaaatccattactatgttttggctttgaaaagttttgtgagatggcatctaatgctggcgtttctggactaatagttcctgatctccctttagaggaagcttataaattttctaaaatagttagtaatcattctatggacttaattttattggtagctccaactactccttttgaaagaatgaaacaaatatcaaatcatacaaaaggctttacttatttagtaagtgttacaggtgtcactggcgagagaaacaagatggaaaatagagtagaaaatcttattgctaaattaaaagatgtaaatagcaatccaattgctgttggttttggaatatccactccagaacatgttaataaagttcgtgagtggggagcagatgggagtaataattgggagtgcatttgtaaaa

SEQ ID NO: 281512 - DNA, 1363 bp, Unknown
  Bacterial polypeptide expressing nucleotide sequence isolated from the Sargasso Sea
tatgtctgaccagctaaaatatttcttagaagaaagcaaaatgccaaaaacttggtataatattgctgctgatctgccaaaaccaatggagccgcctcttcatccaggtactttaaagcctattggaccagatgatttagctcctttatttccaatggcattaattgggcaagaagtttcacaagatagagaaattgaaattccagaacctgtaagaaaaatatacaaacaatggagaccttcgccactgtatagagcaagaaatttagagaaatttttagatacaccagcaaaaatttattacaaatatgaaggggttagcccaacaggaagtcacaaaccaaatactgcagtagcacaagctttttttaataaagaagaaggaactaaaaaaattactactgaaacaggtgctggtcaatggggtagttctttagcatttgcatgtcaaatatttggaatcgaattagatgtatatatggttaaagttagctttgaacagaagccttatagaaaattaattatgcaaacatacggcgctagttgttttgcaagtccttcgaatagaacagatagtggaaaagctatactagccaaagaccctaacaatacaggtagtttgggtatagctatttctgaagcagttgaaatggcagcaaaagatcctaatacaaaatactcgctcggaagtgttttaaaccatgtattaatgcatcagactatagttggtaatgaagctttgctgcaaatggagatggcagatgattaccctgatattttagttggctgtactggaggtggaagtaacttttcagggttagtactacccttcctaggaaaaaaatttagagaaaataaaaatacaagagtaatagcatgtgagccaaaatcttgtccttcgttaacaaaaggtaaatatgtttatgattttggtgatacgggaagactaactcctttggtaaaaatgcatactttaggatcacaatttattcctccagcaacccattctggtggtttgagatatcatggaatggcacctttagtaagtcatttaaaagaaattggtgcaatagaagctcaagcttttggtcaaaaagaatgctttgaagctggtgtaaactttgcaagatcagaaggaatagttcccgctcctgaagcaacacatgcagttaaaggtgctattactgctgcattggaatgtaaaaaaaatggagagtcaaaaacaattctatttaatttatgtggccatggtcattttgatatgaaagcttatggagattattttgataataacttagctgaagacaaatacgatgaagctggagttaataaagctttagaagaactacctaaaattgcatag

SEQ ID NO: 281513 - DNA, 221 bp, Unknown
  Bacterial polypeptide expressing nucleotide sequence isolated from the Sargasso Sea
tgaatacgccgctgtcactgatcagcagccctgggatgccctgcgcctggtcagtgagctggaaggaatcattccggcactggagaccgcccatgccttcgcctggttggagcagctctgcccgacgcttcctgagggaagtgaaattgtgatcaattgttcaggccgcggcgacaaagatgtcaacacagtggctgaaaagttgggtgatcaactctgaa

SEQ ID NO: 281514 - DNA, 1366 bp, Unknown
  Bacterial polypeptide expressing nucleotide sequence isolated from the Sargasso Sea
tatgagcgactcaattaaatacttacttgaagaaaataaagcaccaaagttttggtataatatcaatgcagatttaccaagtccaccaccacctcctttacatcctggaactaaacaacctgcaggtcctgatgactttgctcctttatttccaatgggtctaataatgcaggaggtttctactgaaagagaaatagaaatacctgagccagtaagagaagtttataaacaatggagaccctctccattatttcgagcaagaagattagaaaaatttttagatacaccagctaaaatttattataaatatgaaggtgttagtcctactggaagtcacaaaccaaatactgcggtccctcaagcattttttaataaagaagagggaataagtaagatttttactgagacaggtgctggccaatggggtagttccctggcgtatgcaggtcaaatttttggaatagatattgaggtttttatggttaaggttagctttgatcataaaccatatagaaaattaatgatgcaaacttttggggctaactgtcatgctagtccatctaatttaactgatttcggtaacaagttattatcagaaaattctgataaccctggaagcttgggaatagctatatcagaagcaatagaagcaactgttaaaagcggaggtaaggcaaaatactcacttggaagtgttttaggccacgttctaatgcatcaaactataaatggtaatgaagctattatgcaaatggagatggctggagattatcctgatataattgttggctgtacagggggtggtagtaatctttctggattaatgtttccatttttaggacaacagttaaggggcggtcaaaaaattgatataattggatgcgagcctgcatcatgtccttcatttactaagggtaagtatgcttatgatcatggagatatggcaaaaatgactccattaattaaaatgcatactcttgggtctgatttcttaccaccagctaatcactctggtggattaagatatcatggcatgtcttatcatttaagtcacttatatgagttaggtcttatgagagcaaaggcttacggtcaaaaagattgttttgaagctggtttaacttttgcaaaacaagaaggaattatccctgctccagagggaaaccatgcaatcaaaggtgctattgatgcagctttagaatgtaaagaaaaaggtgagtcaaaaactattctctttaatttatgtggtcatggatattttgatatgtcagcttatgatgattatctaaatggatcaatggctgatgatgttattgacgatgatggaataggtaaatctatttctcaaataccagaagtagcataa

SEQ ID NO: 281515 - DNA, 292 bp, Unknown
  Bacterial polypeptide expressing nucleotide sequence isolated from the Sargasso Sea
gatgtggagtgaaaaattgaattcttataaaacagggcccgatgaaaatggtcgatttggtaattacggtggaatgtttgtatccgaaacgttgatgcctctaattattgagttaaaagttcaatacgaaaaagctcgggaagatcaggattttctgtcggaaatgaattatctttggaaacattatgtaggacgtccaagccctctttattttgctgaaaggattacagaaaaggtatcaggcgcaaaaatctattttaagcgtgacgagttgaatcaccacgggtgccca

SEQ ID NO: 281516 - DNA, 1329 bp, Unknown
  Bacterial polypeptide expressing nucleotide sequence isolated from the Sargasso Sea
tatgacagaatcagttaaatacatccttgaagaatctaaagctccaaaattttggtacaatattaattcagatttacctagtccgccacctccaccattgcatccaggtactaaacagcctgcaggtcctgatgattttgctcctttgtttccaatgagtttaattatgcaagaagtttctactgaaagggaaatagaaattcctgaaccagtaagggaaatatataaacagtggaggccatctccattatacagagcaagaagattagaaaagttcttagatactccagctaaaatatattacaaatatgagggagtaagccctacaggtagtcacaaaccaaatacagcagttcctcaagctttttttaataaagaagaaggagttaacaaaatatttactgaaacaggtgcgggtcaatggggaagctcactggcttttgcaggacagatgttcggaatagaagttgaagtttttatggttaagattagttttgatcaaaaaccatatagaaaactaatgatgcaaacttttggaggtaaatgtcatccaagtccatcatccttaactgattttggaaaaaaactattagaagaaaatccaaataacccaggaagtcttggtattgcaatatctgacgctattgaagctgttgtaaagagtcaaggtaaagcaaagtattctttaggcagtgttttaggccatgttttaatgcatcaaactattaatggaaatgaagctattttacagatggaacaagctggtgattatccagatataattgtaggttgtacaggcggtggtagtaatctttctggtctgatgtttccttttttaggacagcaacttagaggaggtaaaaaaatcgatataattggttgtgaacctctttcatgcccctcatttacaaaaggtaaatatgcatatgatcatggtgatatggctaaaatgacacctttgattaaaatgcatactttaggttctgattttttaccaccagccaatcattctggaggccttagatatcatggcatgtcatatcacttaagccatctttacgaattgggtttaatgcgagctaaagcttacggtcaaaaagattgttttgaagctggagtaatttttggtaaacaagaaggaattatccctgcacctgaagcaaatcatgctgttaaaggtgcaattgacgcagctttagaatgtaaacaaaatggtgaagctaaaactattttattcaatttatgcggtcatggacattttgatatgtcagcctatgacgattactttagtggcaagctagctgatgatgtttttgaggaagattcagt

SEQ ID NO: 281517 - DNA, 470 bp, Unknown
  Bacterial polypeptide expressing nucleotide sequence isolated from the Sargasso Sea
aatgtttggcagtcaatacatcgaggaaagaataagggctcccaaagcgcctggacctgcgatcatcccattcataactgcaggttatcctaatgctgaggaatttaaacagacactctatgatatttcaaaaaaggctgatgtgattgaaattggggtcccattttctgaccccatggcagatggagtcaccattcagagatcaagtagtgtagccatagaaaatggagtgacattgacatggatctttagtcagcttaaggagattaagctagacattccaattgttcttatgagctatttaaacccactttatgtatttggcatgaaagagcttgtcgaggcttccattgcatctggagttgatggctacattgttccagacttgccaatcgaagaaagcaaggaactcaatggtcaactgacagaggccggcctagctttgatccaattggtcacaccagcgacac

SEQ ID NO: 281518 - DNA, 763 bp, Unknown
  Bacterial polypeptide expressing nucleotide sequence isolated from the Sargasso Sea
aatgataggcggaaaatatattgagaaaaaaataaggactccgaaggcagcgggacctgcgattatcccattcataactgcagggtatccaaatactgaggacttcaagcaaacactccacgaaatcgcaaaaaaagctgatgtgattgaaattggcgttccattttctgatcccatggcagacggggttacaatccagagatcaagccacctggcaatagaaaatggagtaacactttcttggatctttgatcagctaaaagaaattaaattagataccccgattgttttgatgagctatttaaatccactttatgtatttggcatagaagagcttgttgaagcttcaatcgcatctggcgtggatggttttattgttcctgacttgccaattgaggaaagcaaagaactcaatgagcaattgatggatgctgaccttgctttgattcaattggttacgccggcgacaccactggataggatcgaattgatttctaatcagagtacaggatttatatatgctgtcactgtcaagggagttacaggtggagaagatgctttatctgcagatgtaacagactacctaaagcaggtccaagagatctctagaatacccgtttgtgctggatttggtattagagaaaagtctgatgtagaaatgatttccgattatgtcgatggcgtcattgttggttctgcaattgtagaaacaattgaaaagggcaacagcccaacggaattcttagatcaacttaaaaactaa

SEQ ID NO: 281519 - DNA, 325 bp, Unknown
  Bacterial polypeptide expressing nucleotide sequence isolated from the Sargasso Sea
catgttattgcacgatgacgatgggttaattcaggagacacattcagtttcagccggtcttgactatccgggtgttggtccggagcacgcattcttgcaatcgataaaccgagtacaatatacatcggcaagagatgatgaagccttggaattattgagagaggtttgtgaatacgaaggaatattgcctgccattgaaagctctcatgcttttgttgaggcaagaaaatgggccagaggaaaccaaggaaagcgaattttaatcggactctctggacgtggcgataaggacatgcccactctcagcaaattaatgaatgaatga

SEQ ID NO: 281520 - DNA, 691 bp, Unknown
  Bacterial polypeptide expressing nucleotide sequence isolated from the Sargasso Sea
aaagttgcaagaaaatggagctgaccttattgaattaggcatcccgtatagtgacccacttgcagatggacctgttattcaagtggcggcctctcgcgccttaaagtcaggtactagcttaagaaaagtaattaaacttttagagtctttaaaagataaattaaatatccccatcatccttttttcatacttgaatccattactatgttttggctttgaaaggttttgtgagatggcatctgatgctggagtttctggactaatagttcctgacctccctttggaggaagcttataaattttcaaaaattgttagtaaccattctatggacttaattttattggtagctccaactactccttttgaaagaatgaaacaaatatcaaataatacaaaaggctttacttatttagtaagtgttacaggtgtcactggtgagagaaacaaaatggaaaatagagtagaaaatcttattgctaaattaaaaggtgttaatagcaatccaattgctgttggttttggaatatcaactccagaacatgttaataaagttcgtgagtggggagcagatggagtaattattgggagtgcatttgtaaaacgaatctcgagctcaagtgaaaaagatgttgtcgatcatgttggtgaattttgtaaagaaatgcgtttagctgctgatcaaaaaaaataa

SEQ ID NO: 281521 - DNA, 1098 bp, Unknown
  Bacterial polypeptide expressing nucleotide sequence isolated from the Sargasso Sea
tatgagtgaggatagtaaattttttttaaaagacagtgatgtgccaaaacagtggtacaacctgggagcggatttaaaagagcctatgagcccacccttaaatcctggaacaaaacagccaataggtccagatgacttagcacctttatttcccatggaattaataatgcaagaagttactcaagagagatatattgatattccgggaccagttttagaggcttacagtcgttggagatctacgcctctagtaagggccagagctttagagaaagcattagatacaccagccagaatttattacaaatacgaaggagccagtccatcagggagtcataaacctaatactgcattagctcaggctttttataataaagaagcaggtgtaaaaaaaatagcaaccgagaccggtgcaggtcaatggggaacagcattaagttatgcaggggcagtatttggaatagagataaaagtattcatggtaagagtaagctatgatcaaaaaccttacagaagagccataattgaaagctacggtggtagtgttgtagctagcccatcaaatgaaacaaattcaggtagagccatacttgaaaaagatcctaatagttcaggttcactaggtatagccatatcagaggctgcagaggttgctgctacaaatgacgatacaaaatatgcattaggtagtgtgctcaatcatgttttaatgcatcaatccattattgggcaagaagcgctactacaaatggaaatggctaatgattatcctgatattgttataggttgtactggtggaggaagtaatttctcaggtttatgtaatccttttttagggaaaaaattcagaggagaacaagaagttcatgctattgcagttgagccatcttcttgtccttctttaacaaaaggtaagtattcctatgactttggtgatactctaaagtctgcaccattgttgaagatgcatacattaggctctgattttatgccatcacccacgcatgtaggtggactaagatatcatggaatgtctccaatgctatcgcatttagttcataatggtcatatggaacctcgagcttatggtcaaaagga

SEQ ID NO: 281522 - DNA, 802 bp, Unknown
  Bacterial polypeptide expressing nucleotide sequence isolated from the Sargasso Sea
aatgaccagaatacaagaaaaatttaatcagttaaaatcaaaaaacgaagcagctttaatttcatatattatggtaggatatccatcagagaaagcaacattagctgcagtgagaggattgattaaaggcgggacagacattattgaactaggatttccattttcagacccaatagcagatggtccaacaatacaaatggcaagtacagaatcattaaacaaaggaactaaaattgatgatttcttttcaattgtaaaaaaaattcgtaaagaggcagatattccattagtcttgatgacatatacaaatatcttgtataatcaaacatatcaaaaattcatctcacgtgcaaaagaagtaggaattgacggattaattttaccagacatggcaattgaagaatctaaagactatgtaaaagcagcaaaaaagtcaggcatggacacaatatttctagtatcaccaaatacacaaaatgataggctaaagaagataatcaaggcaacgtcaggttttttgtatatggtggcagtgtttggcacaactggagttcagacaaaaattcacaagtatacaatcgatgcattaaagaatacaaaaagatccgcaaatggaaaaattccagtaggagtaggatttggaatatctacagacaaggatgttcacaaatatgtttcatcaggagcagatgcagtaattgtgggtagtgcaaatatcaagatcatggaaaatacgcctgcaaataagattgagagtaagattttcacatttacaaagaaactaaagaataaaacaagataa

SEQ ID NO: 281523 - DNA, 1107 bp, Unknown
  Bacterial polypeptide expressing nucleotide sequence isolated from the Sargasso Sea
tatgtcagatcagcttaaatatttcctagaagagagtaaaatgccaaaaacctggtataatatagctgcggatcttcctaaacctatggagccacctttgcatccaggaaccttaaaacctattggtccggatgatttagctcctctttttcctatggcattaattggccaagaagtttcgcaggaaagagaaattgaaattcctgagcctgtgagaaatatatataaacaatggagaccatcaccactatttagagcaagaaatttagaaaaatttttagatacaccagcaaaaatttattacaaatatgaaggagttagcccaacaggaagtcacaaaccaaatacagcagtagctcaagctttttttaacaaagaagaaggaactaaaaaaattacaactgaaactggcgctggccaatggggaagttcattggcatatgcatgtcaaatatttggcatagaattagatgtatatatggttaaagttagctttgagcagaagccctatagaaaattaattatgcagacatatggtgcaagctgttttgctagtccttcaaatagaactgatagcggaaaagctatactagctaaggatccaaataatactggtagcttaggtattgctatttctgaagcagtagaaatggcagcgaaagatcctaatacgaaatactcacttggaagcgttttaaaccatgttttaatgcatcaaactatagttggaaatgaagctttattacaaatggaaatgactgatgattatccagatatattagttggttgtactggtggtggaagtaatttttcaggattagtatttccttttttaggaaaaaagtttagagaaaataaaaatacaagagtaattgcatgtgagccaaaatcttgtccttcattaacaaaaggtaagtatgtttatgattttggggatacaggaaggcttactcctttggtaaaaatgcatacattaggttcacagtttattcctccagctactcactcaggaggtttaagatatcacggaatggctcctatggttagtcacttaaaagaaattggagcaatagaagctcaatcatttggtcaaaaagaatgttttga

SEQ ID NO: 281524 - DNA, 427 bp, Unknown
  Bacterial polypeptide expressing nucleotide sequence isolated from the Sargasso Sea
agttcctgacctccctttggaggaagcttataaattttctaaaatagttagtaaccattctatggacttaattttattggtagcgccaactactccttttgaaagaatgaaacaaatatcaaatcatacaaaaggctttacttatttagtaagtgttacaggggtcactggtgagagaaacaaaatggaaaatagagtagaaaatcttattgctaaattaaaaaatgtaaatagcaatccaattgctgttggttttggaatatcaactccagaacatgttaataaagttcgtgagtggggagcagatggagtaattattgggagtgcatttgtaaaacgaatctcgagctcaagtgaaaaagatgttgtcgatcatgttggtgagttttgtaaagaaatgcgtttagccgctgatcaaaaaaaataa

SEQ ID NO: 281525 - DNA, 670 bp, Unknown
  Bacterial polypeptide expressing nucleotide sequence isolated from the Sargasso Sea
tatgactaaaaattcattaaaaaatggaccagacgaatttggatattatggagaatttggatcaagatatgcgcctgagatccttatgcccaatttaattgaattagaaaaagcttttaacgatgcgattaaagataaaaaatttattgatgaatttgaatattatttaaaagaatggataggaagaccaaacccactttattttgctgagcagttaacaaatcaaattggtggtgcaaaaatttattttaaatctgatcatttgaatcatctaggtgctcataagggaaataatgcacttttccaaatattgttagctaagagaatgggtaaaactaaagtgctatgtgaaacaggtgcaggagcacatctaatagctacagctgctgcgggagcattcaaatcattacctgtaattgggtacatgggaaaagatgacatttttaaacagtcaaccaatgtccttaaagcaaaactttttggtgccaaagttatagaatgtgttgatggaactggagaaaaaggtgtgcttaaagatgcatgtacagccgtactaaaggcgtggtcaaatgatcctgatgctttttattgttgtgggagcgccataggtccccacccatttcctaggatcgtacaatatgcacaatcagtaataggtaaggaaataaaa

SEQ ID NO: 281526 - DNA, 487 bp, Unknown
  Bacterial polypeptide expressing nucleotide sequence isolated from the Sargasso Sea
tggcggcagtaatgcagccggcatgttctatccttttgtggatcacccggatgttcgtctcgttggtgttgaggcaggaggccgctcgggtggtgacggtgagcatgcagcccctctgacctatgggacaccgggcattcttcatggaagcctgagctacgtattgcaggacgctgatgggcagacggctgacgttcattcagtgtctgcaggactggattatcccggagttggtccggagcacagtttctggcgagattccggccgtgtcgactacaccagtgtgactgatgctgcggcacttgatgcctttgatatggtggctcagcaagagggagttctgcccgcacttgaaacttcacatgccttggcatgggccgttgaagctgcttccaagatgcgccctgaggaaatcctggtagtgtgcatgtcgggtcgtggtgataaggatgctgctgagatagcaaggctgcgtgggcacgagtaa

SEQ ID NO: 281527 - DNA, 793 bp, Unknown
  Bacterial polypeptide expressing nucleotide sequence isolated from the Sargasso Sea
tctggaggatgcgtttgctttatgcaagactgaatcgcgtcgtgctgttgcaccgttcgttacagccggtgatccagatagtgaatcaacatcggctattttggagtcgatctatgaagccggggcgacgtgttgtgagctcggtgttccttatagtgatccgattgctgatgggccggtaattcagtcctcgtacacccgtgcactcaacgctggtatgaccctcacaaaaatgtttgatgtcgttgctacgttttcaaagtcacactcgatgcccttgctggcaatggcgagttattcacttatatttcgaaacggaatagagacatttgtaaaacgtggtgaggcaagtggtttggcagggttcgttgttcctgacttgccgttagaagagtctgacgaactggacacgcagtgccgacgggcaggccttgctcttgtccgacttgtcacgccaacaacgccaccagagcgagctcgagagatcgccagacggtctacaggatttctttactgcgtatccgttgcaggggtgacaggagagcggactgtattgccagaaaatcttgttgaacgtatccaatggttacgtgaagagtcagacgtgcccatattggtaggttttggaatatcaactgctgatcaggcgagagaggttgctgcagttgccgacggcgtaattgtcggctctgcggttgtccgctgtgtcgaaaaggctcaagaaacaacgtctatgcctgaatctgtaggcgattttgttcgcgaacttgttgaagcgtgtcgtctcaattga

SEQ ID NO: 281528 - DNA, 757 bp, Unknown
  Bacterial polypeptide expressing nucleotide sequence isolated from the Sargasso Sea
ttgcgcatcgataattgttttgaaacactaaaattaaccaataaaaaagccttaataactttcttaactgcgggtgatccaaattatgatttatcactggaactaataaagtcattaccagaagctggtgcagatataattgaaattgggatgccgttcagtgatccaatggctgatggaccggcgatacaggcatcttcactgagggcaataaattcaggtcataaaatggaaaagacctttgaaatgattgaaagttttcggaaagataattctcgcaccccaataattctaatgggatatttcaatcccatatacaattatggggtcgactcttttattaagaagattattgatatcgaagttgacggtgtcatagttgttgatttacctccagaagaggataatgagctttgtaacgcgctagaaagtgctgacctttcatttataagattagttactcccacaaccaacgcagatagactcaataaaattcttcaaaaaacctcaggatttttatattatgtatcaatagctgggataacgggctcaaagagacccgaaatagacgaagttgagaccgctgtccaagaaattaaaacaaaaacaaatatcccgataggtgtgggttttggaataagaacaaaagaggatattgagagagtcggaagttttgccgacggggttatcgtaggttcagtattagttgatataataaaaaataatgagcgcgagtcttctttaaagataaaataat

SEQ ID NO: 281529 - DNA, 802 bp, Unknown
  Bacterial polypeptide expressing nucleotide sequence isolated from the Sargasso Sea
aatgtcaaaaataaaagaaaaatttaaggaattaaaatcaaaaaaagaatctgcattaatctcctacattatggcaggatatccatcagaaagagctacacttgctgcagttagaggattaattcagggaggtacagacattattgaactaggttttccattttcagatccaattgcagatggaccaacaatccaaatggcaagtaccgaatcattgaatggtggaacaaagattgacaatttctttgcaattgtaaaaaaaattagaaaagaatcagatattcctttggtgttaatgacatacactaacatcttgtataatcagacatatcaaaaattcatttcacgtgcaaaacaagcaggcatagacggattaattttgccagatatggcaatagaggaatcaaaagaatatgtcaaagctgccaaaaaaataggcatagatacaatatttcttgtttccccgaatactgaaaaagatcgattaaaacaaattatcaaatccacgtcaggtttcctttacatggttgcagtttttggaaccacaggagttcaaactaaaattcacaaatataccattgatgcacttaaaaatacaaaaaattccgcaaaaggaaagattccggtaggggtaggatttgggatttcaacagaaaaagatgtccaaaaatacgtatcatcaggagcagatgcggtaatagtaggtagtgcgaacataaagattatcgaaaacacgcctgcaagcaagattcaaactagaattgcaacatttacaaaaaaattaaaaaacaaaaccagataa

SEQ ID NO: 281530 - DNA, 766 bp, Unknown
  Bacterial polypeptide expressing nucleotide sequence isolated from the Sargasso Sea
atgaatagaattaatcaagtatttaaaaactcaaaagatattctgtctatatatttcacatccggttttcctaaattagatgatacccttgaaataattaaagaacttgatagttccaatgttgaaatgattgagattggtttgccttttagtgatcctcttgctgatggaccaacgattcaaaaaagctctgaaattgctcttaaaaatggtatgactactgatttacttttcaaacaattaaatggtcttcgtgcaataaccgatattccagttgttattatgggctacttcaacccaattctacaatatgggtttgaaaagttttgtacaagatgtaaaaatgttggtatagatggactaattgttcccgaccttcctgttgaaatataccaaaaagattacattaaaatcactgaaaaatttggcttaaatatgatgtttttaatcactccacaaacatcaaatgaaagaatttataaaattgataaattttctaatggatttatttacatggtaagcagttatagtgttactggtgccagaaactcctttgatgaatatcaaattgattatttcaagagaataaaaaaaatgaaattatccaacccacttttaataggttttggtattggaaataacaatacttacaagactgcatgtaaatatagcagtggggcgataatcggttctgcatttataaaacatattaagaaaaatggtgtcaaaagaactaaagattttataagcgaaataactgaatgat

SEQ ID NO: 281531 - DNA, 574 bp, Unknown
  Bacterial polypeptide expressing nucleotide sequence isolated from the Sargasso Sea
atgaactcaagaatatcaaaaactttttcaaataatgaaaataaattagtaacatttgttactgctggcgatccagatattattacttctgagaaaattattaatacaatagcatcaagtggtgctgatattattgagataggaatgcctttttcagaccctatggccgatggtccaactattcaattgtcaagtaatagggctataaaacaaaatattaatttagataaaatattttctatatgtaacaactttagaaaaaataatagcaaaatacctataatcctaatgggttattataatataatatttagttatggaattgaaaaatttgttaaagaatgtaacaataacggtgtagatggtttaataatagtagatttgcaacctgaagaggatgcagagttattaaatgcaataaaaaaaactgcaataaatttaattagattaattactccaacaacagattccaaaagacttgataaaatattagaaaattcttctggatttttatattatgttacaattacaggcattacaggacaacactcagcaaatatagatcaattaaaat

SEQ ID NO: 281532 - DNA, 508 bp, Unknown
  Bacterial polypeptide expressing nucleotide sequence isolated from the Sargasso Sea
ttgacttctaaaattaaagaagttttttcaaatattaaagccgaaaatagaaaagctctcataacatatattgtttcgggtgatcctgatactgaaactacaattgagatcatgaactctatggttcgacagggaactgatatcattgagttaggtatacctttttcagatccgatggcagaaggtatatcaattcaaaaaggtcatgaacgagcattagaaaagggcgcttctttaagcggtgcttttgaattacttaaaaaattcagggtaaatgataaaaaaactccgattatatttatgggttacatgaatacatttgaatccctgggggctaataaatttatgctagaagctgtcaaagcaagtttagatggcatattgatagtagacatgcctcctgaagaaagttcaaactttagcattgaagctaaaaaggtcggtgtagatataataagactgatagcacctacaaccagctctacaagggctaagaaaatttgttctc

SEQ ID NO: 281533 - DNA, 1237 bp, Unknown
  Bacterial polypeptide expressing nucleotide sequence isolated from the Sargasso Sea
tatgaaacttaaaaaaggaattccagtaattgaccaaggtaacaaattaggtttttggggtggcaaatttggaggaaattttgttcctgagacattaaaaaaaccaatcgaagatttagaaatacttttcaacaaacttaagaaggataaaaaatttatcaatgaaagagataaatattttaaaaattgggttggttcgcctacccgtttcataaaactagaaaatttaactaaacatgttgggggagcgcaaatttggtctaaggttgtatccgatgccaatggaggcgcacataagatttataatgctactgtccattgtttgcttgctaaaagatctggaaaaaaggttatttgtggagatacaggtgcagggtatgcaggaaaaatgttaagtatggcagctaaaaagtttggtcttaaatgtaaaatttttatgggagcgaaggacatagaaagacaacagccaaatgtaaaagctataaaaaaaaacggtgcagaagttattccggtttactctggaagccaaacacttgtcgatgctgtttctgaatgtatgcgtttctgggttgcaaactgtgacacgacagcgatgtgtgtaggtagtacagtaggaccggcagtatttgttcgtatatgtgggtggagtactagccaaatttcaagggaacttaaagttcaattaattaatgaattcggctctatacctaaaaaacttaaattgtacaattgtgttggtggtggaagttctagttttggattttggaacgaatttatggatattgataagagacagtgtgaatttattggtgtggaagctgggggtccaaaaaaaagtaaaaaacatgcagcaccattaacttatggatcaaaaattggaattttgcacggagctgctcaatacgtaaatcaaaactcagatgggcaaatagaagaaacagagtcaatatctgcagggcttgactatcctggtatctccccacttcattgttttttaaaagacacaaagagagcaagatatactgctgcaagcgatgaggatgctttagaggcatttaagctagtaactaaatatgaaaaactaagaccatccttggagccgagtcatgctttctctgttgcaataaaggagtcaaaaaaattcagtaaagatacaattgttgtagtcaacagttgcggagatgcatacaaagataaacaaattataaaaaaaagattgggaaaaaagtatgcctga

SEQ ID NO: 281534 - DNA, 808 bp, Unknown
  Bacterial polypeptide expressing nucleotide sequence isolated from the Sargasso Sea
aatggccacaagaattttaagaacctttgatgaattaaaatcaaattctcaaactggtttaattacatatcttacagctggatttccaaatcaagacttatgtcttgatataattaatgaactttcaaaatcgggaagtgatttgatagaaattggcatgcctttttcagatcctatggctgaaggacctataattcaacaatcatctaagattgcattggataatggtcatacaatggagttaacctttgatcttataaaaaagtttagaagtaaaaattctcaaacacctattatattgatgggttattacaatcctatttatcaatatggaaatgagaactttataaaaagatgtttagatgatggtgtggatggtttaattgttgttgatttaccacctgagcatgattctgagttatgtgatctaacaatagatattgatcttgattttataagactcgctacacctacaactgacaaaaaaagattaaatatagttttaaacaaaagctcaggctttctttattatgtctcaattatgggtataactggaacaaaagaacctaaccttgatattttaaaggagcaggttattacattaaaaaaagaaaccgatattcctattggtgtcggatttggtattaaaagaccagaccaggctcaaaagatatctgaattttctgatgcaatagtagtaggctcatctttgattgaaaaaataatgggaaattatcaaaataataaagaaaatttagttttatcagaggtttctgagtatataaaaagtcttaaggccgtgatttaa

SEQ ID NO: 281535 - DNA, 763 bp, Unknown
  Bacterial polypeptide expressing nucleotide sequence isolated from the Sargasso Sea
tatgtttggcggtcaatacatagaggacagaataaaggctcccaaagcgcctggacccgcgatcatcccattcataactgcaggttatcctaatgctgaggactttaaacagacactctatgatctcgcaaagaaagcggatgtgattgaaattggggttccattttctgaccccatggcagatggggtgactattcagagatcaagccatatggccatagaaaatggggtgacgttgacatggattttcagtcaacttaaagaaattaaactagacaccccaattgttctgatgagctatttaaatccactttatgtatttggcttgaaagagcttgtcgaggcttccattgaatctggagttgacggctatattgttccagatttgccaattgaagaaagcaaggaactcaatgatcaactgacagacgctggtctagcattgattcaattggtcacaccagcgacaccatcagatagaattgaaattattaccaaacaaagctcaggatttatttatgcagtgactgttaagggcgttacagggggagaaaatgctttgtctgctgatgtgacggattacttggaacaagttcatgagatttcaaaaatacccgtatgcgccggctttggtatcagagataagtctgatgttgaaatgattgctgagcatgtagatggcatcattgtcggctctgcaattgttgaaacaattgagcaaggcaatagcccaacagaatttttagatcggcttaaaaattaa

SEQ ID NO: 281536 - DNA, 418 bp, Unknown
  Bacterial polypeptide expressing nucleotide sequence isolated from the Sargasso Sea
aatgaaattaattgataaaataaaatctaataataaatctagaaaaatttcatttgtttcttatataactgcgggcgaccctgatattaatacaagtttaaatataatgaaaaatttagctgaaaatggtactgacataattgaacttggtgttcctttttcagatccgatatctgatggtcctattatacaaaaagccactgaaagggctttgagcaacaaagttgatatgaaaaaagtattagacctagttaagaaatttagaaaaaattactctacaccaatagtcatttttggatattataatccattcctaaaatatgggttaaataaaatcatgaagaatattaaagatgcgggagcagatggagtattagtagttgatctccctcctgaagaagcagaagagatacaagag

SEQ ID NO: 281537 - DNA, 1249 bp, Unknown
  Bacterial polypeptide expressing nucleotide sequence isolated from the Sargasso Sea
ggagccgcctcttcaccctggtactttaaagcctatcggtccagatgatttagctcctttatttccaatggcattaattgggcaagaagtttcacaagatagagaaattgaaattccagaacctgtaagaaaaatatacaaacaatggagaccttcaccattgtatagagcaagaaatttagagaaatttttggatacaccagcaaaaatttattacaaatatgaaggtgttagcccaacaggaagtcacaaaccaaatactgcggttgcgcaagctttttttaataaagaagaaggaactaaaaaaattactactgaaactggtgctggtcagtggggaagttctttggcttttgcatgtcaaatatttggaatcgaattagatgtatatatggtaaaagttagttttgaacagaagccttatagaaaattaattatgcaaacatacggcgctagttgtttcgcaagtccttcgaatagaacagatagtggaaaagctatactatccaaagaccctaacaatacaggtagtttaggtatagcaatttctgaagcagttgaaatggcagcaaaagatcctaatacaaaatactcgcttggaagtgttttaaaccatgtattaatgcatcagactatagttggtaacgaagctttactacaaatggaaatggctggagattatccagatatattagttggttgcacaggtggtggaagtaatttttcaggattagtatttccttttttaggaaaaaaatttagagaaaataaaaatacaagagttattgcttgtgaaccaaaatcttgtccttcattaacaaaaggtaagtatgtttatgattttggagatacaggaagacttactcctttggtaaaaatgcacacattgggttcacagtttattcctccagcaactcactctggaggtctaagatatcatggaatggcgcctatggttagtcacttaaaggaaattggagcaatagaagctcaatcatttggtcaaaaagaatgttttgaagcaggtgtaaattttgccagagctgaggggatagtcccagctccagaagcaacacatgcagttaaaggtgctattacagctgcaatggaatgtaaaaaaaatggagaatcaaaaactatcttatttaatttatgtggtcacggtcattttgatatgaaagcttacggtgattattttgaaaataatttatccgaagataaatatgatgaagcagggagtaataaagct

SEQ ID NO: 281538 - DNA, 226 bp, Unknown
  Bacterial polypeptide expressing nucleotide sequence isolated from the Sargasso Sea
aagggttgaatattcatcagcaacggatgacgaagcgttagaagcattcaggtggttatcagaaaaagagggaataattccagctttagaaactgcacacgctattgcttatttaaaagataaaaataataatatcaaaaaaaatgaacatgttattttgaatttatctggaagaggagataaagatataaataccattgcaaaggaattaggaattgaactatga

SEQ ID NO: 281539 - DNA, 901 bp, Unknown
  Bacterial polypeptide expressing nucleotide sequence isolated from the Sargasso Sea
atgagtgatacagttaaatacatattacctgaatctgaaattccaaaaaactggtacaacattacagcagatcttccagaacctcctccccctgttttgcatccaggtactggagagcctataggacctgatgatttagctcccctttttccaatggaactcattttacaggaagtaagttcagaacgttatatagacattccagaacctgtaagagatatataccgccaatggcggccaagccctctttatcgagcaagacgattggagaaaacactcgatacacctgcaaaaatatattacaagtatgaaggtgtcagccctacgggtagccataaaccaaatactgcagttgctcaggctttttataataaagagtctggtgtaaagaaaatttcaactgaaactggagccggtcagtggggatcttctttagcatttgctggttctatttttggattggaaattcaggtttatatggtgaaggtaagtttccaacaaaaaccttatcgaaaagcaatgatggaatccttcggagcgacatgtatagcttcaccatcagagacaaccgagtttggtaaggcttaccttgacaagaatccagattctaaaggaagtcttggaattgctatttctgaagcggttgaagttgcagcaactaatgatgatgttaaatattctcttggaagtgtacttaaccatgtacttatgcatcagacaattgtgggtgtagaagctttgaagcaaatggaaatggcaggtgactatcctgatgtaatagttggctgcacaggtggtggttcaaattttgctggacttatgttcccattccttggcgaaaaacttcgtggaggatctaatataagggtaaaagcaattgaacctgcagcatgtccatcct

SEQ ID NO: 281540 - DNA, 439 bp, Unknown
  Bacterial polypeptide expressing nucleotide sequence isolated from the Sargasso Sea
aatgaaaaaatataaacaacccagcactattggaagatttggtgagtttggtggaatgtatgtttcagaaacattaatgcccctattattagatttagataaatcttacaaaaaaattcaaaaagacaaaaaatttaaaaaagaactaaatgatctttttaaaaactatgtaggtagaccctcttcattgcactatgctaaaaatctttctgaatatattaatggaccaaaagtatattttaaaagagatgagctaaatcatacaggcgcccataaaatcaataattgcctaggacaaatactccttgcaaaaaaaatgggcaaaacaagaattatcgctgaaacaggtgctggacaacatggagtcgcaacagctactgtttgtgctctttttggtcttccttgttatatttacatggggtcaaaagatatcgaaaga

SEQ ID NO: 281541 - DNA, 799 bp, Unknown
  Bacterial polypeptide expressing nucleotide sequence isolated from the Sargasso Sea
aagaggaatagcaagagatgctgatcaaagatcaaagattgcagtaaaaacaaatgatggtcgaattgatcctgtaggtgcttgcgttggtatgagagggtcaagggtacaagctgtatcgtcagagttaggtaatgaaagaattgacataattatttatgatgacaatcctgctcagcttgttataaatgcactttctcctgcaaaagttgaatctattgtaatggatgaagactctagatcaatggatattgctgtcaatgaggataatttagccttagcaatagggtctagaggtcaaaatataagacttgcatcaagattagttggatgggatctcaatattattagtaatgaagaagctgaagcaaaagttaaggttgatgaaacagaatttttagctaagatcattgatacccttggagttcaagaagaagttgctgaaaaaataatatcttctggctttttgtcttttgatgaaattgcctatgcagaagattcaaaattaaaagagtttattgaatcagatgaggaagttttaagaattaagacagcttcagaggatgcagcacttcttgaagcaatgggtgcagtgactgaagaagaagataatgttgaatcattatcagatttaaatcttgatgaagacaacataggtaaattatctaataagggtattaaaaataaagatgatttagcagagctttcagtagatgaactgcaagaaataattgagatttcttcagatgatgcttcaaagatgattatgaaggcaagagaacattggtttaacgaatag

SEQ ID NO: 281542 - DNA, 496 bp, Unknown
  Bacterial polypeptide expressing nucleotide sequence isolated from the Sargasso Sea
atgaattcctatcagcaacctgatgcttccggccatttcggcccttacggcggcagcttcgtcagcgaaaccctgacccacgccatccaggaactgcgcgaggcctacgcgcgctaccagaacgacccggagtttctggccgaattccagtacgaactcaagcacttcgttggccgcccgtctcccatctaccatgcggcgcgcaccagccgcgaaatgggcggcgcgcagatctacctcaagcgcgaagacctgaaccacaccggcgcgcacaagatcaacaacgtgatcggccaggccatgctggccaagcgcatgggcaagccccgtgtgattgcagaaaccggcgcgggccagcacggcgtggccacggccaccatctgcgcccgctacggcctggaatgcgtggtgtacatgggcgccgaagacgtgaagcgccagagccccaacgtgtaccgcatgaagctcctgggcgccacggtggtgcccgtgatcc

SEQ ID NO: 281543 - DNA, 514 bp, Unknown
  Bacterial polypeptide expressing nucleotide sequence isolated from the Sargasso Sea
gttcgtcagtacaacaaagacattcctattggtctgttgctgtacagcaatctggtgatggccaaaggcatcgacagcttttatcagcaggcgcagcaagcaggcgtagattctattctgatcgccgacgtaccactgcatgaaagtaagttattcagaaacgccgcgatgaaatacgacatcgcacctatttttatcgcgccgccaaacatcacagacgaaagcttacgtgaactggcctcttacggccgtggttacacttatctgttaagccgcgcgggcgtcactggcactgaaactcaggccgctatgcctgccagcacgctgattaatcagctgaaagaatacaacgcagcccctaccttgctcggttttggcatctccaaaccagagcatgtcaaagcagctattgaaagcggagctgcaggcgctatttcaggctcagccatagtgcagatcattgaaaaatatcaggcagaaccagaacaagtaaaacagcagttgtttaactttg

SEQ ID NO: 281544 - DNA, 379 bp, Unknown
  Bacterial polypeptide expressing nucleotide sequence isolated from the Sargasso Sea
ttcagcaactctagtcaaaggaagcgtaggaatacttcatggaaccaaaacgtatttaattcaaaataatgacgggcaaataatagaaacacacagtatatctgccggattagattatcctggggtaggcccagagcacagttttctcaaagataccgaaagagcgagttacgtagcagccactgataaagaagcccttaaggctctagctttaacttcaaaactagaaggtataatcccggctttagaacctgctcacgcattagcttacttagaggaattagcaccaaagctggataagaaagatattatccttcttgggttaagtggacgtggagacaaagatatcgatactataatgcaaaatatgtctttgtaa

SEQ ID NO: 281545 - DNA, 946 bp, Unknown
  Bacterial polypeptide expressing nucleotide sequence isolated from the Sargasso Sea
gcgcacaagatcaacaactgcatcggccagatcctgttggccaagcgcatgggcaaacagcgcatcatcgccgagactggcgctggcatgcatggcgtggccaccgccaccgtggctgcacgtttcggcatgcagtgcgtggtgtacatgggcaccaccgacatcgaccgccagcaggccaacgtctttcgcatgaagctgctcggcgccgaggtgatcccggtcactgccggcaccggcaccctcaaggacgccatgaacgaagccctgcgcgactgggtgaccaacgtccacaacaccttctacctgatcggtaccgccgccggtccgcatccgtacccagccatggtgcgcgacttccagtcggtgatcggcaacgaagtgcgcgagcagatcctggggaaggaagggcgcctgcccgactcgctggtcgcctgcatcggcggtggctccaacgccatcggcctgttccaccccttcctcgatgacgaaggcgtgcagatcgtcggcgtcgaggcagctggccatggcatcgacaccggcaagcatgcggcgagcatggccggtggcgcaccgggcgtgctgcacggcaaccgcacctttctgctgcaggacgaggacggccagatcaccgatgcccactcgatttccgccggcctcgactaccccggtgtcggcccggaacacgcctggttgcacgaaatcaagcgcgtcgaatacgtaccgatcagcgatgacgaagccctcgaagccttccaccactgctgccgtctggaaggcatcatcccggccctggaaagcgcccacgcgctggccgaagccttcaagcgcgcacccaagctgcccaaggatcacctgatggtgatcaacctgtccggtcgtggcgacaaggacatgcagaccgtgatgcaccacatgcaggacaaccaggagaagcacgcatgag

SEQ ID NO: 281546 - DNA, 820 bp, Unknown
  Bacterial polypeptide expressing nucleotide sequence isolated from the Sargasso Sea
gaagcacgcatgagccgcctgcagaaccgtttcgccgaactgaaagcggaaaaccgcgccgcgctggtgaccttcatcaccgccggtgaccccgactacgccacctcgctgagtatcctcaagggcctgccggacgctggcgccgacgtgatcgagctgggtatgcccttcaccgacccgatggctgatggcccggccattcagctcgccaacatccgcgcgctggccggcaagcagggcatgcagcagacgctgcagatggttcgtgaatttcgcgaaggcaaccagagcacgccgctggtgctgatgggctactacaacccgatcttcgtctacggcgtcgaacgcttcatcgctgatgccaaagaggccggcgtcgacggcctgatcgtggtcgacctgccgccggagcataacgacgaactgtgcgagccagcgcagagcgccggtatcgacttcatccgcctgaccacgccgaccaccgacgacgaccgcctgcccaccgtgctggccggcagctccggtttcgtctactacgtgtcggtggcgggcgtgaccggcgctggcgcggcgaccatggatcacgtcgaggaagccgttgcacgcctgcgtcgccacaccgacctgccgctgtgcatcggtttcggcatccgcaccccggagcacgccgctgaagtggccaagcgtgccgagggcgcagtggtcggttcggcgctgatcgacaagatcgccgaggcgcaaagcccgcagcaggccatcgacggcgtgctcggcctgtgccgcgaattggccgagggcgtgcgcagcgcgcggcgctgac

SEQ ID NO: 281547 - DNA, 580 bp, Unknown
  Bacterial polypeptide expressing nucleotide sequence isolated from the Sargasso Sea
catgacctcatttcgcaccggccccgacgctcgcggcctgttcggccgcttcggcggtcaattcgtcgccgaaaccctgatgccgctgatcaactcgctggcggccgagtatgagaaggccaagagcgatccagccttcctcgaagagctggcctacttccagcgcgactacatcggccgcgccagcccgctgtattacgccgagcgcctgagcgagcacttcggcggagcgaagatctacctcaagcgcgaagacctgaaccacaccggcgcgcacaagatcaacaactgcatcggccagatcctcctggccaagcgcatgggcaagcagcgcatcatcgccgagaccggcgccggcatgcacggtgtggccaccgccaccgtggccgcgcgcttcggcatgcagtgcgtggtgtacatgggcaccaccgacatcgaccgccagcaggccaacgtcttccgcatgaagctgctcggcgccgaggtgatcccggtcacggccggcaccggcaccctcaaggacgccatgaacgaggccctgcgcgactggggaccaacgtccacaacaccttctacctga

SEQ ID NO: 281548 - DNA, 412 bp, Unknown
  Bacterial polypeptide expressing nucleotide sequence isolated from the Sargasso Sea
ggcaaggggctgaattccaatctacatgctgcttcgcttactgcaggctctccaggagtgcttcatggaaatagaacttacttacttcaagatgatgatggtcaaataattgatgctcattcaatatcagctggattggattatcctggtattggacctgaacattcatggttgcatgatattggtagaataaaatatttatcaactaccgatgaggaaagtttagcagccttcaaactttgcagtagtttagagggtattattcctgcgctcgaacctgctcatgcattgcatgtaactggaaaacttgcttctaaaaggaagggtcaaattatcattatgaatatgtgtggcaggggtgacaaagatttatcagcagttttacctctaatgatgaaagatgacaattaat

SEQ ID NO: 281549 - DNA, 846 bp, Unknown
  Bacterial polypeptide expressing nucleotide sequence isolated from the Sargasso Sea
tcttttttatgctgaaagaattagtaatgatcttggaggtccaaagatttattttaaaagagatgaattaaatcatacaggtgctcataaaatcaataattgtatgggacaaattttattagcaaaaaaaatgggtaagtctagaattatagctgaaacaggagcaggacagcacggtgtcgcaacagcaacagtttgtgctctatttggtttaccatgcatagtttatatgggagaaaaagatatcgaaagacaatctccaaatgtttttagaatgaaattactcggtgcagaaatacgatctgtttctactgggtcaaaatcacttaaagatgctatgaatgaagcattaagagattgggtaacaaatgttaaagatactttttatataattgggaccgctgcaggaccacatccatacccagctatggttagagattttcaatcggtaattggtaaagaagttcgtaatcaacttgaagaattggaaggaaaggctccagatttattaatagcatgtattggtggtggttcaaatgctttaggattgtttcatgaatttttagatgactcaaatgttgaaatgattgctgtcgaagcagcagggcatgggataaaaactgataagcatgcagcaagtttaacaggtggtaagccaggtgtattgcatggaaataaaacatatttattacaatcaaagtctgggcaaattcaggaggcacattctatttcagcaggcttagattatccaggaattggacctgagcattcatttttgtttgaggaaaaaagagtgacatacatgtcggcaacagacaaagaagcactggaagcttttaaatattg

SEQ ID NO: 281550 - DNA, 446 bp, Unknown
  Bacterial polypeptide expressing nucleotide sequence isolated from the Sargasso Sea
gtgcggcgtcgaggccgcgggagagggcatggggcccgggcagaagcacgcggcgacgctcacgctgggcacccccggcgtcctgcacggatccttctcgtacctcatccaggacgaggaggggcagatcatcgagccccactccatcagcgcgggcctcgactacccgggcatcggccccgagcactcgttcctgaaggacttcggcagggcggagtaccacgcggtgacggaccaggaggcgctcgacgcgttcgtccgcgtctcgcgcaccgagggcatcatcccggcgctcgagacgtcgcacgccctcgcctacctcgagaagctcatgcccacgctgaagaagggacagaaggtcgtgctcaactgctccggccgcggcgataaggacgtcaacaccgccgccgccgccctcgacatctcgggagaggtcgacatctgaa

SEQ ID NO: 281551 - DNA, 526 bp, Unknown
  Bacterial polypeptide expressing nucleotide sequence isolated from the Sargasso Sea
tatgacaattaaaaattcttataaacaattacccgatgataaaggttactttggtgtctttggtggaagatatgtatctgaaactctaatgcctctaatactagaagtagaaaaagaatatgaaaaaataaaaagtgaaaataactttaaagaagaattaaatcactatatggaaacatacattggaaggccaagtcctctattttttgcaaaaagaatttctgaagatctaggtgggccaaaaatatatttcaaaagggatgaattaaatcacacaggtgcacacaaaataaataactgtatgggccagatacttcttgcaaaaagaatgggtaaaaaaagaataattgctgaaactggagcaggtcaacatggcgtagcaactgcaactgtatgtgcattatttggattaccgtgtattgtttacatgggagaaaaagatattaaaagacaatcacctaatgtttttagaatgaaattattaggtgctgagattagaagtgtaaaaactggttcaaaatcacta

SEQ ID NO: 281552 - DNA, 1042 bp, Unknown
  Bacterial polypeptide expressing nucleotide sequence isolated from the Sargasso Sea
tacttcgcagaacgtctaacaaatcatttaggtggtgcaaaaatttactttaaaagggatgagttgaatcatacgggtgcacacaagattaataatgtacttggccaaataattcttgccaaaagaatggggaaaacacgaataattgcagaaacaggagccggccaacatggcgtagctacagctaccgtctgtgcaaagtttggattaaagtgtgttgtttatatgggatctcacgatgttgaaagacaggctccaaatgtctttcgtatgaagcttcttggtgctgatgtgatacctgttacgtcgggccgaggcaccttgaaagatgcaatgaatgatgcactgcgtgattgggtaactaacgtgcgtgatacattttattgtatagggacagtagcaggtccacacccctaccctgctatggtaagagactttcaatcaataattggaaaagaaacaaaagaacaaatgaacgacgtggaaggtcgtcttccggatacattgatagccgccattggtggtggatctaatgcaatgggtctattctttccttttttagacgacagttcagtgaatataataggtgtagaagcaggcggaaaaggcgtaaacgaaaagatggaacactgtgcctctcttaccggcggcaggccaggagttttacatggaaatcgtacctacctattacaaaatgaagatggccagatattagagggattttctatatccgctggtcttgattatccaggaataggtcccgaacatgcatggcttcatgaaataggtcgagcaaaatatgtttcaattacagataaagaggctcttgaagcatttcaactgagttgtaccactgaaggcataataccagccttagaacccagtcatgccctcgcccacgttatgaagattgcacctagtcttcctccagatcatataatttgtatgaatatgtgcggaagaggtgataaagatatttttacagttgctcgccatcttggatttgacatgtctggtccggagggaaggaatgtagagtaat

SEQ ID NO: 281553 - DNA, 439 bp, Unknown
  Bacterial polypeptide expressing nucleotide sequence isolated from the Sargasso Sea
gccttgggtatattctcaggattcgttgatacagatgctgaccttgttggggttgaaccagcaggaggtgctgcagtgtttagaggtactcctggagtagtgcatgggtctctgtcttacctgatgcaagacgagtgggggcaagttttagaagcagaatcgatttcagctggacttgactatccaggaatcgggcctgaacatgctcaccttgctgacattggacgcgctaggtacgagaaagtatctgatagtgaagtagtcgatgcatttcagttgctttcgcgcactgaagggatcattccagctctcgaacctgctcatgcgcttgcttggatgagtagagcacgtagggaactttctgggaaaactgtgcttctcaatctctccggacgaggggacaaagatgcaacacagatgatggaattgctgggatgag

SEQ ID NO: 281554 - DNA, 466 bp, Unknown
  Bacterial polypeptide expressing nucleotide sequence isolated from the Sargasso Sea
tatgtcaaaacggtttaatgagttacctgatgatcacggtttttttggagactatgggggtcaatatgtctctgagattttaatgccattaatccatgagcttgatcagttgttccatgaacaaattgaaacacccgaattcaaacgttcattgaatgattattatcaacattatgttgggcgtccgtccccattatattttgccaaacgtttaaccgagcattgcgcaggtgctcagatctactttaaacgtgacgagttaaatcacaccgggtctcataaaatcaacaattgtattggtcaaattttattggctcaaaaaatgggtaaaactcgaattatcgctgaaacaggagctggacaacatggtgtcgctacggccacagtatgtgcgctatttggtattccttgtacgatttatatgggggccaaagatataaaaacgtcagcaaccgaatgttttagg

SEQ ID NO: 281555 - DNA, 585 bp, Unknown
  Bacterial polypeptide expressing nucleotide sequence isolated from the Sargasso Sea
aatgtcagatagaataaaaaaaacatttgaaaataaaaataagaagttggtcactttcaccacagggggtgatcctgatttagaaacaagttttaagatcttaaaaacaattataaaaaacaatattgacattattgaaataggcatgcccttttcagatccaatggcagacggaccaactattcaggaatctagtacaagatcgattgaaaacgggacaacaataaataatatttttgagctggtaaaaaaaataaggactttaaataatgtaattccagttattttaatgggttattataattcaatatttaacatgggagttgaagagtttacttctaagtgtgttgaggtaggtgttgatgggttaataattgttgatttgcaacctgaagaagacgctgatttgtattttaaaacaaaacagcataatattgatcttataagattaatcaccccaacaactaacagggaaagattaaaaacaatattaaataatgcttcgggatttttatattatgttactatcacaggtattactggtcaaaactcagcaaacttaaaagaattagaatcatcaatcca

SEQ ID NO: 281556 - DNA, 678 bp, Unknown
  Bacterial polypeptide expressing nucleotide sequence isolated from the Sargasso Sea
tgcagagacaggggctggacaacacggtgttgctgttgctacagtctctgcaagatttggacttccatgcgtgatttatatgggcgcaaaagatattgagagacaaaagcctaatgtctttagaatgaagctgcttggagctgaggttgttcctgtgagatctggcaatgctacattaaaagatgcgatgaatgaagcactgagagattgggtagcaaacgtaaatgatacattctatataattggaactgttgcagggcctcacccttatcctgaaatggttcgcgattttcagtcaataattggcaaagaaacaaaagaacaaattcttgaccaggagggacgtcttccggatcaactgattgcatgtattggtggaggatcaaatgcaatgggcctattttatccctttttagatgatataagtgttaagattacaggaattgaggccggtgggatggggcttcaaggagaaaagcattgtgccagcctaacagcgggcagacccggtgttctccatggaaatagaacatatcttcttcaggatgatgaagggcaaataattgaaggtcattcaatttctgcgggtctcgattacccggggattggaccagagcatgcttggcttaaagagtcaggaagagttgaatattttgcaattacagatagtgaggcagt

SEQ ID NO: 281557 - DNA, 930 bp, Unknown
  Bacterial polypeptide expressing nucleotide sequence isolated from the Sargasso Sea
tgtccctgcgcttaagcagttagaaaacgaatttaataaagcacagaaagatcctgaatttcaggcagaactaagtaaattacttaacgagtatgcaggccgtcctaccccgcttactttaacgcgtaacttagttaaaaacccaaaagtaaaactgtacttaaagcgtgaagatttactccacggtggtgcgcacaaaacaaaccaagttttaggccaagctctgcttaccaaacgtatgggtaaaaaagaagtgattgctgaaacaggcgccggccagcacggcgttgcaacggcacttgcctgtgcgttacttggactaaaatgccgcatttatatgggtgcaaaagatgttgaacgccaacaaccaaatgtatttagaatgaagctaatgggcgctgaagttattccggtaaccgcaggctcgggtacattaaaagatgcggttaacgaggcactgcgtgattggtctgccaattatcaagaagctcattaccttttaggtactgccgcgggtcctcacccattcccgactattgtacgtgaatatcaaaaaataattggtgaagaagcaaaacaacaagtacttaaagccgaagggcgtttgcctgatgcggttattgcgtgtgtaggcggtgggtctaacgcaattggtatgtttaccgattttattgatgagccaagcgttaaactcattggcgttgaacctgcaggtaaagggttagacacgcacgaacatggcgcaactatctgtaaaggaacaaaaggtattttgcacggtacttacacttatattatgcaaaatacagatggccaaattgaagagtcttactctgtatcggcgggactagattaccccgcagttggccctcaacatgcctttttgcacgaaactggccgtgctcaatatgtcggtattaccgacaccaa

SEQ ID NO: 281558 - DNA, 622 bp, Unknown
  Bacterial polypeptide expressing nucleotide sequence isolated from the Sargasso Sea
atggataatttaactgacttaccaaactctgatggtttttttggagaatatggagggaaatttgttcccgagacacttatgcatgctttaaaagagttggatgaaacatatgcaaaactaaaaaataatcccaagtttgtagaagaaattgatcaagatttagtccaatttgtgggtaggccttctccattatattttgctaaaagattaacagatcactattctggcccacaaatatggcttaaaagagaagatttaaatcatacaggtgctcataaaattaataacacagtcgggcagatattgcttgccaaggcgatgggtaagaaaagaattattgctgaaactggtgccggacaacacggagttgccactgcaacagttgcagcaagactcggtcttgagtgccatatttatatgggtgctgccgatgtagagaggcagtctttgaacgtatacagaattaagcttcttggagcaaaagtgcatgcagttgattctggtactgcaacgcttaaagatgctttgaatgaggctatgagagactgggtaactaacattgaggatacctattatattattggcagtgttacaggtcctcatccatatccaatgatagtta

SEQ ID NO: 281559 - DNA, 379 bp, Unknown
  Bacterial polypeptide expressing nucleotide sequence isolated from the Sargasso Sea
gttagtgggcctcatccttatcgtatgattgttagagattttaattgtgttgttggtgaggaattgatttcacagtcaaaagagttatttaattcaatgcctgatgcaattgttgcatgtgtaggcggtggatcaaatgcaatgggagctttttatccttttattaaatttaatgaaacaagacttataggtgttgaagccggcggggaaggtgtagaaacaggagaacatgctgcaccattaaacgatggcactccaggggtcctacatggatcattaagttacctcatgcaagatgacagcggtcaagtcaaaggcacaaaatcagtttctgctggacttgattatcctggagttggacctgaacattcttggctaa

SEQ ID NO: 281560 - DNA, 337 bp, Unknown
  Bacterial polypeptide expressing nucleotide sequence isolated from the Sargasso Sea
atgactagaattgagcaaactttcaaaaagttaaaagctgacaataagaaagcctttgtctcttatatcatggccggtgatcctgattttaaaacatctttggaattagttatgggactcccggatgcaggagttgatattattgaattaggtctcccgtttactgatccaatggcggatggcccaactatacaactagctggcggccggtcgctcgataacggaatgacacttttgaagacgttggaattagcaaaaaaatttagagagaaaaatgatagcacgcctatcgttttaatgggctactacaatccaatttacagtcacggcgtcgaaa

SEQ ID NO: 281561 - DNA, 754 bp, Unknown
  Bacterial polypeptide expressing nucleotide sequence isolated from the Sargasso Sea
atgggtaaatctagaataatagctgaaacaggagcaggacagcacggtgttgcaacagcaacagtttgtgctctatttggtttaccatgcatagtttatatgggagaaaaggatatcgaaagacaatccccaaatgttttcagaatgaaattactcggtgcagaaatacgatcagtttctacagggtcaaaatcacttaaagatgctatgaatcaagcattaagagattgggtaacaaatgttaaagatacattttatataattgggaccgctgcaggaccacatccttacccagctatggttagagattttcaatctataattggtaaggaagttcgtaaacaacttcaagaagtggaaggaaagactccggatttattaatggcatgtattggtggtggttcaaatgctttagggttgtttcatgaatttttagatgactcaaatgttgaaatgattgctgttgaagcagcagggcatgggataaatactgataaacatgcagcaagtttaacaggtgggaagccaggtgtgttgcatggaaataaaacatatttattgcaatcaaaatctggtcaaattcaggaagcacattccatttcagcaggtttagattatccaggaattggaccggaacattcatttttatttgaagaaaaaagagttacatacatgtccgcaacagacaaagaagctctggaggcttttcaatattgttgtaaattagaaggtataattccagctttggaaccag

SEQ ID NO: 281562 - DNA, 729 bp, Unknown
  Bacterial polypeptide expressing nucleotide sequence isolated from the Sargasso Sea
gtgctgagataagaagtgttgcaaccggttcaaaatcattaaaggatgctatgaatgaagcacttcgtgactgggttacaaatgtaaaagatactttttatataataggtacagcagcaggtcctcacccttatccagcaatggtaagagattttcaatctattataggtgaagaggtaagacaacaaattttaaaagctgaaaataaacttcctgacttattaatggcttgtattggaggtgggtctaatgctctaggtttgtttcatgaatttcttgatgaaacacaaattgaaatgattgcagtagaggcggctggtcatggcattgacacaaatcaacatgcagctagtttaagtggagggaaaccaggtattttacatggaaataaaacgtatcttttacaatctaatgatggccaaattgatgaggcgcattctatatctgcaggcctagactatcctgggattggtcctgaacactcttatttatttgaacaaaaaagagttaagtatatgtctgcaacagataaagaagcaatagaagcatttcaatactgttgtaatctagaaggtataataccagcacttgaaccttcacatgcgcttgcagttttaaaaaaaatagcaaaaaaatataataaagacaaaattgtagttatgaatatgtgtggtagaggcgataaagatattttcaccatagccgaagaactaaatataaaattataat

SEQ ID NO: 281563 - DNA, 586 bp, Unknown
  Bacterial polypeptide expressing nucleotide sequence isolated from the Sargasso Sea
ctgccgaccgccagcacgccggatcccgccagcctgcagccttccgtgcgtcctggagcccacggtcgcttcggtcgtttcggtggccagtacgttccggaaaccctgatgccggctctggcggagctggagcaggccgcggcccaggcctggaacgatcccgccttcaccgcagaactcaaccagctgctcaagaactacgtcggccgggccacaccgctttacgaagctgaacggctgacggcccactaccgccgcgccgatggtggcccccgcatctggctcaagcgtgaggacctgaatcacaccggcgcccacaagatcaacaacgccctcggccaggcgctgttggccctgcgcatgggcaagaagcggatcatcgccgagaccggtgccggccagcacggtgtggcgacggccaccgtctgcgcccgcttcggtctggagtgtgtgatctacatgggcgccgaagacatgcggcgccaggccctgaatgtgttccggatgcgcctgctgggggccacggttcaaccggtcacggccgggaccgccaccctgaaggacgccaccagcgaagcgatccgcg

SEQ ID NO: 281564 - DNA, 526 bp, Unknown
  Bacterial polypeptide expressing nucleotide sequence isolated from the Sargasso Sea
atgcctgataaaaatggaagatttggtatatacggtggaaggtacgtagcagaaaccttagtacccgccttggaggaattatcagagcaatatgaaatcataaaaaatgatgaaaacttccttaaggaatttacagacgatcttaaatattatgttggaagaccttcacctttatattttgcaaaacgatggacagagttattaggtggagcaaggatttttcttaaacgcgaagatctaaatcatactggagcgcataaaatcaacaatactgttggtcaaattctgctcgctaaacatatgggtaagaaaagaataattgctgaaaccggtgctggacaacatggtgtagcaactgcatctgtagcagcgcgacatggactggaatgtatcatctatatgggagaagaagacatcaagaggcagtcactcaatgtttttaggattaaattgctgggagcaaaagtagttggtgttagctctggaacatctacccttaaagacgcaatgaatgaggcgatgagag

SEQ ID NO: 281565 - DNA, 515 bp, Unknown
  Bacterial polypeptide expressing nucleotide sequence isolated from the Sargasso Sea
tatgaaaataggaataccaaaagacggacgatttggagattttggcgggaagtatattccagaaacattagctcctgcaatagaagagttagagagaaattatctgaaaattagaaatgataaaaatttcaagaaagaattgggcagactgttaatagattatgcaggaagaccaactccaatatactttgcaagaaatcttacgaaaaccgtaggaggtgcaaaaatctacttaaaaagagaggatttgttacacggcggagctcataaaattaacaacactttgggacaagcgttacttgcaaaacgtatgggtaaaaaaagaatcattgcagaaactggagcaggacaacacggagttgcaactgcaatggcctgtgcaagtttaggattgaaagctgagatttacatgggttatgttgatactgttcgtcaaaaacaaaatgttttcagaatggaattactgggagccaaagtgcatgcagtgaaatcaggttcaaagacactaaaagacg

SEQ ID NO: 281566 - DNA, 851 bp, Unknown
  Bacterial polypeptide expressing nucleotide sequence isolated from the Sargasso Sea
atcctcgaactggaagagcagtacgagaacgccaagaccgacgatagtttctgggccgagatgcacgatctctggacccattacgtgggccggcccagcccgctttatttcgctgagcggatgaccgaggcactgggtggtgcgaagatctatctcaagcgggacgagctgaaccataccggcgcgcacaagatcaacaacgtgctgggccagatcatcctggcccgccgcatgggcaagacccggatcatcgccgaaaccggcgccgggcagcatggcgtggccaccgccacggtctgcgccaagttcggtttgaaatgcgtggtctacatgggcgcgcatgacgtgcagcgccaggcgcccaatgtgttccgcatgcgccttctgggggccgaggtggtgccggtgacctctggccgtggtacgcttaaggatgcgatgaacgatgcgctgcgcgactgggtgactaatgtgcgcgataccttctattgcatcggcaccgtggccgggccgcacccgtatcccgccatggtacgtgatttccagtcgatcatcggcaaggaagccaaggagcagatgcacgccgccgaagggcgcctgcccgacacggtgatcgccgccatcggcggcgggtcgaatgccatgggcctgttctttcccttcctcgacgacaaatcggtcaacatcatcggggtcgaagcgggcggcaagggcgtcaatgaaaagatggagcattgcgcctcgctcaccggcgggcggcccggtgtgctgcacggcaaccgcacctatcttttgcaggacgacgatggccagatccttgaaggttattcgatctcggcgggcctcgatta

SEQ ID NO: 281567 - DNA, 736 bp, Unknown
  Bacterial polypeptide expressing nucleotide sequence isolated from the Sargasso Sea
aaattataccttaaacgtgaagacttacttcacggcggtgcccacaaaacaaaccaagtactcggccaggcgttattaacaaagcgtatgggtaaaaccgaagttattgccgaaacgggcgccggtcaacacggtgttgctacagcattagcatgcgcattattaggcttaaaagcccgtatttatatgggtgcaaaagatgttgagcgtcaagcacctaacgttttccgaatgaagctaatgggtgcagaagttattccagtaaatgctggctctggcacacttaaagatgcggtaaacgaagccatgcgtgattggtctgcgaattacgataccgcgcattacctgttaggaacggctgcgggccctcacccattccccactattgtacgtgaataccaccgcatgattggcgaagaaacccgagctcaaattttggaaaaagaaggccgtttaccagatgctgttgttgcctgtgtaggtggtggttctaatgctattggtatgtttgctgatttcatcgacgaaccctctgtacgcctggtaggtgttgaacctgcgggtaaaggagtgcacaccaaagagcacggtgccactattgtgacgggcactaaaggtatactacacggcgcttataccttcattatgcaagaccacgaaggccaaattgaagaaagctattccgtatctgcgggattagactatccggcggttggccctcaacatgcctatttag

SEQ ID NO: 281568 - DNA, 583 bp, Unknown
  Bacterial polypeptide expressing nucleotide sequence isolated from the Sargasso Sea
gtgcgggattcctgccgtgatcggcgaagagtccaagcagcagtgtcaggaggccttcggccggctgcccgacgtgctgatggcctgtgttggcggtggctccaatgccatgggcctgttccatccctttgtgcaggacacgtctgtgcggctgatcggtgttgaggccgctggtgatggtgtggccaccggtcgccacgccgcgacgatcaccgagggccgtgccggtgtgctgcacggggccatgagcctgctgctgcaggacggcgacggtcaggtgatggaggcccactccatcagtgcaggtctcgattaccccggagtggggccggagcacagctacctgcgggaaatcgggcgtgctgagtacgccgcagtcaccgaccaacaggccctcgatgccctgcgcctggtcagtgagcttgagggcatcattccagccctggaaaccgcccacgccttcgcctggcttgagcagctttgccccaccctggtggacggcacggaagtggtgatcaactgctccggccgcggcgacaaggacgtcaacaccgtggcggagaagcttggggatcagctctaa

SEQ ID NO: 281569 - DNA, 870 bp, Unknown
  Bacterial polypeptide expressing nucleotide sequence isolated from the Sargasso Sea
gaaatttataaacaatgggagaccatcaccattatatagagcaagaaaattagaaaaacatttagatacaccagcaaaaatttattataaatacgaaggtgtaagcccttctggtagtcacaaaccaaatacagcggttgctcaagctttttataataaagaagaaggtacaaaaaaaataactactgaaacaggtgctggacaatggggaacatctttagcatttgcatgtaaattgtttggaatcgagttagatgtttacatggtaaaagtaagttttgaacaaaaaccatatagaaaacttgttatgcaaacatatggtgcaagatgtgttgcaagtccatcaaaagaaacagatagcggaaaagcaattttagcaaaagatccaaacaatactggaagtttaggaatagctatttcagaagcagtcgaaatggcagctaaaaatccagatacaaaatatgctttagggagtgtattaaaccatgttctaatgcatcaaactattgttgggaatgaagctttgcttcaaatggaaatggctgatgattatcctgatattttagtaggttgtacaggaggtggaagtaatttttctggattggtaaatccatttttaggaaaaaattttagagaaggaaaaaaaacaagagtaattgcttgtgaaccaaaatcatgtcctactctgactgaaggtaaattcgtttatgattttggagatactggaaaacttacaccattagtgaaaatgcatactttaggatcacaatttattccaccagcaacgcattctggaggattgagatatcatggaatggcaccattagtgagtcatttaaaagaaaataatgcaattgaagcaaaagcgta

SEQ ID NO: 281570 - DNA, 881 bp, Unknown
  Bacterial polypeptide expressing nucleotide sequence isolated from the Sargasso Sea
gggcaaaacacgtattattgctgagactggagccggccaacatggagttgctacagcgactgcatgcgccatgctcggttttgagtgcgtagtgtatatgggagaagaagacatcataagacaacgtctaaatgtatttagaatggaacttcttggcgcagaagttagatctgtaacttcaggaaccaaaactcttaaggatgctattaatgaagcaataagagattgggttactaatgtagatgatactcactatcttattggcagtgctgttggacctcatccttaccctgaaatcgtgagggattttcaaaaagttataggtgccgaatcgaaagatcaaattatcgagcagtctggcaggttgcctgactatgtaattgcatgtgtaggcggtggtagtaatgccatagggttattccatgaatttattaaagatgaagaagtaaatttaattggagttgaagctggtggattaggccaggaagaagggcaacatgcagccactttaacttatggggaaataggggttttgcacggtagtatgtcttatttgctgcaagatgaagatggtcaagtttcgccggctcacagtatatctgctggactggattaccctggcgtaggacctgagcatagttacttaaaagacgcgggccgtgctagttacgttagtgtcacagatcaggaagcaattgtagggttcaaactattaaccaaaactgaaggtataatacctgctcttgaaccagcgcatggaatcgcatatctttcaaaatttgccccaactctttcacgtgattccattgtgttatttggtttgagcggtagaggtgataaagacatcgacacagtatctgaattcgaaacgaaccaataaa

SEQ ID NO: 281571 - DNA, 547 bp, Unknown
  Bacterial polypeptide expressing nucleotide sequence isolated from the Sargasso Sea
atggataacagttactttggaaaatacggaggaacattcatacctgaaaccctctcctttgcattagaagaattagagaatttgtatagggaaattaaagataatagatcctttaaagaggatctaaaaaatatatatgcagattatgtaggaaggccgtctccattatattttgccgaaactttaacaaataatttaggtggtccaaaagtttggtttaaaagagaagacctaaaccatacgggtgcacacaaaataaacaacacagttggacaagcattattggcaaaaaaattaggtaaacaaagaattattgctgagactggtgccggacagcacggggttgcaacagcaactatttgcgcaaagttaaatttagactgtgtcatctatatgggcgaaacagatatagagagacaagaattaaatgtttttaaaataaaaaccttaggtgcagaagttatccctgtgtcatctggtacagccacattaaaagatgctctaaatgaatctataagagattgggttactaatgtgattcaactca

SEQ ID NO: 281572 - DNA, 701 bp, Unknown
  Bacterial polypeptide expressing nucleotide sequence isolated from the Sargasso Sea
tggttcaagaacattaaaagatgctgttaacgaagctatcagagattgggtcactaatgttgaaaatacttattatataattggaagtgctgttggccctcacccatatccctatatcgttagagaatttcaatcaataattgggattgagtcaaggaaacaaatattagacaaaacaggaagcttgccaaattatgtacttgcttgtgtaggtggcggttcgaatgctatcggaattttttcaggatttatcgatgatttagacgtttctctaataggaatagaagcaagtggagaaggaatagatactgaaaagcatgcagctactttaacaaaaggaacccctgggatattacatgggtcccttagttatgttctacaagatagttttgggcaaattcaagaagcacactcaatatctgctggcttagattatccgggagttggcccagagcattcaaatttgaaagatattgaaagagcacaatattactccgcaacagatctgaaggccttagaaggctttaagttattatcagttgaagaaggaattattcctgctcttgaaccagctcatgctttaggctttttaattgattggtcacaggaaattccaaaagatcaatctatcctgttcttgctttctggtcgtggtgataaagatatggaaactgtatcaaaaaaaatggcatcattataat

SEQ ID NO: 281573 - DNA, 673 bp, Unknown
  Bacterial polypeptide expressing nucleotide sequence isolated from the Sargasso Sea
tattttgctaagagactctccaacaaatacaaaacaaaaatttatttaaaaagagaagatctatgccatacaggagctcacaaaataaataatacaattggtcaaattatactggcaaaaaagctaggtaaaaaaagaattattgctgaaactggtgcagggcaacatggcgttgctactgctacagtttgtgctttgatgggaattgagtgtgttgtttatatgggtgaaattgatatttctaggcaagctccaaatgtagcacgaatgaaaatgcttggtgccaaagtcagatctgcaacatctggaagcagaactttaaaagatgcaacaaatgaagcaataagagactggatcgcaaatccaatcgatacacattatattattggatcagtagttggtccgcatccctaccctgacatggtggcaagatttcaatccgtcattggatatgaaactaaaaaacaattacttaaaatggaacaaacggacaaacctactcatgttattgcttgtgttggaggaggaagtaatgcagcaggtttattctatccatttttgaatgatttagatgttgaaattgtatgtgtagaagctgctggaaaaggagttactagcggagaaagtgcagcaacatcaattcttggcacagaaggaattattcatggttcaa

SEQ ID NO: 281574 - DNA, 853 bp, Unknown
  Bacterial polypeptide expressing nucleotide sequence isolated from the Sargasso Sea
gctggacaacatggtgttgcaactgcagctgtgtgcgcgcgtcatggaatagaatgcataatttttatgggatctgaagatatcgaaagacaggcccagaatgtctatagaatgaaattaatgggagcagaagtatgtccggtttcttcagggacatcgacattaaaagatgcaatgaatgaagctatgagagattgggtttcctacatagacgacactcattacattattggcagtgtagccggccctcatccatatcctatgatcgttagggattttaattcgatcgttggaacagaactaaaaaaacaatcaaaaatcctttttggaaagcacccagataaaatagtcgcttgcgttggagggggttctaatgccatgggaattttttacccttttattaaggacaaaatggtagatttaattggagtcgaggccgcaggatctgggttaagttcaggcaagcatgctgcacccttgagcgatggatctcctggagttctgcatggaatgaaaacttatttaatgcaaaactcagatggtcaaattttgggaacccactcagtttcagctgggctagattatcctggagtaggtccagaacattctttcttgaaagatatgggcagagtgcattatgaggcagctacagacaaagaggctcttaaagctttccacgatttaagtcgaattgaaggaataatgccggcgttagagacttcacatgccttagcctgggtatccaagaatgctaaaaaattgaaaaaatcagacattgtggttgtcaatttatctggcagaggagataaagatatgcaatcagtagcgaaagctgatggaattaatttctgat

SEQ ID NO: 281575 - DNA, 622 bp, Unknown
  Bacterial polypeptide expressing nucleotide sequence isolated from the Sargasso Sea
atgtctaataaaaattcactaaaacaattacctaatgaaaaaggttattttggtcagtttggtggaagatatgtttctgaaactttaatgcctttaattcaagaagtagaaaaagagtatttaaaaattaaaaatgattctaattttcaaaaagaattagattattatttaaaaacttacataggcagaccaagccctcttttttttgctagccaaattacgaaaaacttaaatggtcctaaaatttattttaaaagagacgaactaaaccatactggagcccataaaattaataattgtatgggtcaaattttattagcaaagaaaatgggtaaaaaaagaataattgctgaaactggagcaggacaacatggtgtagcaacagcaactgtttgcgcactgtttggattcccttgtattatttatatgggtgaaaaagacataaaaaggcagtcaccaaatgtttttaggatgaaattattaggagctgaaataagaagtgtttccactggatcaaaatcacttaaagatgcaatgaatgaagctctacgtgactgggtgactaatgtaagagataccttttatataattggaactgttgctggacctcatccttatccaa

SEQ ID NO: 281576 - DNA, 466 bp, Unknown
  Bacterial polypeptide expressing nucleotide sequence isolated from the Sargasso Sea
gatgagcgcgatcgctgagagatttgcctgtctgaaagagcgtggcgagacagccttcatcccctacgttaccgcgggggatccggatctggagacgacgaaggcgatcgtggtcgagatggcccgtagaggtgcggatgtgatcgagctgggaatcccgttctctgacccgcttgcggacgggccgacgattcaggcctcatcgcaaagggcactcgacaagggagctacgctcgaaggaatattcggttgtgccgaggacattcggaaagagacggatgttccgattattatttttagctactacaaccccgtgcatcggtatggcctcgaggccttcgtgaaccggtgcgtggatgtgggtgtggacggagcgctggtgacggatctgcctcctgaagaggccggtatatatggggagctaatgtcggcagcgggttggacacggtattcctgctcgcgccta

SEQ ID NO: 281577 - DNA, 946 bp, Unknown
  Bacterial polypeptide expressing nucleotide sequence isolated from the Sargasso Sea
acacccacttagggagttgttcagtgcatataaaaaatatgctacatcagcaacatttaaaaaaaccttaaatagtcaattaaaagattacgttggaagacctacaccgatttattatgctgaatcattgagtaaacaacttggaagttcgcatatttacttaaaaagagaggatctcaatcataccggagctcacaagataaataatgctcttggacaagctttactcgcaaaaaaaatgggaaagacgagaattatcgctgagactggtgctggccaacatggtgttgcgactgcgactgcatgcgcgcgattaaatttgaagtgcgtggtgtacatgggagaagaagatatcaacagacaatctgtaaacgtatacagaatgaaacttcttggtgctgaagtagtctctgttgactcgggcacaaaaactctaaaagatgctctcaatgaggcgcttagagattgggtaacgaatgtagacgatacacactacattataggatcagttgctggacctcatccatatcctatgattgtaagagattttcaatctgtaatagggtatgaagctaggaatcaatttaaaaaagaatataaatgcctacctgattatctcgttgcttgtgtcgggggtgggtccaatgcgataggtctttttcatccttttttaaatgataaagttaaaatcgtgggagtagaggcaggcggttctggaattaagtctggaaaacatgctgcacctttgagtgcaggttcgccaggcgttctgcatggcaacagaacatacatcatggaagatgaaaatggtcaaataaagaatactcattcgatatcagctggactagattatccaggggttggccctgagcattcttggctcaaagatttaaaacgtgttgagtacactgcggttacagatgacgatgcattggaggctttttcc

SEQ ID NO: 281578 - DNA, 954 bp, Unknown
  Bacterial polypeptide expressing nucleotide sequence isolated from the Sargasso Sea
agtaccttaaaacctataggaccagatgatttagctccactatttccatgggcattaatcggacaagaagtttctcaagaaagagaaattgaaataccagacccagttagaaaaatttatcagcagtggagaccgtcacctttatacagagcaagaaagttagaaaagcttttagatacgcctgcaaaaatttattataaatatgaaggcgttagccctactggtagtcataaaccaaatactgctgttgcacaggctttttataataaagaagaaggtacaaaaaaaataactactgaaactggagctggtcaatggggtagttcactggcttttgcatgttcaatttttaaaatagaacttgatgtgtatatggttaaagtaagttatgagcaaaaaccttatagaaaaatgataatgcaaacatttggggcaaattgttatgcaagtccatctgacagaacaccaactggtaaagctattttagaaaaagatcctaataacactggtagtttaggcatagcaatttctgaagcagttgaaatggcggcaaatgatgaaaatacaaaatattctttgggaagtgttttaaatcacgtacttatgcatcagacaattgtaggtaacgaagcaattcttcaaatggagatggctgatgattatccagatatattagtaggatgcactggtgggggaagtaacttttcaggtttggcttttccttttttaggaaaaaaatttagagaaaataaaaatttaagagttatcgcttgtgaaccaaaatcttgccctacaattacaaaaggtaaatttgcatatgattttggagatacggggaatagaacaccattagttaaaatgcatacacttggatcttcatttatgccaccatctactcactctggtggtttgcgataccatggcatggcgccaatgggtaagtcatctgtagat

SEQ ID NO: 281579 - DNA, 825 bp, Unknown
  Bacterial polypeptide expressing nucleotide sequence isolated from the Sargasso Sea
tgtatataaaaaactttcaaagagtgatagcttctggaacgaatttcacagcgaactaaatcattatgtgggtaggccgtcccctctttactttgccgaacgcttgaccgaacgttgtagtggggccaaaatttatttgaagcgcgaggacttgaatcacacgggtgcacataaagtcaacaacacgattggacaggcccttcttgcaaaatatatgggtaagtcgcgtattatcgcagaaactggtgcaggccaacacggcgttgccagtgcaacagttgctgctagactcggtcttgagtgtcatgtttatatgggcgctgacgatatcgttagacaggctccaaacgtataccgaatgaaattgcttggggctaatgtagtgtctgtgaaatcaggctcaaggacactaaaagatgctctcaatgaagccctgagggactgggctacaaacgttgataatacatactatatcattgggacagttgcagggcctcatccatatccacaaatagtaagagattttcaaagcattatcggtcgtgaagctaaagctcaatctcgagagttgttaggtaagttgcctgacgcgctggtagcttgcgtcggtggaggatcaaacgcgattggcttgttccatccttttcttgaggatgagactgttaagatgtatggggttgaggcaggaggctgcggcctgggtacaggaaaacatgctgcaccactgagtgcgggcaaacctggtgttcttcacgggaatagaacctatttgatgactgatgagaacggtcaaatttctgaaacgcactctgtttctgcaggatt

SEQ ID NO: 281580 - DNA, 679 bp, Unknown
  Bacterial polypeptide expressing nucleotide sequence isolated from the Sargasso Sea
aatggagctgaccttattgaattgggcatcccatacagtgatccactcgcagacggacctgttattcaagtggcggcctctcgcgctttaaagtcaggtaccaacctaagaaaagtaattacacttttagagtctttaaaaggtaaattaaatattcccatcatacttttttcttacttaaatcccttgctatgctttggctttgaacagttttgtgagatggcatctaatgctggagtctctggactaataattcctgatctccctttagaggaagcttataaattttctgaaatagtaagtaaccattctatggacttgattttattggtggccccaactactccttttgaaagaatgaagaaaatatccaatcatacaaaaggctttacttatttagtaagtgttacaggtgtaactggtgagagaaataaaatggaaaatagagtagaaaatcttattgcgaaattaaaagaggttaattcaaatccaattgccgtcggttttgggatatccacacctgatcatgttaatagagttcgtgagtggggagcagatggagtaattattgggagtgcattcgtaaaacgaatttctagttcaactgaaaaagatgtcgttgataatgttggtgaattttgtaaagatatgcgtctagctgctgatcaaaaaaaataaa

SEQ ID NO: 281581 - DNA, 913 bp, Unknown
  Bacterial polypeptide expressing nucleotide sequence isolated from the Sargasso Sea
cctgggccaggccctgctggcgctgcggatgggaaagaagcggatcatcgccgaaaccggtgccggccagcatggtgttgccacggccacggtttgtgcccgctttggtctggattgtgtgatctacatgggcgctgaagacatgcgccgtcaggccttgaatgtgttccgcatgcgattgctgggcgccaaggtgcaaccggtgacagctggaacagccaccctcaaagacgccaccagcgaagccatccgtgactgggtgaccaacgttgaaaccacccattacatcctgggttccgtcgctggcccgcatccctacccaatgttggtgcgggattttcacgccgtgatcggccaggagtccaagcagcagtgtcaggaggccttcggacggctgccggatgtgttgatggcctgtgttggtggtggctccaatgccatgggcctgttccaccccttcgttcaggacacgtctgtgcgcctgatcggtgtcgaggccgccggtgatggcgtggccaccggtcgccatgccgccacgatcaccgaaggccgcgccggggtgctccacggcgccatgagcctgctcctccaggattccgacggccaggtgcaggaagcccactccatcagcgctggtctcgattaccccggcgtgggtcccgagcacagctatctgcgcgagatcggacgggccgagtacggcgctgtcaccgatcagcaggccctggatgctctgcggttggtgagtgaactcgagggaatcattccagccctggagactgcccatgccttcgcctggctggagcagctctgcccgacattgcccgacggcagcgaggtggtgatcaactgctcaggtcgtggcgacaaggacgtcaacaccgtggctgaaaagctgggggatcagctctga

SEQ ID NO: 281582 - DNA, 674 bp, Unknown
  Bacterial polypeptide expressing nucleotide sequence isolated from the Sargasso Sea
tgcggtccccatccatttcctgaaatggtttcctggttttcagtcaatcatcggcaaggaggcacgtcagcagatgtttgacagtacaggaaaactgcctgatctgatttatgcctgcgtaggcgggggatcaaatgcaagtggaatatttctcccttttctggaagatgagtcagttgaattagttggagtggaagctgggggaagaggaattgatacgggttcacatgcagcacgcttttacagtggaaacgttgggatagctcaaggatataaaacatattttttccaagacgaagaaggccaaatgcttcacactcattcgattgctgctggactggactacattggagtaagtccgatcttaagtcatctgcatgacgaaaaacggatccgatttactgctactgcagatgacgcagttatttctgcaacaaaacacctaattcgtactgaagggataattcccgccctcgaaagcagtcacgctttcgcttcagttattgaagaagcttctcacattcctgaggggtctcaagttttgattaacctatccggtcgtggtgataaagatatctttaatattgctgaggctattggcgacaaaaaatgggaggaatttttacgccaaaaagctttatcaaatcaaagaataacaacaactgaaatctgaa

SEQ ID NO: 281583 - DNA, 529 bp, Unknown
  Bacterial polypeptide expressing nucleotide sequence isolated from the Sargasso Sea
gaaggaaggtctccagatttgttaatggcatgtattggaggtggctctaatgctttagggttatttcatgaatttttagatgactcaaatgttgaaatgattgctgttgaagcagcagggcatggaataaaaactgataagcatgcagcaagtttgacaggtggtaaaccaggtgtattacatggaaataagacatatttattacaatcaaaatctggacaaattcaggaagcacattccatttcagcaggcttagattatccgggaattggaccagaacattcatttttatttgaggaaaaaagagtttcatacatgtcggcaacagacaaagaagcgctggaggcttttcaatattgttgtaaattagaaggtataattccagctttagaaccagcgcatgcattagcagtattaaagaaaatagcaaaaaactatagtaaagataaaattattgtaatgaacatgtgtggccgaggagacaaagatatttttacaatagctgatgaattaaacataaagatttaaa

SEQ ID NO: 281584 - DNA, 896 bp, Unknown
  Bacterial polypeptide expressing nucleotide sequence isolated from the Sargasso Sea
ggagcacggatccattttaagagagaagatttgaatcatacaggagcccataagatcaataacgctgtcggacaggcccttctagcgaagcatatgggtaagactaggattatagctgagactggcgccggtcagcatggggtcgcaactgcaaccattgcggcgcgattaggcttggaatgtcagatctttatgggtgaaaaagatatagagcgccaagaattgaacgtgtatcgaatgaaccttcttggggctaaagtggtgagtgtgtgctcaggctccagaacattaaaagatgccatgaatgaagctatgcgggattgggtcactagggtgaacgataccttttacgtgattggtacagtggcaggtcctcatccatatccgatgctagttcgggattttcagagtgttattgggagagaagcgcgtatccaaagtctcgataaaattggcagattgccagacgcgctagtggcttgtgtgggtggaggttccaatgcgatcggtttgtttcatccctttcttgatgatgctggagtctctatgtttggtgtagaggcaggtggaaaaggtctggaaacaggtcagcacgccgcacctcttaattccggtgtgcaaggtatacttcatggcaacagaacgtatttaatgcagacaactgatggacagattatggatacccactccgtttcagcaggcctagattacccaggagttggaccagagcatgcgtggcttaaagatataggaagagtggagtacgtggtttcaagtgatgaagaagctttgatagcgttccaaaacgtcacgcgtattgaaggtatcatgccagctttggaaaccgcccatgctcttgcctatgcagaaaaattggcagctgatttagatcctaa

SEQ ID NO: 281585 - DNA, 931 bp, Unknown
  Bacterial polypeptide expressing nucleotide sequence isolated from the Sargasso Sea
aaaaattacaatacaattattaatgaaaaaggctttcaaaatgattacaataacctattaaaagattatgttggaagacctactccacttttttatgctgagcgtatatcagaaaaatataagtgtaaaatatatctaaaaagagaggatttatgtcatactggtgcccataaaattaataatacaattggtcaaatattattagcaaaacgattaggtaaaaaaagaattattgctgaaactggagcaggacagcatggagtagcaactgcaacagtttgtgcattggcaggtattgaatgtgtaatctatatgggagctgttgatataaaaaggcaggctcctaatgttgctagaatgaaaatgctaggtgcaagtgtagtttctgctgaatctggaagtaaaacgcttaaagatgcaacaaatgaagcaataagagattggattaataatcctattacaactcattatattattggatcagtagttggtcctcatccatatcctgatatggttgcgaaatttcaatctgttgtttctgaagaaattaaatctcagttgttagaaaaagaaggaactgaaaaaccaaattacttgatcgctaatattggagggggaagtaatgcagctggattatattatcattatttggaagatgagagtgtaaagattatatcggttgaagcagctggagaaggtattgaatctgggaaaagtgctgcaacatcagtccttgggaaaataggaattatacatgggagtaagactttattgatgcagactaaagacggtcaaatagttgagccttactcaatatctgctggattagattatccaggggttgggcctcttcatgctcatttattagagagcaaaagagcagattttatatctattactgatagtgatgctatgctagcaggcttagaag

SEQ ID NO: 281586 - DNA, 355 bp, Unknown
  Bacterial polypeptide expressing nucleotide sequence isolated from the Sargasso Sea
aatgaaatctaataaacataattggcctgataaagatggtttttttggagaatatggaggtaaatttgttccagaaactcttatgcatgcgttagaagagcttgaaacaacttataataattttaaagataagcctgaatttaaagaacaattttataaagatttatctgaatttgtaggtcgaccatctcctttatattatgctgatagactaacaaaacattatggcacaggctctatttggctaaaaagagaggaccttaatcatacaggcgctcataaaattaataacactataggacaaattttgttagaaaagcaaatgggaaaaaaaagaataatcgctgaaacaggt

SEQ ID NO: 281587 - DNA, 721 bp, Unknown
  Bacterial polypeptide expressing nucleotide sequence isolated from the Sargasso Sea
atggcaattaaaaattcttttaaacaactacctgatgataaaggatattttggttcttttggtggaaggtatgtatctgaaactttaatgccactgatattagaagtagaaaaagaatacgaaaaaattaagaatgacaaaacctttaagggagaattaaaccattatatggagacatatattggaagacctagtccactttttttcgcagagagaattactgaagatttgggtgggccaaaaatttatttcaagagagatgaattaaatcacacaggtgcacataaaattaataattgcatgggccaaatacttcttgcaaaaagaatgggtaaaaaaagaataattgctgaaactggagctgggcaacatggagtggcgactgcaactgtgtgtgcattatttggattaccctgtattgtatatatgggagaaaaagacattaaaagacaatctcctaatgtttttagaatgaaattgttgggtgctgagattagaagtgtcaacactggatcaaagtcattaaaagatgcaatgaacgaagcacttcgtgattgggtaactaatgttagagatacattttatatcataggtacagctgcaggaccacatccatatccagctatggtaagagattttcaatcaataattggggaagaagttagagagcaaattttgaaaatgaacaaaaacttcctgatttattggtggcttgcatagg

SEQ ID NO: 281588 - DNA, 736 bp, Unknown
  Bacterial polypeptide expressing nucleotide sequence isolated from the Sargasso Sea
atgaaaaaaaattcatataaattagggccagatttagatggcaattttggattatttggcgggcgatatgttgctgaaacattaatgcctctaataattgagcttgagaaagcttattcagatgccttaagtgataaaagtttcagaaatgaaattgaccaattttctaaagattatattgggagagagagtccgttatactttgctgagaggttaacaaattatcatgagggagcaaaaatatattttaaaagggacgaactaaatcatactggcagtcacaaaataaataattgcataggacagatactattagcaaagagaatgagaaaaaatagaataatagctgagactggagctggacagcatggagtggccgtagctacagtttgtgctcgatttggttttgaatgtgtaatttatatgggaaaaaaagatattgagcgtcaaaagtctaatgttttcaaaataaaattacttggtggacagattgttcctgtggaatctggaaacggcactttgaaggatgctatgaatgaagcattaagagattgggttgctaatgttgaaaatacttattatttgattggtactgcagcaggtcctcatccatatccatcaatggttagagattttcaatcaattattggtgaagaggcaaaaagacaaattcttgataaagaaaaagtattacctgatgctttagtagcttgtattggcggaggatcaaatgcat

SEQ ID NO: 281589 - DNA, 487 bp, Unknown
  Bacterial polypeptide expressing nucleotide sequence isolated from the Sargasso Sea
gggcctattccacccatttgtcggcgacaccagcgttcgcctgatcggcgttgaagctgccggtgaaggggtcgccagtggtcgccatgccgccacgatcaccgaagggcgaacgggcgttctgcatggggccatgagcctgctgctgcaagactgcgatggccaggtaatggaagcccattccatcagcgcaggcctcgactaccccggcgttggcccggagcacagctacctgcgggagatcggccgcgccgaatacgccgcggtaactgatgcgcaagccctcgaggccctgcagcgcctcagccaactggaagggatcatcccggccctagagaccgcccatgccttcgcttggctcgaaagcctttgcccaactctggctccaggcaccgaggtggtgatcaacctctccggccgcggggataaagacgtgaacaccgtggctgaacgcctcggcgatcaactcaagccagcagacggctga

SEQ ID NO: 281590 - DNA, 409 bp, Unknown
  Bacterial polypeptide expressing nucleotide sequence isolated from the Sargasso Sea
cctgccgaacgccagcactccggatcccgccagcctgcaaccgtccgtgcgtcctggagcccacggacgcttcggtcgcttcggtgggcagtacgttccggagaccctgatgccggccctggcggagctggagcaggcggcggcccaggcctggaacgacccagccttcaccgcagaactcaaccggctgttgaagaattacgtcggtcgggccacacctctgtatgaggccgaacgcctcacggcccattaccgccgcggcgatggcggcccccgcatctggctgaagcgcgaagacctgaatcacaccggagcccacaagatcaacaacgcccttggtcaggcgttgctggccctgcgcatgggcaagaagcggatcattgcggaaaccggtgccggccagcacggc

SEQ ID NO: 281591 - DNA, 469 bp, Unknown
  Bacterial polypeptide expressing nucleotide sequence isolated from the Sargasso Sea
ttcaaatgcaatgggagtcttttatccatttatagatagtaaagatgttgaattaattggtgttgaagctggtggcaaagataaaaatgacgttggtagtgcatctataaatgatgggacaataggcgtcttacatggatcaaaaacatatatccttcaaaatacatctggagagatacttgaaacaagctcaatttcagctggtttggattaccctggagtaggacctgaacattcttatttgtcggattcaaaaagagcaaaatatgtgaaagtttatgatgatgaagcattagatgcattctatgaatgctcaagaattgaaggtattatacctgctcttgaaactgctcatgcaattgcatatctccataaattgaaagaacttaatccaaaagaaaatattgtcataaatatgtctggtagaggcgataaagatctctattcaataatgaatcatgataaataa

SEQ ID NO: 281592 - DNA, 892 bp, Unknown
  Bacterial polypeptide expressing nucleotide sequence isolated from the Sargasso Sea
ttacaaaaaaactatttaaaaatcactgagtcaactgattttaaaaaggaatttaataaactactaactgattatgttggtagaccaacccctctttattttgctaagagactctccaacaaatacaaaacaaaaatttatttaaaaagagaagatctatgccatacaggagctcacaaaataaataatacaattggtcaaattatactggcaaaaaagctaggtaaaaaaagaattattgctgaaactggtgcagggcaacatggcgttgctactgctacagtttgtgctttgatgggaattgagtgtgttgtttatatgggtgaaattgatatttctaggcaagctccaaatgtagcacgaatgaaaatgcttggtgccaaagtcagatctgcaacatctggaagcagaactttaaaagatgcaacaaatgaagcaataagagactggatcgcaaatccaatcgacacacattatattattggatcagtagttggtccgcacccctaccctgacatggtggcaagatttcaatccgtcattggatatgaaactaaaaaacaattacttaaaatggaacaaacggacaaacctactcatgttattgcttgtgttggaggaggaagtaatgcagcaggtttattctatccgtttttgaatgatttagatgttgaaattgtatgtgtagaagctgctggaaaaggagttaatagcggagaaagtgcagcaacatcaattcttggtacagaaggaattattcatggttcaaaaacacttctaatgcaaacccaagatggtcaaattactgaaccttattcaatttcagcaggtcttgattatcctggaaaaggaccaatgcatgcaaatttatttaaatcaaatagaggaaaat

SEQ ID NO: 281593 - DNA, 820 bp, Unknown
  Bacterial polypeptide expressing nucleotide sequence isolated from the Sargasso Sea
atgtcttacaaagtagttgcaaacacgttacgagatggtcccgatgaaaatggccattttggaatttttggcggtcaatacgtagctgaaacacttatgcctttgataatagaggtcgaagacgcttggcagacagctaaaaacgatccaagtttttggagtgaattagaatactacaaagagcactatataggacggcctagtcctctttaccttgccagtagactcacagaacatttcaatggcgcaaaactttattttaaacgcgacgagctgaaccatactggtgcgcataaaataaacaatgtcatgggacaagctctcgtagcgcgtcgtatgggtaaaacaaaaattattgcggaaacaggagcagggcaacatggtgtggcaacggcaacagcttgtgcattgttcaacctagaatgtgaagttttcatgggtgcggaagatgttaagcgtcaaaaaccaaatgtcgaccggatgcgattattaggggcaaaaattcactccgtgacctctgggtcctcaaccttgaaagatgcaatgaatgaggcactaagatactgggtgtccaaagcagaaacacatttctacataattggtacagtcgctggcccccatccctatccagagatggtaagggattttcagtgtgtaataggcgaagagacaaaagagcagattatggcggtagagggcaaattgcccgatacattagttgcgtgtattgggggtggttcaaatgcgattggcctatttcatccctttctcgacgatgacgttaaaataataggggtggaagcagcaggacatggcgtag

SEQ ID NO: 281594 - DNA, 673 bp, Unknown
  Bacterial polypeptide expressing nucleotide sequence isolated from the Sargasso Sea
catactggaagtcataaaataaataattgcataggacagatattattagcaaaaagaatgaggaaaaatagaatcatagctgagaccggagctggacagcatggagttgccgtagctactgtgtgtgcccgatttggttttgaatgtgtaatttatatgggaaaaaaagatattgagcgtcaaaaatctaatgttttcaaaataaaattacttggtggacagattgttcctgtggagtctggaaacggtactttgaaggatgctatgaatgaagcattgagggattgggttgccaatgttgaaaatacttattatttgattggtactgcagcaggccctcatccatatccagcaatggttagagattttcaatcaattattggtgaagaggcaaaaagacaaattcttgataaagaaaatatattacctgatgctttagtggcttgtattggtggaggatcaaatgcattaggtttattctacccatttttagatgatgatgtagatatgtatggtgttgaagcagctggtttgggattaaatgggaatgagcatgccgcttcactatctaaaggagcgccaggtgttttgcatggtaatagaacctacctacttcaagatactgaaggtcagattagagaaggacactcaatttctgccggtctagattatc

SEQ ID NO: 281595 - DNA, 559 bp, Unknown
  Bacterial polypeptide expressing nucleotide sequence isolated from the Sargasso Sea
ggggatgaagcaaaggatcaaataaaaaaggcagaaggcaaattgccagattttttaatagcatgtgttggtggaggttctaatgctatggggcttttttatccctttttaaatgacaggaatgttaaaatgattgctgtagaagctgctggagaaggtctaaataagaaacacgctgcatcaattgcgaaagggcaattaggtgttttacatggaagtaaaacttacattttacaagacgaggatggacaaattattgaaccacactcaatatcagcagggcttgattatcctggtataggtcctgaacatgcgtggttaaaagatactaaaagagttaagtacgttagtgttacagataaagaagcgcttgaagcatttcaattatgtacaaaaattgaaggaataattcctgcactagagccctctcatgctcttgcttatttaattaaaaaagctcgaaaaatacctaaaaacaaaataatcataatgaatatgtgcggaagaggagacaaagatatatttactgttgcaaaaaaattaaaaattaatatctaaa

SEQ ID NO: 281596 - DNA, 280 bp, Unknown
  Bacterial polypeptide expressing nucleotide sequence isolated from the Sargasso Sea
atgtcacaagaagatttattaaaaaaaaaatttgatgagttaaaaaaaaagaaaaaatgcggattcatatcatttataactgctggtgatccggactttaatacatcttataaaatattagagaaacttcccgaatctggagttgatattattgaattaggcatgcctttttcagatccaatggctgatggacctgtgatacaaaaagctaatgatagggcaataaaaaataaaatgaatttaaaaaaaacttttggtctaataaaaaaatttagaaaaa

SEQ ID NO: 281597 - DNA, 520 bp, Unknown
  Bacterial polypeptide expressing nucleotide sequence isolated from the Sargasso Sea
atggataatttaactgatttaccaaactctgatggtttttttggagagtatggagggaagtttgttcccgaaacactcatgcatgctttaaaagagttagatgaaacatatgcaaaactaaagaataacccaaaatttattgaagaaattgatcaagatttggtccaatttgttggaagaccgtctccattatatttcgcaaaaagattaacagatcactattctggtcctcaaatatggcttaaaagagaggacctcaatcacacaggtgctcataaaattaataatactgttggacagatattgcttgctaaggcaatgggcaaaaaaagaattattgctgaaactggcgctggacagcatggagtagcaactgcaacagtggcagcaagactgggtcttgagtgccatatttacatgggtgcagcagatgtaaaacgccaatctcttaatgtttatagaattaagttacttggagctcaagttcatgcagtggactctggaacagcaacgcttaaag

SEQ ID NO: 281598 - DNA, 628 bp, Unknown
  Bacterial polypeptide expressing nucleotide sequence isolated from the Sargasso Sea
gccgacggtcctgtcattcaaaacgccaatatacgtgcattggccgctggcgtgacgccagctcagtgctttgaactgataagccgtattcgtcagtacaacaaagacattcctattggtctgttgctgtatagcaatctggtgatggcgaaaggcatcgacagcttctaccaacaagcacagcaagcaggggtagattctattctgatcgccgacgtgcctttgcacgaaagcagactattcagaaacgcagcactgaagcacgacatagcgcctattttcatagcgccgccaaacatcactgatgacagcttacgtgaattggcgtcttacggccgtggttacacttatctgttaagccgcgctggtgtcactggcactgaaactcaggccgctatgcctgccagcaccctgattaatcagctgaaagaatacaacgcagcccctaccttgctcggttttggtatctccaaaccagagcatgtcaaagcagctattgaaagcggagctgcaggcgctatttcaggctcagccatagtgcagatcattgaaaaatatcaggcagaaccagaacaactaaaacagcagttgtttaactttgtctccgctatgaaagccgccacctaac

SEQ ID NO: 281599 - DNA, 526 bp, Unknown
  Bacterial polypeptide expressing nucleotide sequence isolated from the Sargasso Sea
tatgtcccgcatcgctcaaacgttctcacaattgtccgctcagggccgcaagggcctgattccgttcatcacggcgggcgacccgtaccccgaaatgacggtcgacctgatgcacgcgctggtcaagggcggctccaacgtcatcgaactgggcgtgccgttttccgacccgatggccgatggcccggtgatccaacgtgcgtccgagcgtgcattggccaagaaggtcggtctgcgtacggtgctggagtatgtgcgggcatttcgcaccaccaattcgaccaccccggtggtgctcatgggttacgccaatccgattgagcgcatgggcgtagaagcctttgccaaggctgcatccgaagcgggcgtggacggcgtgctcgtggtcgactatccgccggaagaatgcgaggcctttgccaagaccatgcgcgccgccggtatcgatccgatcttcctgctggcgcccacgtctacggaagcacgcatcgcgcagatcgcccgtgtggcgagcggctacatctac

SEQ ID NO: 281600 - DNA, 835 bp, Unknown
  Bacterial polypeptide expressing nucleotide sequence isolated from the Sargasso Sea
agtccgcttttttttgctgaaagaataactaaggatttaaatggaccaaaaatatattttaaaagggatgaattaaatcatacaggtgctcataaaataaataattgtatgggtcagatactgcttgcaagaaaaatgggtaaaacaagaattattgctgaaacaggggctggacaacatggtgtagcaactgcaactgtttgtgctttgtttggactgccttgtgtaatttatatgggtgaaaaagatatagaaagacaatcacctaatgtttttagaatgaaattactaggtgcagaaataagaagtgtgtcgactggttccaaatctctaaaagatgcaatgaatgaagcattacgggattgggttactaatataaaagacacattttatataattggaactgcggctggaccacacccttatcctgaaatggttaggaatttccagtctgtaattggaaaagaagttagacaacagctaaaagatcttgagggtaaatctcctgatttattaattgcatgtattgggggaggctcaaatgctcttggactgttttacgaatttcttgatgatagtgatgttgaaatgattgctgttgaagctgcaggtcatggtataaatagtaacaaacatgctgcaagtttaaccggtggaaaacccggcgtattacatggaaacaagacttatttgcttcaatcaaagacagggcaaattcaagaagcacattctatatcagctggtttagactatcctggaattggtccagagcattcttttttatttgaagaaaaaagagttaagtatatgtcagctactgataaagaagcgctag

SEQ ID NO: 281601 - DNA, 622 bp, Unknown
  Bacterial polypeptide expressing nucleotide sequence isolated from the Sargasso Sea
atgaataatttaactaatttacctaatcccgatggtttctttggagagtatggaggaaagtttgttcctgaaacattaatgcatgcacttaaagagctagatgagacatactcaaaattaaagaataactcaaaatttattgaagaaattgatcaagatctagctcaatttgttggtagaccctctcctttatattatgcaaaaagattaactgatcattactctggacctcaaatatggttaaaaagagaagatctaaatcataccggagctcataagatcaataatactgttggacagatattacttgcaaaagctatgggcaaaaaaaggataattgctgaaacaggggcgggacagcacggagtcgcaactgcaactgtcgcagcaagactgggtcttgagtgtcatatctatatgggagccaaagatgtagagagacagtcacttaatgtttatagaattaagttattgggagcagaggttcatgctgttgattctggtaccgctacactcaaggatgccttgaatgaggctatgagagattgggtaacaaatattgaggatacttattatatcattggcagtgttacaggtccgcatccttatccaatgatagtaa

SEQ ID NO: 281602 - DNA, 748 bp, Unknown
  Bacterial polypeptide expressing nucleotide sequence isolated from the Sargasso Sea
gactcaaatggtagatttggtgattatggtggcaagtttgtatcagaaacattaatgcctgcactagatgaattagaaaaaaattataggaaaattaagaataataataaattcaaaaaagatgtttcaaaattactaaaagattttgttggtagaccaacacctttgtatttagctgagagaactacggagtctcttggtggtgcaaaaatttatcttaagagagaggatcttgcccatacaggtgctcacaaaataaacaacacaattggtcaagcaatacttgcaaaactaatgggtaaaaaaaggataattgctgaaacaggtgctggtcaacatggggtagcaactgccacagtttgtgcacttcttggtttagattgtgaaatatatatgggagcaacagatacagttaggcaatcagttaatgttcaaagaatggaattgcttggtgcaaaagttatccctgtaacatcaggttctcagaccctaaaagatgctttaaatgaagctttaagggattgggttacgaatgtaagagatactttttatattatcggaagtgtcgctggtcctcacccttatccaatgattgttagagattttcaatctattattgggaaagaatgtagaaatcaaattctaaaattagaaggcaaactacctgatttattaatagcatgtgtgggtggaggttctaatgcaattggactttttcatcctttcttaaaagataaatcagtgaaaa

SEQ ID NO: 281603 - DNA, 816 bp, Unknown
  Bacterial polypeptide expressing nucleotide sequence isolated from the Sargasso Sea
tatgtcaaaattaaatttaaatagcttaaaaactggtccagattcttacgggaaatttggtattcatggcggaagatttgttgcagaaactcttatgccattaattttagatgtagaaaatgcatatgaaaaagcaataaaagaccaaacttttattgacgaattagatatgtatagaagagattatataggtaggcctagtcctttatattttgctgagagactaacagagcattttggtggagctaaaatttatttaaaaagagatgaactcaatcatactggagctcataaaattaataatgttattggtcaaattttattagcaaaaaggatgggtaaaaataaaataattgctgaaactggagctggtcaacatggagttgcaactgcaacagcatgtgctttatttggttttgaatgtgaagtatttatgggcgcaaaggatattgaaagacaaaaaccaaatgtgcaaagaatgcaactgttaggtgccaaaataaattctgttatttcaggaactggtacattaaaagatgctatgaatgacgctttgagattctgggtgacaaatgccaatactcatttttatattattggaacagcagcaggtccacatccctatcccaaaatggtaagagatttccaatctattataggcgaagaagcaaagaaacaaattttagaaaaagaaaatagtctaccaaatgctttagttgcttgtattggaggtggatcaaatgcattaggtttatttcatccttttcttgatgataaagatgttgagatattcggtgtagaagcagctggtaaagg

SEQ ID NO: 281604 - DNA, 886 bp, Unknown
  Bacterial polypeptide expressing nucleotide sequence isolated from the Sargasso Sea
aattcatataaaaattatccaaatgaaaaaggatattttggtcaatttggaggtagatatgtttcagagactttaatgcctttaatattagaagtagaaaaagaatatgaaaatataaaaaatgacaaaaaatttattgatgaattcaattactatcttgaaacttatgtaggtagaccaagtccacttttttttgcaaaaagaataagtgaagatcttaatggtcctaaaatttattttaagagagatgaattaaatcatacaggtgcgcataaaataaataattgtatgggccaaattctattggctaaaaaaatgggtaaaacaagaataattgctgaaactggtgctggtcaacatggtgtggctacagcaactgtatgcgctttatttggtttgccatgtgtagtttatatgggtgaaaaagatattgaaagacagtctccaaatgtttttagaatgaaattattaggcgcagaaattagaagtgtatctacaggatcaaaatcacttaaagatgcaatgaatgaagctttaagagactgggtaacaaatgttaaagatactttttatattattggtacagctgctggtccccatccttatccagtaatggttagagattttcaatctgtaattggaaaagaagttagaaaacaactcaaagatattgaagggaaacctcctgatttattgatggcttgtataggaggtggctcaaatgccttaggactttttcatgaatttttagatgatacagatgttgagatgatagctgttgaagcagctggtcacggaattaaaagtggtaaacatgcagcaagcttaacaggaggtaagccaggagttttacatggaaataaaacatatttattgcaatcagaat

SEQ ID NO: 281605 - DNA, 811 bp, Unknown
  Bacterial polypeptide expressing nucleotide sequence isolated from the Sargasso Sea
tatgagcctggcaaatggcgaaggtcgaatcgagcggcgctttgcatcccttaaggcggagggtcgaggcggccttgtcgctttcgtgacggctggtgacccaaatcaggaaatggcccaagaaatcgttatgggcttgccggcagcaggtgccgacctgattgaacttggtatgccgttctccgatccgatggcggatggcccgtccgtgcaagcgtcttctcaacgcgccctaaaagcaggtgcctcgctcgctatgacgttggagctcgttcgcacattcaggaccgaagatgatcatacaccgatcgtcttgatgggttattataatccgatctatatctacggggtcgaagcgtttctcgctgatgctaccaaagcgggcgtcgatggattgatcatcgtcgacttaccaccggaagaggataccgagctttgccagccggcgattgaggccggtatccgctggattcgattggcgacaccgacaactaattcagagcgccttccaacggttctaagtaacgccaatggattcatctattacgtttcaattttaggtgtgaccggatctgcgacaataccggaagaggcgaccaggaaggccgtcgagcgactgaaatcgcacacggatttgccggtcgccgttggtttcggaattaagaccccagaaatggcagctacagtggctaaatgtgcagatgctgcagtggttggctctgctatcgttgaccgcgttcttgccggactggacgatgagggccaccgaaacccggctcgtggatgcgtgctcggcttcgttagcgaatag

SEQ ID NO: 281606 - DNA, 853 bp, Unknown
  Bacterial polypeptide expressing nucleotide sequence isolated from the Sargasso Sea
atgcttaaaaaaaatagttacaaatgctttcctaatgaaaagggatattttggaaaatttggtggccgctatgtgtctgaaactttgatgcctttaattcaagaagtagaaaatgaatataataatttaaaaaaagaccaaaattttttaaatgaattagaatattattttaaaaattatataggaagaccaagtcctcttttttttgcagaaagaattaccaaagatcttaaaggaccaaaaatttattttaaaagggatgaattaaatcatactggggctcataaaattaataattgtatggggcaaatattactggcaaaaaaaatgggaaaaaaaagaataattgcagaaactggcgcaggccaacatggtgtagctacagctacggtttgtgctttgtttggattaccctgcataatatatatgggtgaaaaagatatagaaagacaatcaccaaatgtattcagaatgaagttacttggagcagaagtgagaagtgttactagtggatctcaatctttaaaagatgcaatgaatgaagctttaagagactgggtaacaaatgttcgtgatactttttatattataggtaccgcagcaggcccacatccttatcctagtatggttagagattttcaatcaataattggaaaagaggtcagaacacaaatactagaagtagaaaaaaaacttcctgatcttttgatagcatgtattggaggaggatcaaatgcattaggcctattttatgattttttagatgataaagaagttgaaatgttagcagtagaagcagctggactaggtttatcttctggcaaacatgcagcaagtttatctgggggcaaac

SEQ ID NO: 281607 - DNA, 802 bp, Unknown
  Bacterial polypeptide expressing nucleotide sequence isolated from the Sargasso Sea
tatgcacgttatcagcagttattcagccgcctgagcaccgccaaacaaggtgcttttgtgcctttcgtcactatgggcgatccgggtcttgagctgtctttcaacattatcaaaaccttaatagatgcaggcgccgatgcgttggagctgggtattccgttctcagaccctatagctgacggccctgtgatccaaaacgccaatatccgcgctttggccgctggtgtaactccagctcagtgttttgagctgattggccgtattcgccagtacaacaaagacattcctattggcttgttgctgtacagcaatctggtgatggctcgtggtatagataacttctatctgcaggcacagcaagccggcgtggattccattctgatcgctgatgtgccactgcatgaaagcaagttattcagaaacgccgcgatgaaacatgacatagcgcctatttttatcgcgccacccaacatcacagacgacagcttacgtgaactggcctcttatggccgtggttacacttatctgttaagccgcgctggtgtgacaggcactgaaacccaggccgcaatgcccgccagcacgctgattaatcagttaaaagaatacaatgctgctcctacgcttttgggttttggtatctccaaacctgaacatgtcaaagcagctattgatagtggtgcagcgggtgcaatttcaggttcggctatagtacaaattattgaaaaacatcaacatcagccagacactctactcagtgaactctcagcttttgttcgcagtatgaaagcggcaacctaag

SEQ ID NO: 281608 - DNA, 586 bp, Unknown
  Bacterial polypeptide expressing nucleotide sequence isolated from the Sargasso Sea
ttggactatgaacccgatacaggcgggcattttggtgattacggcgggcgctacgtatctgagaccctgatggcggcactcagcgagctcgatcagaactatcaaaaactgaaaaacgaccccgatttccaaggggaattcgatgctgaccttgcgtcattcgttggtcgtccttctcccttatatcacgccgagcgttggtcaaaagccattggcggagcgcagatttattttaagcgggaagacttgaaccacacgggtgctcacaaggtaaacaacaccatcggacaagccctgttggcaaaatattcaggaaagccaagagtgatcgctgagacaggggctggccaacatggtgtagcctcagcgactgtagccgctcggcttggtcttgagtgcgtggtgtacatgggcgctgacgatatcgaacgtcagtcaccgaatgtttaccgcatgaagttgttgggtgcggaggttgtcccagttgagtcaggttcgcggacgttgaaggacgcgcttaatgaagccatgcgggattgggtgacaaatgtaaatgacacgttctacatcattggaacagtggctg

SEQ ID NO: 281609 - DNA, 788 bp, Unknown
  Bacterial polypeptide expressing nucleotide sequence isolated from the Sargasso Sea
taaaagagatgagctgaatcacacaggagcccataatattaataattgcttaggacaaatactgcttgcaaaaaaaatgggcaaaacaagaattattgctgaaacaggtgctggacaacacggagttgcaacagctactgtttgtgcgctttttggtcttccttgttatatctacatgggttcaaaagatatcgagagacaaaaaccaaatgttttcagaatgaagcttctgggtgccaccattattcctgtagagtctgggagtaaatctttaaaagatgcgatgaatgaagctctaagagattggattaaaaacgtcagagatactttttatattattggctccactgcaggtccccacccctatccaaaaatggtaagagattttcaatctgttattggaaaagaggcaagagaacaaatattaaaagtagagaaaaaactaccagattatttgatagcttgcgttggaggcggatcaaatgccatgggtttattttatccatttttaaatgataaaaaggtaaagattattggagttgaggcggctggtagaggcgctaagacagaagaaacagctgcaacaatgacctctgggactcctggtattttacacggtagttacagttatgtcttacaagataatgatggacaaataaaagaggctcattctatttctgctggtctcgattatcctggtgtagggcctgaacactcccacttaaaagatattaaaagagttaaatacttcggtgtaactgatacagaagcccttgaagcatttcaaa

SEQ ID NO: 281610 - DNA, 784 bp, Unknown
  Bacterial polypeptide expressing nucleotide sequence isolated from the Sargasso Sea
tatgagttccagaatattaaaaacctttttagaacttagaaacaaaaaaacaaaaggattcatccctttcattacagcaggtgacccaagtatttcaacatcattagaaattataagaacactcccaaaagctggggctgatcttattgaagttggaatgcctttttctgatccaatggctgatggcaaaataattcaggcatcaagcttaagggctcttgaacaaggaataactttaaaaaaaattctagaaataatttccatttttagaaaagataataacgtaacacctattgttcttatgggttattataatcctatttataattttggcgtagataaatttttgaatctttgtaaagaaagtggtgttgatggtttaattatagtagaccttccatttgaacatgatgatgagctttgcttgcctgcaaaaaaagcagggattgattttattaggcttatagccccaactactaatgaggaaagaattccatatttattagaccaatcttctggatttgtatattgtatatcactaagtggaataacaggttcaaaagaagcaaaaacaaaaatagttaatgaaacaatagatagaataaaaaaatttagtgaattaccaatagctgtaggctttggaataaaaacgccaaagcaagctggggaaatgtcattaaaagcagatgcaactgttattggctcaataattattgaaaaaataaatgagatttactcttctaaaatgaacgacgaaacacaattaaatcaagtttacgatttt

SEQ ID NO: 281611 - DNA, 451 bp, Unknown
  Bacterial polypeptide expressing nucleotide sequence isolated from the Sargasso Sea
atgccagataaaaatggtagatttggaatatatggtggcagatatgttgctgagacacttgtcccagctctagaagagttatccgagcaatatgaattaataaaaaaggatgagaaatttcttaaagaatttaaagacgatctaaaagattatgtaggaagaccttctcctttgtattttgcaaaacgttggacagaattacttggcggtgcaaagatctatctaaaaagagaagatcttaatcacactggagctcataagatcaataatactgttggacaaatattattagcaaaacatatgggcaaaaaaagaatcatagccgaaactggagctgggcagcatggtgtagctacagcctctgtggcagctagacatggtttagagtgtatagtttttatgggtgaagaagatatccaaagacaatcacttaatgtttttaggattaaat

SEQ ID NO: 281612 - DNA, 365 bp, Unknown
  Bacterial polypeptide expressing nucleotide sequence isolated from the Sargasso Sea
gccaggaatactgcatggtgccaagagttatctaatgcaagattcagatggacaaattatggcaactagttctatcagtgctgggttggattatccgggtgttggtccagagcactcattcttaaaagatagcggtagagctgaatacattgcagttgatgatgaatcagttatgaaagcatttcatcagctgagtgagctggaagggattatccctgcattagaaactgctcatgcgtttgctccacttgacttaatatgtagtgagtttaatgaagatcaaaatatagttatcaatgtatcaggaagaggtgataaagacattgcatctgttgccaagcttgagggcatagatcttgaatagg

SEQ ID NO: 281613 - DNA, 885 bp, Unknown
  Bacterial polypeptide expressing nucleotide sequence isolated from the Sargasso Sea
aatgtctgaagagtatttaccagataatgatggccgttttggagtctatggaggcaggtatgtagctgagacattagtcccagcattagatgaacttgccaagcaatataagtttattaaaaaagataaaaatttctctgaagaatttagaaatgatttaattcattatgtaggaaggccatccccactttattttgcaaaacgttggactgaacaattgggcggagcaaaagtttatctgaaaagagaagatctaaatcatacaggtgcacataagattaataatactgttggtcaaattctccttgcaaaacacatgggcaaaaaaagaattattgcagaaacaggagcaggtcaacatggagtagcaagcgctactgtggcagctcgtcatggtttagattgcgttgtctatatgggagaagaagatattaaacgacaatctttaaatgtttttagaatgaagctcctgggcgctgaagtggttggtgtcaattcaggtactagaacattaaaagatgcaatgaacgaagccatgcgcgattgggtcactaatgtagatgacacttattatattattgggagtgtagcagggcctcacccttaccctgaaattgtaagagatttcaattctgttgttggtgaagaagtaatagagcagagcaaaaacgaaattggcaagaatccagatgttttaattgcatgcgttggaggaggctctaatgcattgggtctattttatccatttattaaatctaaggaagtcaggctaataggtgtagaagcaggaggtttaggtttaagcacaggtaaacatgctgcaccattaagcgatggaaaagaaggcgtactccatggaatgaggacttatctgatgcaagatga

SEQ ID NO: 281614 - DNA, 872 bp, Unknown
  Bacterial polypeptide expressing nucleotide sequence isolated from the Sargasso Sea
atgttgggagaccaagtcctttattttttgctaaaagaattactgatgatctttggaggaccaaaaatatattttaaaagagatgagctaaatcacacaggtgctcataaaattaataattgtatgggacaaattctattagcaaaaaaaatgggtaagactagaattatagcagagactggtgcagggcaacacggagtagctacagcaactgtttgtgctttatttggtttaccttgtattgtttatatgggagaaaaagatattgaaagacaatcaccaaatgtctttagaatgaaattattaggtgcagaaatacgctctgtttcaactggttcaaaatcacttaaagatgctatgaatgaagccttaagagattgggtaacaaatgttaaagatactttttatatcataggaacagcagcaggaccccacccttatccagcaatggttagagattttcaatctataattggcagtgaagttcgaaagcaacttgaagaagtagaagggagacgaccagatttactaatggcttgtattggtggcggctctaatgctttaggtcttttttatgaatttttagatgattcaaatgttgaaatgattgctgttgaagcagctggtcatgggattaataccaataagcacgcagcaagtttaactggaggtaaaccaggtgtattacacggcaataaaacgtatttattacaatcgaacactggccaaattcaggaagcacattccatttcagcaggcttggattatccaggaattggaccagaacattcatttttatttgaagagaaaagagtaacatatatgtcagcaacagataaagaggcactggaagcctttaaatattgttgtaa

SEQ ID NO: 281615 - DNA, 889 bp, Unknown
  Bacterial polypeptide expressing nucleotide sequence isolated from the Sargasso Sea
cgctgatggcggcccccgcatctggctgaaacgcgaggacctgaatcacaccggtgctcataagatcaataacgcccttggtcaggcgttgttggccctgcgcatgggcaagaagcggatcatggcggaaaccggtgccggccagcacggggtggccaccgccacggtctgcgcccgtttcggcctcgagtgcgtgatctacatgggcgctgaggacatgcgccgtcaggccctcaatgtgttccgcatgcgcctgcttggggcctcggttcaaccggtcacggccggcaccgccaccctcaaggacgccaccagcgaagcgatccgcgactgggtcacgaacgtggaatccacccactacatcctcggttccgttgctggtccgcatccctaccccatgttggtgagggatttccatgccgtgatcggcaaggaggcccgtcagcagtgccgcgaggccttcgggcgcctaccggatgtgctgatggcctgcgttggcggtggctccaacgccatggggctgttccacccctttgtggaatgcaccaatgtccgtttgatcggtgtcgaggcagctggtgatggcgtggccaccggtcgccatgccgccacgatcaccgaaggccgcgccggggtgctccatggcgccatgagcctgctgctccaggactccgacggtcaggtgcaggaagcccactccatcagtgctggtctcgattaccccggcgtgggtcccgagcacagctatctgcgcgagatcggacgggccgagtacggcgctgtcaccgatcagcaggccctggatgccctgcgtctggtcagcgagctggagggcatcattccagccctggagaccgccccatgccttcgcctggctgagcagctctgc

SEQ ID NO: 281616 - DNA, 448 bp, Unknown
  Bacterial polypeptide expressing nucleotide sequence isolated from the Sargasso Sea
tatgaaaacgagaaaacttaattattataagtatcctgataaccaaggaagatttggaagatttggtggaagatttgtggcagaaacattaatgcctcttcttctagaagttgaacaaaaatataaggaggcaaagaaatcaaaaaaattcaaaaagaaacttgattattattttacaaattatgtaggcagaccaagtcctctttattatgcaaagagaacatcagagtttcttggaaatgtaaaactttatttcaaaagagatgaactcaatcatacaggagcgcacaaaataaacaactgcatcgggcagatcttgttagcgaaagaaatgggtaaaaaaaggatagttgcagaaactggggctggtcagcatggattagcaactgcaacagtttgtgcattgtttaatctaaaatgtgttgtttatatgggtgcgctagatatt

SEQ ID NO: 281617 - DNA, 827 bp, Unknown
  Bacterial polypeptide expressing nucleotide sequence isolated from the Sargasso Sea
cgctgggcaacatggccttgcaacagcaaccgtttgcgcactttttaacctaaaatgtgttgtgtacatgggtgctttggatattaaaagacaagctccaaacgtattcaaaatgaaattgcttggagctgagattatcccagtaaaatctggcacctctacattaaaagatgccatgaatgaagcattaagagattgggtatccaatgtcaaagataccttttatgtaataggaaccgtcgctggacctcatccttatccaatgatggtaagggattttcaatcaataattgggatagaagcaaaaaaacaaatccttaaagttgaaaaaagacttcctgattatttggttgcttgtatcggtggagggtcaaatgcacttggtcttttttatccatttcttaataacgaaaatgtaaacattattggaattgaagcaggaggaaaagggataaactctaaaatgcatgcagcttctttatcaagaggaaaaccaggttttttacatggaaattatacttatttactgcaaaacgaagaaggacaaattactgacgcacattcaatttctgcaggtttagattatcctggcatcgggcctgaacattcatggcttaaggaaacaggtagagtaaattattttagtgctactgataaagaagcactagatgcattcaaaatttgttcaaaactcgagggtatcattcctgctcttgaaccagctcatgctttatcgtatcttctaaaaaactctaaaaaatttaaaaaaaatcaaatcattataatgaatatgtgtggtagaggagacaaggatattttttctatct

SEQ ID NO: 281618 - DNA, 528 bp, Unknown
  Bacterial polypeptide expressing nucleotide sequence isolated from the Sargasso Sea
aaacccaatatgattatcctgaccgtttggttgcttgtgttggcggtggctcaaatgcaataggactttttttcccatttattgaagatcctgtaaaaataattggtattgaggctgcaggagaggggcttgacactgttaaacatgctgcaactttaactaaagggagttatggtgtgctccatggttcagcaagctatttaatacagaataaagaaggacaaatactattacctcattcaatttcagcaggcttagattatcccggagtgggacctgagcatagttatttgaaagatatcaaacgagttcaatataaatctgctaccgatgaagaagctttaagagcttttaaatggttatctgatagagaaggaattatacctgccttagaaacatctcatgcaattgcgtatttacaacaatcaaattcgggtataaaaaagggagaaaacataattttatgtttatcaggaagaggtgataaagatctcgatataatctttaaaagtgaatcaataaaatgaa

SEQ ID NO: 281619 - DNA, 652 bp, Unknown
  Bacterial polypeptide expressing nucleotide sequence isolated from the Sargasso Sea
cattacattggccggccaagcccgctatattttgccgagcgtctgacttcctattttggtggggccaagctatatttgaaacgtgacgaattaaaccacaccggtgcgcacaagatcaacaatgtaattgggcaggcactactggccagacgcatgggcaaaaccaaaattattgctgagactggtgctggccagcatggcgtggccaccgccaccgcctgcgcgctgtttgatatggagtgcgaagtatttatgggcgcagaagatgtcgaaagacagcgccccaatgtcgaaagaatgcggcttctcggggcaaaaatccacccggttacggcggggactggtacactgaaagatgcgatgaatgaggctttacgatattgggtgagtaatgccgaaactcatttttacataatcggcacagtggctggtccacacccctacccgcaaatggtgcgtgactttcaatctgtcattggtattgaggcgcgcgaacaaatcattgaggccgaaggaagattgcctcataaaatcgtcgcctgcatcggtggcggttccaatgccatggggttgttccacccgtttttggatgacagagatgttgaaatttatggtgttgaagcggctggcaaaggcatccctagtggtttgc

SEQ ID NO: 281620 - DNA, 849 bp, Unknown
  Bacterial polypeptide expressing nucleotide sequence isolated from the Sargasso Sea
tttgagcttgaaacagctgcttcaaatgcatggaaagataagctttttgtaaaagaattaaatcatcttcttaagacttatgtaggaagagaaacaccactttatgaagcaaaaagacttactgagcattacaaaaccaaacgagcaaccccaagaatatggcttaaacgagaagatttaaatcatactggtgcacacaaaattaataatgcccttggacaagctttattagcaataagaatgggcaaaaaaaggatcattgcggaaaccggagcaggccagcatggagttgctactgcaactgtttgtgcgagatttggcttgaaatgcattatctatatgggtgccgaagacataaaaagacaatctcttaacgtcttcagaatgaaactgctaggagctgaagttaaagttgtaaattcaggaactgcaacactcaaggatgcaactagtgaagccattagagattgggtttctaatgtagaaacaactcactacattttaggatcagttgcaggtccccaccctttcccgaagattgtgagagattttcatgcagtgattggagaagaaactaaaaaacaatgcctggaatcgtttgggtctttgcccgatattttacttgcttgtgtaggtggtggatcaaatgcaatgggtcttttccatcccttcgtaaaagaaacatctgtacgacttattggtgttgaagctgcaggaagtggagttaacaccgacaaacatgctgcaactatcactaaagggtcagttggaattctacatggatcaatgagtcttcttttacaagatgataatggccaagtacaagaagcacattcaataagtgcaggt

SEQ ID NO: 281621 - DNA, 817 bp, Unknown
  Bacterial polypeptide expressing nucleotide sequence isolated from the Sargasso Sea
agtaatggacgttttggtgagtttggtggaagatttgttgcagaaacacttatgccattaatactgaatgtcgaaagtgcttatgaaaaagctataaatgatattaattttattaatcaattagatattttaagaagagattatattggaagaccttctcctttatattttgctgaaagattaactgaatattttggtggtgccaaaatatattttaaaagagatgaactcaatcatacaggcgcacacaaaataaataacgttattggtcagattttgctcgctaaaagaatggggaaaaatcgtattattgctgaaactggtgcagggcaacatggcgttgctactgctacggcatgtgctctttttggatttaaatgtgaagttttcatgggagcagaagatataaaaagacaaaaacccaatgttctgcgtatggagttattgggtgcaaaaattcatcctgtaacaagtggaagtagtaccttaaaagacgcaatgaacgaggcattgagatattgggtcacaaatgcaaaatcacatttttatattataggaacggttgcaggccctcacccatatcccaagatggtaagggattttcagtcaataattggtattgaaacaaagaaacaaatattagataaagaaaataggttacctgacgccctaattgcctgtataggaggtggatcaaacgctttaggtttatttcatccctttcttgatgataaggatgtagaactatttggagttgaagcgtctggaaaaggtataagttctgggaaacatgctgcatctattaatgcaggaaaac

SEQ ID NO: 281622 - DNA, 850 bp, Unknown
  Bacterial polypeptide expressing nucleotide sequence isolated from the Sargasso Sea
ctgcaagtggaaagcgcctacaaggcggcctgcacggatgatgacttcgccagggaacttctctattaccagacgcattatgtcggccgcccgagcccgctctatttcgccgagcgtctgaccgtgcattatggcggtgcaaagctgtatctgaaacgtgacgagctgaaccacaccggcgcgcacaagattaacaatgtgctgggacaggcgcttctcgccaagcgcatgggaaagaccaagatcattgccgagaccggcgccggtcagcacggcgtcgccaccgccacggcctgcgccctgttcgacatggagtgtgaggtcttcatgggcgaggaggatgttcgccggcagaagccgaatgtcgaccggatgcgccttctcggcgcgaaggtccatccggtgacgtccggaacaggcacgctgaaagacgcgatgaacgaggcgctgcgctactgggtagcgaatgccaagacccatttctacatcatcggcactgtcgccggcccgcacccctacccgcagatggtacgtgacttccagtcggtcatcggcaaggaagcgcgccagcagatcatcgatgccgaaggacgccttcccgacagcatcgtcgcctgtatcggcggcggatctaacgccatggggctgttccacccgttccttgatgacgaggacgttacgatctacggcgtcgaggcggccggcaagggcatcccgtccggcctccacgccgcatcgctgaccggcggtacgcccggcgttctgcacggcaaccgcacctatctgctgcagaatgatgacgggcagatcatcgacgcgcattcaatttccgccggcctcgactaccccg

SEQ ID NO: 281623 - DNA, 419 bp, Unknown
  Bacterial polypeptide expressing nucleotide sequence isolated from the Sargasso Sea
tgtccctgttgaggagtctgcgccattcagaactgctgcactgcgtcacaacatcgcaccgattttcatctgcccgccgaacgctgatgaagaactgctacgccagattgcctcttacggtcgcggctacacttatctgctttcacgtgcaggcgtgaccggtgccgaaaatcgtgcggcattaccgctgcatcatttggttgaaaagctgaaacaatatgatgctccgccttctttacagggcttcggtatctctgcgcctgaacaggtagccgtagctattgaagccggtgctgccggtgcaatttccggctcggcaattgtgaaaatcattgagaaaaatgttgcggcaccggaacagatgctggctgagctgaaagcgtttgtcagcacgatgaaagccgccacccaccagtaag

SEQ ID NO: 281624 - DNA, 900 bp, Unknown
  Bacterial polypeptide expressing nucleotide sequence isolated from the Sargasso Sea
aatgaaaacatataaacaacctagcactgttggaagatttggtgaatttggtggcatgtatgtttcagaaacattaatgcccctgttattaaatttagataaatcgtataaaaaaattcaaaaggataaaaaatttaaaaaagagctcaatcatctttttaaaaactatgtgggtaggccctcctctttgcactacgctaaaaatttatctaaatatattaatggaccaaaagtatattttaaaagagatgagctaaatcatacaggagctcataaaatcaataattgcttaggacaaatactccttgcaaaaaaaatgggcaaaacaagaattattgctgaaacaggtgctggacaacacggagttgcaacagctactgtttgtgcactttttggacttccttgttatatctatatgggctcaaaagatatcgaaagacaaaagccaaatgttttcagaatgaagcttcttggtgctaccattattcctgttgagtctggaagtaaatctttaaaagatgcaatgaacgaagctttaagagattggattaaaaacgtcagagatactttttatattataggttctactgcaggtccccacccctatccaaaaatggtaagagattttcaatctgtcattggaaaagaggcgagagagcaaatattgaaagtagagaaaaaacttccagattatttgatagcttgtgttggaggcggatcaaatgctatgggtttattttatccatttttaaatgataaaaaggtcaagattattggagtcgaggcagctggtagaggtgctaaaacagaagaaacagctgccacaatgacctctggtactcctggtatcttacacggtagttacagttatgtcttacaagacaatgatggacaaataaa

SEQ ID NO: 281625 - DNA, 912 bp, Unknown
  Bacterial polypeptide expressing nucleotide sequence isolated from the Sargasso Sea
aatggctaataaaactaataactataattaccctgacaaaaatggacgatttggatcatttggaggtaggtatgtttctgaaaccttaatttctgcattagaagaactagaatctctatataaaaagattaaaaatgataaaaaatttcaggaagagttaacgaatgacttacaaacttttgtgggaaggccttcaccgttatattttgcaaagagatggaccgataaactcaatggagccaaagtcttccttaagagggaagatttaaatcataccggggctcacaaaataaataatactgtaggtcaagttctattagcaaagaaaatgggcaaaaaaaggattattgcagagactggagcaggacaacatggcgttgcgactgcagctgtgtgtgctcgtcatggaatagaatgcataatttttatgggatctgaagatatagaaagacaggctcagaatgtttatcgaatgaaattaatgggagcagaagtatgtccagtttcttcaggtacatcgactctaaaagatgcaatgaatgaagccatgagagactgggtttcttacatagatgatacccattacatcattggaagtgttgccggtcctcatccatatcctatgattgtcagggattttaattcgatcgttgggacagaattaaaaaaacaatcaaaaatcctttttggaaagtatccaaataaaatagtagcctgcgttggaggtggctctaatgcaatgggaattttttacccttttattaaggataaagaggtagatttaattggagtcgaggccgccggttccgggttgagttcaggcaagcatgctgctcctttaagtgatggttctccaggagtgcttcatggaatgaaaacttacttaatgcaaaactcagatggtcaaatttt

SEQ ID NO: 281626 - DNA, 381 bp, Unknown
  Bacterial polypeptide expressing nucleotide sequence isolated from the Sargasso Sea
cagcacctcttaataagggtaaacctggagtacttcatggaaatagaacatatgttatggaagatgaaaatggtcagatacaatcaacacattctatttctgctgggttagattatccgggagtaggtccagaacactcttggttaaaagacaataagagagttaaatatgtatctgtcaccgacgatgaagctttggaggcatttaacatacttaccgagagggaaggtataatacctgcgctagagactgcgcatgctttagcttatgcatttaagctagcaaaaaaacttaaaaataaaaaaattctcataaacttatcaggtagaggcgataaggacattgacactatagcagctcttagccatattaaattgtgaa

SEQ ID NO: 281627 - DNA, 760 bp, Unknown
  Bacterial polypeptide expressing nucleotide sequence isolated from the Sargasso Sea
gcacaagattaacaatgttttaggtcaggcgcttcttgccaaacgcatgggcaaaacaagaatcattgctgaaactggcgcaggtcagcatggtgttgccacagcaacagcctgtgcgctttttaatatggaatgcgaagtatttatgggcgccgaagatgtcgaacgacaaaagccgaatgtcgaacgcatgcgccttcttggggccaaaatccaccccgttacttcaggcacgggcacgctcaaagacgcaatgaatgaggcgcttcggtattgggtgaccaatgccgaaacgcatttttatattataggcaccgctgcaggcccacacccctatccacaaatggtgcgtgatttccaatcaattattggcactgaggcgcgcgaacaaattcttgaggctgaaaaccgccttcccaatgctctggttgcctgcattggtggtgggtcaaatgcaattggacttttctatccgtttcttgatgatactgatgtagccatttatggcgtcgaagcagcaggtaaagggcttgctagcggccttcatgcggcgtcactcaccggcggaacgccgggcatcctacatggtaaccgaacctatcttttgcaaaacaatgatggacaaatcatcgatgcccattcaatttcagctggtctagattatccgggcatcgggcctgaacattcatggcttcatgacattgggcgcgtcaattatgtcagtgccaccgatgaagaggcacttgtcgcctttcagatt

SEQ ID NO: 281628 - DNA, 595 bp, Unknown
  Bacterial polypeptide expressing nucleotide sequence isolated from the Sargasso Sea
aatggtaagagatttccaatcaattattggcaaagaagttagagaacaattgtttaaagcagaaaaaaaattacctgatttattagttgcatgcattggtgggggatcaaatgcaattggcttgttccacgaatttctagatgaaagaagtgtaaaaatgatagcagttgaagcagcaggtttaggtattaatactaataaacatgctgctagtctatcaggaggtaaaccaggtgtattacatggaaacaaaacttatctattacaatctaaatcaggacaaataaatgaagctcattcgatttcagcaggacttgattatcctggaataggccctgaacattcatttttatttgaagaaaaaagagtagagtatgtatcaattactgataaagaagctatagaagcttttaaatattgtagcaagcttgagggaatcattcctgcgttagaaccatcacatgcattggcgcatttaaaaaaaattgctccaaaaatgagtaagaaaaaaattattgttatgaacatgtgtggaaggggtgataaagatatatttacggtagctgaaaaaataaatgtaaaaattcatgaataa

SEQ ID NO: 281629 - DNA, 386 bp, Unknown
  Bacterial polypeptide expressing nucleotide sequence isolated from the Sargasso Sea
catgaataatagaataaaagaaatatttttaaaaaaatcaaaaaaattacttacatttataactgctggagatccagatattaagacttctttaaaaataatgaataaactggttgaatctggaactgatattatcgaaataggtatgcctttttcagacccgatggcagatggtcctacaattcaattatcaagcataagagcaattaaaaaaaatattgatttaaaaaaaataatgtctttatgtaaagaatttagaaaaaaaaataaacacacacctataatacttatgggatattataatcctattcaatactatggtgatcaaaaatttataaaggagtgttctaaagtaggtattgatggacttataattgtagatttac

SEQ ID NO: 281630 - DNA, 866 bp, Unknown
  Bacterial polypeptide expressing nucleotide sequence isolated from the Sargasso Sea
aataaataataccgttggacaggctttattagctaagagaatgggcaagcaaagagttatcgctgaaactggtgcaggacagcatggtgttgcgacggcaactgtagctgcaagatatggtatggaatgcgttgtatatatgggcgctgaagatattaagaggcaggcaattaatgtttttcgaataaagcttttaggggcaaaagttgttcctgttgatgcgggatctaaaactttgaaagatgcattaaacgaagcaatgcgagactgggtaacttatgtagataaaacgttttatataatcggaactgttgctggaccacatccttatccagcaatggtaagagactttaatgcagttgttggtcgagaggtaagagaacagtgtttaacacagataggaaaactcccagacactttagtggcatgtgttggcggtggttctaatgctataggtcttttctatccttttttggatgataaagaaatttcaatttatggtgttgaagctgctggaggcggacttagtacaggtaaacacgcggcccccttaaatgctgggaaacctggtgtattacatggtaatcggacttatcttatggaggatgactacggtcaaattatcgaaacgcactcgatttcagcaggtttagattatcctggagttggtccagaacattcatggttgaaagatacgggacgagctgattatgtatcagttaccgatattgaagcaattcaagcgtttcatgatctatgtcaaatcgaaggcataatcccagcattagaatcgagccatgcgattgcttatacgtcaaaaattgccccgaaaatggataaaaatgagataatagttgtgaatttat

SEQ ID NO: 281631 - DNA, 419 bp, Unknown
  Bacterial polypeptide expressing nucleotide sequence isolated from the Sargasso Sea
aatgaaaacaaataaacaaaatttgccagataaaaatggtttttatggagagtttggaggaaaatttgttcctgagacccttatgtatgctcttgagcaactggagacgacatatgcaaaactaaaagataataatgaatttaaggaaaaattctatagtgatttgtcagagtttgttggtaggccatcaccactatattttgcagaaagactaactaagcactatggaactggttcaatttggttaaaaagagaagatctaaatcatacgggtgctcataaaattaataacaccattggacaaattctattagctaaatacatgggaaaaaaaagaattattgcagaaactggcgctggacaacacggagttgcaactgctgctgttgcagccagattgggcttagaatgcatattta

SEQ ID NO: 281632 - DNA, 784 bp, Unknown
  Bacterial polypeptide expressing nucleotide sequence isolated from the Sargasso Sea
ttcatgggagaacaagatatttataggcagtcgcaaaatgtttatagaatgaaattattaggcgctgaagttataccagtaacttccggttctagaacactaaaagatgcattgaatgaagctcttagagattgggttacaaacgtagatgacactttctatataattggaaccgttgccggcccatctccatatccagaattagtgagagactttcaagcaattataggaagagaagtaatagatcaaatgaaaggtattgacaaaaaagttgatgctttagttgcttgtgttgggggaggatctaatgcattaggacttttttatccatatatagatagtgatgccaaaatatatggagttgaagctgcaggtgacggactagatacagaaaaacactctgctccattaaataaaggcaagattggcgtacttcatggtaacaggacttatctattagaggatgaaaatggtcagattatcgagacccatagcatttctgctggactagattaccctggggtcggtcctgagcatgcattactcaaagatcttggtagagtaaattataaatcagcaactgataaagaggcgttggaagcttttcacgaattatctagagttgagggaataataccggcattggaaacaagtcatgcggtagcatatgcaattaaacttgctgctcaaatgaaaaaaggtgagaatatagttataaatttatcaggtaggggtgataaagatttaaacactgtagcaagaatagagggcattgaaatttgag

SEQ ID NO: 281633 - DNA, 802 bp, Unknown
  Bacterial polypeptide expressing nucleotide sequence isolated from the Sargasso Sea
ttttatgcaacgttatcagcagttattcagccgccttgccgctgccaacaaggggcttttgtaccattcgtcaccatgggtgacccaggtcttgagttgtcttttgatattatcaaaactttaattgacgcaggcgcagacgcgcttgaactgggtattccgttctccgaccctattgccgacggtcctgtcattcaaaacgccaatatacgtgcattggccgctggcgtgacgccagctcagtgctttgaactgataagccgtattcgtcagtacaacaaagacattcctattggtctgttgctgtatagcaatctggtgatggcgaaaggcatcgacagcttctaccaacaagcacagcaagcaggggtagattctattctgatcgccgacgtgcctttgcacgaaagcagactattcagaaacgcagcactgaagcacgacatagcgcctattttcatagcgccgccaaacatcactgatgacagcttacgtgaattggcgtcttacggccgtggttacacttatctgttaagccgcgctggtgtcactggcactgaaactcaggccgctatgcctgccagcaccctgattaatcagctgaaagaatacaacgcagcccctaccttgctcggttttggtatctccaaaccagagcatgtcaaagcagctattgaaagcggagctgcaggcgctatttcaggctcagccatagtgcagatcattgaaaaatatcaggcagaaccagaacaactaaaacagcagttgtttaactttgtctccgctatgaaagccgccacct

SEQ ID NO: 281634 - DNA, 716 bp, Unknown
  Bacterial polypeptide expressing nucleotide sequence isolated from the Sargasso Sea
aatgccggatgcccgcggtcattttggcccctacggcggccggttcgtgtcagagacccttagctttgctcttgaagaactggagcagatctacctcagtctgcgcgacgacccggatttccaagccgaattcgatcgtgacttagcttactacgtgggccgtccgtcgccgctgtatcatgccaagcgctggtctgactcgctgggcggggcacagatttggttgaaacgtgaagacctcaatcacaccggtgctcacaaggtgaataacaccatcggtcaggcgctgctggcgaaaaaaaccggcaagcctcgggtgattgctgaaaccggcgctggccagcacggcgtggcgacagccaccgtcgccgcccgactcgggttggagtgtgacgtgtacatgggggcggaagacgtgcagcgtcaaaagctcaatgtttaccgcatgcgcttgttgggtgcccgtgtcattccggtggagtcgggcacgcggacgctgaaagacgccatgaacgaagccctgcgcgactgggtcactaacgtcgataacaccttctacatcatcggcaccgtggcgggcccgcacccatacccgcagctggtgcgcgacttcaatgccgtggtaggtcgcgaagctcgccgtcagtcgctggaacagattggccgtttgccggatgtgctgatcgcctgtgttgggggtggttccaatgcgctgg

SEQ ID NO: 281635 - DNA, 268 bp, Unknown
  Bacterial polypeptide expressing nucleotide sequence isolated from the Sargasso Sea
atgaatagaatcaatacatgttttgatcaaataaaaaaaaacgacaagaaggcgcttataccttttataactgctggcgatccgtcatcaaatctgacggttagcataatgcatgaattagttcgttctggttctgatatcattgaattaggaatacctttttctgatccaatggcagatggtcccgtaatacagcgtgctagtgaaagggctctagcccagggaacaaatactgacgatgttttcagacatagtaaaaaactttaga

SEQ ID NO: 281636 - DNA, 680 bp, Unknown
  Bacterial polypeptide expressing nucleotide sequence isolated from the Sargasso Sea
attgaatgaagccttaagggattgggtaacaaatgtagatgacacatattatattattggaagtgttactgggcctcatccctatccaatgattgttagagattttaattctgttgttggtgaggaattgatttcacagtcaaaagagttatttaattcaatgcctgatgcaattgttgcatgtgttggcggtggatcaaatgcaatgggagctttttacccttttattaaatttaatgagactagacttataggtgttgaagctggaggagaaggcgtagaaacaggagaacatgcagcaccattaaatgatggtactcctggggttctgcatggatcactaagttaccttatgcaagatgaaagcggccaagtaaaaggtacaaaatcagtttctgctggactagattatcctggagttggaccagaacattcttggctaaaagactctggaagggctgaatatgttgctgttagtgacgatgccgcactaaaagcatttcatgaggtttctgagctggagggaataatacctgcgcttgaaacagctcatgcttttgcatatctagatactttaatgaaagagtttgataagaattccaatataattgtgaatgtatcgggacgaggtgataaagatattaacactgttgcaaatattgacggaataaagatttgaa

SEQ ID NO: 281637 - DNA, 949 bp, Unknown
  Bacterial polypeptide expressing nucleotide sequence isolated from the Sargasso Sea
aatcacacagggtgctcacaagattaataatacagtcggtcaaattattcttgctaagatgatgggtaaatcaagaatcatagctgaaactggcgctggtcaacacggcgtggctacagcaacagttgctgccagattaggacttgattgtcatatttacatgggtgcagaggatgtgcaaagacaatcattaaatgtatatcgtataaaactcttaggtgcaaaagttcaccctgtagattcaggtacctcaactcttaaagacgcactaaatgaagcaattagagattgggtaacgaatgttgatgatacttattatattattgggagtgttacaggacctcacccttatccaatgattgtcagagactttaatgccattgttggaagagagctaatcgagcaagctaataataattttggaaaaaatcctgacgcaataattgcatgtgttggaggcggttcaaatgcgataggtatatttcacccttttattgataaagacgatgttgagctaataggtgttgaagctggtggcgagggtatcaagagtggcaaacatgctgctccactaaacgatggaaagcctggtattcttcatggagcaaaaagttatttgatgcaagatgctgatggacaagttatgtcaacaagctcaataagtgctggactagattatcctggagttggcccagaacattcataccttaaagatgtaggaagagctaaatatcttgctgtaacagatcaagaggttatgaaggcttttcatgagttaagtgaattagagggaattattcccgctcttgaaacagctcacgcttttgctgttctgcctgaagtgtgcagtaagatggatagttcacaaaatattgttttaaatgtctcaggtagaggagataaagatatttcttccgttgcaagcattgaaggcatcaatcttgaatag

SEQ ID NO: 281638 - DNA, 746 bp, Unknown
  Bacterial polypeptide expressing nucleotide sequence isolated from the Sargasso Sea
aatgaaaactaataaacatgattggccagataaagatggtttctttggagaatatggtggaaagtttgttccagaaacccttatgcatgcattagaggaacttgaaaaaacttataataattttaaagacaagcctgaattcaaagaacaattttataaagatctatctgaatttgtaggccgaccatcacctttatatttcgcagaaaggctaaccaatcactatggaacaggttcaatttggctaaaaagagaagaccttaatcatacaggcgcacataaaatcaataatactataggacaaattctgttagctaaatatatgggaaaggaaagaataattgctgagacaggggctggacaacatggagttgccacagcaacggtagctgcaagacttggtcttgaatgtcatatatatatgggggctgaagatgtacaaaggcagtctcttaatgtctatagaatgaagcttttaggagcacaagttcattcagttgaatcaggttctgcaactttaaaagatgcgttaaatgaagctttaagagattgggttacaaatgttgataatacttattacattataggaagtgttacgggaccccatccttatccaatgatagttagagattttaattcagtagttggagaggaggttgtggctccatctaaagatttgtttaatgatatgcccctacgcatttgtgctttgtgtggtggtggctcaaatgcaatgggtatttttt

SEQ ID NO: 281639 - DNA, 751 bp, Unknown
  Bacterial polypeptide expressing nucleotide sequence isolated from the Sargasso Sea
tcctaatgtagctcgaatgaaaatgcttggagcagaagttaaatcagttaaatcaggtagtaaaacattaaaggatgcaactaatgaggctattagagattggattaataatcctttaaatactcattacataattggatctgttgttggccctcatccatatccagatatggttgctcgttttcaatcagtaataagtaaagaaattacagaacaacttttagaaaaagaaaataaatcaaaacctaatcatataattgcatgcgttggtgggggaagtaatgcagctggagcttattataattttcttaatgacaaaaatgtcaatttaatagctgttgaagcagctggtaagggaattgatacaggagaaagtgctgctacctcagttcttggaaaagatggaataattcatggaagtaaaactcttttaatgcaaacttcagatggtcaaattactgaaccctattcaatttctgcaggtcttgactatccaggggttggaccgatgcattcacatctttatagaacaggaagggcagaattcatttctattactgacgacagcgctatgcaagcaggtctgaatttaactcaacttgaagggattattcctgcaattgaaacttcacatgcttttgcagtttttgaaaatcgtaaattcaaaacagatgatattgtagttgtaaacttgtctggcagaggcgataaagatcttgatacttttattaattattttaaactcaagtga

SEQ ID NO: 281640 - DNA, 744 bp, Unknown
  Bacterial polypeptide expressing nucleotide sequence isolated from the Sargasso Sea
aatgactggatataattcccgacgagaagattcactgacccgcttctccccgccctccccaccaccccaggctgagctcgagagcatcctcaaggactacgtcggccgcgccaaccccttgtacttcgccgagcgcctcaccgagcactacggcaccgcggacatctacctcaagcgcgaggatctcaaccacaccggcgcgcacaagatcaacaacgcggtgggccaggcgctcctcgccaagaagatgggcaagaagcgcatcatcgccgagaccggcgcgggtcagcacggcgtcgcgaccgccaccgtgtgcgcgcgcttcggcctcgagtgcatcatctacatgggcgccgcggacatggagaggcagaagctcaacgtcttccgcatgcgcctcctcggcgccaccgtgaaccctgtgcgctccggcacctccaccctcaaggacgccacctccgaggccatccgcgactgggtgaccaacgtggagaccacccactacattctcggctccgtcgcgggtccccacccgtaccccatgatggttcgcgacttccacgcgtgcatcggccgggagacgcgcgcacaggcgatggagaagtggggcggcaagcccgacatcctcatggcgtgcgtgggcggcggatcaaacgccatgggcctgttccacgagttcgtcgacgatgaggacgtgaggctgatcggcatcgaggctgcgggtgagggcatgggccctgggca

SEQ ID NO: 281641 - DNA, 826 bp, Unknown
  Bacterial polypeptide expressing nucleotide sequence isolated from the Sargasso Sea
atcgctgagactggggctggtcaacacggagtcgcaacagctactgtttgtgcgaaattaggtttagaatgccatgtttacatgggatctatagatattgaaaggcaaaatccaaatgttcgtagaatggaattattaggggcaaatattatttcagtcagtagtggaaccaaaaccctcaaagacgctataaatgaagcaatacgagattgggttagtaatgtagataccacacactatttaattggaagtgctataggcccacatccatatcctgttatcgttcgtgatttccagtcagtaattggagcagaagtcagagagcaaagtctaaaacaattaggaacattaccaagtgcagttatagcgtgtgtaggaggtggcagtaatgcaattggtatattttacccttttatcaatgatttagatgttaaattaattggtgttgaagctggaggtaaaggtgaaaatactgacgctactgccgcaacattagttaaaggaacaccaggggtactgcatgggacatatacttatttattacaggataattatggacaaattcaagaaactcatagcgtttcagcaggtttagattatccgggagtaggaccagaacatgcatatttgaaagatacagaacgagctaaatacgtttcggctgatgatcaaatggctattgatggattcaaactattgtgttcaaccgaaggcattatccctgcgttagaacctgcacatgttataggatatttacctcacattatcaaggatttctcatccaaagatattatggtgataggtctaagtggtaggggggataagg

SEQ ID NO: 281642 - DNA, 858 bp, Unknown
  Bacterial polypeptide expressing nucleotide sequence isolated from the Sargasso Sea
ttgtactttgccgaaagattgaccgctcatttggcggcgcgaagctttacctcaaacgcgatgaattgaaccataccggcgcccacaagatcaacaatgtgctaggccaagccttgctggctaagcggatgggaaagaccaagatcatcgctgaaacgggtgccggtcagcatggtgttgcaacggccaccgcctgcgccctgttcgatatggaatgcgaagttttcatgggtcaggaagatgttaggcgacaaaagccgaatgttgaccgcatgcgcctgctcggcgcgaaggttcatcccgtaacatcgggtacgggaaccctcaaggacgcgatgaatgaagcgcttcgcttctgggtggcgaatgcccaaacacatttttacattattggcaccgttgccggcccgcacccctatccgcagatggtacgtgacttccaatctgtgatcgggaaagaggcaaaagagcaactgatggaggctgagggccggttacctgacaccattattgcctgcattggtggcggctcgaatgccatgggtctgtttcatccgttccttgatgatgagtctgtcagcatctacggcgtagaggctgctggcaagggcatcccgtccgggctgcatgcggcgtcgctgaccggtggaacacccggcgttctacatggcaaccgcacctatcttttgcaggatgaggacggccagatcattgatgcgcactcaatttctgccggccttgactatccgggaatcgggccagagcattcctggcttcatgatatgggccgaatcaattatgtgagtgctacagacgaggaagcacttgttgccttccaaattatgctcccgcattgag

SEQ ID NO: 281643 - DNA, 939 bp, Unknown
  Bacterial polypeptide expressing nucleotide sequence isolated from the Sargasso Sea
gctgagacgggagcaggtcagcatggagtagctacagcaacagtttgtgctcgatttggattaaaatgtatcgtttttatgggtaaaacagatgtcgagagacaagctcctaatgtttttaggatgaagctattaggtgctgaagtagtctctgttacttcagggcgtggaactttaaaggatgcaatgaatgaagctttaagggattgggtgactaatgttgaagatactttttattgtattggcaccgtagcaggacctcatccttatccttcaatggtacgtgattttcaatcaataattggttctgaaacaaagcaacaaattattgataaagagggacgtttaccagacagtttaatcgcttgtataggggggggatctaatgctatgggtctctttttcccctttttagatgataaagatgtgaagatgtttggggtagaggcaggtggaaaaggagttaacaataagatggagcatgcagcttctttgacaggtggtaggcctggtattcttcatggaaatagaacttatttattgcaagataaaaacggtcaaattatagaaggtcactctatatctgctggattagactatccaggcataggaccagaacattcatacctacacgatattggaagagtagagtatgtatcaataacagatcaagaggcactagatgcatttaaattatgttgtgaaaaagagggtattatacctgctttagaaccaagtcatgctttggcatatgttacaaaaattgctcctaaacttcccaaaaatcatattatgataatgaatatgtgtggtcgtggtgataaagacatttttacagtagctgaatatttgggctttgacttaaaaattagagagttgtttctgaaaataactttttacattgttcgtttttatctgcaattaatagttttattcctt

SEQ ID NO: 281644 - DNA, 625 bp, Unknown
  Bacterial polypeptide expressing nucleotide sequence isolated from the Sargasso Sea
atgacccgtatcgacgccaaattcgccgcgctgaaagccgaaggtaaaaaggcctttgtcgcctatgtcatggcaggcgaccccgattacgacacctcgctcgacgtgatcaagggcctgcccggcgcgggcgtcgatatcatcgaactgggcgtgcccttcaccgatccgatggccgacggcccgaccatccaactcgccggtcagcgcgcgctcgaaggcggcatgacgctggaacgcaccctgcaaatggcccgcgaattccgcaaggccgatgacacgacgccgattgtcatgatgggctattacaacccgatctacagccgcggggtggacaaattcctcgtcgatgccaaagaggccgggatcgacgggctgatcgtggtggacctcccccccgaggaggatgaggagctttgcattcccgcccagaaggccgggctgaacttcatccgccttgccacgcccaccaccgacgacaaacgcctgcccaaggtcctgacgaacacttcaggatttgtttactatgtctcgataacagggatcaccggcgccgctgccgcacaggccaccgatgtcggccacgaggtcgcgcgcatcaaatcgcaaaccgattgccggtgat

SEQ ID NO: 281645 - DNA, 655 bp, Unknown
  Bacterial polypeptide expressing nucleotide sequence isolated from the Sargasso Sea
gattgggtttctaatgtagaaactacacactacattttaggatctgttgcaggtccacaccctttcccaaagattgtgcgagattttcatgcagttataggtgaagaaactaaaaaacaatgtttggaatcatttggatcttttcccgatattttgcttgcttgtgtaggtgggggatcaaatgcaatggggcttttccatccttttgttaaagaaacttctgtacgtcttattggagttgaagccgcaggaagcggagttgatactgacaaacatgctgccactatcactaaagggtcagttggaattttgcatggatcaatgagtcttctcttgcaagatgataatggtcaagtacaagaagctcactcaataagtgcaggtttagattaccccggagtaggacctgaacatagccatttaaaagatataggtagggcagaatatggatcagtcacagatcaagaagctttagacgctttgaaacttgttagtgagctagaaggaattatacctgcacttgaaacttcccatgcctttgcttggttagataaattatgccctactctcgaaaaagacactcatatagttatcaattgctctggtagaggcgacaaagatgttaatactgttgcatcttcattagatatttaat

SEQ ID NO: 281646 - DNA, 799 bp, Unknown
  Bacterial polypeptide expressing nucleotide sequence isolated from the Sargasso Sea
agttttcatgggggcgcaaagggaatattgaaagacaaaaaccaaatgtacaaagaatgcaattatttgggtgcaaaaattaatccggtaacctctggcacaggtacattaaaagatgcaatgaatgatgcattaagattctgggtaactaatgcaaacactcatttttatattattggaaccgctgctggaccacatccatatcctaaaatggttagagattttcaatctataattggtgaagaggcaaaaaagcaaattttagaaaaggaaaatcaacttccaaatgttttagttgctagcattggaggaggatcaaatgctctaggtttgtttcatcctttccttgatgatgaagatgttgaaatatttggtgtagaagcggcaggtaaaggactgaattctagccttcatgctgcttcactttctgctggatcaccaggagttcttcacggaaatagaacctacttactccaagatgatgatggtcaaataaacgatgcccactcaatatcagcaggtttggattatcctggtattggaccagagcattcatggctacatgatattggtagaattaaatatttatcaactactgatgaacagagtttagctgcttttaagttatgtagtagtttggaaggtataattccagctcttgaacctgctcatgccttacatattactggaaaacttgcttctgaaagacaaggccaaattataattatgaatatgtgtggtagaggagacaaagatttatccgctgtgttacctttaataatgaaaaatgatagttaat

SEQ ID NO: 281647 - DNA, 550 bp, Unknown
  Bacterial polypeptide expressing nucleotide sequence isolated from the Sargasso Sea
atgtcaaacattaataaaagcaattctctaaaaaattttcccgatgaagatggaaattttggtcattatggaggaagatttgtagcagagactttaatgcctttattgcttgaagttaacgcagcttggaagaaagcaaaaagagataaaagtttttataatgaacttaactacttcttagaacattttgttggaaggccctctccactttattttgcggaaagaatgacagaacaccttaatggagcaaaaatttactttaaaagagacgaactaaaccatacaggggcgcataaaataaacaactgcatgggacaaattcttctagcaaaaaaaatggggaaaactagaattatagctgaaacaggagcaggtcaacatggtgttgctacagcgactgttgcagctagatttggattaaagtgtataatttatatgggtcataccgatattgagagacaaaaatcaaatgtttttagaatggaacttttaggtgcagaaataatcccagtttattctggaactggaactttaaaagacgctatgaatg

SEQ ID NO: 281648 - DNA, 625 bp, Unknown
  Bacterial polypeptide expressing nucleotide sequence isolated from the Sargasso Sea
gaagaaacaacaaaacaaattggtggtgcaaaaatttattttaaatctgatcatttaaatcatcttggagcacacaaaataaataacagtctttttcaaattttattagctaaaagaatgggcaaaactaaagtgtatgctgagacgggtgcgggtgctcatttaatagcaacagctgcagcatgtgcaaagtttaatcttccttgtattgggtatatgggaaaagatgatgtatttttacagtccacaaatgttcttaaagcaaaactttttggtgccaaggttattgaatgtgttgacggaactggaaaaaaaggcgttcttaaagatgcgtgtacagcggttttaaaagcgtggtcaaatgatcccgatgctttttattgttgtgggagtgcaataggaccacatccttttcctaggatagtacaatatgcacaatctgtaataggcaaagaaataaaagaacaaattttggaaaaagaaggaagattaccagatgccatcgtcgcatgcataggtggtggaagtaacctaataggctcagttcatgaatttttagatgaaaaggaagttgaactgcatggtatagaaccagaacatagtgctgctttaacaaatggcactg

SEQ ID NO: 281649 - DNA, 706 bp, Unknown
  Bacterial polypeptide expressing nucleotide sequence isolated from the Sargasso Sea
actgggatcaaaatcacttaaagatgcgatgaatgaagcattaagagattgggtgacaaatgttaaagatactttctatataattgggacagctgcaggaccgcatccctaccccgcaatggttagagattttcaatccgtgattggcaaggaagtgcgtgaacaacttgaaaaagtggaaggaagatcaccagatttattaatggcatgtatcggtggtggttcaaatgctttaggactatttcatgaatttttagatgattcaaatgttgaaatgattgctgttgaagcagcaggacatgggataaagactgataagcatgcagcaagtttaactggtggtaagccaggtgtattgcatggaaataaaacatatttattacaatcaaaatctgggcaaattcaggaagcacattccatttcagcaggcttagactatccaggaattgggccggaacattcttttttatttgaagaaaaaagagttacatatatgtcagcaacagacaaagaagcactggaagcttttcaatattgttgtaaattagaaggcataattccagctttagaaccagcacatgcattagctgtattaaagaaaatagcaaaaaactatagtaaagataaaattgttgtcatgaacatgtgtggccgaggtgataaagatatttttacaatagctgatgaattaaacataaagatttaa

SEQ ID NO: 281650 - DNA, 703 bp, Unknown
  Bacterial polypeptide expressing nucleotide sequence isolated from the Sargasso Sea
atgacaattaaaaattcttataaacaacttccagatcataaaggatattttggatcatttggtgggagatatgtatctgaaactttaatgcctctaatattagaagtagaaaaagaatatgaaaaaataaagaatgacaaaagctttaaagaagaactaaatcactatttgaaaacatatattggaagaccaagtccactattttttgcaaagagaatttccgaagatttgggtgggccaaaaatatatttcaaaagagatgaattaaatcatactggtgcacataaaataaataactgtattgggcagatacttcttgcaaaaagaatgggtaaaaaaagaataattgctgaaacaggagctggtcagcatggagtggcaacagcaactgtatgtgctttatttggactgccgtgcatagtttatatgggggaaaaagacataaaaagacaatcacctaatgtttttagaatgaagttgttaggtgctgaaattagaagtgtaaccactggttctaaatcacttaaagatgcaatgaacgaagctctgcgtgattgggtaactaatgttagagatactttttacatcataggaacagcagcaggtccacatccttatccaaccatggtaagagattttcaatctataattggagaagaagttagagagcaaattttaaaagctgagaacaaactgcctgatt

SEQ ID NO: 281651 - DNA, 541 bp, Unknown
  Bacterial polypeptide expressing nucleotide sequence isolated from the Sargasso Sea
ataaataaattagaaggtaaatccccaaatctattaattgcttgtattggaggtggctctaatgcattaggtttatttcatgaatttttagatgacccagatgtcaaaatgattgcagtagaagccgcaggtcatggtataaaatctaataaacatgctgcaagtctagctggaggtaaaccaggagtcttgcatggaaataaaacataccttttacaatctaatacaggacaaatagaagaggcgcattctatatcagcaggcttagattatcctggtattggtccagaacattcttatttgtttgaagaaaaaagagttgattacatgtctgctacagataaagaagctttagatgcttttcaatattgttgtaaattagaaggtattattcctgcattagaaccagctcatgctttagcagtattaaaaaaagttgccaaagattatagtaagaatgatattatagttatgaatatgtgtggaagaggcgataaagacatatttactatagcagatgaactaaatattaaattttaat

SEQ ID NO: 281652 - DNA, 463 bp, Unknown
  Bacterial polypeptide expressing nucleotide sequence isolated from the Sargasso Sea
atgaaaaaaacaaataaaattaactattataagttccctgataaacatggaagatttggaaaatttggaggaagatttgtagcggagactttgatgcctttattacttgatgttgaaaaaaaatacaaagaagttagaagatcaaagaagtttaaaagggaactaagctattattttgaaaattacataggaagaccaagcccactctattttgctaaaagaatttctaaagagattggagatgtaaaagtctatttcaaaagggacgaactaaatcataccggcgctcacaagattaataattgtgttgggcaagtacttttagcaaaaaagatgggtaaaaaaagaattgttgcagaaacaggcgcagggcaacatggacttgcaacagcaactgtctgcgcactctttaacctaaaatgcgttgtgtacatgggtgctttagatataaaagacaagctcc

SEQ ID NO: 281653 - DNA, 733 bp, Unknown
  Bacterial polypeptide expressing nucleotide sequence isolated from the Sargasso Sea
agcaggacaacatggtgtagctacggcaaccgtttgcgctctaatgggattagaatgtattgtgtatatgggtgaaattgatattaaacgtcaagcaccaaatgtggcacgtatgaaaatgttaggtgcagaagttcgtccagctacttcaggttccaaaacactaaaagatgctacaaatgaagccattcgagattggattaataatccaacggatactttttacattattggttctgttgttggtcctcatccttatcctgatatggtagcaaaatttcaacgtattatttctcaagaaattaaatcgcaattacaaacttcagaaggaatagaaaatccaaattatgttatagcttgtgtgggtggtggtagtaatgcagccggtgcattttatgaatatttagaggaagaaaatgtacaattaattgcggccgaagctgcaggtcatggtgtagattctggtgagagtgctgcaacttctgttttgggaaaaattgggattatccacggaagtaaaacattgttaatgcaatctgaagacggccaaattacagagccttattctatttcagctggactagattatcctggtattggtccaatgcatgctcatttatttgataccaaaagaaccatttttgaagccattactgacgatgaagctatgaaagctggattaaatttatgcaaaaaagaaggcattattcctgctattgaatcggctcatgct

SEQ ID NO: 281654 - DNA, 658 bp, Unknown
  Bacterial polypeptide expressing nucleotide sequence isolated from the Sargasso Sea
tgggttacaaatgtaaaagatacattttacataattggtactgtagctggacctcatccttatccttcgatggtaagggattttcagtctataataggaaaagaggttagaaaacaaataattgaggctgaaaataaattaccagatttattagttgcatgcattggaggaggttctaatgcaattggattatttcatgaatttttagatgatgaaaatataaaaatgttagcagtagaagctgccggttgcggtttaaattcagaaaagcatgcagcaagtttaacaggtggtaagccaggcatacttcatggaaataaaacatatttattgcaatcagaaactggacaaataaaagaggctcattcaatatcagctggattagattaccctggaataggtccagaacactcgtttttgtatgatgaaaaaagagtgaaatatacatcagcaaccgatgaagaggctttagaagcctttcaatattgttgtagacttgaaggtattatacctgcgctcgaaccttctcatgcattatctgcattaaaaaaaattgctccaaaaatgaattctgatgagattgttgttatgaatatgtgtggaaggggtgataaggatatatttactgtcgcaaaagctcttaatataaatatttaat

SEQ ID NO: 281655 - DNA, 922 bp, Unknown
  Bacterial polypeptide expressing nucleotide sequence isolated from the Sargasso Sea
tttaagagagatgaattaaatcatactggtgctcacaaaataaataattgcatgggtcaaattttacttgcaaaaaaaatgggaaaaaaaagaattatagctgaaacaggagccggtcaacatggggttgcaacagctacagtatgtgctttatttggtcttccctgtattgtttacatgggtgaaaaagatatagaaagacaatctcctaatgtatttagaatgaaactccttggagctgaaattagaagtgtttctacaggttcaaaatcactaaaagatgctatgaatgaagcactaagagattgggttactaatgtaaaggatactttttatattattggcacagcagctgggccacatccatatcctgctatggttagagattttcaatcagtaattggaaaagaagtaagacagcaactaaaagatattgagggcaaatcacctgatttattgatggcgtgtataggtggaggttcaaatgctttaggattattttatgaattccttgatgacagcaatgttgaaatgattgcagtagaagctgcagggcatggaataaacacagacaaacatgctgcaagtttaacggggggtaaacctggtgttttacatggaaataaaacttatcttttacaatcaaatactggacaaattcaagaagcacactcaatatcagctggattagattatcctggcattggtcctgaacattcatttttatttgaagaaaagagagtaaagtatatgtctgctactgataaagaagccttagatgcttttaaatattgttgcaaacttgaaggtattattccagcattagaacctgcgcatactttgtctgttttaagaaaaatagcaaaaaattataaaaaagataaaataattgtaatgaatatgtgtggcagaggagacaaag

SEQ ID NO: 281656 - DNA, 376 bp, Unknown
  Bacterial polypeptide expressing nucleotide sequence isolated from the Sargasso Sea
aatgatggagagccagggattctgcatggagctaagagttatttaatgcaagatgaaaatggccaggtaatagacactcattctgtttcggcaggtttagattatccgggagttggaccagagcattcaaatttaaaagattctggaagagccaattatatagccgtagatgacatagaagtacttgattcattccatttaataacaaagctagaagggataatgcctgctttagagactgctcatgcatttgctgctcttgatcatattgcaaaaaattacacatctgatcaacatttagtgattaatgtttcaggaagaggggataaagatattaatacagttgccacaatggatggaatatcccttgactaga

SEQ ID NO: 281657 - DNA, 591 bp, Unknown
  Bacterial polypeptide expressing nucleotide sequence isolated from the Sargasso Sea
aatgaaaacatataaacaacctagcacagttggaaggtttggtgagtttggtggaatgtacgtttcagagacattaatgcccctattattaaatctagataaatcttacaaaaaaattcaaaaggataaaaaatttaaaaaagaattaaatggtctttttaaaaactatgtaggtaggccctcctctttgcactatgccaaaaatttgtctaaatatgttaatggaccaaaaatatatttaaaaagagatgagctaaatcatacaggagcccataaaattaataattgcttaggacaaatactccttgcaaaaaaaatgggtaaaacaagaataattgctgaaacgggtgctggacaacatggagttgcaacagctactgtttgtgctctttttggacttccatgttatatttacatggggtctaaagatatcgaaagacaaaaacctaatgtttttagaatgaagcttctaggagcaaccattattcccgttgagtctggcagtaaatctctaaaagatgcgatgaatgaagctttaagagattggattaaaaacgtcagagatactttttatattatcggttctaccgc

SEQ ID NO: 281658 - DNA, 757 bp, Unknown
  Bacterial polypeptide expressing nucleotide sequence isolated from the Sargasso Sea
tatgaccgagctcaagcttaacccttatttcggcgaatacggtggtatgtatgtaccacaaatcttagtgccagcattaaagcaacttgaagcagcttttgttgatgcacaacaagatgaaagctttcatgctgaatttaacgatttattaaaaaattacgcgggccgcccaacagcattaaccttaacccgcaaccttagcccaaacccaatggtaaaaatttaccttaagcgtgaagacctactccatggtggtgcacacaaaacgaaccaagtattaggtcaggctttacttgctaaacgcatgggcaaaaaagaaattattgccgaaacgggtgctggccaacacggtgttgccaccgccctagcctgcgcacttttaggtttaaaatgtaaagtctacatgggtgcaaaagatgttgagcgtcagtcgccaaacgtgttccgcatgaaactcatgggcgcagaagttatccctgtaacctctggctcatcaaccctaaaagatgcctgtaacgaagccatgcgagactggtctgcaagctacgacaaagcgcattatttattaggtactgcagcgggtccacatccgtttccaactatcgtgcgtgaatttcagcgcatgattggcgctgaaactaaaaagcaaatacttgaaaaagaaggccgtttaccagatgccgtcattgcctgtgttggtggtgggtctaacgcaattggcatgtttgcagactttatcgatgagccgtcggttgaa

SEQ ID NO: 281659 - DNA, 727 bp, Unknown
  Bacterial polypeptide expressing nucleotide sequence isolated from the Sargasso Sea
cagacatcagaagtgttagcaccgggatcaaaatcactaaaagatgcaatgaatgaagctcttcgtgattgggtaacaaatgtacaagatactttttatataattggcactgctgctggtccacatccttatcctgcaatggttagagattttcaatcagttattggtgaagaggtaaggcaacaaattttaaaagctgaaaatagacttcctgacttattaatggcttgtattggtggtgggtctaatgcattaggtttattccatgaatttcttgatgacaaacagatagagatgattgcagtagaagcagctggtcacggattagactctggaaaacatgcagcaagtttaagtggtggtaaacctggaattttacatggtaataaaacatatctgcttcaatctcaagatggtcaaattgatgaagcacattctgtatctgcaggattggactaccctggaataggtcctgaacactcttatttatttgaacaaaatagagttcggtatatgtctgcaactgacaaagaggcaatagatgcatttcaatactgttgtaatttagaaggtattattcctgcacttgaaccctctcatgcacttgcagtcttaaaaaaagtagcaaaaaaatatgctaaagacaaaattgttgttatgaatatgtgtggcagaggggataaagatatttttacaattgctgaagaattaaacataaaattataat

SEQ ID NO: 281660 - DNA, 215 bp, Unknown
  Bacterial polypeptide expressing nucleotide sequence isolated from the Sargasso Sea
aatgtcagaaagaattaaaaaaatatttgaaaaaaaagaaaaaaagctaataacctttacaactggtggggatcctgatttagaaacaagtttaaaaatacttaaagttataataaataatgatatagatttaatagaaattggaatgcctttttctgatccaatggctgatggtcctactattcaagaatccagtgtgcgatcaattttcaacg

SEQ ID NO: 281661 - DNA, 625 bp, Unknown
  Bacterial polypeptide expressing nucleotide sequence isolated from the Sargasso Sea
ctgcccaattccgcggccctggatgccgcagctcgccccgacggcttgggtcgttttggccgctttggcgggcagtacgtgcctgaaaccctcatgccagctctagctgagctggaaacagcggcagctgaagcatggaaggacaaaactttcaccgatcgtttgaacgctctgctgcgggactacgtcggacgcccaagcccgctctacgaagccgaacggctcagtcagcactaccgacgtgccgatggcgggccacgcatttggcttaagcgtgaggacctcaaccacacaggcgcccacaaaatcaataacgccctagggcaagcactgcttgccctgcgaatggggaaaaagcggatcattgccgaaaccggcgccggtcaacacggcgtggccacagccaccgtctgtgctcgtttcggactgaagtgcgtcatctacatgggctctgaagacatgcgtcgtcagtccctcaacgtcttccgcatgcgtctactgggggcaaccgttcaaccggtgacggcgggcacggccaccttgaaagacgccaccagtgaagcgatccgcgactgggtgacgaatgttgagagcacccactacatcctgggctcagtggctgggc

SEQ ID NO: 281662 - DNA, 616 bp, Unknown
  Bacterial polypeptide expressing nucleotide sequence isolated from the Sargasso Sea
gcggggccccacccttatccgatgatcgttcgggattttcaatcagttatcggtgaagaaactaagaggcagtttgcggcagtgtctggtggacttccagatgccatagtagcttgtattgggggcggttcgaacgccatggggattttccattcttttcttgaagaccgcagcgtccgtctgattggtgttgaagctgcaggctatggtctcgatagtggcaagcatgccgcttcgctaaatgaaggctccgttggtgtcttgcacggcaatagaacgtatcttttggatgataaagatggccagattattgaagctcacagcatctcagctggactagattatcctggtgttgggccggaacacgctttcttgaaagacatgaaaagggctgaatacgttgcaattgatgatcatgaggcaatggcagcatttcgcgagttgaaccttttagagggaattttgcctgctctcgagtcctcgcatgcagtcgcatacgctatgaagctcgcatcgaccatgagcactgaccagagtatcgtggtcaacctatctgggcgaggtgataaggatatcccaactgtcgctcgaattgacggaatttccattgagtaga

SEQ ID NO: 281663 - DNA, 560 bp, Unknown
  Bacterial polypeptide expressing nucleotide sequence isolated from the Sargasso Sea
agaaacaaaacaacaaatgtttgaagccgaaggaaaattgccagataccctggttgcctgtattggtggaggttcgaatgctatcggcttgttccatccatttttagatgatgatgtcgaaattattggcgtagaagctgctggacttggaattagtaccaaacagcatgccgcttctttgacagggggaaagccgggcgtcttgcatggaaatagaacctacttactgcaagataatgatggccaaatcacagaagcacattcaatatcagccggattagattatccaggaattggtccggaacactcgtggctatttgaaacaggtcgcatagagtatgtaagtgcaacagataatgaagcgttggaggcatttgctctatgctcaaaaatggaaggtatcatcccagctctcgaacccagccatgcgcttgcatacatcaaaaatataatcagctcgttgccaaaagaccatactatagtgatgaatatgtgtggaagaggagataaggatctcgaagcagtaataccacgtctagaagaaatggacctactttgaa

SEQ ID NO: 281664 - DNA, 271 bp, Unknown
  Bacterial polypeptide expressing nucleotide sequence isolated from the Sargasso Sea
ttgaaaacatataaagaaaatcgcctaaagctactatttgaaaatctaaaaaaggaaaaaagaggaggccttggtatctttatagcggcctctgatcccaatcttgagatttctttagaaatattaaagcgcttgccacaggctggtgcagatatgatagaactcggcatgccattttcagatccaatggccgatggccccacaattcaagctgccagtctgcgagctttgaaatctggaggatcactcaaacgaacactcgaaatggtaa

SEQ ID NO: 281665 - DNA, 631 bp, Unknown
  Bacterial polypeptide expressing nucleotide sequence isolated from the Sargasso Sea
atgaaaacatataaacaacctagcactgttggaagatttggtaaatttggcggcatgtatgtttcagaaacattaatgcccctattattaaatttagataaatcgtacaaaaaaattcaaaaagataaaaaatttaaaaaagagctaaatgatctttttaaaaactatgtaggtaggccctcctctttgcactttgctaaaaatttatctaaatatatcaatggaccaaaagtatattttaaaagagatgagctaaatcatacaggagctcataaaatcaataattgtttaggacaaatactacttgcaaaaaaaatgggcaaaacaagaattattgctgaaactggtgctggacagcatggagttgcaacagcaactgtttgcgctctttttggtcttccttgttatatttatatggggtctaaagatatcgaaagacaaaagccaaatgtttttagaatgagactactaggtgccactattattcctgttgagtctggcagtagatctttaaaagatgcgatgaatgaagctttaagagattggataaaaaacgtcagagatactttttatattatcggatctacagcaggtcctcacccctatccgaaaatggtaagagattttcaat

SEQ ID NO: 281666 - DNA, 716 bp, Unknown
  Bacterial polypeptide expressing nucleotide sequence isolated from the Sargasso Sea
ttatttggtttgccttgcgtagtttatatgggtgataaagacatacaaagacaattaccaaatgtatttagaatgaaattacttggtgctgaaataaagagtgtttcttcaggatcaaaatcattaaaagatgctatgaatgaggcattaagagactgggtaacaaacgtaaaagaaacattttatattattggaacagcagcaggtcctcatccttacccagctatggtaagagactttcaatcagttattggaaaagaagttagaaaacaactaaaagatcttgagggcaaatctccagatttacttatagcttgcattggtggaggatccaatgctcttggattatttcatgaatttcttgatgatagtaatgttgaaatgatagctgtagaagcagcgggacatgggattaacacaaataaacatgcagcaagcctgacaggtggtaaacctggtgttttgcatggaaataaaacttacttgcttcaatctaatactggtcagattcaagaggcacattcaatttctgcaggtttagactatccagggataggtcctgaacattcatttttatttgaagaaaagagagtaaagtatatgtcggcaactgataaagaagccttagaagcatttcaatattgttgcaaacttgaaggtataattcctgcattagagcctgctcatgcgttgtctgtattaaaaaaaaattgcta

SEQ ID NO: 281667 - DNA, 942 bp, Unknown
  Bacterial polypeptide expressing nucleotide sequence isolated from the Sargasso Sea
taaatcatactggggctcataaaataaataattgtttggggcagatattgttggcaaaaagaatgaagaaaaaaagaataattgcagaaacaggtgcagggcagcatggtctagcaactgcgactgtatgcgctctatttgggttaaaatgtgtaatttatatgggatctaaagacataaaaaggcaaaagcctaatgtattaaaaatgaaattattgggggctgatataattcctgtagactcagggtcttctactttaaaagacgctatgaacgaagcactgagggattgggtaagtaatgtaggagatacattttatataataggtactgctgcaggaccacatccgtacccgatgatggtaagagactttcaatctgtaataggaaaagaggtaagagaacaaatttttgaatatgaaaaaaaactcccagattctcttattgcatgcataggcggtggctcaaactcacttgggctttttcatgaatttttagatgaaaagaaagttgcgctttatggcatagaagcaggaggtaagggaataaagactggaaaacatgcttcttctttgctggctggcaaaccaggagtactccatggaaataaaacctatattttacaaaacaaatatggacaaataagcgaggctcattctatttccgcgggattagattatcctggtataggacctgaacatagctggctaaaagatatcggtagagtaaaatatttttctgtaaaagataatcaggcaattgaggggctaaaactatgtagtaagttagaaggcattattcctgctttagaaccttcacatgctttgtattttgttacaaagtttgctccaaaaaagaaaaaaaaccacattatagttatgaatttatgtggtagaggcgacaaagatctagatgcgatagctcctttattgaatatttaaa

SEQ ID NO: 281668 - DNA, 344 bp, Unknown
  Bacterial polypeptide expressing nucleotide sequence isolated from the Sargasso Sea
gctgaccctagttgacccagcgccggtgaccagcaccatgccttctgctgaagccctgcaggcatcggcgcgccccgattgtctcggccgctttggtcgctacggcggtcagtacgtgccggagacattgatgccggccttggccgagctggaacgatctgccgctgaagcctggcaggatccggcgttcaccggacggctcaaggagctcttgcgcacctatgtcggccgacccagccctctttatgaagccgagcggctgagcgagcactaccgccgccccgaggggggaccgcgcatctggctcaagcgcgaagacctgaaccacaccggtgcccacaaga

SEQ ID NO: 281669 - DNA, 808 bp, Unknown
  Bacterial polypeptide expressing nucleotide sequence isolated from the Sargasso Sea
tgtgtgttttcatgggtcaaactgatgtggaccgtcagtcacccaaatgtttttagaatgcgtctattaggggctgagataatatctgttacctctggtcgggcaactttgaaggatgcgatgaatgaggccatgagagattgggtaacaaatgtaaaagatactttttattgtattggcacagttgcgggacctcacccttacccagttatggtgcgtgattttcaatcaataattggtcgcgaggctagggagcagctgatgaatgttgaaggaaagcttcctgatactattgtagcgtgtatcggtggtggatctaatgctatgggtttatttcacgcttttctggacgatgagtctgtaaaaattattggcgtagaggcggggggcttaggagttgatagtcgaatggcgcatgcggcttctctgacagggggacgccctggggttctacatggaaatcgaacctatttattgcaagatgaatttgggcagataattgaaggtcattccatttccgcaggcctcgattaccctggtataggacctgaacattcctggttacatgatattaaaagggttgaatatgtttctgtaaccgatacagaagcattagcagcttttcaactttgttgtacaaaggagggaattattccagctctagaacctagtcatgcgcttgcgcatgtaattaaaattgcaccaggacttggtaaacgccatatattattattgaatatgtgcggcagaggagacaaagatatttttacggtagcgaatgctttgggggaagaacttgacgcctaat

SEQ ID NO: 281670 - DNA, 634 bp, Unknown
  Bacterial polypeptide expressing nucleotide sequence isolated from the Sargasso Sea
atgaaatatagtgtaaatagtagtggtttctatggtgattttggaggtgcatatatacctgaaatgttattttcaaacatagatgaacttaaaaaaaattatctcagtattgtagaaaaagattctttcactaaagagtttaatttttatctaaaaaaatatgttggtaggcctacaccattgtattatgctaatagattgtctaaaaaatatggttcaaaaatttatttaaagagagaagatttgtgtcatactggtgctcataaaataaataatacaatagggcaaattctattagctagagagcttaagaaaacaaagataattgcagaaacaggagcaggccaacatggtgttgcaacagctacagtatgttctcttatgggaatggaatgtgtaatttatatgggagaggttgatattgaaagacaaagaccaaatgtagaaagaatgaggatactaggtgctgaagttagacctgcaacatcaggtagtagaaccttaaaagatgctacgaacgaggcgatgagacactggataaataatccagacgacacacattacataattggatctgtagttggaccacatccatatcctgatatggttgctagatttcagtcagttatatcta

SEQ ID NO: 281671 - DNA, 823 bp, Unknown
  Bacterial polypeptide expressing nucleotide sequence isolated from the Sargasso Sea
ttttcagcaagaatttaatcaattgcttaaagactatgttggtaggccatctcctctatatttttcaaaaaatttatctgaaaaatattcagctaaaatatatttaaaaagagaagatctaaatcacacaggagcacataaaattaacaatacaataggacaaataatacttgcaaaaagattaaaaaaatcgcgaattattgctgaaactggagcaggacaacatggagtggctacagcaacagtttgtgctttaatgggtttaaaatgcatcgtatatatgggtgctactgacgttaaaagacaggctccaaatgttgcaagaatgaaaatgttaggagctgatgtcattcctgtaacatctggaagctcaactttaaaagatgcaacaaatgaagcaatgagagactggattaataatccaattgatactcattatattgttgggagcgttgttggaccgcatccttttcctgacatggttgctagatttcagtctgttatttcaaaagagataaaagaacaacttcttttagctgaaggaagaaattacccagattatttaatcgcttgtgtaggtggaggaagtaatgcggctggaacgttttatgattatttggacgatgaaagagtaaaaattatttgtgttgaggcatctggaaaaggagtaaattctggaaaatcagctgcgactacaaaattgggtaaaacgggaattatacatgggagtaagaccttacttatgcaaaccgatgacggtcaaataactgaaccctattcaatttcagctggattagattatccaggaatagggcctatgcat

SEQ ID NO: 281672 - DNA, 544 bp, Unknown
  Bacterial polypeptide expressing nucleotide sequence isolated from the Sargasso Sea
atgaaccaaaaaaaaataaactttaattcacttaaaaatcagccttctgaagatggaaagtttggagaatatggaggtatgtttgttgcagaaactcttatgcctctgatattaagtttatcaaaaaactataacaaattaaaaaaaagctcatcatttcaagaaaagttaaaatattatcaaaaaaactatataggaaggccatctcccctttattttgcaaatagaattactgaatattgtggtggtgctaagatttttttcaaaagagatgaattaaatcatactggcgcacataaaataaataatgttattggacaagcattactagcaaaagaaatgggtaaaaataaaattattgctgaaacaggcgcaggacaacatggagttgctactgctacagtttgcgctctttttgatatggattgtgaagtttttatgggtgaagaagacatagagagacaaaaaccaaatgtagaaagaatgcaattactaggtgcaaaaattattccagtgtcatctggtacaggaacacttaaagatg

SEQ ID NO: 281673 - DNA, 529 bp, Unknown
  Bacterial polypeptide expressing nucleotide sequence isolated from the Sargasso Sea
gaaaataaattaccagatttattgattgcatgtatcggtggaggatcaaatgctcttggtttattttatgattttttagatgacaaagaaattaaaatgcttgctgtagaagcagcaggcctgggtttgtcttcaggtaaacatgcagcaagtctttcaggtggaaaaccaggagtacttcatggtaacaaaacttatcttttgcaaaatcaagacggtcaaattgaagaagctcattcaatttcagcaggattagattatccaggtatagggccagagcactcttttttatttgaacaaaaaagagttaagtatgtatctgcaactgatgaagaagctttagaagcttttaaatattgttgcaagactgaaggtattattcctgcattagaaccagctcatgctttagcagctctaatcaaaattgctcctaaaatgagtaaagatgaaatcattgtgatgaatatgtgtggaagaggtgacaaagatatttttacagtagcagatgctttaaaaataaaaatttaat

SEQ ID NO: 281674 - DNA, 556 bp, Unknown
  Bacterial polypeptide expressing nucleotide sequence isolated from the Sargasso Sea
gaagtgagatctcaaattatagctcaagaaaatagactgccagatttattgatagcatgtatcgggggaggatcaaatgctcttggtttattttatgaatttttagatgataaagaaattaaaatgcttgctgtcgaagcagcaggtctaggtttatcttcaggtaaacatgcagcaagtctttcaggaggaaagccaggagtacttcatggaaataaaacttatcttttgcaaaatcaagatggtcaaattgaagaagctcattctatttctgcgggattagattatccaggaataggtccggaacattcttttttatttgaacaaaaaagagttaaatatgtatctgcaactgatgaagaagctttagaagcttttaaatattgttgtaagactgaaggtattattcctgcattagagccagctcatgctttagcggctctaatcaaaattgctcctaaaatgagtaaagaagaaatcattgtaatgaatatgtgtggaagaggtgacaaggatatttttacagtagcagatgctttaaaaataaagatttaat

SEQ ID NO: 281675 - DNA, 798 bp, Unknown
  Bacterial polypeptide expressing nucleotide sequence isolated from the Sargasso Sea
ccattatatcacgcatccagaattacaaaagaacttggaggagcaaaagtttattttaaaagagatgaacttaatcatacaggtgcccataaaattaataattgtataggacaggtacttttagcaaaaagaatgggaaaaagtagaataatttgcgaaactggggctggtcagcatggtgtagctacagcgacagtatgtgcactttttggacttccttgcacagtttatatgggtgcaaaggatattgaaagacagtcgcctaatgtgtttagaatgaagctattgggagcaaatatagtctcagttcaatctggttctcaaagtttaaaagatgcaatgaatgaagcattgagggcttgggtatcagatgtagaagatactttttatattattggtacagccgccggccctcatccttaccctatgctcgtaagagatttccaatccgtgataggagaagaaactaaggaacaaattatagaagcagaaggaagattgcctgatagtttaattgcatgtattggcggaggatctaatgcgttaggccttttttatccttttctagatgatatttctgtaaatttgtatggagtagaagctgcaggaaaaggattaaacactaatgaacatgcagcctcattatctttaggttcccctggagtattacatggaaatagaacatatttacttcataatgatgacggtcaaataattgaagctcattcaatatcagcagggttagattatcctggtgttggcccaaaacattcatatttaaaagatgtaaatagagtt

SEQ ID NO: 281676 - DNA, 835 bp, Unknown
  Bacterial polypeptide expressing nucleotide sequence isolated from the Sargasso Sea
agcaaccgctactgtatgtgctctttttaatctagaatgtgttgtatatatgggagctttagacataaaaagacaagcccctaatgtttttaaaatgaaattattaggagcagagattattccagttgagtctggaacatcaactttgaaagatgcaatgaatgaagcactcagggattgggtttcgaatgtagatgatactttctatgttattggtactgtggctggtcctcatccttacccgatgatggtaagagatttccaatctattattggtattgaagctaaaaaacaaattcttaaaaaagaaaaaagacttccagattatttacttgcctgcattggtggggggtcaaatgcattgggacttttttatccttttctaaataatgatgatgtgaaaattattggaatagaagcggggggagaaggtgtaaatacagaaaaacatgctgcatcattgtctaaaggcaagccaggtttcctgcatggaaactatacatatttgcttcagactaatgaaggacagatttctgatgcgcattctatatcagcaggcttggactatcctggtattgggcctgaacattcatggttaaaagagactgggagagtcaattatttcagtgcaacggacaaagaggcactggaggcatttaaaatttgctcaaaactagagggaattattcctgcacttgaaccatcacacgcattagcatacctattaaaaaattctaaaaaatttaaaaataatgaaatcattataatgaatatgtgtgggaggggggataaagatattttctcaatatctgaacatttaggagtaacaatttaa

SEQ ID NO: 281677 - DNA, 885 bp, Unknown
  Bacterial polypeptide expressing nucleotide sequence isolated from the Sargasso Sea
ccaaccgcacttacttatgcaagtcagttgagtaaaaggtggggagttgaggtttttcttaaaagagaagatttgactcacacaggcgctcacaagatcaacaatgcacttggtcaagccatgcttgcaaagaagctcggcgtgaaaaggattgttgcagaaactggcgctggccaacacggggtggcttcagccgcagcctgtgcaagactgggtcttccatgcacagtttacatgggagcaatagatattgagcgacaagctccaaatgtagatcgcatgaagcaattgggcaccgaagtcatttctgtaatgagcggagatcaaaccttgagagcagccatcgatgaagcattcagggactgggtgtctgaccctgaaaatacacattatataattggttccgttgtgggccctcatccattcccttatttggttagggaaatgcagtccatcataggcaaggaggcaagacaacaaatgttggatgttggggaaaatctccccgacgcagtgtttgcttgtgttggtggtggatcaaatgcaatcggattgtttcatgcttttctaggagataccgaagtagagctattcggaatagaggcagggggaacaagcgatgatttgggagagaatgccgcaacacttgcttcaggaaaaccagggattcttcatggaacttattccatgttattgcacgacgacgacgggttaattcaagagacacattcagtttcagccggtcttgactatccgggtgttggtccggagcatgcattcttgcaatcgataaaccgagtaaaatatacatcggcaagagatgatgaagccttggaattattgagagaggtttgtgaatacgaaggaatattgcctgccattgaa

SEQ ID NO: 281678 - DNA, 832 bp, Unknown
  Bacterial polypeptide expressing nucleotide sequence isolated from the Sargasso Sea
tattttgcaagtagaatttcagagaaaataaataatgctaaaatatactttaaacgcgacgaactaaatcacactggtgctcacaaaattaataattgtatcgggcaaattcttctagcaaaacgaatggggaaaaaaagaatcgttgctgaaacaggggctggacaacatggacttgccacagcaacagtttgtgcattattcaacctcaagtgtattgtttacatgggtgaaactgatatcaaaagacaagcgcctaatgtttttaaaatgaaattacttggcgcagaaataagatctgtcaaatcaggaactgcaaccctaaaagatgcaatgaatgaagctcttagagactgggtatctaatgttaatgatactttttatgtaattggaactgtggctgggcctcacccataccctatgatggttagagattttcaatcaattattggaatcgaagcaaaaaagcaaatccttaaatcagaaaaaagaatgccagacttattgatcgcttgcattggagggggatcaaatgcactaggtttattttatccttttttaaattgtgaaaaagtaaaaatagtaggtgtagaagccggtgggaagggtattaatactgataaacatgccgcctctctctcaaaaggaaagccaggctaccttcatggtaatcatacatatttattgcaagataaagatgggcagatattagatgcccactcaatttctgctggtttagattatcctggaataggtcctgaacattcctggttaaaagaaataggaagggtaaaatatgtaaatgcaacagacaaagaagcattgaatgcat

SEQ ID NO: 281679 - DNA, 679 bp, Unknown
  Bacterial polypeptide expressing nucleotide sequence isolated from the Sargasso Sea
atgagaaaatataaacaacctagcactgttggaagatttggtgaatttggtggcatgtatgtttcagaaacattaatgccgctattattaaatttagataaatcttacaaaaaaattcaaaaggataaaaaatttaaaaaagagctaaatgatctttttaaaaactatgtaggtaggccctcctctttgcacttcgctaaaaatttatctaaatacattaatgggccaaaaatatattttaaaagagatgagctaaatcatacaggtgcccataaaattaataattgcctaggacaaatactccttgcaaaaaaaatgggcaaaacgagaattatcgctgaaacgggtgctggacaacatggagttgcaacagctactgtttgtgctctttttggtcttccatgttatatttacatgggagctaaagatatcgaaagacaaaaacctaatgttttcagaatgaagcttctgggagccaccatcattcctgttgagtctggtagtaaatctttaaaagatgcgatgaatgaagctttaagagattggattaaaaacgtcagagatactttttatattatcggatctaccgcaggtcctcacccctacccgaaaatggtgagagattttcaatctgtaattggacaagaagcaagagaacaaatattaaaagtagagaaaa

SEQ ID NO: 281680 - DNA, 838 bp, Unknown
  Bacterial polypeptide expressing nucleotide sequence isolated from the Sargasso Sea
gttcctccaggcaacattggccgtggtctgtacggcgtacgcgctgtccggcccgatacgcatgctttccatgcggaaccgttcgaacgccaggaaccgtgcagagtcgaaggaacacgcatcgtgagcaccattgaagacacccgcggtcggtttggaccgttcggcggacggtacgtcccggaaaccctggttgccgccctcgatgaacttgaagcggcctggcttgaagcccggaaggacgacgcgttccaggccgaggtcgaccgggagttgcgggatttcgtggggcgcccgaccgccctcacctttgcgccgaggctgaccgccgaggtcggcggtgcgaacatctggctcaagcgcgaggatctcgcacataccggcgcccacaagatcaacaacaccatcggccaggtcctgctcgcccgccgcatgggcaagcagcggatcatcgccgaaaccggcgccggccagcacggcgtggccaccgccaccgcgtgcgcccggttcggcattgcctgcgaggtctacatgggagccgaagacgcccgcagacagtcgctgaatgtcttccgcatgcgcctgctcggggcaacggtgcacgaggtcgaacacggttcacgaacgctcaaggacgcgaccaacgaggcgatgcgggactggatgggctcggtcggcgacacccactacgtcctgggttcggtggtcggaccgcatcccttcccaaccattgtccgggagttccaatcggtcatcggccgtgagtgccgtagccagttccccaaggcaaccggcggccagcccgcggcggtgatcgcctgcgtcggtggcggatcaa

SEQ ID NO: 281681 - DNA, 355 bp, Unknown
  Bacterial polypeptide expressing nucleotide sequence isolated from the Sargasso Sea
atgaaaaaaaataaaaatattaattataaaatatttccagacaaaaatggaagatttggaaaatttggtggaagatttgttgccgaaacattaatgcctttgttacttaaagtcgaagaggaatataaaaaggctaaaaattcaaaaaaatttaaatctaaactcaattattattttgaaagttatattggccgaccaagccctctttatcttgctgaaagattatctagcaagcttaacggagccaaattatatcttaaaagagatgaacttaatcatactggagcccataaaattaataattgtgtaggacaaattttacttgctatgcagatgggaaaacaaagaattgttg

SEQ ID NO: 281682 - DNA, 670 bp, Unknown
  Bacterial polypeptide expressing nucleotide sequence isolated from the Sargasso Sea
tatgaaagaatacgaaacgcaaaatgctcaaaatgaatctttatctaaggtagatgagacgttttgtgagttaaaaaaaaataaaaaattagctttaatgcctttcataatggctggagatcccaatattgaaaaaacgtctgagatcttattaaagttacaagaaaatggagctgaccttattgaattaggtatcccttacagtgacccacttgcagacggacctgttattcaattggcagcgtctcgcgccttaaagtcaggtactaacttaagagaagtaattaaacttttagagtctttaaaaggtaatctaaatattcccatcatccttttttcttacttaaatccattactaagttttggctttgaaaagttttgtgagatggcatttaatgctggcgtttctggactaataattcctgatctccctttagaggaagcttataaattttctaaaatagtcagtaacaattttatggacttaattttattggtagctccaactactccttttgaaagaatgaaacaaatatcaaatcatacaaaaggctttacttatttagtaagtgttacaggtgtaactggtgagagaaacaaaatggaaaatagagtagaaaatcttatttctaaattaaaaggtcttaataacaatccaattgcggttggt

SEQ ID NO: 281683 - DNA, 567 bp, Unknown
  Bacterial polypeptide expressing nucleotide sequence isolated from the Sargasso Sea
aagtaattaaacttttagagtctttaaaaggtaaattaaatattcccatcatacttttttcttacttaaatcctttactatgttttggctttgaacagttttgtaagattgcttctaattctggagtctctggactaataattcctgatctcccattagaggaagcttataaattttctcaaatagttagtaactattctatggacttgattttattggtggcgccaacgactccttttgaaagaatgaaacaaatatcaaatcatacaaaaggctttacttatttagtaagtgttacaggtgtcactggtgagagaaacaaaatggaaaatagagtagaaaatcttattgctaaattaaaagaagttaatactaatccaattgctgttgggtttgggatatccacccctgaacatgttaataaagttcgtgagtggggagcagatggagtaattattggtagtgcatttgtaaaacgaatttctagttcaagtgaaaaagatgtcgttgatcatgttggtgaattttgtaaaaatatgcgcttagctgctgatcaaaaaaaataac

SEQ ID NO: 281684 - DNA, 862 bp, Unknown
  Bacterial polypeptide expressing nucleotide sequence isolated from the Sargasso Sea
ttggaaacatatattggaagaccaagtcctctattttttgcaaagagaatttctgaagatttaggtggaccaaaaatatatttcaaaagagatgaattaaatcacaccggtgcgcataaaattaataactgtatgggacagatacttcttgcaaaaaaaatgggtaaaaaaagaataattgccgaaacaggagcaggccaacatggagtagcaacagcaactgtatgtgcgctatttggactaccgtgcatagtgtatatgggagaaaaagacatcaaaagacagtcgcctaatgtttttagaatgaagttgctaggtgctgaaattagaagtgtaaccactggatccaagtcacttaaagatgcaatgaacgaagcgctacgtgattgggtaacgaatgttagagatactttttatattataggcacagcagcaggtccacatccttatcctactatggtaagagattttcaatctataattggagaagaagtaagacagcaaattttaaaagctgagaacaaactgcctgatttgttgatggcttgtataggaggtggttcaaatgctttaggtttatttcatgaatttcttgatgataaacaaatagaaatgatagcagtagaggctgccggccacggtatagagtcaggaagtcacgctgcaagtttaagtggaggaaaacctggaattttgcatggtaataaaacttatctcttacaatcaaatgatgggcaaatagatgaggcacactctatttcagccggtctagattatccaggaattggacccgaacactcttatttatttgagcaaaaaaagagttcaaatatatgtcagctacagacaaagaggctataga

SEQ ID NO: 281685 - DNA, 226 bp, Unknown
  Bacterial polypeptide expressing nucleotide sequence isolated from the Sargasso Sea
atgaaaaataggatttcacagctttttgataatttaatagaaaaaaaaagagcaggtttgggtatatttataactgcaggtgacccaaatttagagatttcacaaaaaatttttgatagcttgcctgattttggcgctgatttcattgagctcggaatgcccttttcagatcctatggctgatggtcctaccattcagtcatcatctttaagggcacttaatcaag

SEQ ID NO: 281686 - DNA, 544 bp, Unknown
  Bacterial polypeptide expressing nucleotide sequence isolated from the Sargasso Sea
attgaaaagtacaaatatcagtaggtctttttccaaaataaaaaaggagaaaagaattgcactaatgcctttccttatggcaggtgaccctgatttggaaactacagcaaagattttgttagagcttcaggcaaatggcgctgacatgattgagctaggcattccatacagtgatcctttagcagatggtccgattattcaattagcagcttctcgagctctctctgcaggaacctcccctgacagggtttttaaaatgttgtttgaattgagagatcaattgacaataccaataattttatttacttactcaaacccacttattaataaaggtttggaagaattttgcttgcaagcatcgaaagtaggtgtttcaggacttgtcgtaccagatcttcctctagaggaagcagaaaaactttctgatattgctgaatctaaggaaattgatttggttttacttgttgctcctacaaccccaaaggatcgtatgaaaagaatcgcagcgacttctaatggattcacttatcttgtaagtgttact

SEQ ID NO: 281687 - DNA, 787 bp, Unknown
  Bacterial polypeptide expressing nucleotide sequence isolated from the Sargasso Sea
tatgggcgaagaggatatagaaagacaaaaattaaatgtttttagaatgaatcttatgggcgctcatattcgccctgtatcttcaggaagtaaaactttgaaggacgcaactaacgaagctataagagactgggtaagtaatgttgaaagtacattttacattataggctcatcagttggtccacacccatatccaatgctggtaagagattttcaatctgtaattggaaaggaggcaatgattcaatttaaggaattaactggccaaccacttcctgataaacttattgcttgcgttggaggcggttcaaacgccttgggactcttttatccttttttgccctacaatgtagaaattatcggcgtagaggctggaggaaaaggcatagacaccgctcagcatgcggccacactaacgaaaggcgaatttggagttttgcatggtgcagcatcaatgatgttacaaaacgaagatggtcaagtgacacttccacattcaatatctgctggtttagattatcctggaattggtcctgagcacagctatttatttaagtcaaaaagagttaaatataaaacggctactgatgatgaggctttagatgcatttaggtggatgtcagaaaaagaaggaataatccctgctttagaaactgctcatgcaatagcatatttgagacaagaggataacggaatcttaaacaatgaacacgtcattcttaatctatcaggaagaggagataaagatgtctcaacagttgaacaagcaatgaaaaaagaaatatga

SEQ ID NO: 281688 - DNA, 470 bp, Unknown
  Bacterial polypeptide expressing nucleotide sequence isolated from the Sargasso Sea
aattttttatccttttataaatataaaagaaaccagattaattggagtagaagcaggtggtaagggtgtggagacaggtgaacatgcagcacccctaaatgatggtaagcccggagttcttcatggagcattaagttatttgatgcaaaatgattctggacaagttaaggcaacaaaatcagtatctgctggacttgattaccctggagtgggtccagaacattcccttctcaaggactcaggaagagctgaatatgttgctgtaactgatgaagcagctttaaaagctttccatgaagtatccgagtttgaaggaataatacctgcacttgaaaccgctcatgcttttgcttatctagatagccttatgaaagaatttgattcatcagcaaatgttattgtaaatgtttcaggaagaggtgataaagatataaataccgtagctgaaatagatggaataaaattttgaa

SEQ ID NO: 281689 - DNA, 874 bp, Unknown
  Bacterial polypeptide expressing nucleotide sequence isolated from the Sargasso Sea
tacaaacagtggagaccttcgccgttatatagagcaagaaaattagaaaaagctttagatacaacagctaagatttattataagtatgaaggtgttagcccaacaggaagtcacaaaccaaatactgccgtagctcaagctttttttaataaagaagaaggcacaaaaaaaattacaactgaaacaggcgcgggacaatggggaagttctctagcatttgcatgttcaatttttaaaatcgaacttgatgtttacatggttaaagttagctacgaacaaaaaccatatagaaaaatgattatgcaaacttttggagcaaattgttacgcaagcccatcaaatagaactccaactggtaaagcaattttagaaaaagatccaaatagcaccgggagtttaggtattgcaatatctgaagctgtagaaatggctgcacaagacgaaactacaaaatattctcttggaagtgttttaaatcatgttttgatgcaccaaacaattgttggaaatgaagcaataatgcaaatggagatggcagatgactatccagatatattagttgggtgtacaggaggtggaagtaatttttctggattagtgtttccttttcttggtaaaaaattcagagaaaaaaaagatattaaagtaatagcttgtgaaccaaagtcttgcccaactttaacaaaaggtaagtttgcatacgactttggagacactggaatgagaacaccattagttaaaatgcatactttgggatctcaatttatgccaccatcaactcactcaggcggtttaagatatcatggaatggcaccaatggttagccatttaactgatataggtgccatcgaagcaaaagcttttggtcaaaaag

SEQ ID NO: 281690 - DNA, 702 bp, Unknown
  Bacterial polypeptide expressing nucleotide sequence isolated from the Sargasso Sea
atttggtggcatgtatgtttcagaaacattaatgcccctattattagatttagataaatcttacaaaaaaattcaaaaggataaaaaatttaaaaaagagctaaatgacctttttaaaaactacgtgggtaggccttcctctttacactatgctaaaaatttatctaaatatatcaatggaccaaaaatatattttaaaagagatgagctaaatcatacaggtgcccataaaataaataattgtttaggacaaatacttcttgcaaaaaaaatgggaaaaacaagaattattgctgaaacgggtgctggacaacacggagttgcaacagctactgtttgtgctctttttgatcttccttgttatatttacatgggatctaaagatatcgaaagacaaaaaccgaatgtttttagaatgaagcttctaggtgccactattattcctgttgagtctggcagtaaatctttaaaagatgcgatgaatgaagctttaagagattggattaaaaatgtcagagatactttttatattatcggttctaccgctggtcctcacccctacccaaaaatggtaagagattttcaatctgtaattgggaaagaagctagagagcaaatattaaaagtagagaaaaaattaccagattatttgatagcttgtgttggaggcgggtcaaatgccatgggtttattttatccatt

SEQ ID NO: 281691 - DNA, 437 bp, Unknown
  Bacterial polypeptide expressing nucleotide sequence isolated from the Sargasso Sea
aagacttataggtgttgaagctggtggggagggcgtagaaacaggagaacatgcagcaccattaaatgatggtactcctggagttctccatggagcattaagttaccttatgcaagatgacagcggtcaggtaaaaggcacaaaatcagtttctgctggacttgattatcctggagttggaccagaacattcttggctaaaagactctggaagggctgaatatgttgctgttagcgacgatgctgcactaaaagcatttcatgaggtttctgagctggagggaataattcctgcacttgaaacagctcatgcttttgcatatctagatactttaatgaaagagtttgataagaattccaatatcattgttaatgtatcgggacgaggtgataaagatattaacactgttgcaaatattgatggaataaagatttgaa

SEQ ID NO: 281692 - DNA, 594 bp, Unknown
  Bacterial polypeptide expressing nucleotide sequence isolated from the Sargasso Sea
caatgattgtacgagattttaattcagttgttggtgaagagcttatatctcaatcagaagaactatttaatggaatgcctgatgcaatagttgcttgtgtaggcggcggatccaatgcgatgggcattttttacccatttatcaatatgactgaaacaaggttgattggtgtagaggctggtggtgagggtgttgaaactggtgagcatgctgcgccattaaatgatggaagtcctggagtgcttcatggagctttaagttatttaatgcaagatgattcaggccaagttaaatcaactaaatcagtttcagcaggcttagattatccaggcgtaggcccagaacattcctggttaaaagatactggaagggctgaatatgtagcagttagcgatgatgatgctttaaaagcattccatgaggtttcagagtttgagggcattattcctgctcttgaaacagctcacgcatttgcatatttagataagcttatgaaagattttaatccagattcaaatatagtcgttaatgtttctggaagaggtgataaggatataaatactgttgctgagattgatggtattaagttttgaa

SEQ ID NO: 281693 - DNA, 873 bp, Unknown
  Bacterial polypeptide expressing nucleotide sequence isolated from the Sargasso Sea
tgaagaatcatattttgaagctaaaaatgatccaaattttattcaagaatgtgaagatttttctagagattatataggaagagaaagccctctttattttgctgaaaggttaacagaatatataggcggagctaagatttattttaaaagagatgagttaaatcatacaggtagtcacaaaataaataattgtctaggacaaattctattagcaagaagaatgaaaaaaagtagaattattgcagaaacaggagcaggacaacatggtgttgctgttgctaccgtttgtgcaaggtttgggtttgaatgtattatatatatgggcaaaaaagatattgatcgtcaaaaatcaaatgttttcaaaattaagcttcttggtggagaagtaataccggtagaatcagggagtggaacacttaaagacgctatgaacgaagcattaagagattgggtggcaaatgttgaaaatacatattatttaattggcactgttgcaggaccacacccctatccttcaatggtaagagattttcagtcaattataggaaaagaaactaaaaggcagatatcagaaaaagaaaatgttttgccaaatgctcttgttgcttgtattggcgggggatcaaatgcattgggtttattttatccctttttagatgatgatgttgatatgtatggtgttgaggcagctggtttaggcttggaaggaaaagatcacgctgcatcgctatccaaaggatcgccaggtatattacatggcaatagaacatatttattacaggattctgaaggtcaaattgaagaaggacattctatttcagccggtttagattatcctggtattggaccagaacattcttggttgaaagatca

SEQ ID NO: 281694 - DNA, 876 bp, Unknown
  Bacterial polypeptide expressing nucleotide sequence isolated from the Sargasso Sea
gaggatttgactcatacaggtgctcacaagatcaataacgcactcggtcaagcgatgcttgcaaagaaattgggcgtgaaaagaattgttgcagaaactggcgctggacaacatggcgttgcttccgcagctgcatgtgccagagtggggctaccatgcacagtttacatgggcgcaattgatatcgagcgacaggctccaaatgtcgaccgaatgaaacaattgggtaccgaagtgatttctgtaatgagcggagaccaaactttgagggctgccattgatgaggcgtttagggattgggtatcagaccctgaaaatacacactatataatcggctctgtagtaggccctcatcctttcccatacttggttagggaaatgcagtccatcataggaaaagaagcaagacagcagatattaaatgttgaagaaagccttcccgatgcagtttttgcatgcgtaggtgggggctcaaatgcaattggactgtttcatgcttttcttgctgacagcgaagtagagctatttggaatagaggcaggagggacaagcgatgatttgggtgaaaatgcagcgacacttgcttctggaaaaccaggcatcctccacggaacttattccatgttattacacgataatgatggtttaattcaggaaacacattcagtttcagctgggcttgactatcctggcgttggcccagagcacgcattcttacaatcgataaaccgagtacaatactcttctgcaagggatgatgaggccttggaattattgagagaggtttgtgaatatgaaggaatattaccagccattgaaagctcccatgctttaatcgaggcaaaaaaatgggccaaagaaaacaaaggaaaacga

SEQ ID NO: 281695 - DNA, 310 bp, Unknown
  Bacterial polypeptide expressing nucleotide sequence isolated from the Sargasso Sea
tttgattaataatattaaaaagtataactatcctgatagttcaggtcatttcgaggagtttggtggtaaatatgttcctgagactttaattccagcacttaatgaacttgaagaacattacctcaataagaaatcaaataaatcttttcaggataaattaaataatctattgaaatattatggtggcagagaaacaccattatatttagctaaaagaatctcaaaagaattagggtacaatgtttggctgaaacgtgaagatttgaatcatactggagctcataagattaataatgcattaggtcaaatg

SEQ ID NO: 281696 - DNA, 541 bp, Unknown
  Bacterial polypeptide expressing nucleotide sequence isolated from the Sargasso Sea
atgaaatatacagttgataaaaaggggttttatggaaactatggtggtgcttttgtacctgaaatgctatttccaaaccttgacgaattagaaaaaaattataatgagattattaatgatccaaatttcaaagaggattataatgagcttttaaaggattatgtagggaggcctactccattgtattttgctgaaagaatgtcaaagaaatataaatgtaagatttactttaaacgagaagacttgtgtcatacgggtgcacacaaaataaataatacagttggtcaaattttacttgctaaaagattaggaaaaaaaagaattattgctgaaacaggagctggtcaacatggagttgcaaccgcaacagtttgtgcattagcaggaattgaatgtgtaatatatatgggtgctgttgatatcaaaaggcaggctcctaatgttgctagaatgaaaatgttaggtgcaagtattgtagctgctgaatcaggaagtaagacacttaaagatgccaccaatgaagcaattagagattggatca

SEQ ID NO: 281697 - DNA, 906 bp, Unknown
  Bacterial polypeptide expressing nucleotide sequence isolated from the Sargasso Sea
ctcttttctttgcagaaagaattagtaatgaccttggtggtgcaaaagtttattttaaaagggatgaattaaaccatacaggtgctcataaaattaataattgcatgggtcaaatcttactagcaaaaaaaatgggtaagactagaattatagcagaaactggagcaggacagcacggtgtagctacagcaactgtctgtgctttatttgggttaccttgtatagtttatatgggagaaaaagatattgaaaggcaatcaccaaatgtctttagaatgaaattgctaggtgctgaaatacgatctgtctctactggctcaaaatctcttaaagatgctatgaatgaagccttaagagattgggttacaaatgtcaaagatactttttatattataggcacggctgcaggacctcatccatatcctgcaatggtgagagattttcaatctgtaattggaaaagaagtacgtgagcaacttgaagatgttgaaggaagaccaccagatttattaatggcttgtattggtggtggttcaaacgctttaggtttgtttcatgaattcttagatgactccaatattgaaatgattgctgttgaagcagcaggtcacggaataaatacagataaacatgcagctagcttaactggtggaaaaccaggtgtactgcatggtaataaaacctatttgctacaatcaaacactgggcaaattcaggaagcacattctatttctgcaggattagattatccaggaattggtcctgaacattcatttttatttgaagaaaaaagagttaaatatatgtcagctacagacaaagaagcattagatgcatttcaatattgttgtaaattagaaggtataattccagccttagaaccatctcatgctttggctgtttaaa

SEQ ID NO: 281698 - DNA, 812 bp, Unknown
  Bacterial polypeptide expressing nucleotide sequence isolated from the Sargasso Sea
tatgggacaaatattattagcaaaaagaatgggtaaaaaaagaattattgctgaaactggtgccggacaacatggagtagctacagcaactgtatgtgctttgtttggattgccttgcgtagtttatatgggtgaaaaagatattgaaagacaatctcctaatgtgtttagaatgaaattactgggagctgaaataagaagtgttgctactggatctaaatcattgaaggatgcaatgaatgaggctttaagagattgggtaacaaatgttgaagatactttttatattattggaacagccgcaggtccacatccttatccagccatggtcagaaattttcaatcagtaattggtaaggaggtaagagagcaattaaaaaaacaagaaggtaaacctccagacttgcttatagcttgtataggagggggatctaatgcattaggattatttcatgaatttcttgatgacagtgatgtagaaatgattgctgtcgaagcagcaggacatggtattaaaacaaataagcatgccgcaagtcttaatggtggtaaaccaggcgtcttacatggaaacaaaacttatttattacaatctgattctggtcaaatccaagaggctcactctatttcagcaggattggattatcctggtataggtcccgaacattcatttttatttgaagaaaaaagagttaagtatatgtctgctactgataaggaagctttagatgcttttcagtattgttgtaagctggaaggaattataccagctttagaaccatcacatgccttatctgttttaagaaaaattg

SEQ ID NO: 281699 - DNA, 808 bp, Unknown
  Bacterial polypeptide expressing nucleotide sequence isolated from the Sargasso Sea
aatgaaaaataataaagttaatttcttatcactacctgactctaatggtagatttggtgattatggcggcaagtttgtatcagaaacactaatgcctgcactagatgaattagaaaaaaattataggaaaattaagaataataataaattcaaaaaagatgtttcaaaattactaaaagattttgttggtagaccaacgcctttgtatttagctgagaggactacaaaatctcttggtggtgcaaagatttatcttaaaagagaagatcttgcccatacaggtgcccacaaaataaacaatacaattggtcaagcaatacttgcaaaactaatgggtaaaaaaaggataattgctgaaacaggtgctggccaacatggggtagcaactgccacagtttgtgcacttcttggtttagattgtgagatatatatgggagcaacagatacagttaggcaatcagttaatgttcaaagaatggaattgcttggtgcaaaagttatccctgtaaaatcaggttctcagaccctaaaagatgccttaaatgaagctttaagggattgggttacgaatgtaagagatactttttatattatcggaagtgtcgctggtcctcacccttatccaatgattgttagagattttcaatctattattggaaaagaatgtagaaatcaaattctaaaattagaaggcaaactacctgatttattaatagcatgtgtgggtggaggttctaatgcaattggactttttcatcctttcttaaaagataaatcagtgaaaatggttggtgttgaagctgggggg

SEQ ID NO: 281700 - DNA, 511 bp, Unknown
  Bacterial polypeptide expressing nucleotide sequence isolated from the Sargasso Sea
ttcataattgcctgtgttggtggcggatcaaatgctatgggtattttttatccttttattaaaatggataatgtagagctcattggtgtcgaagcagcaggtaaaggtatagaaacaggtgaacatgcagctccattaaatgatggaactcctggagtgcttcatggtgcaaaaagttatttgatgcaagatgaaagtggacaagtaaaaggaacggcttctatttctgcaggcttagattatcctggtgttgggcctgagcattcatggctaaaagatattaaaagagctaagtatgttgcagtttcagatgatgaggttatgaaagcttttcatatggtaaataaaatggaaggaatactgcctgcacttgagacagctcatgcatttgcttacctagatgagctaatgccaaagatgaataaagatcagcacatcgttatcaacgtctcaggaagaggagacaaagatttaaatagcgtggttgaaatagaggatatcaaactttgaa

SEQ ID NO: 281701 - DNA, 843 bp, Unknown
  Bacterial polypeptide expressing nucleotide sequence isolated from the Sargasso Sea
cactctgttggcaggccaagtccattatattttgcttcacgtttaactgagttttttggtggagctaaggtgtactttaaaagagacgaattaaaccataccggtgcacacaagataaataattgtattggacagatacttctagcgcggcgcatgggtaaaaaaagaattattgctgaaaccggtgcgggacaacatggggttgccacagccactgtttgcgctttatttggacttgagtgtgttatttacatgggagctaaggatatcgagagacaggctccaaatgttttcagaatgaaattactcggcgctgaggttattcctgtaaaaagtggaacttcaactttaaaagacgcaatgaatgaagctctgcgagattgggtgtcctcagtcgaaaatacctattatttgattggcacagtcgcaggtccccatccctacccagctatggttcgtgattttcaatctattattgggaaggaagtcagagagcaaatcttaaaaactgaagggaggttacctgatactttggtggcctgtattggtggaggctctaatgctatcggtttgttttacgattttctagatgaggctgacattaatcttattggtgtggaggcagcaggacacggaataaacacaggaagccatgctgcatcattaaatggaggcgttccaggagtattgcatggaaaccgcacttacttattacaagataatgatggccaaatattagatgcacattctatttctgctggcttagattatcccggtattggaccagaacactcatggctccatgatattggaagggtgaattatgtttctgttcaggatgaa

SEQ ID NO: 281702 - DNA, 580 bp, Unknown
  Bacterial polypeptide expressing nucleotide sequence isolated from the Sargasso Sea
tccagtgtcatctggtacaggaacacttaaagatgcaatgaatgaggctcttaggcattgggtgtctaatgctaaatctcacttttatataattggaactgttgctggcccacacccttatcctatgatggtgcgagattttcagtctattattggagaagaagcaagagatcaaatcttggaaatagaaaaaaaacttccttcaaaaattattgcgtgtattggaggtggatcaaatgctatgggcttatttcatagctttttagatgatgataaagttgagataattggtgtagaggcaggtggaaaaggtgtaaattccaaacttcatgctgcttctttaacaggcggaaaaccaggaattttgcatggaaacaaaacctatttaattcaagacttggatggacaaattatagatgcccattcaatatctgctggtttagactacccaggaataggtcctgaacattcttggcttaatgatattggtagagttcagtataaagcttgtactgatgatgaagcgcttgaagcttttcatttatgttcaaaacttgaaggaattatttcctgcccttga

SEQ ID NO: 281703 - DNA, 415 bp, Unknown
  Bacterial polypeptide expressing nucleotide sequence isolated from the Sargasso Sea
atgacaattaaaaattctttcaaacaactacctgatgaaaaaggttattttggatcttttgggggtagatatgtatcagaaactcttatgcctttgatattagaagtagaaaaagaatatgaaaaaattaaaaatgataacagctttaaggaagaattaagctattatatggaaacatacattgggagaccaagcccactattttttgctgaaagaattacaaaggatttaggtggaccaaaaattttttttaaaagagacgaattaaaccatacaggtgctcacaaaataaacaattgtatgggtcagatacttttagccaaaagaatgggtaaaaaaagaataatagctgaaactggtgcaggacaacacggagtggcaacagcaactgtatgtgcattatttggactacctt

SEQ ID NO: 281704 - DNA, 762 bp, Unknown
  Bacterial polypeptide expressing nucleotide sequence isolated from the Sargasso Sea
aagaaaagaagcttgttacttttacaacaggtggtgatccagatttagacacaagtttagaaattcttaatactataatcagcaatggaatagatataatagaaattggaatgccattttctgatccaatggcggatggaccaactattcaagagtcaagtgttagatctattgctaatgggaccaaaattaatgacattttggaagccgttaacaaggttagaaaacttaataatgaaattccaataattcttatgggatattataattcaatatttaatatgggcattaaaaattttacttcaaagtgtgctaatgttggtgttgatggactaattattgttgatcttcaaccagaagaagattcagaactctataaagaagccaaagaaaaacatatagatcttattagattggtaacaccaacaactgatgaagagagacttaaaactatactaaatactgcatctggatttttatattatgttacaattactgggattacaggacaaaattcagcaaatatacaacatttaaaaaagtcaattctaaaaattaaatcatcaactaagctgcctatagttgcgggttttggaataaaaaatagaaaagacgtcgaggaaataagtattttttcagatggagtagttgtaggttcaagtataattaatattattaaaaacaaccttaaaaacaaaaataaaatgattactgaaattgataaatttacaaaagatttaaaaaaaggtttaaaagaatgaa

SEQ ID NO: 281705 - DNA, 498 bp, Unknown
  Bacterial polypeptide expressing nucleotide sequence isolated from the Sargasso Sea
tatgtcaaatagtaacaaaagtaattctttaaaaaattttcctgatgaaaatggaaactttggtgattatggaggtaggtttgttgcagaaactttaatgcctttattgcttgaagttaatgatgcttggaaaaaagccaaaaaagacaagattttttataaagaactgaattactttttagagcattttgtgggcagaccttctcctctttattttgctgaaagaatgacggaatatctcaatggagcaaaaatatactttaaaagggatgaattaaaccatacaggcgcacataaaataaataattgtatggggcaaattcttcttgcaaaaaaaatgggtaaaaccagaattatagctgaaacaggtgcaggtcaacatggcgttgcaacagcaactgttgcagcacgatttggattagagtgtataatttatatggggcatacagatattgaaagacaaaaatctaacgtatttagaatggagctcttaggtgc

SEQ ID NO: 281706 - DNA, 562 bp, Unknown
  Bacterial polypeptide expressing nucleotide sequence isolated from the Sargasso Sea
catgaaagaaaacaagaaaacgcaatttcctatgaatgaaactttatcaaaaataaataagaagtttttggaactaaagaaaagcgataaattagcattgatgcccttcataatggcaggtgatcctaatattgagactacatcagagattttattaaagttgcaagaaaagggtgcagatcttattgaattaggaatcccttatagcgaccctcttgctgatggtccaatcattcaattatcagcttctagagcattaaagtcaggaactacattgaaaaatgttattcaattattagagtctttgaaagataagttgcatattcccataatacttttcacttattttaatcctgtattaaattttggacttgagaatttttgtgaattggtatctaaagtaggagtttcaggattaataattcccgatcttcctttggaagaagcatataaattttcagaaataattagttcttattcaatagacttgatattattagttgctcctactactccctctgaaagaatgaaaattatatctaataatacaaaaggttttact

SEQ ID NO: 281707 - DNA, 857 bp, Unknown
  Bacterial polypeptide expressing nucleotide sequence isolated from the Sargasso Sea
aatgacgtttcagacaatcataccaaatgaatcaggtttttatggagaatacggtggtatgttcattcctgaaattttaaggactacttttgatgagctaatagaagcatttactgaagcaaaagcagatcctgagttttggctgggttttgaggatgttatgcagaattattcatgcaggcccactccgattacgccactagataattttgtaaactcattgggtggtaatttcaagttattttgcaaacgtgaagatttaaatcataccggagctcataaagctaataatgtgataggtcaaggactgcttgttaaacgtatgggtaaaaaacgtgtgattgctgaaactggagcaggacagcatggagtagccacggctacaatggcagcacgaatgggactggaatgtacaatttacatgggctcagttgacgttgaacgtcaaagaccaaatgttttttggatggaacagcttggtgctgaagttgtatctgttaccgatggaactgcaacactgaaagatgcaatcaatgccgccatgcgagactgggcggaaagtatggaaaccactcattatgttttgggaacaacctgcggtccacatccatttcctgaaatggttgcctggtttcagtcgattataggcaaggaagctcgtcaacagatgctcgaaactactggtaaacttcctgaccttgtttatgcttgtgtaggtggcggatcgaatgcgagtggaatcttcctaccttttctaaatgatgagtcagttgaattagttggagtggaagcagggggaagaggagttgatacaggttcacacgcagcacgtttttacggaggaaaagttggaatag

SEQ ID NO: 281708 - DNA, 237 bp, Unknown
  Bacterial polypeptide expressing nucleotide sequence isolated from the Sargasso Sea
aatgtctaatagaattaataaagcctttgaaaaaaaaggaaaaaagttagtaactttcactactggtggagatccagatttaaatacaagtttggatattcttaatactataataaataatgatgtagatataatagaaattggaataccattctcagacccaatggctgatggtccaaccattcaagaatcaagtgtaaggtctatagcaaatggtactaaaattaatgatctttt

SEQ ID NO: 281709 - DNA, 571 bp, Unknown
  Bacterial polypeptide expressing nucleotide sequence isolated from the Sargasso Sea
tccgtaattggtaaagaagttcgtaaacaacttgaagaactagagggaaggtcgcctgatttattaatggcatgtattggtggtggttcaaatgctttagggttgtttcatgaatttttagatgacacaaatgttgaaatggttgcagttgaagcagcagggcatggtattaaaactgataagcacgcagcaagtttaacaggtggtaaacctggtgtattacatggaaataaaacatatttattacaatcaaaaactgggcaaattcaggaggcacattccatttcagcaggtctagattatccaggaataggtccagaacattcatttttatttgaagaaaaaagggtaacatacatgtcagcaacagataaagaagctctagaagcttttcaatattgttgcaaattagaaggtataattccagctttagaacctgctcatgctttagctgtattaaagaaaatagcaaaaaactatagtaaagataaaattattgtgatgaacatgtgtggccgaggggataaagatatttttacaatagctgatgaattaaatataaaaatttaaa

SEQ ID NO: 281710 - DNA, 775 bp, Unknown
  Bacterial polypeptide expressing nucleotide sequence isolated from the Sargasso Sea
gctgggcgccgaagtgatccccgtgacctctggtcgggggacgctgaaagatgcgatgaatgatgcgctgcgtgactgggtgaccaatgtgcgcgatacattctattgtatcggcacggtggctggcccgcatccttatccggcgatggtgcgtgatttccagtcggtgatcggcaaggaagtacgctggcaactggccgagcaagaaggcgaagggcgtctgcctgatactttggttgcagccatcggtggcggctcaaacgcgatggggctgttccatccgttccttgacgataagtccgtaaatatcatcggcgtcgaggcgggtggcaaaggcgtagacgagaagatggaacattgcgcctccctcaccggcgggcgtccgggcgtgctgcacggaaaccgcacctatttgctgcaagacgatgatgggcagatccttgaggggttctcgatctcggccggtctggactatccgggcatcgggcccgagcacgcgtggctgcatgagacgggccgcgcgcaatatgtgtcgatcaccgacaaagaagcgctggaggcgttccagctgtcttgtgcgatggaaggcatcatcccggcgctggagccgagccacgcgcttgcacatgtgatgaagatcgcgccgaccctgcccaaggaccacatcatcgtaatgaatatgtgtggtcgcggcgacaaggacatcttcaccgtcgcgcgtcaccttggctttgacatgtccgacactgaagaaggccgtgatctcgaagagtga

SEQ ID NO: 281711 - DNA, 715 bp, Unknown
  Bacterial polypeptide expressing nucleotide sequence isolated from the Sargasso Sea
aatgttgaataatagaataaattcctacaaggaaggtccagatgagaatggaagatttggtagttttggaggaaggtttgtttctgaaacattaatgcctttaattttatcattagaaagtgaatataaaaaagcaaagagtgataaaagcttttggaaagaaatgaacttttttctcaaggactatgtcggaagaccaagccctctttatttttcagagcgcttaactgaacattttggaggtgctaaaatttaccttaagagagatgagttaaatcatactggggcgcataagataaataatgttcttggtcaaatattattggcaaaaagaatgggaaaaaaaagaataattgctgagactggagcaggtcagcatggagtagccacagcaacagtttgtgctcgatttggattaaaatgtatcgtttttatgggtaaaacagatgtagagagacaagctccaaatgttttcagaatgaagctcttaggtgctgatatagtatccgttacatcaggaagaggaactttaaaggatgcgatgaatgaagctttgagggattgggtaactaatgttgaagatactttttattgtattggtactgttgcagggcctcatccatatccttcaatggtacgagattttcaatcgataattggttctgagacaaagcaacaaattcttgataaagagggacgcttacctgacagttta

SEQ ID NO: 281712 - DNA, 742 bp, Unknown
  Bacterial polypeptide expressing nucleotide sequence isolated from the Sargasso Sea
atgaaattgcttggtgcagaaatacgatctgtttcaactggctcaaaatcacttaaggatgcaatgaatgaagctcttagagactgggtaacaaatgttaaagatactttttacataataggaactgctgcaggaccccatccttatccagcaatggtaagagattttcaatctattataggcaaggaagttagaagccaacttgaagaggcagagggaaagtctccagatttattgatggcttgcattggtggtgggtcaaatgctctaggacttttccatgaatttttagacgacacgaatgttgaaatgattgctgtagaagcagccgggcatggtatcaaaacggacaaacatgcagcaagcttaactggggggaaaccaggtgtgttacatggtaataaaacatatttacttcaatcagaaacaggacaaattcaggaagcgcattctatctctgctggtttagattatccaggtattggtccagagcattcttttttatttgaagaaaaaagagtaacatacatgtctgcaactgataaagaagctttagatgctttccaatattgttgcaagttagaaggtataattcctgctttagagccagctcacgctttggctgtattaaaaaaaatagcaaaaaactatagtagtgataaagttattgttatgaacatgtgtggaagaggtgacaaagatatttttactatagccgatgaattaaaaataaaaatttaaa

SEQ ID NO: 281713 - DNA, 688 bp, Unknown
  Bacterial polypeptide expressing nucleotide sequence isolated from the Sargasso Sea
tttgaaagatgctatgaatgaagcattgagagattgggttgccaatgttgaaaatacttattatttgattggtactgcagcaggtcctcacccatatcctgaaatggttagagattttcaatcaattattggtgaagaagcaaaaagacaaattcttgataaagaaaatgtattacctgatgctttagtagcttgtattggcggaggatcaaatgcattaggtttattctactcatttttagatgatgatgtagatatgtatggtgttgaagcagctgggatggggttagacgggaatgagcatgctgcttcattatctaaaggagtaccaggaattttacatggtaatagaacctatctacttcaagatactgaaggtcagattagagaaggacattcaatttctgcaggtcttgattatcctggtattggaccagaacactcctggttaaatgatcaaggaagagtaaattatgtatcttcaactgatgatgaagcgttaaatgcttttgaaatatgttcaaaatacgaaggaattattcctgctttagagccttctcatgctctagcatttgttttcaagcttgcaaaagatatgaaaaaagatcagataattatcgttaatttatgtggtcgaggcgataaagatattgaaacggttgcagattatcttggtgtagaagtataa

SEQ ID NO: 281714 - DNA, 682 bp, Unknown
  Bacterial polypeptide expressing nucleotide sequence isolated from the Sargasso Sea
tatgaaggtaatggtaaatgagggcgtagatattatcgagcttggaattcctttttctgatcccatggctgagggtgtgtctattcaaaaaggacatgagagagctttggaaaaaggaacaactatcactgatgcattttctttagttgagtcatttagagaaattaacaaagaaacgccgcttgtctttatgggttatatgaatacatttgagtcattgggtgcagagaagtttatgagtgaggctcttagagttggtcttgatggcctccttatagtagatatgccaccagaagaaagctcagattttactctgcaagcaaaaaaaaatgacattgatatcattagattaattgcacctacaactagcttagttagagcaagtaatatttgtaataaatcttccggttatgtttactatatatctgttaaggggataacaggtgcagccaatctcgattctgccgatgcaaaacaaaaagttcaagagctaaaagggttgactgagctacctgttgtaataggatttgggattaaggatgctcagtctgctatttcagtcaaggatgctgccgatggtgtagttgtagggagtgtatttgtagatttagtaggagagggtggcgatatcttagaaaaggttacaaaaaaaacaagggaactctcagaagctctaagttaa

SEQ ID NO: 281715 - DNA, 550 bp, Unknown
  Bacterial polypeptide expressing nucleotide sequence isolated from the Sargasso Sea
agaagctaggcaagaaattctaaaagtagaaaaaaaattacctaactatgtaatagcctgtgtaggtggaggaagcaatgcaatgggactgttttatccttttgtggaagataaagatgttaatttagttggagtagaagctggaggaaaaggtgttgatacaaatgaacactctgctactctagtaaaaggcagtattggagttcttcatggaacaaaaacatatttaatacaagatgatgatggacaaataactgaaactcacagtatatcagctggtttagattatcctggagttggccctgaacacagctacctaaaagattctgaaagagcaaattatgtagctgtaactgatcagcaagcattaaaagctttagctttaacttcgaatttagaaggtataattcctgctttggaacctgctcatgctttagcataccttgaggaattggctccttctttaggaaaagatcaaattattcttttaggtcttagcggaagaggtgataaagatataagcacaattatgcaaaatatgtctctttaa

SEQ ID NO: 281716 - DNA, 415 bp, Unknown
  Bacterial polypeptide expressing nucleotide sequence isolated from the Sargasso Sea
atgcctgataaaaatggaagatttggtatatacggtggaaggtacgtagcagaaaccttagtgcccgccttagaggaattatcagagcaatatgaaatcataaaaaatgatgaaaacttccttaaggaatttacagacgatcttaaatattatgttggaagaccttcccctttatattttgcaaaacgatggacggagttgttaggtggagcaaagatttttcttaaacgcgaagatctaaatcatactggagcgcataaaatcaacaatactgttggtcaaattttgcttgcaaaacatatgggtaagaaaagaataattgctgaaaccggtgcaggacaacatggtgtagctactgcatctgtagcagcgcgacatggactggaatgtatcatctatatggagaagaagacat

SEQ ID NO: 281717 - DNA, 716 bp, Unknown
  Bacterial polypeptide expressing nucleotide sequence isolated from the Sargasso Sea
atattttacagctggtttcccaaagttagatgatactctaaaaataatcagagaacttgataattctaatgttgatatgattgagattggtttaccttttagtgatccgcttgctgacggacctacaattcaaaaaagttctgaaaaagcactaaaaaatggtatgaccacagatttactttttgatcaattaaaaggtcttcgttcaattactgatattcctattgttgttatgggttactttaatccaattctacaatatggctttgataaattttgtataaactgtaaaaaaagtggtattgatggtctaataattccagatcttcctgttgatatttataaaaaaaactataaaagtaaagtagaaaattatggtttaaatatgatgttcttaattacacctcaaacctcaaatgatcgcatacatgtaattgataaaatatctaagggttttatttatatggtcagtagctttggcgtaacaggtgctagagataattttgataaatatcaaattgaatattttgaaagaataaaagaaatgaaattatctaatcctcttttaattggatttggtataagtaatgataaaacatttaaatctgcttgtgaaaatagtaatggagcgattataggatctgcttacatacagcatttaaagaactatggtgtttcaaaaactaatgattttataaaaaaaataaagttttaat

SEQ ID NO: 281718 - DNA, 706 bp, Unknown
  Bacterial polypeptide expressing nucleotide sequence isolated from the Sargasso Sea
ttatatatctaaaaaaatcttaaaaaaattaccagatataggtgtagattttatagatattggtattcctttttctgatccaatggcagatggaccacttatccaagagtctagtgaagcagctcttaaaaatggaataaatatcgaaaaatgttttgacttggtttctgaaattcgtcttaaagaaaaaaataaacctataatacttatgggttattataaccctattttcatttatggtaatgaaaaatttatcaagaaatcagtaagtcttggagttgatggagtaataatagtagacttgccaatagaagaagataatgagtttttttatgatgctagaaaacataacctccatgtaataagacttgtcaccccaacaactaatataagtaggttaaaaaaaataattaaaaaagcacaaggttttatatattatgtttcggtaactggagtcacaggtacaaaaagtgcaaatattaacgaagtttatcaaagagttaagttgattaaatcattgactaatattccaataataattggttttggtattaagacacccgaacaagcaaaacaaatgtcaaatgtatccgatggaattgttattggttcatcaattgtagaagaaataaaaaaatctaagtcgttaaataaaatctataataattgtctcatttttattaaaaaattaatgacaaagttttga

SEQ ID NO: 281719 - DNA, 697 bp, Unknown
  Bacterial polypeptide expressing nucleotide sequence isolated from the Sargasso Sea
aaaaaaatgggtaaatctagaattattgctgaaacgggagcaggtcaacatggtgttgccactgcaacagtatgtgctctatttggattgccttgtattgtttatatgggagaaaaggatattgaaagacaatcaccaaatgtttttagaatgaaattacttggtgctgaaattagatctgtttcaactggatctaaatcactgaaagatgcaatgaatgaagctttgagagattgggtgacaaatgttaaagatactttttatataattgggacagctgcaggtcctcacccatatccagcaatggttagagattttcaatctgtaataggtaaagaggttagagaacagctgttagaagtagaaggaaaatcaccggacttacttattgcctgtataggtggtggttcaaatgctttgggactttttcatgagtttttagacgattcaaatattgaaatggttgctgttgaagcagctggtcatggtattgatactgataaacatgcagcaagtttaactggcgggaaacctggtgtattgcacggcaataaaacatatttattacaatcaaacactggtcaaattcaagaagcacattctatttcagctggtttagattatcctggtattggtccggagcattcttttttatttgaagaaaaaaagagtaacatatatgtcagcaacagataaa

SEQ ID NO: 281720 - DNA, 545 bp, Unknown
  Bacterial polypeptide expressing nucleotide sequence isolated from the Sargasso Sea
aatgaataagggatattatggaaagtttggaggaatatttattcctgagacgctctcgtttgcactgcgtgaattggatacgctttatcaagatataaaaaatgacacaacatttaataacgaattacaggacatttacatacactatgttggtcgaccttcacccttatactttgcagaaaaatatactgagaatattggaggtccaaagatttggtttaaacgtgaagatttaaatcatactggggcacacaaaataaataatactgttggtcaagccttgcttgcaaaaaaattaggtaaaaaaagaataattgctgaaactggtgcaggtcaacatggtgttgctactgctactatatgtgcaaaattaggccttgagtgtgttatctacatgggagaaacagatatacaacgacaagagcttaatgtttttaagattaatactttaggagctaaagttgtccctgttagctctggaacagcgactttgaaagatgccctcaatgaatcaatcagggattgggtgactaatgttgaaaata

SEQ ID NO: 281721 - DNA, 898 bp, Unknown
  Bacterial polypeptide expressing nucleotide sequence isolated from the Sargasso Sea
cttgcaaaatacatgggcaagaaaagaaatattgccgaaacaggtgcaggacaacatggtgttgcgactgcaactgttgctgctaggcttggtcttgaatgtcatatttatatgggttcagaagatgttcaaagacaatcattaaatgtgtatagaattaaactgcttggagcacaagttcattctgttgattctggatctgctacattaaaagatgcactgaatgaagccttaagggattgggtaacaaatgtagatgacacatattatattattggaagtgtcactgggcctcatccttatcctatgattgttagagattttaattctgttgttggtgaggaattgatttcacagtcaaaagagttatttgattcaatgcctgatgcaattgttgcatgtgttggtggcggatcaaatgcaatgggagctttttatccttttattaaatttaatgaaacaagacttataggtgttgaagctggtggggagggcgtagaaacaggagaacatgcagcaccattaaatgacggtactcctggagttctccatggagcattaagttaccttatgcaagatgatagcggtcaagtaaaaggcacaaaatcagtttctgctggacttgattatcctggagttggaccagaacattcttggctaaaagactctggaagggctgaatatgttgctgttagcgatgatgctgcactaaaagcattccatgaggtttctgagctggagggaataattcctgcacttgaaacagctcatgcttttgcatatctagatacattaatgaaagagtttgataagaattccaatattattgttaatgtatcgggacgaggtgataaagatattaatactgttgcaaacattgatggaataaagatttgaa

SEQ ID NO: 281722 - DNA, 514 bp, Unknown
  Bacterial polypeptide expressing nucleotide sequence isolated from the Sargasso Sea
atgaccgatccgaataaggaagggcgctttggcgagttcggtgggcgtttcgtccctgaaactctgatcccggcttgcgaagagcttgaaacggcatttcgagacgcttgggctgacccggcgttcgtcaacgaatttcatcggatccttaccgattatgggggacggccctctcctcttaccgagtgctatcggttatctgagcaactaggagtcagaattcttctaaaacgagaagatctgaaccacacaggctcgcacaagatcaacaatgtaattggtcaagccctactcgctcgtcgaatgggaaagtctcgccttgtggccgaaacaggagcgggacaacatggtgttgctaccgcaactgctgcagctctgttagatatggagtgcaaggtctatatggggcaggttgacgtcgaacgccaagaattaaatgtctttcgaatgcacttgttggggtcagaggttgaggcggtttcgtctggtagtcagaccctaaaagatgcagtga

SEQ ID NO: 281723 - DNA, 454 bp, Unknown
  Bacterial polypeptide expressing nucleotide sequence isolated from the Sargasso Sea
tttagacgactcggatattgaaatgatagctgttgaagcagctggtcatggtattaatacagataaacatgctgctagtttaacaggtggcaaaccaggtgtattacacggaaataaaacatatttattacaatcaaactctgggcaaattcaagaagctcattccatttcagctggtttagattatccaggtattggtccagagcattcatttttatttgaagaaaaaagagtaacgtacatgtcagcaacagacaaagaagctctagaagcttttcaatattgctgtaaattagagggtataattccagctttagagccagcccatgcattagctgttttaaaaaaaatagcaaaaaactatagtaaagataagattattgtaatgaatatgtgcggtagaggagataaagatatttttacaatagctgatgaattaaaaataaaaatttaa

SEQ ID NO: 281724 - DNA, 751 bp, Unknown
  Bacterial polypeptide expressing nucleotide sequence isolated from the Sargasso Sea
aatgcatggaaagataaactttttgtaaaagaattaaatcatctacttaaaacttatgtaggaagagaaacaccactttatgaagccaaaagacttactgaacattacaaaactaaacaagcaactccaagaatatggcttaaaagagaagatttaaatcatactggtgctcataaaatcaataatgctcttggacaagctttattagcaataagaatgggaaaaaaaaggataattgcagaaactggagcaggtcagcatggagttgctacggctactgtttgtgcgagatttggcttgaaatgcattatctatatgggtgctgaggatataaaaaggcaatcgctcaacgtctttagaatgaaattactaggagctgaagttaaagttgtaaattctggaactgcaacacttaaggatgccactagtgaagctattagagattgggtttctaatgtcgaaaccacacactacattttaggatctgttgctggtccacaccctttcccaaagattgtgcgagattttcatgcagttataggagaagaaactaaaaaacaatgcctggaattatttggatctttaccagatattttacttgcttgtgtaggtgggggatcaaatgcgatgggccttttccatcctttcgttaaagaaaaatctgtacgattaattggagttgaagccgctggaagcggagttgatactgacaaacatgctgcaactatcactaaagggtcagttggaattt

SEQ ID NO: 281725 - DNA, 805 bp, Unknown
  Bacterial polypeptide expressing nucleotide sequence isolated from the Sargasso Sea
atgaaagaatataacgaaccaaataaactaggtcgttttggtgtatatgggggtatgtatgtctcagaaacactgatgcctttactaattgatttggatcaatcttataaaaaaattcaaaaggataaaaaatttcaaaaagacttagctgacttgttcaaaaattatgttggtcgcccttctgctcttcattatgccaaaaatttatccgcatttgttaaaggaccaaaggtttatttcaaaagggatgaattaaatcatactggcgcacataagataaacaattgtcttggacaaattctattagctaaaaaaatggggaagacaagaattattgcagaaactggcgcaggtcaacatggtgttgctacggcaaccgtttgtgcattatttggtttaccatgtaatatttatatgggttctaaagatattgaaaggcaaaaacccaatgtatttcgtatgaaattgttaggtgcaaatattattcctgttgaatctggaagcaaatcactaaaagatgcaatgaatgaggctcttcgagactggataaaaaatgtaagagatacattctatattattggttcaaccgctggaccgcatccttatccgaagatggttagagatttccaatcagttattggtaaagaggcgaaagagcaaattcttaaagtagaaaaaaaattacctgattatcttatagcatgtgtaggtggtggatctaatgcaatgggtttgttttacccatttcttgataataaagatgtcaaaattattggtgttgaagctcacggtaaaaggacctaaa

SEQ ID NO: 281726 - DNA, 895 bp, Unknown
  Bacterial polypeptide expressing nucleotide sequence isolated from the Sargasso Sea
ggtccgcatcctcgacgaggtcggcagcgacgtcatcgagctcggcgtgccttactccgaccccctcgccgacggtcccaccatccaggtgcgcgcgagagccctcgacgtaccccgttccgggggcggtcacgcccgatcaccctcaccctatccgaaaaccaacgcggcgtctccaaccgccgctctttttcccatccccgccgacccgctgaccagacccgcgccccccccctccgcgttcgcgccccacgtcctcaggccgccgcgacccgcgcgctcgaagcgggcaccaccctcgaccaggtcatcgacctcgtcgcgcgcgtcacccccgacgtctccgcccccatcgtcctcttcacctactacaacccgatctaccagcgaggtttcgagcccttcgtcaagaagatcgccgcggcgggcgcgaagggcctgctcgtgcccgacattcccctcgaggagaccggggagctcagcgcggtgtgcaaggccaacggcctcgacctcgtcctcctgtccaccccgaccaccccggaggagcgcatggctaagattgccgaaaagtccaacgggttcatctacctcgtctcggtcacgggcgtcaccggggtcaggtccggggtggagtcccgcgtcgagggactcgtcaagtccctcaagtccgtcaccgacaagcccgtcgccgtcggcttcggaatctccaagagggagcaggcggccgaggttgtgcaatggggcgccgacggcgtcatcgtcggatcggcgctggtcaaggcgctcggggaggcgaagaccccggaggatggcctggcggcgctcaaggagctcgcggtggagctcagggaggggagcaacagggagggcgcgaagcccaaggggtcgggcggcg

SEQ ID NO: 281727 - DNA, 358 bp, Unknown
  Bacterial polypeptide expressing nucleotide sequence isolated from the Sargasso Sea
gatgaaaaataggatttcacagctttttaataatttaatagaacaaaaaagagcaggtttgggtatttttataacagcaggtgacccaaatttagagatttcacaaaaaattttcaatagcttacctgactttggtgctgatttcattgaacttgggatgcccttttcagatcctatggctgatggtcctactatacagtcgtcatctttaagggcactaaatcaaggaatgaaccttaaaaaaactcttttaatggttaaaaaatttagaaaaaatgatataaaaacacctgtaattttgatgggttattataatcctatttaccaatatgatgtagagagatttattacagactca

SEQ ID NO: 281728 - DNA, 648 bp, Unknown
  Bacterial polypeptide expressing nucleotide sequence isolated from the Sargasso Sea
gagatactttttatattatcggttctaccgcaggtcctcacccctatccgaaaatggtaagagatttccaatctgtaattggaaaagaggccagagagcaaatattgaaagtagagaaaaaactaccagattatttgatagcttgtgttggaggtggatcaaatgccatgggtttattttatccatttttgaatgataaaaaggtaaagattattggagttgaggcagctggtagaggcgctaaaacagaagaaacagctgctacaatgacatctggaactcccggtattttacatggtagttacagttatgtcttacaagataatgatggacagataaaagaggctcattcaatttctgctggtctcgattatcctggtgtagggcctgaacactcctacttaaaagatattaaaagagttaaatactttggtataactgataaagaagctcttgaagcatttcaaacatgttcaaaactagagggaattattcctgcactagagccttcccatgccctagcctacttaattaaagcatttaaaaataaacataaaaacaaagttgtaattttaaatttgtgtggacgaggtgataaagatttatttactgcagctaaagcaataggatttgatgcagatgaataat

SEQ ID NO: 281729 - DNA, 550 bp, Unknown
  Bacterial polypeptide expressing nucleotide sequence isolated from the Sargasso Sea
aaaaaacaatttacagatatgacaaataaaaaattacctgatagacttatagcatgtgttgttggtgggtctaatgctcttggattattttatcctttcattgatgataatgtaaaaataattggagttgaagctgcaggaaaggggattgatacaaatcagcatgctgctactcttacaaagggtgaatttggtgtattgcatggtgcagcatcaatgttactccaaagtatggatggtcaaattgctttaccttattctttatctgcaggtttggattatccaggaattggtccagaacacagttatcttcaaaaaaccaaaagagttgaatattcatcagcaacggataatgaagcgttagaagcattcaagtggttgtctgaaaaagagggaataattccagctttagaaactgcacatgctgttgcttttttaaaaaataaaaataataatatcaaaaaaaatgaacatgttattttgaatttatctggaagaggagataaggatataaatactattgcaaaggaattgggtattgaattatgaa

SEQ ID NO: 281730 - DNA, 712 bp, Unknown
  Bacterial polypeptide expressing nucleotide sequence isolated from the Sargasso Sea
atgaaaaagacattaaacacttataaaagcgggccaaatttagatggattttttgggatacatggcggaagatttgtagcagaaactttaatgcctttaatattagagcttgagaaagaatacaatgcagttaaaaatgataattcttttcaaaaagaattatcttattggtataagcattatattgggaggccttcacctttgtattatgcatcaaggataactaaggaattaggtggggcaaaagtatattttaagagagatgaattaaaccatactggagcccataaaataaataattgtataggacaagtattattagcaagaaaaatgaataaaaccagaattatagcagaaactggtgctggtcaacatggtgtagcaactgcaactgtatgtgctctttttggcttaccatgtacaatttatatgggtgcaagagatatagagagacaagcacctaatgtgtttaggatgaaattgttaggtgcagagatagttactgtagaatctggctctaaaactttaaaagacgcaatgaatgaagcattaagggattgggtatctaatgtagaaaatacattttatattattggaacggcagctggaccacatccttatccaatgttagtaagagattttcaatctataataggtattgagactaaagaacaaataatgaacaagagggcaggttacctgatagtttagt

SEQ ID NO: 281731 - DNA, 436 bp, Unknown
  Bacterial polypeptide expressing nucleotide sequence isolated from the Sargasso Sea
tatgagtgagctaaaacttaatccttactttggccagtacggcggtatgtttgtaccgcaattactggtaccggcactgaaacagctggagcaggcttatgttgatgcgctggccgatccggcttttcatgccgagtttcagcaactactgacagaatacgccggcaggccaacgcctttaacgctgtgccgcaatatttcgcctaacccgaaagttaaaatttacttaaaacgcgaagatttactgcatggtggtgcacataaaaccaatcaggtgctcggccaggcactgctgactaaacgtatgggcaagcaggaagtgatagccgaaaccggtgccggccagcatggtgttgcaaccgccttagcctgcgcattactggggttaaagtgccgaatttacatgggggctaaagacattgaacgccagcagccg

SEQ ID NO: 281732 - DNA, 692 bp, Unknown
  Bacterial polypeptide expressing nucleotide sequence isolated from the Sargasso Sea
catcggctccgtcgtcggcccgcaccccttccccggcatggtcagggacttccagtccgtcgtcggccgcgaggcgagggagcagttcaagcggatgacgggcgggaagcttccggattccctcgtcgcgtgcgtcggcggcgggtgtaacgccatcggcttgttcaccgcgtttctcgacgacgacaaggtggcgatgttcggcgtcgagccctccggcacggacatcggcaccgtcggcaagcacgcggcgacgatgacgaagggcaccccggggaccatccacgggttcaagtgcctcctccttcaggacgagaagggcgagcccgcggcggtgaacacgtgcgcgagcggcctcgactacccgggcgtcgggccgcagcactgtcatcttaaagactcgggaagggtgacgtacgagacggcgtccgacgaggagtgcgtggacgcgttcatgacgctcagcagggaccaggggatcatccccgcgctcgagtccgcgcacgcggtcgccttcgcgatgaagctcgcggcgaagaagcccgcgagcgagacgatcctcgtcaacctgagcggaaggggcgacaaggacgtcgactacgtcgtgacgcacttcggcgccaaatacggcgtcgaggtcaaggagacgcagatgcccgcgtgggacggcgcgaaggcgaacagcgcgtgaa

SEQ ID NO: 281733 - DNA, 712 bp, Unknown
  Bacterial polypeptide expressing nucleotide sequence isolated from the Sargasso Sea
gtgaactcaggaacatctactcttaaggacgctatgaatgaagctatgagagattgggtaaccaatgtagatgatacttattacataataggtagcgtggctggaccccatccttatcctcaaatagtaagagatttcaatgcggttgtgggagaagaagttctagagcaaagcaaatcagtgattggcaaagatccagatatgcttgtggcttgcgtaggaggaggttcaaatgccatgggactattttatccttttattgaaaagaaaaatgttaggttagtgggtgttgaggctggaggtttgggcttaagtacaggtaagcatgccgctcctctcaatgatggtaaagaaggagttcttcatggtatgcgaacatacctaatgcaagacgatgttggtcaagttattgaaacacattctgtttcagctggattagattaccctggagttggtccagagcatgcatggttaaaagatataggtagagcagagtatgagtctgcagatgatgaagaagcattagatgcctttaaagaactaaccagagttgaaggaattatgcctgcacttgaaacagcacatggtattgcttatgtgaaaaagattgcacccactatgaaagatgatcaatccatagtggtaaatgtttccggaaggggtgataaggatataaacacagttgcttcaatagaaggaatagagctttgac

SEQ ID NO: 281734 - DNA, 845 bp, Unknown
  Bacterial polypeptide expressing nucleotide sequence isolated from the Sargasso Sea
tcagagagagtttcataatgacttgaatcacttcgtgggaagacctacatctctttattttgcagagcgtttcacgggtctgctcggtggggcgaaagtgtatctaaaaagagaggacctgaatcacacaggagcgcataagatttgtaacactgttgggcaagcactacttgcaaaacgaatgggaaagcccagagtaatagcagaaacgggtgcgggccagcatggggtggcaacggctaccattgcggcgaggcttgggcttgaatgtgacgtctacatgggtgccgaggatgtaaggcgccagagtcttaatgtctatcgtatgaagttaatgggcgcaaatgttatccccgtaagttccgggtcgcgtaccttgaaggatgctctcaatgaagcgatgagggattgggtgaccaatgtcgacaatactcactacattataggcacggttgctggtccccatccctatcctatgattgtgcgggattttgcttcagtgatcggacaggaagcacgcgcgcaaatgttagaaagagaggggcgcttgcctgataccgtcgttgcttgcgtgggaggtggctctaacgcgatgggaattttctacccgttcgttaatgattcgagcgtatctttagttggggttgaagctggaggtaacgggttgcagactggtgaacacgctgcgccgttaaatgaggggaaggtgggcgttctgcatggaaatcgcacatatctgatgtgtgacgatgatggtcaaatcaatgagacgcactcgatatctgctggccttgattatcctggggtcggacccgagcacgcttatttgaaagatataggaagag

SEQ ID NO: 281735 - DNA, 436 bp, Unknown
  Bacterial polypeptide expressing nucleotide sequence isolated from the Sargasso Sea
atgactaatttaattagtcagacatttaaagatgataaaaaaaaattggtaacattcgttaccggtggcgatcctgatttagaaactagtttaagaattattaagacaataattaataatggagcagatattatagaaattggaatgcctttttctgatccaatggctgatggtccaacaattcaattatcaagtaatagagctataagtaaaggtattagtctagaagatattttttatttagcctctgagacaaagaaaataaaaagtgatctgccaattatcctaatgggttattataacttgattttatattttggtattaagaagtttgtcaaaaaatgtaaggaaaatggtgtagatggtttgattattgttgatttgcaaccggaagaaaatgaggatctaattaatgaactaaataaaaacaaaataa

SEQ ID NO: 281736 - DNA, 676 bp, Unknown
  Bacterial polypeptide expressing nucleotide sequence isolated from the Sargasso Sea
atgaaaacatataaacaacctagcactgttggaagatttggtgagtttggtggcatgtatgtttcagaaacattaatgcctctattattaaatttagataaatcgtacaaaaaaattcaaaaggataaaaaatttaaaaaagagctaaatgatctttttaaaaattatgtgggtaggccctcttctttgcactacgctaaaaatttatctaaatatattaatggaccaaaagtatattttaaaagagatgagctaaatcacacaggagcccataaaatcaataattgcttaggacaaatactccttgcaaaaaaaatgggcaaaacaagaattattgctgaaacaggtgctggacaacacggagttgcaacagcaactgtttgtgcgctttttggactaccttgttatatctacatgggttcaaaagatattgagaggcaaaaaccaaatgttttcagaatgaagcttctgggtgccaccattattcctgttgagtccggaagtaaatctttaaaagatgcaatgaatgaagctctaagagattggattaaaaacgtcagagatactttttatattatcggttctactgcaggtcctcacccctatccaaaaatggtaagggattttcaatctgtaattgaaaagaggcgagagagcaaatataaaagagagaaaa

SEQ ID NO: 281737 - DNA, 493 bp, Unknown
  Bacterial polypeptide expressing nucleotide sequence isolated from the Sargasso Sea
atgccagaacaagatttattaaaaaaaaaattcgatgaattaaaaaaaaaaaaaaagtgtggttttatctcttttattactgctggtgacccagattttagcacttcatataaaattttagaaaaacttcctagtcatggagtagatataattgaattgggtatgcctttttctgatcccatggctgatggacctacaatacaaaaagctaatgacagagcgataaaaaataaaatgagtttaaaaaaaactttcgatttagtaaaaaaattcagaaagacaaatacttcaactcctttacttttaatgggttattttaatccaattcttagatttggcattaacaattttataaaaaaaataaaaaaaaataaaataaatggagtaattattgttgatttgccacctgaagaagataatgaattatgcgttcctatattaaaaaataaaataaattttataaaactagcatcccctacaacagacaaaaaca

SEQ ID NO: 281738 - DNA, 862 bp, Unknown
  Bacterial polypeptide expressing nucleotide sequence isolated from the Sargasso Sea
ttatactttgctgagaggttaacaaattatcttggaggcgcaaaaatatatctgaaaagagatgagctaaatcatactggtagtcacaaaataaataactgtatagggcagatattattagcaaaaagaatgagaaaaaatagaatcatagctgagactggagctggacagcatggagtcgccgtagctactgtgtgtgctcgatttggttttgaatgtgtaatttatatgggaaaaaaagatattgagcgtcaaaagtctaatgtttttaaaataaaattacttggtggtgagattgttcctgtggaatctggaaacggtactttaaaggatgctatgaatgaagcattaagagattgggttgccaatgtagaaaatacttattatttgattggtactgcagcaggtcctcatccatatccatcaatggttagagattttcaatcaattattggcgaagaggcaagaagacaaattcttgataaagaaaatgtattgcctgatgctttagtagcttgtattggtggaggatcaaatgcattaggtttattctacccatttttagatgatgatgtagaaatgtatggggttgaagcagctggtttaggattagatggtaatgagcacgccgcttcattatccaaaggagtaccgggaattttgcatggcaacagaacctacctacttcaagatactgaaggccagattagagaaggacattcaatttctgctggtcttgattatcctggtattggaccagaacactcttggttaaatgatcaaggaagagtaaattatgtatcttcaacagatgatgaagcgttaaatgcttttgaaatatgttcaaaatacgaaggaatta

SEQ ID NO: 281739 - DNA, 175 bp, Unknown
  Bacterial polypeptide expressing nucleotide sequence isolated from the Sargasso Sea
gtaggcagaccatcacctttatattttgcaaaaagacttaccgagcattacaacacagcttcaatttggttaaaaagggaagatttaaatcataccggtgctcataaaataaataatacagttggacaaatccttttagctaaatatatgaggaaaaaaaaggataattgctgaa

SEQ ID NO: 281740 - DNA, 765 bp, Unknown
  Bacterial polypeptide expressing nucleotide sequence isolated from the Sargasso Sea
tatgagccgaatagcccatataaccaaaatggctcgcgaaagagggcgcaagcttttaattccttatttagtagtcggtgatccaagcttacaggtcacgttagatttaatgcactccttggtagaaagtggcgcggatattatcgaattgggcatcccctttagtgatccatcttcagatggaccggtcatccagcgaagtattgaaagatctttgggaaacggaacaagccttcgtgatgcttttaacgtagttgctgaatttcgaaaatcagatcaagctacacccatagttttgatggggtatctaaaccctgtcgagatactgggcgcagatgtgtttgttaagaagtcactcgaagtaggcgtcgatggggttttgttggttgacatgccccctgcggaagcagagaccattcataagaagttaacagaagcagagattgatacaatttttcttgttgcaccaaccactagtgaagaccgagttaaatcgattgttgagcttaccagtgggtatgtttattacgtttcgttaaagggcgtaacaggggcttcaatatcagatgcccattcagtgcaacgaaacgttgatactctaaagaagataactgatctgcctgtagttgttggttttggcgtaaaagacgaacagagtgctaaaaatatgtcgggtgtttcagacggcgttattgttggaaccgctttagttaaaaacatagagtccttaaatcagtcaacaaaggtttattatcaggacatagc

SEQ ID NO: 281741 - DNA, 683 bp, Unknown
  Bacterial polypeptide expressing nucleotide sequence isolated from the Sargasso Sea
cgaagcattaagagattgggtaactaatgtagaaactacacattatattataggaagtgctgttgggcctcatccttatccatctatagtaaaaggatttcaaaaaataataggaattgaatctagagagcagatattatctttaactaacagtcttccagattatgttgtagcttgtgttggaggaggaagtaatgcgataggaatgttttctggttttataaaagatgatgtaaaattaattggtgttgaggctgctggggagggaacaatgacacctcaacatgcagcaacaatttcaaaaggtaggcctggaattttacatggtgctttttcttatttattgcaagataatgatggtcaagtacaagaggctcattccatttctgctggattggattatcctggtgttggaccagaacatagttatttaaatgatactggaagagtaaagtatgtttcagctactgatgaagaagccttgctagggtttgatttgcttactaaaaccgaaggaattattcctgctttagagccatctcatgctatgggttatttatcaaaattcttaaaaaaattagataaaaaaactaaaatcattttattaataagtggtagaggagacaaagatcttgatacggttgccgcttacagaggcattagtttgaaagataaattataaa

SEQ ID NO: 281742 - DNA, 624 bp, Unknown
  Bacterial polypeptide expressing nucleotide sequence isolated from the Sargasso Sea
tatgaataaaaataaaaattcttttaaacaactgcctgatgaaaaaggatattttggtcaatttggtggaagatatgtttcagaaactcttatgcctcttatctatgaagtagaaaaagaatatataaaaattaaaaatgatcaaaattttttaaaagaattagattattacttaaagcattatattggtagaccaagccctcttttatttgctgaaagaataactaaagatttaaaggggcctaaaatttattttaaaagagatgaattaaaccatactggagctcataaaataaataattgtatgggacagatattattagctaaaaaaatgggaaagaaaagaattatagcagaaacaggtgcaggccaacatggagtagcaacagcaactgtttgtgctttatttggattgccttgtgtaatttatatgggagaaaaagatataaaaagacagtcaccaaatgtttttagaatgaaattacttggtgcaaaaatagaaagtgttaatagtggttcaaaatctctaaaagatgcaatgaatgaagctttaagagattgggtaactaatgtcaaagacacattttatataattggaaccgcagctggtccacatccctatcc

SEQ ID NO: 281743 - DNA, 639 bp, Unknown
  Bacterial polypeptide expressing nucleotide sequence isolated from the Sargasso Sea
gatggataagttaaactcttataaactaggacctgatcaaaatggaaggttcggaatatttggtggaagatttgttgctgagacattaatgcctcttatattagacctggagaaagcatatcagcaagcaaagaaagatgacagcttccaatctgagctggcttatttaaataaatattacacaggaagaccaagcccgctctactttgcagagagactgacagattacctcaaaactgcaaaaatttattttaaaagggacgagcttaatcatacaggcagccataaaatcaataattgtttaggtcaaatattattggcaaagaggatgggaaaaacgagaataatagcagagacgggggctggacaacacggagttgcagttgctactgtctctgcgagatttggaattccatgcgtgatttatatgggtgcaaaagatattgagagacaaaagcctaatgtctttagaatgaagctgcttggagccgaggttgttcctgtaagatctggcaattctacattaaaagacgcgatgaatgaagcactgagagattgggtggcaaacgtaaatgatacattttatataattggaactgtggcagggcctcacccttatcccgaaatggttcgcgattt

SEQ ID NO: 281744 - DNA, 700 bp, Unknown
  Bacterial polypeptide expressing nucleotide sequence isolated from the Sargasso Sea
ctcgcgtacgctgaaagatgccatgaatgaggcaatgcgcgactgggtcaccaacattgatgacaccttctacatcattggtaccgtcgcaggcccgcatccataccctgagctggtgcgcgactttcagtgcgtcattggccgtgaggcacgcgagcagtgcctgacccaggccggccgcctgcctgacgcgctggtagcctgtgtcggcggtggttccaacgcgattggtttgttccatcccttcctgaatgatgaaagcgtgcgcatgtacggggtcgaagccggtggccacggtatcgccaccggtgagcatgctgcgccgctgagcgctggtcagcctggggtgctgcacggcaatcgtacctatctgatgtcggatgaagcagggcagatcattgagactcactcggtctctgccggcctcgattatccgggcgttggtccggagcacagctggctgaaggacattggccgggtggactatgtcgatgcgactgacgatgaggcattgcacgcgttccgcgagctgacccgtgtcgagggcatcatgccggcactggagtccagtcatgcggtggcctacggcatgaagctggcagccagcatgagtcctgaggagattgtcgtgatcaacctgtccggtcgtggcgacaaggacattcacaccgtcgccggcattgacggcatcagcatctag

SEQ ID NO: 281745 - DNA, 661 bp, Unknown
  Bacterial polypeptide expressing nucleotide sequence isolated from the Sargasso Sea
atgaaatataatgttgataataatggtttttatggtgattttggaggttcttatatccctgaaatgttattttctaatatagatgagcttagaaagaattatctaaaaattgttaataaagattcttttgaaaaagagtttaattattatttaaataaatatgttggaagaccaactccattatattatgctaatagattatctgaaaaatatagagctaaaatttacttaaaaagagaagatctttgtcatactggtgctcataaaattaataatacaattggtcaaattcttttagcaaaagaattaaagaaaaaaaaaataatagctgaaacaggagcaggtcaacatggtgttgcgactgctacagtttgtgctttaatgggtatggaatgtgtgatttatatgggtgaagttgatatcaaaagacaaaaaccaaatgttgaaagaatgagaattttaggtgcagatgttaaaccagctctttctggaagtaaaaccttaaaagatgctactaatgaagctatgagacattggataaataatcctgatgatacgcattacattattggttcagttgttggccctcatccatatcctgatatggttgctaggtttcaatcagtaatatctaaagagttaatttatcaattaaataagg

SEQ ID NO: 281746 - DNA, 805 bp, Unknown
  Bacterial polypeptide expressing nucleotide sequence isolated from the Sargasso Sea
atgcaacgttatcagcagttattcagccgcctgagcgccgccaaacaaggggcttttgtacctttcgtcactatgggcgatccgggtcttgaactgtcgttcgacattatcaaaactttaatagacgcaggtgccgacgcactggaactgggtattccgttttcagaccctatagcagacggtcctgtgattcaaaacgccaatatccgcgctttagccgctggcgtcacaccggctcagtgttttgagctgattggccgtattcgtcagtacaacaaagacattccaataggtttattgctttacagcaatctggtgatggcgcgtggtatcgacagtttttatcagcaagcgcagcaagctggtgtggattctattctgattgccgatgtgccactgcacgaaagcaagttattcagaaacgccgctatgaaacacgagatagcgcctatttttatcgcgccgcctaacatcacagacgacagcttacgtgaactggcctcttatggccgtggttatacgtatctgttaagccgcgctggtgtcacaggcactgaaactcaggccgctatgcccgccagtacgctgattaatcagttaaaagaatacaatgcagcgccgacgctgttgggttttggtatctctaaacctgaacatgtcaaagctgctatcgaaagcggagcagcaggtgctatttctggttcagctatagtgcaaattattgaaaagtatcaggcagaacctgcgcagctcaaacagcagttgtttgactttgtcagcagtatgaaagcggcgacgctctagt

SEQ ID NO: 281747 - DNA, 400 bp, Unknown
  Bacterial polypeptide expressing nucleotide sequence isolated from the Sargasso Sea
ctgggtggcagaccaggtattttgcatggtaaccgcacctacttgttgcagaatgatgatggccaaatcatggaaggcttttctatatctgcaggtcttgattatccaggtataggccctgaacatgcatggctccatgaaataggtcgcgcaaaatatgtttcaatcactgataaagaggctcttgaagcatttcaactaagttgcactacggaaggtattatacccgcattggagccaagtcatgccctagcgcacgtgatgaaaattgcacctgatctaccatcaaaccacattatttgcatgaatatgtgtggtagaggcgataaagacatttttacagtcgctcgccatcttgggtttgaaatgtctggtctagaaggaaggaatatggagtaga

SEQ ID NO: 281748 - DNA, 799 bp, Unknown
  Bacterial polypeptide expressing nucleotide sequence isolated from the Sargasso Sea
gatgctgtcacccatcgctcagcgctttgagcagctcaaacaggagaagcgtctggccttgatgccatttctgatggctggcgaccctgatctggcaacaaccgcagaggtgttgctgagtttgcagaactcaggggcggacatggtggagctggggatgccctacagcgaccctctggcggatggtcctgtgatccaggccgctgcagcacgagcccttgctgcgggaacaacacccggaaaggtgttggaaatgctgacctctttgaaggggcaactcaccattccggtgattctgttcacctactccaaccccttgctgaatgtgggcatggaggcgttctgtgaacgcgctgcagcggctggagccgctgggcttgtggttccagatctgcccttggaagaagctgaacggctgtcgcctctggcggaacaacagggactggatctggttctgcttgttgcacccacaacccccgctgatcggatggtgcgaattggtcaacgcagccggggtttcacttatctggtgagcgtgaccggtgtcaccggggaacgtgcccagatggaaaccagggtggaggggcttgtgcaggagctgaagcaatcctcagcagttccagtggctgtgggtttcggtatctctggagctgatcaggtgcgccaggtgcgcagctggggggcagacggcgccatcgtcggcagtgcgctggtcaagcgaatggcggcggccggtgacggccaaattgctgaggaagctggacgattctgcagagagctccgcaacgcagctgactga

SEQ ID NO: 281749 - DNA, 1140 bp, Unknown
  Bacterial polypeptide expressing nucleotide sequence isolated from the Sargasso Sea
catgactaaattaaacttaaacccttattttggcgattttggtggcatgtttgtacctgaattgctggtcccggcattagtgcaactggagcaggcttttgtcgatgcgcagcaggatccagcttttattgctgaattccaggcgctgctgaaagactacgccggtcgcccaactcctttgactttgtgccgcaatgtatcacctaatccgctagcaaaaatttacttaaaacgtgaagacttattgcatggcggcgcccataaaaccaatcaggtgctgggccaggctttattggcaaaacgtatgggcaaaaaagacatcattgccgaaactggtgctggtcagcacggtgtagctacagccctcgcctgcgctttgttaggcgtgaactgcaaaatttatatgggcgccaaagacatagaacgtcagcaaccgaacgtcttccggatgaagttgatgggcgcaacagtgattcccgttaccgcaggctccggcaccttaaaagatgctgtcaatgaagccatgcgcgactggtccggcagttatgccaccagccactatttgttaggcacagcagcaggccctcaccctttcccgaccatagtgcgtgaattccagaaaatgattggcgaagaagccaaacaacaaattctcgaagctgaaggcaaattaccagacgctgtgctggcttgtgtcggcggtggctccaacgctattggtatgtttgctgactttattaaagaagaaggcgtgcgtttaattggcgtcgaacccggtggtatgggcattgaaacccaccagcatggtgcagcattaagcacaggcagctttggtatcttgcacggcgcctacaccgctattatgcaaacccaggatggtcagattgaagagtcgtattcggtgtcagcaggtttagattatccggctgttggcccacagcatacctatctgcagagcataggccgcgctgaatatgtggctattaacgacgatgaagccttagcggcgttccagcatctggccaaatctgaaggcattatcccggcccttgaaagttctcatgctttggcgcatgcgctgaaaatggcggctgctaccacagaacctttggtgctgttagtgaacttatcaggtcgtgg

SEQ ID NO: 281750 - DNA, 994 bp, Unknown
  Bacterial polypeptide expressing nucleotide sequence isolated from the Sargasso Sea
gtctgacgctatcggcggtgcgcgaatcctgctcaagcgcgaagatttgaatcacaccggtgcccacaaagtgaataacacgatcgggcaggcactcctggccaaatacatgggcaagaaaagagtgatcgccgagacaggtgcgggtcagcatggtgtggccagtgcgacggttgcggcaagactcggactcgagtgtcatgtcttcatgggagaggaagacattcgcaggcaagcgctgaacgtctatcgcatgaagctcctgggagcgagggttgtctctgtgacctcgggttcgcgtacgttgaaagacgccatgaatgaagccatgcgcgactgggtcacaaatgttgacgataccttttacatcattggaactgtcgcggggcctcatccctatcccatgctcgtacgcgactttcagagcgtcattggccgtgaggcgcgggcgcagagcttggcgcagtgcggcaagctgccggacgcgctggtggcctgtgtcggcggcggctctaatgccatcgggctgtttcatccctttcttcaggatgaaggtgtagcgatgtatggcgttgaggcaggtggcaagggcctagagaccggtgaacacgcggccccgctgtcggttggcagtccaggcgtactgcatggtaatcgcacctacctcatgcaagacgatgacgggcagatccttgagacccactcggtgtccgccgggctcgattatcccggagtggggcctgagcacgcatggctcaaggatatcggtcgggttcaatatgtcgccgcgaacgacgatgaggcgctggcagcctttcaccgactgacgcgtgtcgagggcataatgcccgcactggaaaccgcacatgcgatggcccatgccgagaagttagccgcgagcatgtcgcccgaacagcacatcgtggtaaatctgtccggacgaggtgacaaggacattctgacggttgctgacctcgacgggatcgaggtctga

SEQ ID NO: 281751 - DNA, 723 bp, Unknown
  Bacterial polypeptide expressing nucleotide sequence isolated from the Sargasso Sea
aatgcttaaaaatacatttaaaagttatccaaatgaaaaaggatattttggtcagtttggtgggagatatgtttcagaaacattaatgcctttaattcttgaggtagaaaaggaatatgaaaaaataaaaaatgataaaaattttattgatgaatttaatcattatttaaaaacatatgttggtagaccaagtcctcttttctttgcagaaagaattagtaaagaccttggtggtccaaaagtttatttcaaaagagatgaattaaaccatacaggtgctcacaaaataaataattgtatgggtcaaatcttgctagcaaaaaaaatgggtaagactagaatcatagcagaaacaggtgcaggacaacacggtgtagctacagcaactgtctgtgccttatttggtttaccttgtatagtttatatgggaaaaaaagatattgaaaggcaatcaccaaatgtttttaggatgaaattgctaggtgcagaaatacggtctgtctctaccggttcaaaatcacttaaagatgctatgaatgaagctctaagggactgggttacaaatgttaaagatactttttatataataggtacagctgcaggaccccatccatatcctgcaatggtgagagattttcaatctgtaattggaaaagaagtacgtgagcaacttgaagatatggagggaagatcaccagatttattaatggcttgtattggtgg

SEQ ID NO: 281752 - DNA, 626 bp, Unknown
  Bacterial polypeptide expressing nucleotide sequence isolated from the Sargasso Sea
tatgcaaactagaaattcttacaaaaaacttcctgatgaaaaaggttattttggaaattttggtggaagatatgtttcggaaactttaatgcctttgatattagaagttgaaaaagaatacaaattaatcaaaaatgataatcaatttcaaaaggatttaaaatattatttaaaaacttatattggaagaccaagtcctctattttttgctgagagaattacaaaaaatttagggggtccaaaaatttattttaaaagagatgaattgaaccacactggtgctcacaaaataaataattgtatggggcaaatattactagcaaaaaaaatgggtaaaaaaagaattattgcagagaccggtgctggacaacatggcgtggctactgcaactgtttgtgcattatttggcttgccttgtattatttatatgggtgaaaaagatataaaaagacaatcaccaaatgtttttagaatgaaacttcttggagctgagatacgaagtgtttctacaggatccaaatctcttaaagatgcaatgaatgaagcattacgagactgggttactaatgtcagggatactgtttatattattggaacagcggccggaccacatccataccctgaaa

SEQ ID NO: 281753 - DNA, 1027 bp, Unknown
  Bacterial polypeptide expressing nucleotide sequence isolated from the Sargasso Sea
tatgttaaaaaaaacaaatttaaaaaaatttagaaaattcaattttaaaaaatttcctgataagaacggaagatttggaaatttcggaggaagattcgtagctgaaacacttatgccacttctgcttagtgttcaaaaagaatatgagaaagcaaagaaatcgaagaagtttaaagatgaattagattattattttaaacattacataggtaggccaagcccattatattttgccgaaagactttctaaaaaattaaacaatgccaaaatttattttaaaagagatgaactaaatcatactggagctcataaaattaataactgcattggacaagttcttcttgcaaaaagaatggggaaaaaaagaatagttgcagaaactggggctgggcaacatggattagcgactgcgactgtctgtgcgttgtttgatttagaatgtgttgtgtatatgggggaaactgatattaaaagacaagccccaaatgttttcaaaatgaagttacttggcgctaaaattaacccagttaaatctggaacctcaactttaaaagatgcaatgaatgaagcattaagagattgggtatcgaatgtaaatgataccttttatgtaattggaaccgtagcaggacctcatccctatcctatgatggtaagagattttcaatctgtaattgggatagaagcaaaaaagcaaatattgggccttgaaaaaagacttccagattttcttgttgcttgtattggtggtggatcaaatgccctgggactgttttacccattcctaaatgataatgtagaaattattggagttgaagctggaggtaaaggaataaatactggtaaacatgcagcgtcaatttcaaaaggtaaaccaggctttcttcatggtaaccatacttatctgcttcaaaatgaagatggacaaattgaagacgctcactcaatttctgcaggcttagactaccctggaatagggcctgagcacgcatggttaaaagaaataggaagagtttcttatgtgaat

SEQ ID NO: 281754 - DNA, 453 bp, Unknown
  Bacterial polypeptide expressing nucleotide sequence isolated from the Sargasso Sea
atgaaaaaaatattagaatgctagctgtagaagcagccggttgtgggttaaattctgaaaagcatgccgcaagtttaactgggggaagaccaggtatactacacggaaataaaacatatttattacaatcagaagatggacaaataaaagaagctcattctatttcagctggattagattatcctggaataggtcctgaacactcctttttattcgacgaaaaaagagtagaatatacatcagctacagatgatgaagctttagaagcttttcaatattgttgcaagcttgaaggaattatccctgctcttgaaccttcacatgctttggctgcattaaaaaaaattgcaccaaaaatgaattcagatgaaattgtaataatgaatatgtgtggccgaggtgataaagatatttttactgtggctaaagctcttaatattaatattaaatgaa

SEQ ID NO: 281755 - DNA, 388 bp, Unknown
  Bacterial polypeptide expressing nucleotide sequence isolated from the Sargasso Sea
catgctgcaagtctatcttggaggaaagccaggggtactccatggaaacaaaacttatcttttgcaaaatcaagacggtcaaattgaagaagctcattctatttctgcaggattggattatccaggtataggtccagagcactcctttttatttgaacaaaaaagagttaaatatgtatctgcaactgatgaagaagctttagaagcttttaaatattgttgcaagactgaaggcattattcctgcattagagccagctcatgctttagcagctctaatcaaaatcgctcctaaaatgagtaaagaagaaatcattgtaatgaatatgtgtggaagaggtgacaaagatatttttacagtagctgatgctttaaaaataaaaatttaa

SEQ ID NO: 281756 - DNA, 1207 bp, Unknown
  Bacterial polypeptide expressing nucleotide sequence isolated from the Sargasso Sea
tatgaattcaaataataaaacactacctgataaaaatggtttttttggagactatgggggtaaatttgttcctgaaacacttatgtatgctcttgaggagttagagagtacatataagaaattaaaagataaccccgaatttaaagaccaattttataaagatctttctgaatttgtaggacgaccatctcctttgtattttgctgaaagactaaccaaacattatgggactggttctatttggttaaaaagagaagaccttaatcatacaggcgctcataaaataaataatactattggacaaattttattagcaaaacatatgggcaaaaaaagaattattgctgagactggagctggtcagcatggagtagcaactgcaactgttgctgccaggcttggacttgaatgtcatatctatatgggatcagaagatgttcaaagacaatcattaaatgtatacagaataaaacttttaggtgcgcaggtacatgcagtagactcaggatcagcaactctaaaagatgcattaaatgaagccttaagagattgggtcactaatgtcgatgatacctactatattattggcagtgttacaggacctcatccttatccaatgattgttagagatttcaattctgtggttggtgaggaacttataaatcaatctaaagaattatttaactctatgccaaacgccatagttgcatgtgttggcgggggttcaaatgcaatgggtgctttttatcctttcatcaatataaaagaaactagactaattggagtagaagccggtggagagggtgttgaaactggtgaacatgcagctccactaaatgacggcactccaggtgtacttcatggagcattaagttatttaatgcaagatgacactggtcaggtaaaaggaactaaatctgtttcagcaggccttgattatcccggagttggcccagaacattcttggctaaaagactctggaagggctgaatatgttgctgtaagtgatgatgcagctttgaaagcattccatgaagtttctgagtttgaaggaattatccctgcgcttgaaacagctcatgcattcgcatatttagatactttaatgaaagaatttgataagaaagcaaacataattgtaaatgtatctggcagaggagataaggatattaatactgttgctgaaattgatggaattaagttttga

SEQ ID NO: 281757 - DNA, 790 bp, Unknown
  Bacterial polypeptide expressing nucleotide sequence isolated from the Sargasso Sea
gtcttttggatggaacagcttggcgccgaagtgattcctgtaaccgatgggactgcgactcttaaggatgccatcaacgcggcgatgagggactgggctgaaagcatggaaaacacccattatgttttaggaacaacctgtgggccacacccatttccggaaatggtttcctattttcaatctttgatcggcgaggaatcaaaaactcagatgcttgaaaaggtaggcagacttccagacagggtttatgcctgtgtcggcggtggttccaatgccagcgggatttttcttccttttatagaggataaagaggtttctctggtaggggtagaagcaggaggacatggtattgaaaccggagaacatgctgctcgttttgctggtggttcggtcggcattgcccagggatacaaaacctattttttccagaatacggaagggcagatgcagcatacccactcaattgctgctggattagattatattggggtcagtccgattttaagtcatcttcatgatcagggacgggttcggttctgtgctgctgatgacgaagcggttgtagaagcaactaaattactaatccgcagagaaggtattataccagccttagagtgtagtcatggctttgcaggattgattgccgaagcaggccagatcggggatggagagattattctaatcaatctttccggtcgaggtgataaggatatttttaatattgccgaagcgatgcaggatgaaaaatggcagcagtttatccgggagaaggcatccttaagcctttgag

SEQ ID NO: 281758 - DNA, 1204 bp, Unknown
  Bacterial polypeptide expressing nucleotide sequence isolated from the Sargasso Sea
gatgacagataataaaaaaatgcctaatcaggagggttactttggaaaatatggaggaagatatgtagctgaaactcttgttcctgctcttgaagagttatcagaaaaatatcatgaaataaaagatgatgagggatttaaaaaggaagtaaaggaagacttagaaaaatttgtaggccgaccttcacctctttattttgctgaaagatggtcaaagcaattaggaggtgcaagcatttacctcaagagagaggaccttaatcatacaggcgctcacaagatcaataatactgttgggcaaatacttttagcaaaacatatgggcaaaaacagaataattgcagaaacaggagctggacaacatggagtagctaccgcaactgtagcagcaagacatggattaaagtgttttatctatatgggagaggaggatactagaaggcaatcacttaatgtatttaggattaagctattaggtgcagaagtaattccagtaaattctggaacaaaaactcttaaagacgctatgaatgaagcaatgagagattgggtaacaaatgtagatgatacttattacattatagggagtgttgcaggtcctcatccttaccctgagatagttagagactttaattcagtagttggttcagaattgaagttacaagctagagaacagattggaacagaaccagactatatagtagcttgtgttggaggaggatctaatgcaatgggaatattttatccatttataaatagtaaagacactaagctaataggggtagaagcagcaggcaatggtttagagacaggagagcatgcggctccacttaatataggaacagaaggtgtgcttcatggaatgaggacatatttgatgcaggatgaccaaggacaaatacaagaaacacattcaatatccgctggtttggattatccaggagttggtcctgagcattcatggttgaaggataatggaagggcagaatatgttgcagctaatgatgaagaggcgcttgatgcttttaaagagttaactctaatcgaaggaattatgcctgctttagaaacagcccatgctttagctcatgtaaaaaaactagctcctactttagataaggaaaaatcaatagttgttaatatttctggaaggggagataaggatataaatactgttgccgatctggaaggcataaaaatttaa

SEQ ID NO: 281759 - DNA, 1069 bp, Unknown
  Bacterial polypeptide expressing nucleotide sequence isolated from the Sargasso Sea
atgaataaaaaaaattcttataaacaattgcctgatgacagaggttattttggacaatttggtggcagatatgttgcagaaacactaatgcctttagttattgaggttgagaatgaatacaataaaatcaaaaatgatcattcttttaataaggaatttgaatattatttagagaaatttgttggcagacctagtcctctattctacgccaagaggattactgaggatttaaaagggcctaaaatttattttaaacgcgatgaactaaatcatacaggagcgcataaaattaataattgtataggtcaaatactacttgctaaaaagatgggaaaaaaaagaattattgctgaaacaggagctggccagcatggtgttgcaactgcaactgtatgtgcactatttaatttaccttgtgtaatttatatgggtgaaaaagatattgaaagacaatctccaaatgtttttagaatgaaattattgggtgcagaaataaaaagtgtttcaagtggttcaaaatctttaaaggacgcaatgaatgaagctctaagagattgggttacaaatgttaaagacactttttatataattgggactgtagcaggaccacatccatacccatcaatggttagagattttcaatctgttataggaaaagaagctaaaaaacagattattgatgctgaaaatagattacctgatttattagttgcatgtattggtggaggatcaaatgctatagggctgtttcatgagtttttggatgatgaaaatgttaaaatgttagcagtagaggctgctggtcacggtttagactcagaaaaacatgctgcaagtttaacaggtggcaaacctggcatacttcatggaaacaaaacatatttattacaatcaaaaactgggcaaataaaagaggctcactctatctctgccggattagattatcctggtataggacctgagcactcttttttatatgatgaaaaaagagtaaaatatacatcagctactgatagtgaagcgctggaggcttttcaatactgttgcaaacttgaaggcattatcccag

SEQ ID NO: 281760 - DNA, 861 bp, Unknown
  Bacterial polypeptide expressing nucleotide sequence isolated from the Sargasso Sea
tatgccaacaaatgaaaaattaattccaaaaggtcgttttggaaggtttggtggaaggtttgttcctgaaactcttatgcctgccttggaagagttagagaccgcatacgaagatgcaaaaaaagatcctttgttccaggtagaacttgatggattattaaaagatttcgtaggtcggccgactccattatattttgcagaacgactgtcttctgaattgaagaatttaaaagtttatttaaaaagagaagacctatgccatactggggcacacaaaataaacaatactatggcgcaagtaattttagcaaaaagattaggcaaaaaacgtattatcgcagaaacaggtgcgggtcagcatggagttgctaccgctactgctgcagcaagatatggtttagaatgcagtatatacatgggagaagaggatatagaaagacaggagttaaatgtttttcgtatgcaacttcttggtgcaactgtcattccagttaagtctggaagtggaactttgaaagatgcgacaaatgaaactcttcgagattggactgcatcagttagaacaacacattatataattggttctgttgtgggtcctcacccttttccggagatgattcgtgattttcaagcggtcatcggaagagaaactcgtaaacagtttttagaaatagaaggaagattaccggattcgtgtgttgcatgtgttggaggcggaagtaatgcaatcggtttgttttttccttttttagaagataaagatgtagaactggtgggtgtggaggcaggaggaagaggattggaatctggggaacatggcgcttcgctagctgccggaaggataggagttcttcacgggtg

SEQ ID NO: 281761 - DNA, 844 bp, Unknown
  Bacterial polypeptide expressing nucleotide sequence isolated from the Sargasso Sea
atgaaaaaaaacaaaattcaaatgactaaagatgaagctatatcaaaggtagatgagaagttttatgagttaaagaaaaataaaaaattagctttgatgcctttcataatggctggggatcccaatattgaaataacatctgagatcttattaaatttacaagaaaatggtgctgatcttattgaattgggaatcccatatagtgatcctctcgcagacggtcctgttattcaactttctgcctctcgtgccttgaagtcaggtacaaccccaagaaaagtaattacacttttagagtctttaaaaggaaaattaaatattcctataatactttttacttatttaaatcctttattatgttttgactttgaacagttttgtgagatggcatccaatgctggagtttctggactaataattcctgatctccctttagaggaagcttatgaattttctaaaatagttagtacttattctatggatttgattttattggtagctccaactactccttttgaaagaatgaaaaaaatatctcagcatacaaaaggttttacttatttagtaagcgttacaggggttactggtgaaagaaacgaaatgggaaatagagtagaaaatcttattgctaaattaaaagaaataaccacgaatcctattgctgttggttttggaatttcctcccctgaacatgttaataaagttcgtaattggggcgcagatggagtaattattggaagtgcttttgtaaaacgaatttctagttcaagtgaaaaagatgttgttaatcatgttggtaacttttgtaaagatatgcgtttggctgccgatcaaaagaaataaa

SEQ ID NO: 281762 - DNA, 820 bp, Unknown
  Bacterial polypeptide expressing nucleotide sequence isolated from the Sargasso Sea
aatgagattggaaaatacctttaggtctttagctaaaaagaatcaatccgcatttattacctttttgacagcaggtgatccagattatgaaacctcaattaatataattaatgaacttcctagttgtggagttgatattattgaagttggagttcctttttcggatcctatggcggatggaccatctgttcaagctagctctcttagagctctaaataatggaatgactttagaaaagacactcaatctcgtaaaggaatttagaaaaaaaaacgatattactcctatcgttcttatgggctattacaatccaatatatatttatggaaatgataaatttttgaaagatgccaaagatgctggagttgatgggttaattgttgttgatcttcctcctgaagaagaccatgagctttgtgttcccgcaaataaagcaggactgaatttcattagattgtgtaccccgacaactgatgaaaaaagaattccagcagtattagaaaatacatctggttttttgtattatgtttctattactggaattactggaactaaaactcctgatttttcaaaacttgtaaaacctatcgaaactttaaaatcaaaaagtaaacttccaattgctgtaggttttggaattaaaactaaggaaaatgctagggaagtcgctaaaatagcggatggagtcgttgttggcagttcaatagttgacataattcagacatcacttaatgagaaaaagaatggtgatgaaatgaagaataaagtattaaattatgtaaagaatttgtcagaaggagttaagcaaggtagaaaatga

SEQ ID NO: 281763 - DNA, 1039 bp, Unknown
  Bacterial polypeptide expressing nucleotide sequence isolated from the Sargasso Sea
gacgaactcaaccaatgggcaggtcgtccaacaggacttacctttgcaaaaaaattgagtgaattgtggggggttaaggtttatctcaaacgagaagatctgacgcacacaggcgctcataaaataaacaatgcattgggacaagctttaattgcaaaacagcttaacgccaaacgggttgtcgctgaaactggagcggggcagcacggtgtagcttcagctgctgcatgtgcaagagttggcattccttgtgttgtttatatgggagcagttgatattgaaaggcaagcaccaaacgtggatagaatgaggcaactgggcgctgaggtcatacctgtaactactggtgaccaaacattaagagctgcggtggacgaagctttcagagattgggtaggcaatcctgatgacacttactatattttagggtcagtggtcggtccacacccatacccttatctcgtcagagagttacaatctattattggtaaagaatctaaagatcaaataataaaagccacaaaaggcttgcccgatgctgtgtttgcttgtgtagggggtggctcaaacgcaatcggtatttttcatgcttttcttggtgatgaatcagtcgaattgataggggttgaggctggcggcaagagccaaaaattaggcgacaatgcagccacccttgcttcaggtaaacctgggattttgcatggaacttactctatgttactccacgatgaagatggtctggttcaagagacgcactctgtatctgcaggccttgattaccccggggttggaccggagcacgcttttctgcagtcaataggcagagtaacatacacttcagcagaagatgatgaggccctagaagaggttagagcttgctgctccttggagggcattcttccagctttagagagcgctcacgcttttgtcggggcaaaaaaatgggccgaagcaaatcaagggaaaacaattcttattggcttgtcgggaaggggcgacaaagacatgcccacccttagtaaggtattaaaaatttaat

SEQ ID NO: 281764 - DNA, 1105 bp, Unknown
  Bacterial polypeptide expressing nucleotide sequence isolated from the Sargasso Sea
atgtctgataaaattaaatattttttagaagaaagcaaaatgccaaaaacttggtataatatagctgctgatcttcctaaaccgctttcgcctgtacttcatccaggtaccctgaaacccataggaccagatgatttagctccactatttccaatggcattaatcggacaagaagtttctcaagaaagagaaattgaaataccagacccagttagaaaaatttatcagcagtggagaccttcacccttatacagagcaagaaagttagaaaagcttttagatacgcctgcaaaaatttattataaatatgaaggcgttagccctactggtagtcataaaccaaatactgctgtagcacaggctttctataacaaagaagaaggtacaaaaaaaataactactgaaactggagctggtcaatggggtagttcactggctttcgcatgttcaatttttaaaatagaacttgatgtgtatatggttaaagtaagttatgagcaaaaaccttatagaaaaatgataatgcaaacatttggagcaaattgttatgcgagtccatctgacagaacaccaactggtaaagctattttagaaaaagatcctaataacactggtagtttaggtatagcaatttctgaagcagttgaaatggcagcaaatgatgaaaatacaaaatattctttgggaagtgttttaaatcacgtacttatgcatcagacaattgtaggtaacgaagcaattcttcaaatggagatggctgatgattatccagatatattagtaggatgcactggtggaggaagtaacttttcaggtctggcttttccttttttaggaaaaaaatttagagaaaataaaaatttaagagttatcgcgtgtgaaccgaaatcttgccctacaattacaaaaggtaagtttgcatatgattttggagatacgggtaatagaacaccactagtcaaaatgcatacgcttggatcttcatttatgccaccatctactcactcgggtggtttgcgataccatgggatggcaccaatggtaagtcatcttgtagatataggtgctattgaagcaaaagcctttggacaaaaagagtgctttg

SEQ ID NO: 281765 - DNA, 940 bp, Unknown
  Bacterial polypeptide expressing nucleotide sequence isolated from the Sargasso Sea
atgaaaacttataaacaacctagctctgttggaagatttggtgagttcggaggcatgtatgtctccgaaacattaatgcccctattattaaatttagataaatcttataaaaaaattcaaaaggataaaaaatttagaaaagagctaaatgatctttttaaaaactacgtgggtaggccctcctctttgcactttgctaaaaatttatctaaatatattaatggaccaaaagtatattttaaaagagatgagctaaatcatacaggagcccataaaatcaataattgcctcgggcaaatactccttgcaaaaaaaatgggcaaaacaagaattattgctgaaacaggtgctggacaacacggagttgcaacagctactgtttgtgctctttttggtcttccttgttatatttacatggggtctaaagatatcgagagacaaaaacctaatgtttttagaatgaagcttctaggcgccactattattccggttgagtctggcagtaaatctttaaaagatgcgatgaatgaagctttaagagattggataaaaaacgtcagagatactttttatattatcggatctacagcaggtcctcacccatatcccaaaatggtaagagattttcaatctgtgattggtagagaagcaaaagagcaaatattaaaagttgaaaaaaaactaccagattatttgatagcttgcgttggaggcggatcaaatgccatgggtttattttatccatttttaaatgataaagaggtaaagattattggagttgaggcggctggtagaggtgctaaaactgaagaaacagcggctacaatgacatctggaactcccggtattttacatggtagttacagttatgtcttacaggacactgatggacaaataaaagaggctcattctatttcagccggtctcgattaccctggtg

SEQ ID NO: 281766 - DNA, 1204 bp, Unknown
  Bacterial polypeptide expressing nucleotide sequence isolated from the Sargasso Sea
tatgagtaagaaaaattacaagaagtatcctaataaagacggtcattttgatcaatatggaggaatgtttgtatctgagacacttatgcatccactcaatcaacttcttgctgcatacaaaaaaattggtaaatcatccagttttcaaaaaaaattaaaatcagagttatctatgtttgttggtagaccaactcctatttatcatgccaagagaattagcagagaacttggaagttgtgatatttatttgaagcgtgaagacttaaatcatactggtgctcataagataaataatgcgattggccaagctttacttgcaaaagaaatgggtaaaactagaataattgctgagactggagcaggtcaacacggcgttgcaacagctactgcttgcgcaaagtataatattaaatgtgtagtctatatgggaagtactgatattgagagacagaagataaatgtttatcgaatgaaattattaggagcagaagttgttccggtagaatcaggttctaaaacacttaaagatgcattaaatgaagcattgagagattgggttactaatgttgatgatactcattatattataggatctgtggctggccctcatccttatcccatgattgtaagagattttcagtctgtaataggtcacgaatcaaaaaaccaaatgcaaagtttattcaataccaagccggatattttaattgcttgtgtcggaggaggctcaaatgcaattggtttatttcatccttttctaaatgataatgtagagatgtttggtgtcgaagccggagggtatggattatcaactgggaaacatgcagcacctcttaacaagggtaaacccggagtacttcacgggaatagaacatatgttatggaagataagaatggccagatacaatcaacacactctatttctgctgggttagattatccgggagtaggtccagaacactcttggttaaaagataataagagagttaaatatgtatctgtcacagacgatgaagctttgaaggcatttaacatacttactgagagggaaggtataatacctgcgttagagactgcgcatgctttagcttatgcatttaagatagcaaaaaaacttaaaaataaaaaaattctcataaacttatcaggtagaggtgataaggacattgacactatagctgctctcacccatatcaaatcgtga

SEQ ID NO: 281767 - DNA, 802 bp, Unknown
  Bacterial polypeptide expressing nucleotide sequence isolated from the Sargasso Sea
tttgaatagaattgaaaaaaagtttaacgactcaaaagcaagtggtaaaaagtgtttaatatcatatattactgctggtgaccctgaaaaaaaaattactgcagatctgatgcataccttggtttcatcgggtacagatattattgaacttggcattcctttttcagaccctatggcagatggtccagtaatacaaaaagcatgtgaaagggctttaattaataaaacttcatgtaaagatatttttaatatcgttaaagagtttagaaaaaagaatgaaacaaccccggttgttctaatgggttatctcaatcctattgaacgaattggctacgaaaatttttcaagcgaatcaaaagagtctggtgttgatggagtgcttgttgtagatctcccacacgaggaagcacaagatattgtcaatatttttaaaaaagatggtttagatagcattttccttattgcaccaaatagtacacaagaaagaattttaaataccttgaagtacgcatcagggtttctatactacgtttccttaaaaggggtaacgggagcaaagaatattgatattgatgatactatctcaaatttgaagaaaataaaggaagattcaaatatacctttagcagttggttttggtattaataatgctgaaagcgcaagattgatttcaaaacattcagatgctgtagttgtaggtagttcaattattaaagttattgaaaataacttaaataaaagagaaaatattataaatgaggtttcaaaaatagttaatgaaatcagaacagctttagattga

SEQ ID NO: 281768 - DNA, 397 bp, Unknown
  Bacterial polypeptide expressing nucleotide sequence isolated from the Sargasso Sea
tatgacaaattacaatgtagataaaaaaggtttttacggcgactttggtggagcatttatccctgaaatgctttatcctaatttaaatgaattgactttgaattatgtcagaatttcaaaatcaaagtcatttaagaaaaaatttaatcaattattaaaagattatgttggtcgaccgacccctctttattttgcacaatcactttctgagaaattcaaatgtaaggtatatttgaaaagagaagatttgtgtcacacaggagcgcacaagattaataatacaataggtcaaattcttcttgctaaagaattagggaaaaagagaatcattgctgaaactggcgcaggtcaacatggtgttgcgactgcaactgtatgtgcattactaggtttttaa

SEQ ID NO: 281769 - DNA, 1180 bp, Unknown
  Bacterial polypeptide expressing nucleotide sequence isolated from the Sargasso Sea
ttggcaggtgaatttccggatgaaatgggaagatttggcccatttggtggcagatacattccagagacactggtgcctgccttttcaagactcgaagaaggcatgaaacaataccttgacgatataaacttcatggaagagtggcacaatgagctcaatcattgggtaggtagaccaacagcattgacgttcgcccctcaattaagtcaatcctggggtgccaatgtctggttaaagagagaagatatggcccatactggcgcacacaagatcaacaatgccattggtcaggctatgttggcaaaaaaacttggcgcaaaaaaagtgattgctgaaacgggcgccggtcaacatggtgtggcatctgccgcagcatgtgccagagtcggactcccctgttgtgtttacatgggagtcgtagatattgaaaggcaggctccaaacgttgatcgaatgagacagttaggtgccgaagtaatcgctgttgaatctggtgataggacacttagggcagcaattgatgaggcaatgcgagaatgggtatccgaccccatggacacttattacataatcggttctgcggttggccctcatccttatccatttttggtgagagagtttcaatcggtcatcggcactgaatcaaaaaaacagatgcttgaacaagcaggatgtctgccagatgctgttttcgcttgtgtgggtggcggatcaaatgccatcggtatgttttatccacttattcaagaagaaggtatcgagttgattggagttgaagcaggcgggctcggatctggtctgggtcagaacgccgcaagccttgcaacaggtacacccggtgttttgcagggcgcttacactattatcctgcagaataaggacggtcaagtccaggaaacacattcaatttctgctggtcttgattattcaggtgtcgggcctgagcatgccttgttgcaatttattgatagaattcaatatgtcagcgctcaagataatgaagctcttgaggcattgactgagctctgtcaaacagaaggcatactcaccgcactcgagacagcacatgcatttgcagccgcaaaaaaatgggccagcaaaaatccaaataaaaatatattaataggaaattctggaagaggcgacaaagatatgtccactctctccaaatacatataag

SEQ ID NO: 281770 - DNA, 823 bp, Unknown
  Bacterial polypeptide expressing nucleotide sequence isolated from the Sargasso Sea
catgaccgtggcccctggctccactgccatctccagccgttttgctgggctcaagcagcagggccgttgcgcgctgatgcccttcctcaccgcgggtgatccggatctagccaccacgcgcgcagcgttattggccctgcaagccaatggggctgatttggtggagctgggcattccctatagcgatcccctggccgatggcccagtgattcaggcggcagccagccgcgctcttgaggtgggcaccactcctgcgtcggtgctggagatgttggcagggctcaagggcgagctgaccatgccggtggtgctgttcacctacagcaacccgctgttgaatgtgggcatggagaagttctgcgcggatgctgctgctgctggagcagctggtttagtggtgcccgatctgccgctcgaggaagccgaaaagctctcccccattgccgcagcgcaggggttggatctggtcttgctggtggcgcccaccacaccggctgagcgcatgggccgcattgcagccgccagccgcggcttcacctacatggtgagcgtgactggcgtgaccggtgaacgagcgcaaatggaatcacgggtggctggcttggtggggcagctcaaggccatgggcccaacccctgtagctgtgggctttggcatttccggcccgcagcaggcgatcgaggtacgcaactggggcgctgatggcgcgattgtgggcagtgctttggtcaagcgcatggcccaggccaaagccgaaggcggcgatcctgtggctatagctggagctttctgcgcggagctgcgtgcagcgctcgatagctga

SEQ ID NO: 281771 - DNA, 1210 bp, Unknown
  Bacterial polypeptide expressing nucleotide sequence isolated from the Sargasso Sea
atgaaaaaaaatttaaaaatttttcctgataaagatggtagatttggtgagtatggtggcaagtttgtttcagaaaccttaatgcccgccctaaatgagctggaaaaagaatacaaaaaaattaaaaaaaataaaaaatttaaaaatcaaataagctctcttcttaaaaattttgtcggaagaccaacccctttatatttagcagaaagaactacgaaagatctacaaggtgcaaaaatttatttaaaaagagaagatttagcacatacaggtgcacataaaattaataacactgttggtcaagctattctggctaaagcaatgggtaaaaaaagaataattgcagagaccggagcaggtcaacatggagtagcaacagccacaatttgtgctctcttaggactagattgtgaagtttacatgggtgaattagatactagaaggcaggctataaatgttcaaagaatggagctgcttggagcaaaagtgataccggtcaattcgggctcaaaaactttaaaagatgctctcaatgaggctctgagagactgggtgactaacattgaatccactttttatataattggaagtgtcgctggccctcatccttacccaatgattgttagagattttcaatcaataattggagaggaaactagaaaacagataattaaagttgaatctaagcttcctgatctacttgtagcatgtgttggaggcggttcgaatgcaataggcttattctatccttttttgaatgattcaaaggttaaaatggtaggagttgaggctggaggcaatggaattagttcggggttgcattctgcaagtatatcagctgggtctaaaggtgtcttacatggtagtaaaacatacttgcttcaagataaatttggtcaaattaatgaaactcattctgtttcagcagggctcgactatccaggtgttggacccgaacattcttttctaaatgatattaatcgagtttcgtataagtcagttaatgacaaagaggctattaaggcattacaatatttttcagaaaaagaaggaattatacctgctctagaaactgcacatgcgctcgcatttgcattaaaagccgcaaaaaaaatgaaaaaatcccaatctattattgtgaacctttcaggtaggggcgataaagacttacagtctgtaagagattttttagataaggggaaaaaatgaa

SEQ ID NO: 281772 - DNA, 1201 bp, Unknown
  Bacterial polypeptide expressing nucleotide sequence isolated from the Sargasso Sea
tatgaaatctagtaatttacctgataaaaacggtttttttggagaatatgggggtaaatttgttccagaaacgcttatgtatgctctagatgagctagaaaaaacctataacaaactgaaagataacaatgaattcaaaaaacaattctataaagatctttctgaatttgtaggaagaccatcgcctttatattttgctgaaagattaactcaacattatggaactggatcgatctggttaaaaagagaagacttaaatcatacaggtgctcataaaatcaataatacaattggtcaaatattacttgccaaatatatgggcaagaaaagaattattgctgaaacaggtgctggacaacacggagtagcaacagccacagtcgcagctagacttggtttggagtgccatatttatatgggagctgaagacgtacaaagacagtccctaaatgtatatagaattaaattactaggagctcaagtgcactctgtagattcaggatcagcaactttaaaagatgctttaaatgaagctttgagagattgggtaacaaatgttgatgatacttattacataatcggaagcgttacaggacctcacccatatccaatgatagttagagactttaattcagttgtcggcgaagagctaattatgcaatcaaaagagttattcaattctatgccaaatgcaattgttgcttgtgtaggaggcggttcaaatgcaatgggagcattttatccttttatcaatgttgctgaaactagactaattggagtagaggcagcaggtaatggcataaatactggagaacatgctgcacctttaaatgatggaactccaggtgttcttcatggcgctttaagttatttaatgcaagacgattctggtcaagtaaaagcaacaaaatcagtttcagctggacttgattatccaggagtaggaccagaacactcatggctgaaggattctggaagagctgaatatgttgctgtagatgatgatgaggcattagatgcttttcatgaagtttctgagcttgaaggcataattccggcacttgaaacagctcatgcctttgcatatctaaaaattttaatgaaagaatttgataaaaaatctaatatcattgtaaatgtatcgggaagaggcgataaagatataaatacagttgctcaaatcgatggaattaagctttga

SEQ ID NO: 281773 - DNA, 799 bp, Unknown
  Bacterial polypeptide expressing nucleotide sequence isolated from the Sargasso Sea
ttgctcgatggagagtttccagatgaatcagggagatttggagttttcggagggcagtatgcacctgaaactttgatgccggcattaaaaaagttagagaagaatatcaaaatcttcctgaaagataagacatttcaagaggagttcgtgaaagagctaaacagttgggctggtcgtccaactgcactgacttatgcaaaacaactcagtaaaaggtggggcgttgaggtttttctcaagcgagaggatttgactcatacaggtgctcacaagatcaataacgcactcggtcaagcgatgcttgcaaagaaattgggcgtgaaaaggattgttgcagaaactggcgctggacaacacggcgttgcttccgcagctgcatgtgccagagtgggactaccttgtacagtttatatgggcgcaattgatatcgagcgacaggctccaaatgtcgaccgaatgaaacaattgggtaccgaagtgatttctgtaatgagcggagaccaaactttgagggctgccattgatgaggcgtttagggattgggtatcagaccctgaaaatacacactatataatcggctctgtagtaggcccgcatcccttcccattcttggttagggaaatgcagtccattataggaaaagaagcaagacaacagatgttaaatgttgaggaaagccttccggatgcagtttttgcttgcgtaggtgggggctcaaatgcaattggactctttcacgcttttctaggtgatagcgaagtagagctatttgggatagaggcaggagggacaagcgatg

SEQ ID NO: 281774 - DNA, 463 bp, Unknown
  Bacterial polypeptide expressing nucleotide sequence isolated from the Sargasso Sea
tttggatagtttagttaaaaaatataatatgcccgataagcatgggcattttgaagaatttggtggaaaatatgttcctgaaactcttattcctgcattggatgaattagagcaggaatatttaaagagtaaaaaagataaaaatttccaaaaagaattttttagtttgcttaaacattatggaggcagaccaactccattatatttagctaaaaatatttctgaagaactaggtttcaatgtatggcttaaaagggaagatctaaatcataccggtgcacataaaataaacaatgctcttggacaaattttattggcacatagaatgggaaagaaaagaatcatagctgaaacaggagcagggcaacatggtgtagctactgcagcagcagctgctaaatttggtttagaatgtattgtttacatgggtgaggaagatattgagcgccaaaagctaaatgtg

SEQ ID NO: 281775 - DNA, 889 bp, Unknown
  Bacterial polypeptide expressing nucleotide sequence isolated from the Sargasso Sea
ttgggcaaaaaaaggataattgctgaaacaggagcaggacagcacggagtcgcaactgcaacagttgcagcaaggcttggtcttgagtgccatatctatatgggagccaaagatgtagagaggcaatcacttaacgtttatagaatcaagttattgggagcagaagttcatgctgttgattctggtactgccacactcaaggatgccttaaatgaagccatgagagattgggtgactaatattgagaatacttattacatcattggcagtgttacgggaccacatccatatccgatgatagtaagagatttcaatgccattgttggaagagaactcagaaaacagtctattgaacaattttctcaatacccagatgcaattattgcttgcgttggcggtggatcaaatgcaatgggaattttctatccttttctagaggaatctaatgtcgaacttataggtgttgaggctgctggaagtggtttaaagagtggaaaacatgcagccccattaaatgatggagagccgggcattctccatggagcaaagagttatttgatgcaagatgagaatggccaggtaattgatactcactctgtttcagctggtttggattatcctggagttggacccgagcattcaaatatgaaagattctggaagggctaattatattgcagtagatgataaagaggtcctagattcattccacttagtaacaaagcttgaggggataatgccagctttggagaccgctcatgcatttgctgctcttgatcacatcgcaaaaaattatcaatctaatcaacatttagtaattaatgtttcgggaagaggggataaagatattaatacagtagctactatagatggaatatcccttgactaga

SEQ ID NO: 281776 - DNA, 1045 bp, Unknown
  Bacterial polypeptide expressing nucleotide sequence isolated from the Sargasso Sea
atgatgagcttactaattattgtgggaaggccaacccctatttatcatgcatccagaatcagtaaagagcttggatcatgtaatatttaccttaaacgtgaagatttgaatcatacgggagcacacaagatcaataacgctatgggacaagcaatgttagctaaggcaatgggcaaaacaagaattattgcggaaacaggtgctggtcaacatggtgttgcaacagccacagcttgtgctagatataatttaaagtgcgtggtttacatgggcaccgaagatatcgagagacaaaaggtaaatgtatacagaatgaaacttttaggagcggaggttgtaggagtagactcaggatcaaaaacactaaaagatgctcttaacgaagctctccgtgattgggtatcaaatgttgatgatactcattatattataggttctgttgctggacctcatccttatccaatgattgtacgcgattttcaatctataattggccatgaatctaaagctcaaatgaaaaaaataaaaaagaaggcagatattcttgttgcatgtgtgggcggtggatcaaatgcattgggattatttcatccatatttaaatgaaactgtagatatatatggtgttgaagcagggggttatggattaaatactggtaaacatgctgctccacttaataagggaaaacctggtgtattacatggaaatagaacatacattatggaagataaaaatggtcaaatccaagcaacacattctatatcagcaggactggattatcctggagttgggcctgagcattcatggttaaaagatagcaaaagagtgaactacgtatcagtaacagataaggaagcattaaaagcattttactatttgacagaaaaggagggaattattcccgctttagagacttctcatgctttagcttatgcattcaagttggctaaaacaaaaaagaataaaaatatacttataaatctttccggaagaggcgataaagatatcgatactgtagcctctttaaaaaggatgaaagtatgaa

SEQ ID NO: 281777 - DNA, 1222 bp, Unknown
  Bacterial polypeptide expressing nucleotide sequence isolated from the Sargasso Sea
aatgaaaaataaagatcaaaatctattaagggcattactcgatggtgagcttcctgatgaatcaggaaggtttggcagttttggaggtcaatatgcacccgaaactctaatgccggctttaaaaaagctagaaaaaaacatcaagatatttttgaatgacgaggcattccaagaagaattcataaatgagctgaacagttgggcaggtcgaccaactgcacttacgtatgcaagtcaattgagtaaaaggtggggagttgaggtttttcttaaaagggaagatttgactcacacaggcgctcacaagatcaacaatgcgcttggtcaagccatgcttgctaagaagttgggcgtgaaaaggattgttgcagaaactggcgctggtcaacacggtgtggcttcagccgcagcgtgtgcaagactgggtcttccatgcacagtttacatgggagcaatagatattgagcgacaagctccaaatgtagatcgcatgaagcaattgggcaccgaagtcatttctgtaatgagcggagatcaaaccttaagagcggccatcgatgaagcattcagggactgggtgtctgaccctgaaaatacacattatataattggttccgttgtgggccctcatccgttcccttatttggttagggaaatgcagtccatcataggcaaggaggcaagacaacaaatgttggatgttggggaaaatctccccgatgcagtgtttgcttgtgttggcggtggatcaaatgcaatcggattgtttcatgcttttctaggagataaagaagtggagctattcggaatagaggcagggggaacaagcgatgatttgggagagaatgccgcaacacttgcttcaggaaaaccagggatccttcatggaacttattccatgttattgcacgatgataatgggttaattcaagagacacattcagtttcagccggtcttgactatccaggtgttggtccggagcacgcattcttgcaatcgataaaccgagtaaaatatacatcggcaagagatgatgaagccttggaattattgagagaggtttgtgaacacgaaggaatattgcctgccattgaaagctctcatgcttttgttgaggcaagaaaatgggccagaggaaaccaaggaaagcgaatattaattggactttctggacgtggcgataaggacatgccaactctcagcaaattaatgaatgaatga

SEQ ID NO: 281778 - DNA, 793 bp, Unknown
  Bacterial polypeptide expressing nucleotide sequence isolated from the Sargasso Sea
atgacaagaatagatcagacctttaaaaagcttaaatctgagggcaaaaaagcttttgtttcatatattatggcaggagatcctgatttcgaaacatctttagaattggtaatgggacttccagctgctggtgttgacataatagagttaggtttgcccttcactgacccgatggcggatggcccaacaattcagttagccggtggtcgttcattagacagcggaatgacactggttaaaacactagaaatggcaaaaagattcagagaaaaagataatagcacgccgatcgtaataatgggctactacaacccaatttacagtttcggtgtagaacagtttttaatcgatgcaaaatctgcaggaattgatggacttatagttgtagatcttccaccagaagaggatgatgaactttgtataccggcacaggcagcaggcataaattttatccgactagcgacgccaactaccgatgagcatcggttaccaaaagttttgcaaaatacttcaggttttgtctattatgtgtcaattactgggataaccggagctgctgaggctcaggctatagatgttggtcctgaagtcgaacgaatacaaaaaaatagcggcttgccagtcgttgtcggctttggaataaacacaccagaaaaagctaaggcaattgccgaggttgctgacggcgcggtagttggatcggcgattgtatcggagctagccaagggcaaacctgtggctgacgttttagcattcgtcaaaacattagcagatggtgcgcattcagcttaac

SEQ ID NO: 281779 - DNA, 1183 bp, Unknown
  Bacterial polypeptide expressing nucleotide sequence isolated from the Sargasso Sea
gatgaaatatacagttgacaaaaaagggttttatgggaactatggaggtgcttttgtacctgaaatgctatttccaaaccttgacgaattagaaaaaaaatataaaaagattataaatgatattgatttccaagaagattataataatcttttaaaggactatgtaggaagaccaacaccattatattttgcagagagaatgtcagagaaatataaaagtaaaatataccttaaaagagaggacttgtgccatacaggagctcataaaataaataatactgttggtcaaattttactagctaaaagattaggaaagaaaagaattattgctgaaacaggtgctggtcaacatggagttgccactgcaactgtttgtgcattagcaggaattgaatgtgtaatatatatgggagctattgatataaaaagacaagctccaaatgttgctaggatgaaaatgctaggagcaagtgtagttgcagctgaatctggaagcaaaactcttaaggatgctacaaatgaggctatcagagattggataaataatcctgttacaactcactatatcattggatcagttgttggtcctcatccttatcctgatatggttgccaaatttcaatcaatagtttctaaagagataaagtctcaattaattgaaaaagaaggaactgatagcccagattatttaatagctaatattggagggggaagtaatgcagctggattatattatcattatttagaagacaagaaagtaaaaattatttcagttgaagcagctggtgaaggtgttgagtcaggtaaaagtgctgctacatcagttcttggtaaaactggaattattcatggaagtaaaactcttttaatgcaaaccaaggatgggcaaatagttgagccttactccatatcagctggtctagattatccaggtgttggtccacttcatgcacatttattgaaaagcaaaagagcagagtttatgtctataacagatagtgatgctatgctagcaggattagaagtttctaaactagaagggattattcctgcaatagaaactgctcatgcatttgcagcatttaagtatttagattttaaaccaaatgatataattgttgttaacttctctggaagaggagataaagacttaaatacttatattgattattttaatttataa

SEQ ID NO: 281780 - DNA, 1126 bp, Unknown
  Bacterial polypeptide expressing nucleotide sequence isolated from the Sargasso Sea
atgacaattaaaaattctttcaaaaaacttccagatgaaaaaggatattttggatcttttggtgggagatatgtctcagaaaccctgatgcctctaatactagaggtagaaaaagaatatgaaaaaataaagaatgaagataattttaaagaagaattaaaccattacatggaaacatatatagggaggcctagtcctttattttttgcagagagaattactaaagatttaggtggtccaaaaatttattttaaaagagatgaattaaatcatactggcgcacacaaaatcaataattgtatgggccaaatacttttagcaaaaaaaatgggcaaaaaaagaataattgctgaaactggtgctggtcaacatggagtagcaactgcaacagtatgtgcattatttgggttaccgtgcatagtttacatgggtgaaaaagatattaaaagacaatctccaaatgtttttagaatgaagttgttaggagctgaaataagaagtgttactacaggttcaaaatctttaaaagatgcaatgaatgaagcactacgtgattgggtaactaatgtgagagatactttttacattattggtactgctgcaggaccacatccttatccagctatggtaagagattttcaatcaataataggtgaggaagttagggaacaaattttaaaagctgaaaaaaaacttccagatttattaatggcatgtattggaggtggatcaaacgcactaggtttgtttcacgaatttcttgatgataaacaaattgaaatgattgcagtggaagcagctggtcacggtattaactcgggtaatcatgctgcaagcttaagtggtggtaagccaggagtccttcatggaaataaaacttatcttttgcaatcaaatgatggtcaaatagatgaagcccattctatttcagctggtctcgattatccagggattggacctgaacattcatatttatttgagcaaaaaagagttaaatatatgtctgcaactgataaagaagcaattgaggcatttcaatactgttgcaatttagaaggtattataccagcattagaaccatctcattgctcttgcagttttaaaaaaaatagcaaaaaattatagt

SEQ ID NO: 281781 - DNA, 742 bp, Unknown
  Bacterial polypeptide expressing nucleotide sequence isolated from the Sargasso Sea
atgtcaagtagaattagacaaacatttgaaaacaaaaagaagaagcttgttacttttactacaggcggtgatccggatttagacacaagtgttaaaattcttaatactataattaacaatggtatagatgtaatagagattggaatgccattttctgatccaatggcagacggaccaactattcaagagtcaagtgttagatctattgctagtggaaccaaaattaatgaagtttttaaaattgttaataaagttagaacaattaataatgaaattccaataatacttatggggtattacaattcaatatttaatatgggcatcaaaaactttacttcaaagtgtgctgatgccggtgttgatggactaattattgttgatcttcaaccagaagaagactcagagctttataaagaaactaaagataaaaatatcgatctgataagattaataacaccaacaactgatgaagctagacttaaaactattctgaatacagcatctggatttttatattatgttacaattactggtattacaggacaaaattcagcaaatatagaacatttaaaaaagtcagttctaaaaatcaaattatctactaagcttcctattgttgcagggtttggaattaaaaatagaaaagatgttgaggaaataagtgcttttacagatggagtagttgtaggctcaagtatagttaatattattaaaaacaacctcaacaataaaaataatatga

SEQ ID NO: 281782 - DNA, 532 bp, Unknown
  Bacterial polypeptide expressing nucleotide sequence isolated from the Sargasso Sea
atggcaaatgatctttttaatagttttatgaatggcccagatgataaaggccgttttggtaagtttggtgggaggtttgtttctgaaacattaatgccactcattcttgaacttgaaaatcagtatgaaaaagccaagaatgataaatccttttggaccgaaatgaacgatttgtggacaaactacgtagggcgacctagcccactttactttgcagaacgtctaacaaatcatctgggtggtgcaaaaatttactttaaacgggatgaattgaatcataccggagcacataaaattaataatgtactcggccagataattcttgctaaaagaatggaaaaaacgcgaataattgcagaaacaggagccggccaacatggagtagctacagccaccgtctgcgcaaagtttggattaaggtgtgttgtttatatggggtctcatgatgttgaaagacaagctccaaatgtctttcgtatgaagcttcttggtgctgaggtaatacctgttacatcagggcgaggcacttaaa

SEQ ID NO: 281783 - DNA, 1000 bp, Unknown
  Bacterial polypeptide expressing nucleotide sequence isolated from the Sargasso Sea
caaggacaccaagacccgcctctatctgaagcgtgaagacctgctgcacggcggcgcccacaagaccaaccaggtgctgggtcaggcgctgctggccaagcggatgggcaagaaagagatcatcgccgagaccggtgccggtcagcacggtgtggccactgcactggcctgcgccctgctcggcctcaagtgccgggtctatatgggtgccaaggattgcgagcgccagaaaccgaacgtatttcgcatgaagctgatgggcgccaccgtcattccggtgcactccggctccagtaccctgaaagatgcctgcaacgaggcgctgcgcgactgggccgccaactacgagtcggcccactacctgctcggcaccgccgccggcccacaccccttccccactatcgtgcgggagttccagaagatgatcggcgaagaggccaaggcccagtgcttcgagaaggaggagcgactgcccgatgcggtgatcgcctgcgtcggcggtgggtcgaacgccatcggcatgtttgccgactttatcgatgagccatcagtgcgtctcatcggcgtcgagccgggtggtcacggcatcgagagtggcgagcacggcgcgccgctgggtcacggcagcaagggagtcttctttggcatgcactcctacctgatgcaggacaatcaggggcaaattcaggagtcctactccgtctcggcggggctggatttcccctccgttggcccgcagcatgcccatctggccgccatcggccgcgccgagtacccctcggtgaccgacaaggaggcgctggacgccttccaggagctggccaaatccgaaggcatcatcccggcgctggagtcctcccacgcactggcccacgccctcaagatggcccgcagtgaaccggaaaaagaacaggtgctcatcgtcaacctctccggccgtggcgacaaagatatcttcaccgttgccgacatctttgaaaaagaaggaaccttgtcatga

SEQ ID NO: 281784 - DNA, 708 bp, Unknown
  Bacterial polypeptide expressing nucleotide sequence isolated from the Sargasso Sea
catgaaccgttacgcacaactcttctcccgtctggacgcggccaatcagggcgcctttgtgccgttcgtgatgctgggtgaccccacccccgaattatcactggccatcgtcgatgcgctggtcgcagggggcgccgatgccctcgagctcggcattcccttctccgatccggtggcggacggccccaccattcagggcgccgctctgcgggcctttgccagccacaccaccccggatgactgtttcgaactgctcggccgcatccgcgccaagtacccgcagctgcccattggcctcttggtctacgccaacctggtctatgtgcgcaaaatcgacggcttctacgagaagtgccagcaggcaggcgtggattcggtgctggtggccgacgtgccggtgcagatgtgcgaaccctacaaggcggccgccgacaagttcggtatcgacagcatctttatcgccccgcccaatggcgacgccgagaccctgaaacaggtggcggagctcggcaatggttacacctatctggtgagccgcgccggcgtcaccggcgccgagaccaaggccggcatgccggtggaggggctgatcaacacattgcgcgagttcaaggcgccccccgccctgctcggttttggcatcagcgaaccggctcaggtacgtgaagcgatcgccgctggcgccgccggtcctctccggctccgccg

SEQ ID NO: 281785 - DNA, 508 bp, Unknown
  Bacterial polypeptide expressing nucleotide sequence isolated from the Sargasso Sea
catgtttggtagtgaattaataacaaactctgtggaaaacccaaaacaaaaagggcccgccattgttccttttattactgcgggttatccagataaagatagttttttagatctaataacagcgttagctaaaacagctgatgttatagagattggtgttccattttctgatcctatggcagatggagtgacaatacagcgctcaagtcatgcagccattgaaagcggagtaaccctgaagtggattttggaagaattaaagaccttaaacaccaagacaccaattgtcttaatgagttatttgaacccattatacgtttatggctatgaccagcttgtacaagcttcactagaagcgggcgttgatggttttatcatccctgatctccccattgaggaaggcgaagagataagagaagtattcaatgaggctaagcttgctatgattcaattggttacaccagcaacaccggagaacagaataaacacaatagcaaaacacggcaca

SEQ ID NO: 281786 - DNA, 1222 bp, Unknown
  Bacterial polypeptide expressing nucleotide sequence isolated from the Sargasso Sea
atgcctgacagaattaaatattttcttgaagaaagtaaaatgccaaaaacttggtataatattgctgccgatcttccaaaaccgttatcgccagttcttcatccaggtactcttaaaccaattggaccagatgatttagctccactatttccaatggcacttattgggcaagaagtttcacaagatagagaaattgaaattccagaaccagttagagaaatttataaacaatggagaccttcaccattgtatagagcaagaaaactagaaaaggcattagatacaacagccaaaatttattataaatacgaaggtgttagtccaacaggaagccacaaaccaaacacagcagtagctcaagctttttttaataaagaagaaggtacaaaaaaaattacaactgaaaccggcgcaggtcagtggggaagctctctagcatttgcatgttcaatttttaaaatcgaacttgatgtttacatggttaaagttagttacgaacaaaaaccatatagaaaaatgattatgcaaacttttggtgcaaattgttatgctagtccatcaaatagaactccaacaggtaaagcaattttagaaaaagatccaaacaacactggaagtttaggtatagctatatctgaagcagttgaaatggctgcacaagacgatcatacaaaatattcacttggaagtgttttaaatcatgtattgatgcatcaaacgattgtgggaaatgaagcaataatgcaaatggaaatggccgatgattatccagatatattagttggatgcacaggtggaggaagtaatttttctggattagcttttcctttccttggaaaaaagtttagagaaaaaaaagatattaaagtaattgcctgcgaaccaaaatcttgtcctactttaactaaaggaaaatttgcatatgattttggagatacaggaatgcgtacgccattggttaaaatgcatactttaggatcttcatttatgccaccatcaacccattcaggtggtttaagataccatggcatggctcctttagtcagccatttaacagatttaggtgctattgaacctaaagcatttggtcaaaaagaatgttttgaagcaggagtaaaatttgcaaatgcagaaggtattgttccagcaccagaagctactcacgctgttaagggtgcaatagacgcagcacttgaatgtaaaaaaaatgagaaaagaaaac

SEQ ID NO: 281787 - DNA, 386 bp, Unknown
  Bacterial polypeptide expressing nucleotide sequence isolated from the Sargasso Sea
tatgaaaaaaaattcatacaaatcagggcctgatacagatggtaattttggtttatttggtggacgatatgttgctgaaacattaatgcctctaataattgaacttgagaaagcttattcagatgccttaagtgaccaagatttcagaaatgaaattaaacaattttctaaagattatattggaagggagagccccttatactttgctgagaggttaacaaattatcttaaaggagcaaaaatatatttcaaaagagatgagctaaatcatactggtagtcacaaaataaataattgcatagggcagatattattagcaaaaagaatgaggaaaaacagaatcatagctgagactggagctggacagcatggagttgctgtagcta

SEQ ID NO: 281788 - DNA, 1183 bp, Unknown
  Bacterial polypeptide expressing nucleotide sequence isolated from the Sargasso Sea
aatgaaatatacagttgacaaaaaagggttttatggaaactacggaggtgcttttgtgcctgagatgctttttcctaatcttgatgaattagagaaaaattataataagataatcggtgataaagattttcaaaatgattacaataatcttttaaaggactatgtcggtaggcctactcctctttattttgcagaaagaatgtcggagaagtataaatgtaaaatttatctcaaaagagaagacctatgtcatactggtgcacataaaattaacaataccattgggcaaatattacttgcaaaaagattaggaaaaaaaagaataattgctgaaactggtgctggtcagcatggtgtagctacagcaacagtttgcgcattggcaggaatagaatgtgttatatacatgggagctgttgacattaaaagacaggcacctaatgtagctagaatgaaaatgcttggcgcaagtgtagtttctgctgaatctggaagtaaaacccttaaagatgcaacaaatgaagcaataagagattggattaataatcctgttacaactcattatattatcggatcagtagttggtcctcatccatatcctgatatggttgctaaatttcaatctgttatttctacagaaataagatctcagttattagaaaaagaaggaactgaaagtccaaactacttaatagctaatattggaggtgggagtaatgcagctggattatattataattatttagaagatgagagtgtaaagattatatcagtggaagcagctggtaaaggagttgagtcaggaaaaagtgctgctacttcagttcttggaaaaataggtattattcatggaagtaagacactcttaatgcaaacaaatgatggccagataactgagccctactcaatttctgcaggattagattatccaggggttggaccactgcatgcacatttattggaaactaaaagggcagaatttatgtctattacagatgatgatgcaatgcttgcaggattggaaatctcaaagcttgagggtataatccctgctatagaaacagcacatgcttttgcagcattcaattatttagattttaaatctgatgacattatagtagttaatttctctggaagaggagataaagacttgaatacttacattgattattttaatttatga

SEQ ID NO: 281789 - DNA, 601 bp, Unknown
  Bacterial polypeptide expressing nucleotide sequence isolated from the Sargasso Sea
gatgaataggattgacaaaaaattaaaagaagaaggaaagttattatcaatatactttacagctggatatcctagtaaagatgatacagtggatattatttttaaactccaggaatccggtgttgatatgatagaaataggtcttcctttcagtgatccactagcagatggacctacaattcaagatagctccagtgaggcaattaaaaatggaatgaatacgaatgttttgtttaatcaattaaaaggaatcagaaataaagtctcaattccactaattataatgggatattttaatcctattcttcaatatggagtagaagacttttgtaaaaaatgtaatgaaattggaattgatggcctaattatacccgaccttcctatggattattatgaagaaaattataaatcaatatttaagaaatatgagatttataatatgttcttaatagcccctcagacttcagatgaaagaattaaaaagattgattctatatctgatggttttatttatatggttagctcctctagtataactggatcaaaggattcatttagccctgagcaaaatttaaaaaactcacggaatggttgctattaa

SEQ ID NO: 281790 - DNA, 844 bp, Unknown
  Bacterial polypeptide expressing nucleotide sequence isolated from the Sargasso Sea
agctggacaacatggagttgcaactgcaactgtctgtgctcttatgggagttaaatgtgttatttatatgggagaagtcgatataaaaagacaatctccaaatgttgctagaatgaaaatgttaggttcagaagttaaatctgcaaaatcaggaagtaaaactttaaaggatgcaacaaatgaagctataagggattggataaataatcctttagatactcattatattattggttctgttgttggtcctcatccatacccagatatggttgcaagatttcaatcagtaattagtgatgaaattaaaacacaacttttaaatgcagaaaatagagattatccagattatttaattgcatgtgtaggtggaggaagtaatgctgcaggtttatattataattatctagaaaataaaaatgtaaaaattattgcagttgaagcagctggaaaaggaattagcactggtgaaagtgcagcaacttcaatccttggaaaagaaggtattatacatggcagtaaaacccttctaatgcaaaataaggatggtcaaattacagaaccctattcaatttcagcgggattggattatcctggtattggtccaatgcatgctaatctttaccgatcaaaacgtgcagagtttgtgtctgtaacagatgatgaggctatgaattggggccttactttgtctcaaatggaaggtataatacctgcaattgaaactgcacatgcattttcagttttagatacaataaattttaaagcaagtgatataatagtttttaattgttctggaagaggtgataaggatttagatacctatattaattattttaaaatctga

SEQ ID NO: 281791 - DNA, 1198 bp, Unknown
  Bacterial polypeptide expressing nucleotide sequence isolated from the Sargasso Sea
atgaaagataacttaccagataaagatggattcttcggtgaatatggtggcaagtttgttccagaaactcttatgtatgccctcaatgaactagagcaaacttataaaactctaaaagataacaatgattttaatgcggagtttcacaaagatcttgcagaatttgtaggcagaccatctccattatactttgcaaaaaggcttacagagcattacagcaccgcttctatttggttaaaaagggaagatctaaatcatacgggtgctcacaaaataaataatacagttggacaaatccttttagctaaatatatggggaaaaaaagaattattgcggaaactggcgcaggtcaacatggagttgcaactgctacagttgcggcaaggcttggattagattgtcatatatacatgggatctgaggatgtacggagacaatcacttaatgtatatagaatgaagcttttaggtgctgaagtccatgaagtaaattctggttcagcaactcttaaggatgcactcaatgaggctttaagagactgggttactaatattgaagatacatactacatcataggcagtgttacaggacctcatccttatccgatgattgtaagagatttcaatgcagtcgtaggatatgagttaattgaacaatcacaagaatcatttggaagaatgccagattcaataattgcctgtgttggaggtggatcaaatgcaatgggtattttttatccttttattaaaatggataatgtagaactcattggtgtcgaggcagcaggcaaaggtattgaaacaggtgaacatgcagctccattaaatgatggtactcctggagtgcttcatggtgcaaaaagttatttgatgcaagatgaaagtggacaagtaaaaggaacggcttctatttcagcaggcttagattatccaggtgtaggacctgagcattcatggctaaaagatataaaaagagctaagtatgttgcagtttcagatgatgaggttatgaaagcttttcatatggtaaataaaatggaaggaatattgcctgcactagaaacagctcatgcatttgcttacctagatgagcttatgccaaaaatgaatgaagatcagcatatcgttatcaacgtatcaggaagaggcgacaaagacttaaatagcgtggttgaaatagagggtatcaagctttgaa

SEQ ID NO: 281792 - DNA, 1363 bp, Unknown
  Bacterial polypeptide expressing nucleotide sequence isolated from the Sargasso Sea
tatgtcagacagaattaaatattttcttgaagaaagcaaaatgccaaaaacttggtataatattgcagccgatcttccaaaacctctttcaccagttcttcatcctggcacacttaaaccaatcggaccagatgatttagctccactatttccaatggcgcttattggacaagaagtttcacaagatagagaaattgaaattccagaaccagttagagaaatttataaacaatggagaccttcaccattgtatagagcaagaaaattagaaaaggcattagatacaacagccaaaatttattataaatacgaaggtgttagtccaacaggaagtcacaaaccaaacacagccgtagctcaagctttttttaacaaagaagaaggtacaaaaaaaattacaactgaaacgggcgcaggtcagtggggaagctctctagcatttgcatgttcaatttttaaaatcgaacttgatgtttatatggttaaagttagctacgaacaaaaaccatatagaaaaatgattatgcaaacttttggagcaaattgttatgctagcccatcaaacagaacgccaacaggtaaagcaattttagaaaaagatccaaacaatactggaagcttaggtatagctatatccgaagcagttgaaatggctgcacaagacgatcatacaaaatattctcttggaagtgttttaaatcacgttttaatgcaccaaacaattgttggtaatgaagcaataatgcaaatggaaatggccgatgattatcctgatatattggttggatgtacaggaggaggaagtaatttttcaggattagtatttcctttccttggaaaaaaatttagagaaaaaaaagatgttaaagtaatagcttgtgaaccaaagtcttgtcctactttaaccaaaggtaagtttgcatatgattttggagacacaggaatgcgaacaccactagttaaaatgcatactttaggatctcaatttatgccaccatcaactcattcaggtggtttgagatatcatggtatggccccaatggtcagtcatttaactgatataggagctattgaaccaaaagcttttggacaaaaagagtgttttgaagcaggtgtaaaatttgcaaatgctgaaggtattgttccagcaccagaagcaacacacgcagttaagggagctatagatgctgctctcgaatgtaaaaaaaatggtgaaaagaaaactattcttttcaatttatgtggccacggacattttgatatgcaagcctatggtgattatttcaataataagctttcagatgacaaatataatgaggctgatgcaaataaagctttagaaaaactacctaaaattgcataa

SEQ ID NO: 281793 - DNA, 817 bp, Unknown
  Bacterial polypeptide expressing nucleotide sequence isolated from the Sargasso Sea
tatggctcaaaataaaaattcttatactcaatggccaaatgaaaaaggttattttggtgattttggaggtcgttatgtttctgagactttaatgcctttaattgaagaagtagaacaggaatataatagtgtcagaaacgatggtaaatttcaaaaagaatttgattattatttaaaaaattatgtaggaagaccaagcccacttttttttgcaaaaagaattactgaagatcttggaggagcaaaaatttattttaaaagagatgagttaaatcatactggtgctcacaaaataaataactgtatgggtcaaattttattagcaaagagaatgggtaaaaaaagaattattgctgaaactggtgcaggtcaacacggagttgctacagcaacggtttgtgctctgtttggcttaccatgtattatttatatgggagaaaaagatatagaaagacaatcaccaaatgtgtttagaatgaaactattaggggctgaaataaaaagtgtaagtaatggatctaaatcattaaaagacgccatgaatgaagctttgagagattgggttaccaatgttcaagatactttttatataataggtactgctgcaggacctcatccttatcctagcatggttcgtgattttcaatctgtaatcggaaaagaagtgagatctcaaattatagctcaagaaaataaattaccagatttattgattgcatgtatcggtggaggatcaaatgctcttggtttatttcatgattttttagatgataaagaaattaaaatgcttgctgtagaagcagcaggcctaggttta

SEQ ID NO: 281794 - DNA, 838 bp, Unknown
  Bacterial polypeptide expressing nucleotide sequence isolated from the Sargasso Sea
atgagcagcatttcaaaccaaactatccctcatcaagctggccgttatcacgccgcttttagccgtttaaaagccgaaggccgcggcgcctttgtgccctttgttactttgggtgatcctagtcctgagctgtcactgaaaattatcgacaccttagtgcaaaacggtgccgatgcgctggagttaggctttcccttctctgatccgctcgccgatggccccgtgatccaaggcgcaaatctcagagccttagccgcgggtacaacaccaacagcctgctttgaattgctggccaagatccgcgctaaataccctgaacttccaattgggttattgctgtatgcgaacctcgtattcgccaatggcatagatgctttttatgccaaagcgcagcaagcgggcgtggattcagtgttaattgccgatgtgccagttgaagaagccgcactatttattcaagcggccaaagcccatggcattgcgccaatttttattgcgccgcccaatgccgacagtgacacccttgcgaaggtcagccaaagtggtgaaggctatacctatctattgtcccgcgctggcgtaacaggtacagacactaaggcaggtacgcccgttgaagaaattttagctaagctgcaagcatttaatgcgccgccaccgctattaggctttgggattgcagagcctgctcaagtgagcgccgccattcaagcaggcgccgcgggtgcaatttctggctcggccgtggtgaaaattatcgaaacctatcaacaggatgaagtgaaactgctcgcagcattaggcgattttacccgcgcgatgaaagcggcaacctaat

SEQ ID NO: 281795 - DNA, 1192 bp, Unknown
  Bacterial polypeptide expressing nucleotide sequence isolated from the Sargasso Sea
atgtcacagttaaagcttaacccttatttcggcgaatacggtggtatgtatgtaccgcagattttagtccccgccctcaagcaacttgagggtgcttttgtcgacgcacaaaccgatgagtccttccaagccgagtttaccgacttactgaaaaactacgcgggtcgccccacagcgctcaccttaacccgaaatttaagccccaatcccatggttaaaatctacctcaagcgggaagatttactccacggcggcgcccataaaaccaaccaggtattaggccaagcgttactggctaagcgtatgggtaaaaaagaaatcattgccgaaacgggtgcaggccaacacggtgttgccaccgcccttgcctgtgcactgctgggattaaaatgcaaagtgtatatgggcgcgaaagacgttgcccgccaatcacctaacgtatttagaatgcggctgatgggcgccgaggttatccctgtaacctctggttctgccaccttaaaagacgcctgtaacgaggcgatgcgcgactggtctggtagctacgaaaaagcccactatctgctcggcacagctgctggaccacatccgttcccgaccatagtgcgtgaattccaacgtattattggtgaagaaaccaaaaaacaaatacttgagcgcgaaggtcgcctgcccgatgcggtcatcgcctgtgtcggcggcggctccaatgctatcgggatgtttgccgactttattgatgaagccaatgttgagctgattggcgtcgagcctgcgggtaaaggtattgatacccatatgcacggcgcgccgctaaaacatggtaaaaccgggattttctttggtatgaaagccccattgatgcaggacaacgaaggccaaatcgaagagtcttactcgatttcagcaggattagactttccctcggtcggcccacagcatgcccatttgaacgccatcggccgtgcccgctatgaatcggccaccgatgatgaagccctagaagccttccaattactggctcgcagcgaagggattattccggcgctcgaatcggcccacgccctagcctatgcaatgcgtctggcgaaagagtgcaccaaagagaccattttggttgtcaacctctcaggccgaggcgataaggatattttcactgtgtcagacattttaaacggtaaagaggaataac

SEQ ID NO: 281796 - DNA, 814 bp, Unknown
  Bacterial polypeptide expressing nucleotide sequence isolated from the Sargasso Sea
atgaaattagacaagaataatttaccagataaaaatggtttttttggagaatacggtggtaagtttgttccagagacactaatgtatgctttagaagagcttgaaaccacttacgaaaagttaaaaaataataacgaattcaaagagcagttttataaagatctttcagaatttgttggacgaccttcgccattatattttgctgagagattaacgaaacattatggcacaggttcaatatggttgaagagagaagatctcaaccatactggtgcacataaaataaacaataccattggtcaaatcttgcttgcaaaatacatgggcaagaaaagaattattgccgaaacaggtgcaggacaacatggtgttgcgactgcaactgttgctgctaggcttggtcttgaatgtcatatttatatgggttcagaagatgttcaaagacaatcattaaatgtgtatagaattaaactgcttggagcacaagttcattctgttgattctggatcagctacattaaaagatgcactgaatgaagccttaagggattgggtaacaaatgtagatgacacatactatattattggaagcgtcactgggcctcatccttatcctatgattgttagagattttaattctgttgttggtgaggaattgatttcacagtcaaaagagttatttgattcaatgcctgatgcaattgttgcatgtgttggtggtggatcaaatgcaatgggagctttttatccttttattaaatttaatgaaacaagacttataggtgttgaagctggtggggagggcgtagaaacag

SEQ ID NO: 281797 - DNA, 560 bp, Unknown
  Bacterial polypeptide expressing nucleotide sequence isolated from the Sargasso Sea
tagagaagttttagaacaaagtcagagtattatcggcaaggatcctgatatgttggtagcttgtgttggaggaggctctaatgcaatgggtttattttatccatttatcgacaaaaaaagcgttagattgataggagttgaagcaggtggattaggattgagtacaggaaaacatgctgctccactaaatgacggaaaggaaggagtgcttcatggtatgagaacttatctgatgcaggatgataaaggtcaagttatcgaaacacattctgtttcagcaggattagattacccaggagtaggacccgaacacgcatggctgaaagatattggaagagccgaatatgaagccgcagatgatgaggaggctctagacgcatttaaggaattaactagagtagaaggcataatgcctgctcttgaaacagctcatggaattgcttatgtaaaaaaagtagctccaacaatgagtaaagacaactctattgtagtaaatgtttctggtcgaggagataaagatataaatactgttgcttcgatagagggaatagaactttgag

SEQ ID NO: 281798 - DNA, 772 bp, Unknown
  Bacterial polypeptide expressing nucleotide sequence isolated from the Sargasso Sea
atgaaaacatataaacaacctagtactgttggaagatttggtgaatttggtggcatgtatgtttcagaaacattaatgcccctattattaaatttagataaatcgtataaaaaaattcaaaaggataaaaaatttaaaaaagagctaaatgatctttttaaaaactatgtgggcaggccctcctctttgcactacgctaaaaatttatctaaatatattaatggaccaaaagtatattttaaaagagatgagctaaatcacacaggagcccataaaatcaataattgcttaggacaaatactccttgcaaaaaaaatgggcaaaacaagaattattgctgaaacaggtgctggacaacacggagttgcaacagctactgtttgtgcgctttttggactaccttgttatatctacatgggctcaaaagatattgagaggcaaaaaccaaatgttttcagaatgaagcttctgggtgccaccattattcctgttgagtccggaagtaaatctttaaaagatgcgatgaatgaagctctaagagattggattaaaaacgtcagagatactttttatattattggttctactgcaggtcctcacccctatccaaaaatggtaagggattttcaatctgtaattggaaaagaggcgagaaagcaaatattaaaagtagaaaaaaaactaccagattatttgatagcttgcgttggaggaggatcaaatgccatgggtttattttatccatttttaaatgataaaaaggtaaagatta

SEQ ID NO: 281799 - DNA, 817 bp, Unknown
  Bacterial polypeptide expressing nucleotide sequence isolated from the Sargasso Sea
gatgaccgtggcctccggctcgactgcgatcacccgctgctttgaggggctcaagcagcgcggcagctgtgcgctgatgccgtttctcacggctggcgatcctgatctggccaccacctcagcggccctgatggccctgcaggccaatggtgctgatctggtggagctgggcatcccctacagcgatccgctggctgatggcccggtgatccaggccgctgccagccgcgccctcgatgggggcaccacccctggtgcggtgctggagatgctcgccgggctcaagggtcagctgacgatgccggtggtgctgttcacgtacagcaacccgttgctcaacgtgggcatggaggcgttctgtgccaatgccgctgctgctggggcagcgggtttggtggtgcccgatctgccgctcgaggaagctgaaaagctctcccccatcgctgctgcagcgggtttggatctggtgctgctggtggcacccaccacgccgtctgagcgcatggcccgcattgctgcggccagccgcggcttcacctacctggtgagtgtcacgggggtcacaggtgagcgggcccagatggaatcacgggtggcgggccttgttggccaactcaaggggttagggcccacgccggtggctgtgggctttgggatttccgggcccaagcaagccattgaggtgcgcaattggggcgctgatggcgccatcgtgggcagtgctctggtcaaacgcatggcccaggccaagggcgatggcgctgacccggtggccaccgccggcgccttctgcgccgagctgcgcagcgccctttga

SEQ ID NO: 281800 - DNA, 319 bp, Unknown
  Bacterial polypeptide expressing nucleotide sequence isolated from the Sargasso Sea
aatgaataaaggatattttggagattatggagggttatttatacctgaaacactatctcatgcacttaatgaacttgaaaagctttatacagaaattaaagacgatgaagattttaatttacagttaacaaacatctatagagattatgttggtagaccatcaccattatattttgctgaatcacttactaatcacattaatggaccaaaaatttggtttaaaagggaagatttaaatcatacgggagctcacaaaattaataacactgtaggccaagctctgttagctaaaatgctcggcaaaaaaagaattatgcgg

SEQ ID NO: 281801 - DNA, 1067 bp, Unknown
  Bacterial polypeptide expressing nucleotide sequence isolated from the Sargasso Sea
tttagatgagtttaattattatttaaaaacatatgttggtttaccaagtcctcttttctttgctgaaaggattagtaatgatcttggaggtccaaaaatttattttaaaagagatgaattaaatcatacaggtgcccataaaattaataattgcatgggacaaattttgttggcaaaaaaaatgggtaagtctagaataatagctgaaacaggagcaggacagcacggtgtcgcaacagcaacagtttgtgctctatttggtttaccatgcatagtttatatgggagaaaaggatatcgaaagacaatctccaaatgtgttcagaatgaaattactcggtgcagaaatacgatcagtttctactggatcaaaatcacttaaagatgctatgaatgaagcattacgagattgggtaacaaatgttaaagatactttttatataattgggactgctgcaggaccacatccttacccaactatggttagaaattttcaatctataattggtaaagaagttcgcaaacaacttgaagaactagaaggaaaagtcccagatttattaatggcatgtattggcggtggttcaaatgctttaggtttgtttcatgaatttttagatgactcaaatgttgaaatgattgctgttgaagcagcagggcatgggataaaaactgataagcatgcagcaagtttaacaggtggtaagccaggtgtgttgcatggaaataaaacatatttattacaatcaaaatctgggcagattcaggaagcacattccatttctgcaggcttagattatccaggaattggaccggaacattcatttttatttgaagaaaaaagagttacatacatgtcggcaacagacaaagaagcgctggaggcctttcaatattgttgtaaattagaaggcataattccagctttagaaccagcgcatgcattagctgcattaaagaaaatagctaaaaactatagtaaagataaaattattgtcatgaacatgtgtggccgaggagataaagatatttttacaatagccgatgaattaaacataaatatttaaa

SEQ ID NO: 281802 - DNA, 520 bp, Unknown
  Bacterial polypeptide expressing nucleotide sequence isolated from the Sargasso Sea
atgccagatgcgattgttgcttgtgttggaggtggctctaatgcaatgggagctttttatccatttatttctatgaatgaaacaagacttattggtgttgaagctggtggtgagggtgttgaaactggtgaacatgcagcaccattaaatgatggtattccaggagtattgcatggagcactaagctatctaatgcaggacgaaaaaggtcaggtaaaagaaacaaaatctgtgtctgctggcctagattatcctggtgttggacctgaacattcctggcttaaagattcaggaagagctgaatatgttgcagttagcgatgatgaagctttaaaagcatttcacgaagtatcagaattagagggaataattcctgctcttgaaacagctcatgcttttgcctatcttgatattttgatgaaagaatatgattcatctgcaaacataattgttaatctgtctggaaggggtgacaaggacattaatactgttgctgagatagatggaattaaactttgaa

SEQ ID NO: 281803 - DNA, 394 bp, Unknown
  Bacterial polypeptide expressing nucleotide sequence isolated from the Sargasso Sea
aaaaacaataaagaaataggcagtgcatcaataacggatggttctattggagtattacacggagcaaaaacaaaaatacttcaatcatcaacaggcgaaattaaagaaacaacttctatctctgctggcttagattatccgggagttggacctgaacatgcatatttagcagatataaaaagggcagaatatgtaaaaatttatgataaagaagccttagaagcattttataaagtatcaagactagagggtattatacctgcacttgaaactgctcactctcttgcttatctggaaaaaataaaagatttaggaaaaacattaaacgttgtagtaaacatgtcaggtcgtggagataaagatttatattcggtaatgaacaatgatagttgat

SEQ ID NO: 281804 - DNA, 825 bp, Unknown
  Bacterial polypeptide expressing nucleotide sequence isolated from the Sargasso Sea
aatgaaccagttagatacaaaatttggtgaatttggtggcatgtacgtgcccgagctacttattccagcactagaccaactggaaaaagcatttttggatgccaaggacgacccgacatttaacgaagagtttttatctctgttaaaagactacgccggtcgcccaacatcaatgacgttaactcgcaatctagtaagtaacccaaaggtaaaattatacctaaagcgtgaagacttgctacacggtggcgcacacaaaactaaccaggtgttgggccaagcgctacttaccaaacgcatgggtaaaaaagaggtgatcgccgaaactggcgcaggccaacatggtgttgcaaccgcgttagcatgtgcattgttggggctaaaagcacgtatttatatgggtgcgaaagacgttgagcgtcaagcaccaaacgtgttccgtatgaagcttatgggcgcagaggttattcctgtaaatgccggttctggtacgcttaaagatgccgtaaacgaagccatgcgcgactggtcggcaaactatgataaagcgcactatttgttaggcacagccgcgggcccacacccgttcccgactattgttcgtgaatatcaccgtatgattggtgaagaaactcgtgcacaaattatggaaaaagaaggtcgcttacctgacgccgtagtagcatgtgtgggcggaggctcaaatgctatcggtatgtttgcagactttattgatgagccatctgtacgcctagttggcgttgagcctgcaggtaaaggtgtgcacaccaaagagcacggcgcaactatcgtgacgggtacaaa

SEQ ID NO: 281805 - DNA, 306 bp, Unknown
  Bacterial polypeptide expressing nucleotide sequence isolated from the Sargasso Sea
gtcaagtacaagaagctcactcaataagtgcaggtttagattaccctggagtaggacctgaacatagccatttaaaagatataggtagagcagaatatggatcagtcacagatcaagaagctttagaggctttaaaacttgttagtgagctagaaggaattatacctgcacttgaaacttcccatgcctttgcttggttagataaattatgccctactcttgaaaaagatactcatatagttatcaattgctctggtagaggtgacaaagatgttaatacagttgcatcttcattagatatttaat

SEQ ID NO: 281806 - DNA, 589 bp, Unknown
  Bacterial polypeptide expressing nucleotide sequence isolated from the Sargasso Sea
ccaaagattgtgagagattttcatgcagttatcggagaagaaactaaaaaacaatgcttcgaaacatttgggtctttgcctgatattttacttgcatgtgtaggtgggggatcaaatgcaatgggtctttttcatcctttcgtcaaagaaacatctgtacgacttattggtgttgaagctgcaggaagcggagttgacactaacaaacatgctgcaacaattactaaagggtcagttggaattctgcatggatcaatgagtcttcttttacaagatgataatggtcaagtacaagaagcccattcaataagtgcaggtttagattacccaggagtaggtcctgaacatagccatttaaaagatataggtagagcagaatatggatcagttacagatcaagaagctttagatgctttaagacttgttagtgaacttgaaggaataataccagcacttgaaacttcccatgcctttgcttggttggataaattatgccctactcttgaaaaagatactcatattgttatcaattgctctggaagaggtgacaaagatgttaatactgtcgcatcttcattaaaaatttaat

SEQ ID NO: 281807 - DNA, 1050 bp, Unknown
  Bacterial polypeptide expressing nucleotide sequence isolated from the Sargasso Sea
tatggaatctaaaaataatttacctgataaaaatggtttctttggtgaatacgggggtaaattcgtccctgagactcttatgtatgctcttgatgagctagagaatacttataataaattgaaagacagtaatgagtttaaaaaacaattttataaagacctatcagagtttgtaggtagaccatctccactctattttgcagaaagattaaccaaacattacggaaccggatctatttggttgaaaagggaagaccttaatcatacgggtgctcataaaataaataacacaattgggcaaattcttcttgcaaaatatatgggaaaaaaaagaataattgctgaaactggagcaggccaacatggtgtagcaacagcaacagttgcagcaagacttggtcttgagtgccatatatatatgggtgcagaagatgttcaaagacagtccttaaatgtataccgaattaagcttcttggtgctaaagttcattctgtagattctggatctgcaacgctgaaagatgcattgaatgaggctttaagagactgggtaacgaatgtagatgatacttattatattattggaagtgtaactggaccacatccttatcctatgattgttcgagatttcaattctgtggttggcgaagagcttatagaccaatctaaagaattatttaataacatgcctgatgccatagttgcatgtgttggtggaggctcaaatgctatgggagctttttatccatttattaatatcaatcaaacaagattgattggagtggaggctgcgggtaacggccttaagactggtgagcatgcagctcctttaaatgatggttcaccaggagttcttcatggagctttaagttatcttatgcaggacgaagctggtcaagttaaagcaactaagtctgtttccgctggattagattatcctggcgttggtcctgagcattcatggttaaaggattctggtagggctgaatatgtagcagttgatgatgacgaagctttagaagcctttcatcaagtatcagagttagaagg

SEQ ID NO: 281808 - DNA, 568 bp, Unknown
  Bacterial polypeptide expressing nucleotide sequence isolated from the Sargasso Sea
gatgcagtccatcataggaaaagaagctagacaacagatgttaaatgttgaagaaagccttccggatgcagtttttgcttgcgtaggtggaggttcaaatgcaatcggactcttccatgcttttctcggcgatcgcgaagtagaactatttggaatagaggcaggagggacaagcgatgacttgggagaaaatgcagcgacacttgcttctggaaaaccaggtattctccaaggaacttattccatgttattacatgataatgatggcttgattcaggagacacactcagtttcagctgggcttgactatcccggcgttggtccagagcatgcattcttacaatcgataaaccgagtacaatactcatctgctagggatgatgaggctttggaattattgaaagaggtttgtgaatatgaaggcattttgcctgctttagaaagttcccatgcttttgttgaggcaaaaaaatgggccaaagaaaataaaggaaaacggattttaatcgggctttctggaagaggcgacaaggatatgcccacgctcagtaaactaatgcatgaataa

SEQ ID NO: 281809 - DNA, 802 bp, Unknown
  Bacterial polypeptide expressing nucleotide sequence isolated from the Sargasso Sea
attgcttgatggcgagcttcctgacgaatcaggaaggtttggcagttttggaggtcaatacgcacctgaaacactaatgccggctttaaaaaagctagaaaaaaacatcaagatatttttgaaggacgaggcatttcaagaagaattcataaatgagctgaacagttgggcaggtcgaccaactgcacttacttatgcaagccagttgagtaaaaggtggggagttgaggtttttcttaaaagagaagatttgactcacacaggtgctcacaagatcaacaacgcgcttggccaagcaatgcttgcaaagaagctgggcgtgaaaaggattgttgcagaaactggcgctggtcaacacggggtggcttcagcagcagcttgtgcaagactgggtcttccatgcacagtttacatgggagcaatagatattgagcgacaagctccaaatgtagatcgcatgaagcaattgggcaccgaagtcatttctgtaatgagtggagatcaaaccttgagagcagccatcgatgaagcattcagggactgggtgtctgaccctgaaaatacacattatataattggttccgttgtcggccctcatccattcccttatttggttagggaaatgcagtccatcataggcaaggaggcaagacaacaaatgttggatgttgagggaaaatctccccgatgcagtgtttgcttgtgttggtggcggatcaaatgcaatcggtttgtttcatgcttttctaggagatatcgaagtagagctattcgggatagaggcagggggaacaagcgatga

SEQ ID NO: 281810 - DNA, 1078 bp, Unknown
  Bacterial polypeptide expressing nucleotide sequence isolated from the Sargasso Sea
gataaagatttcttaaaagaatttagaaatgatttatctcattatgtaggaagaccttctccactttattatgcaaaacgttggactcagctcttgggaggggcaaaaatttatcttaaacgagaagatttaaatcatacaggagctcataaaatcaacaataccgttggccaaatccttctagcaaagcacatgggaaagaaaagaattattgctgaaacaggcgccggacaacatggggttgcaagtgcaacagtagcggcacgtcatggcttggaatgtattgtttacatgggagaagaagatatacaaagacaatcattaaatgtatttagaatgaaacttttaggtgccgaggttgttggggtaacttctggaactaggacgttaaaggatgcaatgaatgaagctatgcgtgattgggtaacaaatgtagatgatacttattatattattggaagtgttgctggtccgcatccttatcctgaaattgtaagagattttaatgccgttgttggcgaagaagtaattgagcaaagcaaaaatgaaattggtaaaaatcctgatgtattaattgcttgcgtaggaggaggttcaaacgctttgggtcttttttatccttttataaagtctaaggaagtgaggctaataggtgtagaggctggaggactaggtttgagcacaggaaaacatgcagcccctttaaacgatggaaaagagggtgttttacatggaatgagaacctatttgatgcaagatgatgcaggtcagatcttagagactcattctgtatcagcaggtttagactatccaggagtcggtcccgaacactcttggttaaaagatacaggaagagcagaatatgtagtagcagatgatgaagaagctttagatgcatttaaagaacttacaaaaatagaaggcattatgcctgctttggaaactgctcatggattagcatatgtaaaaaaactcgctcctacaatgaagccggatcaaacgattgtagtcaatgtttccggaagaggagataaagatataaatactgttgcctccatagaaggaatagaactttagt

SEQ ID NO: 281811 - DNA, 1056 bp, Unknown
  Bacterial polypeptide expressing nucleotide sequence isolated from the Sargasso Sea
ttcagaaagattataataaccttttaaaggactatgtaggaagaccaactccattatattttgcagaaagaatgtctgagaaatataaatgtaaaatatactttaaaagagaggacttgtgccatacaggagctcataagataaataataccgttggtcaaattttactagcaaaaagattaggaaagaaaagaattattgctgaaaccggtgctggtcaacatggagttgccacggctactgtttgtgcattagcaggaattgaatgtgtaatatatatgggagctattgatattaaaagacaagctcctaatgttgctagaatgaaaatgctaggagcaagtgtagttgcagctgaatctgggagcaaaactcttaaggatgctactaatgaggctattagagattggataaataatcctattacaacgcactacattattggatcagttgttggtcctcatccttatcctgatatggttgctaaatttcaatcaatagtttctaaagagataaagtctcagttaattgaaaaagaaggaactgatagtccagattatctaatagctaatattggaggtggaagtaatgctgctggattatattatcattatttagaagacgagaaagtaaaaattatttcagttgaagcagctggtgaaggtgttgagtctggaaaaagtgctgctacatcagttcttggtaaaactggaattattcatggaagtaaaactcttttaatgcaaactaaggatggtcaaatagttgagccctactccatatctgctggtttagattatccaggcgttggtccacttcatgcacatttattagaaagcaaaagagcagagtttatgtcgataacagatagtgatgctatgctagcaggattagaagtctctaaactagaagggattattcctgcaatagaaactgctcatgcatttgctgcatttaagtatttagattttaaaccaaatgatataattgttgttaacttctctggaagaggagataaagacttaaatacttacattgattattttaaattataat

SEQ ID NO: 281812 - DNA, 763 bp, Unknown
  Bacterial polypeptide expressing nucleotide sequence isolated from the Sargasso Sea
atgaatagaattgacaaaaaattaaaagaagaaggcaaactgttgtcaatatattttacagcaggatatcctagtttagatgatacagttgatattatttttaagcttcaggaatctggtgttgatatgatagagataggactaccttttagtgatccacttgctgatgggcctacaattcaagatagctcttcaaaggcaattaaaaatggaatgaacaccaatgtcttatttgatcaactaaaaggaattagagataaaatttcaattcctctaataataatgggatattttaaccctatccttcagtatggtgtagaaaacttttgcaaaaaatgtaatgaaattggaattgatggattaatcattcctgatttaccaattgactattatgaagcaaactataaatcaatatttgaagaaaatcatctttacaacatgtttttaatagctccacagacttcagatgaaagaattgaaaagattgactctatatctaatggttttatctatatggtaagctcttctagtattactggatcaaaaaattcttttagccccgagcaaataaattattttgaaagaattgaaaaaatgaatctaaaaactcccagaataattggttttggagttggaaacaatcagacatttaatactgtcgtaaaatattcaaagggagcgataattggatctgcattcataaagaatctacatgagcatggagttgattcaattgcttcatatataggttcaatcagataaa

SEQ ID NO: 281813 - DNA, 838 bp, Unknown
  Bacterial polypeptide expressing nucleotide sequence isolated from the Sargasso Sea
atgagcaacactgcaacccaaactatccctcaccaaggcggccgttatcacgcagcgtttagccgtttaaaagccgaaggccgcggcgcctttgtgccctttgtcactttgggcgatccaagccctgagctgtcgctgaaaattatcgataccttagtgcaaaatggtgccgatgctctggaattaggttttcccttctccgatccgctggccgatggcccagtgatccaaggcgcgaacctcagagccctcgctgcgggtacaacgcccacacagtgcttcagcctattagcgcaaattcgcgccaaatacccagagctgccgattggattattgctgtacgcgaacctcgtatttgctaatgggatcgatgctttttatgccaaagcgcagcaagcgggagtggactctgtgcttatcgccgatgtgccagtggaagaagcggcgccatttattcaagccgctaaggcccatggtatcgcgccgatttttatcgcgccgcccaatgccgatagcgaaacccttgaaaaagtgagccaaagtggcgaaggctatacctatctattgtcccgtgccggtgtgacaggcacagacactaaggcgggtacgcccgttgaagatattttagctaagctgcaagcattcaatgcgccgccaccgctattaggctttgggattgccgagcctgctcaagtgagcgccgccatcaaggcgggcgccgcgggcgcaatttcgggctcggccgtggttaaaattatcgaagctcatcaacaggataaagctaagttactgtctaccttaggtgaatttacccgcgccatgaaagcggcaacctaat

SEQ ID NO: 281814 - DNA, 1192 bp, Unknown
  Bacterial polypeptide expressing nucleotide sequence isolated from the Sargasso Sea
atgtcacagttaaagcttaacccttatttcggcgaatacggcggtatgtatgtgccgcagattttagtccccgccctcaagcaactcgaaaacgcctttgtcgaagcgcaggccgatgaatcctttcaagccgagtttaccgacctactgaaaaactacgccggccgcccaacggcactgaccttaacccgtaatttaagccctaaccctatggtgaaaatctacctcaaacgggaagatttactccacggcggcgcccataaaaccaaccaggtattgggccaagcattattggctaaacgtatgggtaaaaaggagattattgccgaaaccggcgcaggccaacacggtgttgccaccgcccttgcctgtgcgctgctgggattaaaatgcaaagtgtatatgggcgcgaaagacgttgcccgtcaatcacctaacgtatttagaatgcgtttgatgggcgcagaagtcattcctgtcacctcgggctctgccaccttaaaagatgcctgtaacgaggctatgcgcgactggtccggcagctacgaaaaagcccactatctattaggcacagccgcagggccacaccctttcccgaccatagtgcgtgagttccaacgtatgatcggtgaagaaaccaagaagcaaatgctggagcgcgaaggtcgtctgcccgatgcggtgatcgcctgtgtcggcggtggttcgaatgccattggtatgtttgccgactttattgaggaaaccagcgtcgagctaattggggtcgaacccgcaggtaaaggcatcgatacccatatgcacggcgcgccgctcaaacatggcaaaactgggattttctttggtatgaaggcgcccctgatgcaggacagcgaaggtcaaatcgaagagtcttactcgatttcggcaggccttgacttcccctccgttggcccacagcacgcccatttgaacgcgattggccgtgcgcgctacgaatcagccaccgatgatgaggccttagaagccttccaattattggctcgcagcgaagggattatccccgcgctcgaatcggcccatgccctcgcttacgccctgcgcctagcgaaagggtgcaccaaagaaaccattttggtcgttaacctctcgggccgaggcgataaggatattttcactgtgtcagacattttaaacggtaaagaggaataac

SEQ ID NO: 281815 - DNA, 817 bp, Unknown
  Bacterial polypeptide expressing nucleotide sequence isolated from the Sargasso Sea
atgtcccgtattcagcagaccttcgccgcgctcgccgaacaaggccgtaagggcctgatcccgttcatcacggccggcgatcccgaccccgcgaaaaccgtcgaattcatgcacgcgctcgccgaaggcggcgcagacgtgatcgaactcggcgtgccgttctcggacccgatggccgacggccccgtgatccagcgctcgtcggaacgcgcgctcgcacgcggcgtcacgctcaagagcgtgctcgccgacgtgaagcgctttcgcgaaaccgaccccaaaactcccgtcgtgctgatgggctatgcgaacccgatcgagcggatgggcgtcgacacgttcgcggccgaagcacaggcggccggggtggacggcgtgctggtggtcgactatccgccggaagaggcgggcgtgttcgccgagaaaatgcgcgctgcgcagatcgatccgatcttcctgctcgcgcccacgtcgaccgacgaacgcatcgccgacgtcggcaagatcgcgagcggctacgtgtattacgtgtcgctcaagggcgtgaccggcgcaggaaatctggatgtttcgagcattgcgggtaaaatcccggccatcaagtcgcgcgtgccggttccggtgggcgtcggcttcggtatccgcgacgccgaaacggcgcgcgcggtggccgaggtgtcggacgccgtcgtgatcggcagccgcctcgtgcagttgctcgaaaccgctgcgccggaaggcgccgcggccgcgctgaagactttcatcgccgagctgcgtgccgccctggacggcgcgggcaagacggcgcgataaa

SEQ ID NO: 281816 - DNA, 865 bp, Unknown
  Bacterial polypeptide expressing nucleotide sequence isolated from the Sargasso Sea
gggtaaaaaaagaataattgcagagacaggggcaggacagcacggagttgcaacagcaatggcatgtgcaagtcttggattaaaagctgaaatttacatgggatatgtagatacaattcgtcaaaaacagaatgttttccgaatggagttacttggagccaaagttcatgcagtaaaatcaggatcaaagactctcaaagatgcaattaatgaagcaatgagagattggattacaaatgtggattcaacatattacttactaggttctgcagtaggaccgcatccatatccattaatggtgagagatttccaagcagtgattggaaccgagataaaaaaacaaatgaaaaaaattcccaatgcagttattgcatgtgtaggaggaggttctaatgccattggaacattttatccattaattgatactaaaactagaattataggaattgaggcaggaggaaaaggtgttaagacaaaattacattctgcaccactttctgcagggaaaaaaggcgtgttacatggaatgatgacatatcttatgcaagacaaagatggacagattagcgagacacatagtatttctgcaggattagattatccgggggttggacctgaacatgcatacctaaaagatgaaaacagagtagaatacaaggcagtaactgatgatgaagtaattgacgcatttttaattttaacacgtacagaaggaattattcctgcactagaatctgcacatgcaatagctcatgcaataaaaatctcaaagaaaatgaaaaaaacagaatctattgttgtaacattgtcaggtagaggagacaaagatatcgatatcgttaaggaatatttatcaaaacaatga

SEQ ID NO: 281817 - DNA, 1030 bp, Unknown
  Bacterial polypeptide expressing nucleotide sequence isolated from the Sargasso Sea
atgtataacttgcctgacgaaagaggccatttcggcccatatggcggcgtgttcgttgccgaaacactggttcatgcactcaacgaactgcgtgccgcatatgagaaatatcagaaagacccggaattcgtcgctgaatacgaacgcgaactgaagcatttcgtaggtcgtccgtcgccgatttatcacgcgcaacgctggagcgaaatgctcggcggcgcgcagattttcctcaagcgggaagatctgaatcacaccggcgcgcacaagatcaacaacgtgatcggccaggcgctgctcgcaaagcgcatgggcaaaccgcgcgtgatcgcggaaaccggcgcgggccaacacggtgtggcgactgcgaccatcgcggcgcgcttcggcatggaatgcgtggtctacatgggcgaggaagacgtgcgccgccaggccgccaacgtctatcggatgaagctgctcggcgcgagcgtcgtgcccgtgcagtcgggctcgcgcacgctgaaggacgcgctcaatgaagcgatgcgcgactgggtgaccaacgtcgaaaacaccttctacatcatcggcacagtggcgggaccgcacccgtatccgatgatggtgcgcgacttccagcgtgtgatcggcgacgagtgcaaggtgcagatgcccgaactggtgggccgtcaaccggatgctgtaattgcgtgcgttggcggtggttcgaatgcaatgggtatcttttacccgtacattgacgacacttctgttcagttgattggcgttgagcccgccggtgacgggatcgaaaccggccgtcacgcggcctcgctgatcggcggcagtccgggtgtgctgcatggcaaccgcacttatcttctgcaagacgagaacgggcagatcatcgagacgcattcgatctcggccggtctggattatccgggcgtcggtcctgagcatgcatggctaaaagacagcaagcgcgcgcaatatgtcagcatcaccgaagaagaggcgcttaagggcttccacgattgctgcc

SEQ ID NO: 281818 - DNA, 389 bp, Unknown
  Bacterial polypeptide expressing nucleotide sequence isolated from the Sargasso Sea
gcatgctgccccattaaatgatggaacacctggagtacttcatggtgcaaaaagttatttaatgcaagatgaaaatggtcaagttaagggaactgcttcaatctcagcaggtttagactatccaggagtaggacctgaacattcatggttaaaagatattaaaagagctaaatatgttgcagtttctgatgacgaagttatgaaagcctttcatatggttaatagaatggaaggaatattgccggctcttgaaacagcccatgcatttgcttatcttgatgagctgatgccacaaatgagtaaagaacagcatattgttattaatgtctcagggagaggtgataaggatttaaatagcgttgttgaaatagaaggtatcaagctttgaa

SEQ ID NO: 281819 - DNA, 1143 bp, Unknown
  Bacterial polypeptide expressing nucleotide sequence isolated from the Sargasso Sea
aatgaataaagaaacaaaaaaactatataaaccttcatcaaatggaagatttggtaaatttggaggtaaatttgtccctgaaacactaatgtcttcattaaaagaaattgaaaatgcttttgatgaaatatctaaagatcaatctttttgggatgaattaattcttcttcaaaaggattttgttggtcgaccaacaccaatctattttgctaaaaatttatctcaaaaattgaatcaaaacatttggataaaaagagaagacctggcacatacaggagcgcataaaattaataatgcattaggacaaggacttcttgctaaaaaattaggaaagaagagaataattgctgaaacaggagcaggtcaacatggagtggcaacagcaacagtatgtgctatgctcaatctggaatgcatagtttacatgggagaagaggatataaagagacaatctccaaatgtatatagaatggaaatgttaggtgctaaagttgagtcagtaaaatctggatcaaggaccttgaaagatgctgtaaatgaagcaataagagattgggttacaaatgtagaaaattcctactatattattggaagcgcggttggtcctcatccatacccttatatagtacgagaatttcaatctgttttaggagtagagtcaagaagccagatattagaaaaaacaggcaatcttccagattatgtagttgcttgtgttggaggaggctctaacgcgataggaattttttcaggatttatggatgatacttctgtagaattaataggagtagaggctagtggcgaaggtgttgaaacaaagaaacatgctgctactatgactaaagggtctccaggaatacttcatggttcgttaagctatgtacttcaagatgaatatggtcaaattcaagaggctcattctatatctgctggtttagattatcctggtgtagggcctgaacactcctatcttaaagacatagaaagggctaaatatttttcagcaactgatgaaatggctcttgaaggtttcaaattattatctgtagaagaaggaattattccagcattagaacctgcccatgctttaggtttcttattagattggtctaaagaaattcagcctaaatcaaatattctttt

SEQ ID NO: 281820 - DNA, 682 bp, Unknown
  Bacterial polypeptide expressing nucleotide sequence isolated from the Sargasso Sea
atgagttcaaaaacaagcaatttgcctgatcaaaatgggttttatggaaaatatggtggtaaatttgtgccagagactttgatgtatgcattagagcaactagaagaaacctataacaacttgaaagacaataaagactttagaaaacagttttataaagatttatctgaatttgtaggaagaccatctccactttattttgcagaaagacttacacagcactatggtactggttcaatatggcttaaaagagaagacttaaatcatacaggcgcgcacaaaattaataatactattggccaaattcttttagctaaacatatgggcaaaaaaagaatcattgctgaaactggtgccggtcagcatggagtagctactgcaacagtggcagcacgacttggtcttgaatgccatatatacatgggtgctgaagatgttataagacaatcattgaatgtatatagaattaagttattgggggctcaagttcattcagttgactctggttctgcaacattaaaagatgctctaaatgaggctttaagagattgggtgacaaatgtagatgatacttactatattattggaagtgttacaggaccccatccatacccaatgatagttagagactttaattcagtagtaggagaagaattaattgaacaatcaaaagaactattta

SEQ ID NO: 281821 - DNA, 1207 bp, Unknown
  Bacterial polypeptide expressing nucleotide sequence isolated from the Sargasso Sea
tatgagttcaaaaacaagtaatttgcctgatcaaaatgggttttatggaaaatatggtggtaaatttgtgccagagactttgatgtatgcattagagcaacttgaagatacctataaaaacttgaaagataataaagactttagaaaacagttttataaagatttatctgaatttgtaggaagaccatctccactttattttgcagaaagacttacacagcactatggtactggttcaatatggcttaaaagagaagacttaaatcatacaggcgcgcacaaaattaataatactattggccaaattcttttagctaaacatatgggcaaaaaaagaatcattgctgaaactggtgccggtcagcatggagtagctactgcaacagtggcagcacgacttggtcttgaatgccatatatacatgggtgctgaagatgttataagacaatcattgaatgtgtatagaattaagttattgggggctcaagttcattcagttgactctggttctgcaacattaaaagatgctctaaatgaggctttaagagattgggtgacaaatgtagatgatacttactatattattggaagtgttacaggaccccacccatacccaatgatagttagagactttaattcagttgtaggagaagaattaattgaacaatcaaaagaactatttaatgcaatgccagatgctattgtggcatgcgtaggtggaggctctaatgcaatgggcgctttttatccttttataaacataaatcaaactagattaattggtgttgaggctggtggagaaggtgtagaaactggtgaacatgcagctcccttaaatgatggggagccaggtgttttacatggagcgctaagctacttgatgcaagatgaaaaaggtcaagtgaaagaaacaaaatctgtatctgctggattagattatccgggagtaggcccagaacactcatggctcaaagattcaggaagagctgaatatgtagcagtcagcgatcaagatgctttaagagcttttcacgaagtatcagagtttgagggtattatacccgcattggaaactgcgcatgcttttgcctatcttgatacactaatgaaagaatttgattccaaagcaaatattattgtgaatgtatcgggcagaggtgataaggacattaatactgtcgcaaagattgatggcattaaattttga

SEQ ID NO: 281822 - DNA, 1246 bp, Unknown
  Bacterial polypeptide expressing nucleotide sequence isolated from the Sargasso Sea
aatgacttcacagaccatcataccaaacgaatccggtttttacggagaatacggaggtatgttcattcctgaaattttaaggaccactttcgatgagctcattgaagcatttgctgaagcaaaagcagacccggagttttggaagggttttgaggatgttatgcagaattattcatgcaggcctactcccataacaccattggataattttgtaaactccttgggcgggaatttcaagttattttgtaaacgtgaagacttaaatcataccggggcacacaaagcaaataatgtgataggccagggattgcttgtaaaacgtatgggcaaaaaacgtgtaattgctgaaactggggcaggacaacatggtgtagccacagctacaatggccgcaagaatgggattggaatgtacaatttacatgggatcagttgacgttgaacgtcaaaggccaaatgttttttggatggaacagctaggtgctgaagttgtatccgttaccgatggaactgcaacactgaaagacgcaataaatgccgccatgagggactggacagaaagcatgggaactactcattatgtgttgggaacaacttgcggtcctcatccattccctgaaatggttgcttggtttcaatcgatcatagggaaagaggcacgacaacagatgcttgatactacagggaaacttcctgaccggatttatgcgtgcgtaggtggtggatcaaacgcaagtggaatcttcctcccttttctggatgatgatacagttgaattaattggagcagaagcgggcggaaaaggagtggatacgggttcacatgcagcacgcttttgtggcggaaacgttggtatagctcaaggatataaaacttatttttttcaggacgaagaaggacaaatgcgccacacacattcaattgcagcaggactggactacattggagtaagtccgattttgagtcatctccatgataaaaaaagggtgcgatttacagcgactacagatgaggaagttatttctgcaacaaaacacctaattcgtactgaggggataattcctgccctagaatgcagtcacgcttttgcttcagttattgaagaaacgcctcatatacctaatggatctcatgttatgattaacctttccggacgtggtgacaaagatatctttaatatagctgaggctattggcgacaaaaattgggatgaattcctgcgccaaaaagccttgacgaatcaatga

SEQ ID NO: 281823 - DNA, 1204 bp, Unknown
  Bacterial polypeptide expressing nucleotide sequence isolated from the Sargasso Sea
tcacttaaaaatcagccttctgaagatggaaagtttggagaatatggaggtatgtttgttgcagaaactcttatgcctctgatattaagtttatcaaaaaactataacaaattaaaaaaaagctcatcatttcaagaaaagttaaaatattatcaaaaaaactatataggaagaccatctcccctttattttgcaaatagaattactgactattgtggtggtgctaagatttttttcaaaagagatgaattaaatcatactggtgcacataaaataaataatgttattggacaagcattactagcaaaagaaatgggtaaaaataaaattattgctgaaacaggcgcaggacaacatggagttgctactgctacagtttgcgctctttttgatatggattgtgaagtttttatgggtgaagaagacatagagagacaaaaaccaaatgtagaaagaatgcaattactaggtgcaaaaattattccagtttcatctggcacaggaacacttaaagatgcaatgaatgaggctcttaggcattgggtgtcaaatgctaaatctcacttttatataattggaacagttgctggtccacacccttatcctatgatggtacgagattttcagtctgttattggagaagaagcaagaaatcaaatcttggcaatagaaaaaaaattaccttcgaaaattattgcatgtattggaggcggttcaaatgctatgggcttgtttcatagctttttagatgatgataaagttgagataattggtgttgaggcaggtggaaaaggtgtaaattccaaacttcatgctgcttctttaacaggtggaaaacctggcattttgcacggaaacaaaacctatttacttcaagactttgacggacaaattatagatgcccattcaatatctgctggtttagactacccaggaataggtcctgaacattcctggcttaatgatattggtagagtacagtataaagcttgtactgatgatgaagctcttgaagcttttcatttatgttcaaaacttgaaggaattataccagctcttgaacctgcacatgctttacatgttacaattcaagaagcaaaaacaatgaaaaaagatgatattataattatgaatctgtgcggtcgcggtgataaagatttaagtgctgttttgccaaaattaaaagcaatgggcaaaatataat

SEQ ID NO: 281824 - DNA, 341 bp, Unknown
  Bacterial polypeptide expressing nucleotide sequence isolated from the Sargasso Sea
aatgaaaaataggatttcacagctttttaataatttaatagaaaataaaagagcaggtttgggtatttttataactgcaggtgacccgaatttagaaacttcacaaaaaattttcaacagcttacctaactttggtgctgattttattgaacttgggatgcccttctcagatcctatggctgatggccctgccattcaggcgtcatctttaagggcacttaatcaaggaatgaaccttaaaaaaactcttttaatggttaaaaacttcagaaaaaaagatataaaaacacctgtaattttgatgggttattataatcctatttaccaatatggtgtaaaga

SEQ ID NO: 281825 - DNA, 895 bp, Unknown
  Bacterial polypeptide expressing nucleotide sequence isolated from the Sargasso Sea
atgcctgataagcatgggcattttgaagaatttggtggaaaatatgttcctgaaactcttattcctgcattggatgaattagagcaggaatatttaaagagtaaaaaggataaaaagtttcaaaaagaattttttaatctgctgaaatattatggaggtagaccaactccattatacttagctaaaaatatttccgaagaactaggttttaatgtatggcttaaaagagaagatctaaatcatacaggtgcacacaaaataaataatgctcttggacaaattttattggctcataggatgggaaagaaaagaatcattgctgaaacaggagcaggacaacatggtgtggctacagcagcagcagctgctaaatttggattagaatgtattgtttatatgggcgaggaagacattgagcgtcaaaagctaaatgtttttaaaattaatttaatgggggcaaaagttattcctgtaacttctgggtctaaaactttaaaagatgctaccaatgaagcaataagggattgggtgacaaatgttgaagatacattttatatcattggctcctcagttggacctcatccatatccaatgcttgttcgtgattttcaatctgtaattggtacagaaacaaaaaaacaatttaaagatataacaaataatgaattacccgataggcttgtagcatgtgttggcggtggatctaatgcacttggcttgttttacccatttattgatgatgacgtaaaaatagttggagttgaagctgcaggaaaaggtattgacacaaatcagcatgctgccactcttacaaagggagaatttggagtattgcatggtgcagcatcaatgttactccaaagtactgatggtcaaattgctttaccatattctt

SEQ ID NO: 281826 - DNA, 598 bp, Unknown
  Bacterial polypeptide expressing nucleotide sequence isolated from the Sargasso Sea
atgcaatataaaaattcttataagcaacttccaaacgaaaaaggttactttggacaatttggaggtaggtatgtttctgaaacattaatgcccttgattttagaagtagaaaaagaatacaacataataaaagaagataaaaaatttcaaagtgatttaaaatattatttagacacctatgttggaagaccaagccccttattttttgctgaaagaattactgaaaatttaggtggtccaaaaatttattttaaaagagatgaattaaatcatactggtgctcataaaatcaataactgtatgggacaaattttactagctaaaaaaatgggaaaaaaaagaattattgcagaaactggagcaggtcaacatggtgtggctactgcaactgtttgtgcattatttggtttaccttgtattatatatatgggtgaaaaagatataaaaagacaatcacctaatgtttttagaatgaaacttcttggagctgaaattagaagtgtttcgacaggatccaagtctctaaaagatgctatgaatgaagctttacgtgattgggtaacaaatgtaagagatacattttacattattggtactg

SEQ ID NO: 281827 - DNA, 837 bp, Unknown
  Bacterial polypeptide expressing nucleotide sequence isolated from the Sargasso Sea
ttgcagttgctactgtctctgcgagatttggaattccatgcgtgatttatatgggtgcaaaagatattgagagacaaaagcctaatgtctttagaatgaagctgcttggagccgaggttgttcctgtaagatctggcaattctacattaaaagacgcgatgaatgaagcactgagagattgggtggcaaacgtaaatgatacattttatataattggaactgtggcagggcctcacccttatcccgaaatggttcgcgattttcagtcaataattggcaaagaaacaaaagagcaaattcttgatcaagagggacgtcttccggatcaactgattgcatgcattggtggaggatcaaatgcaatgggtctattttatccttttttagatgacaaaagtgttaagatcacaggaattgaggctggtgggatggggcttcaaggagaaaagcattgtgccagcctaacagcgggcagacctggtgttctacatggaaatagaacatatttactgcaggatgatgatgggcaaataattgaaggtcattcaatttctgcgggtcttgattacccgggaataggaccagagcatgcttggcttaaagagtcaggaagagttgaatattttgcaattacagatagtgaggctgtcgaagcctttaaaatctgcacaaaaacagagggtataataccagcattagaaccatctcatgcaatcgctcatttaataaatatagcgccgaatttatcaaagaatgatcttgtggttatgaatttgtgtggaagaggtgataaagatatttttaccattgcagaacacttgaatatggagatatgag

SEQ ID NO: 281828 - DNA, 1198 bp, Unknown
  Bacterial polypeptide expressing nucleotide sequence isolated from the Sargasso Sea
tatgaaaataggaataccaaaagatggacgatttggggattttggaggcaagtatattccagaaacgctagcacctgcaatagaagaattagagaaaaattacctaaaaattagaaatgataaaaatttcaaaaaagaacttggaagactactaatagattatgcaggaagaccaactccaatctattttgcaagaaatcttacaaaaacagtagggggagcaaagatctatttgaaaagagaagacttgttgcacggaggagctcataaaatcaataacactttgggacaagcattacttgcaaaacgtatgggtaaaaaaagaatcattgcagagaccggagctggacaacacggagttgcaactgcaatggcatgtgcaagtttaggattgaaagcagaaatttacatgggatatgtggacacaattcgtcaaaaacaaaatgtctttagaatggaattactaggtgccaaagtacatgcagtaaaatcaggttcaaagacactaaaagatgcaattaatgaagcaatgagagattggattacaaatgttgattcaacatattatttgttagggtcagcggtaggaccacatccatatccactaatggtaagagattttcaagcagttattggagtagagattaaaaaacaaatgaaaaaaattccaaatgcagtgatagcatgcgtaggtggaggctctaacgcaataggaacattttatccattgatagatacgaatgcaaaaattattggaatagaagcaggaggtaaaggagttaagacaaaattacactcagcacctcttacggcaggcaaaaaaggagtattgcatggtatgatgacatatttgatgcaagacaaagatggacagattagtgaaacccacagtatttctgcaggattagactatccaggagtaggacctgaacatgcatatcttaaagatgaaaatcgagttgaatacaaagccgtaacagatgacgaagttattgatgcatttttaattttaacacgaactgaaggaattattccagcattagaatcagcacatgcaatagcacatgcaattaaaatttctaagaaaatgaaaaaaacagaatcaattgtagtcactttatcaggtagaggagacaaagacatcgatattgtaaaggagtatttgagtaaaaatgtcaaaaataaaagaaaaatttaa

SEQ ID NO: 281829 - DNA, 1186 bp, Unknown
  Bacterial polypeptide expressing nucleotide sequence isolated from the Sargasso Sea
atggaaaattttaatattaataaagatgggttttacggtgattttggtggtgcatttattccagaaatgctacaacccaatattgatgaattacaaaaaaaatatttaaaaatcactgagtcaactgattttaaaaaagaatttaacaaactgctaactgattatgttggtagaccaacccctctttattttgcaaagagactatccaacaaatacaaaacaaaaatttatttaaaaagagaggatctatgccatacaggagctcacaaaataaataatacaattggtcaaattatactggcaaaaaggctaggtaaaaaaagaattattgctgaaactggtgcaggccaacatggtgttgctactgctacagtttgtgctttgatgggaattgagtgtgttgtttatatgggtgaaattgatatttctagacaagctccaaatgtagcacgaatgaaaatgctcggtgccaaagtcagatctgcaacatctggaagcagaactttaaaagatgcaacaaatgaagcaataagagactggattgcaaatccaatcgatacacattatattattggatcagtagttggtccgcatccctaccctgacatggtggcaagatttcaatccgtcattggatatgaaactaaaaaacaattacttgaaatggaacaaacagacaaacctactcatgttattgcttgtgtgggaggaggaagtaatgcagcaggtttattctatccatttttgaatgatttagatgttgaaattgtatgtatagaagctgctggaaaaggagttaatagcggagaaagtgcagcaacatcaattcttggcacagagggaattattcatggttcaaaaacacttctaatgcaaacccaagatggtcaaattactgaaccttattcaatttcagcaggtcttgattatcctggaatcggaccaatgcatgcaaatttatttaaatcaaaaagaggaaaatttatttctattgatgatgatgatgccatgaaatgggggcttatgctttcacaaattgaagggataataccagcaattgagacttcacatgcatttgctgttttagagaaaatggattttaataaagatgatattattatatttaattgctcaggaagaggtgacaaagacttagatacttacattgattattttaaattatgag

SEQ ID NO: 281830 - DNA, 304 bp, Unknown
  Bacterial polypeptide expressing nucleotide sequence isolated from the Sargasso Sea
gatggctacacttgtcagtccggatctacctgatgcccgaggccgctacggcgcgtacggtggccggtatgtgccggaaaccctaatgtcacttcttgacgacctggaggcagcataccgggtggccaaagaggacccgggtttccaggcagaactcgatcgctacctgagagagttcatcgggcgtccgacatcgctgtattttgccgatcgccttacgcggcacctgggtggcgccagaatctacctgaagcgagaagatctggcgcacacgggcgcccacaagatcaacaactcaatgggg

SEQ ID NO: 281831 - DNA, 811 bp, Unknown
  Bacterial polypeptide expressing nucleotide sequence isolated from the Sargasso Sea
aatgaaaaataatttacctgacaaagatggattcttcggcgaatatggagggaagtttgttccagaaactcttatgtatgcccttaatgaattagagcagacttataaaactttaaaggataataatgattttaatgctgagtttcacaaagatctagctgaatttgtcggcagaccatctcctttatactttgcaaaaaggctcaccgagcattacaaaactgcttcaatttggttaaaaagggaagatttaaatcataccggagctcacaaaataaataatacagttggacaaatccttttagctaaatatatgggaaaaaaaaggataattgcggaaactggtgcaggccaacacggagttgcaactgctacagttgcggcaaggcttggattagattgtcatatatacatgggatctgaggatgtaaggagacaatcacttaacgtttacagaatgaagcttttaggagctgaagtccatgaagtaaattctggttcagcaactcttaaggatgctctcaatgaggctttaagagactgggttactaatattgaagatacatactacatcataggcagtgttacaggacctcatccttatccgatgattgtaagagatttcaatgcagtcgtaggatatgagttaattgaccaatctcaggaatcatttggaagaatgccagattcaataattgcctgtgttggaggtggatcaaatgctatgggtattttttatccctttattaaaatggataatgtagagctcattggtgtcgaggcagcaggtaaaggaatagaaacaggtgaa

SEQ ID NO: 281832 - DNA, 1090 bp, Unknown
  Bacterial polypeptide expressing nucleotide sequence isolated from the Sargasso Sea
atgagcacagcatctctaaatacctatcacaatcagccagatgagtctgggcgttttggaattcatggtggccggttcgttgctgaaaccttgatgcccctgattctgaatgttgaggcggcatataacgccgcaagcgctgacaaagcatttacagcaaaacttgcgtattaccaaaaacattacatcggacggccaagtccactgtatcttgctgagcgtttaacatcatattttggtggtgccaagctgtatctaaagcgtgacgaattgaaccataccggtgcacataaaattaataatgtgattggtcaggcacttttggcaaagcgtatgggcaaaactaaaatcattgccgaaactggagctggtcaacatggcgtggcaacagccaccgcctgcgcgctatttgacatgaagtgcgaagtttttatgggcgcagaagatgttgaaagacagagtccaaatgtcgagcgcatgcggcttcttggcgctaaaatccacccggtgacgtctggtaccggcaccttgaaagatgcaatgaacgaggcgttgcgatattgggtaaccaatgccgaaacacatttttatatcattggtacggtggctggcccgcacccctatccgcaaatggtgcgcgactttcaatcagtcatcggcaccgaggcgcgcaaacaaatcatagaagccgaagggcgcttgccaaataaaatcgttgcctgcattggcggcgggtctaacgccatggggctattttatccgtttttggatgataaagatgttgaaatttatggtgttgaagcggctggcaaaggcatcccaagcgggttgcatgccgcctctctcaccggtggacagcccggcattttgcatggcaatcgcacctatttgctgcaaaataatgatgggcagatcaccgacgcacattccatttcagctgggcttgattaccccggcattgggcctgaacattcatggttgcatgataccggcagggtcaattatgtcagcgctaccgatgatgaagccttggtcgcttttcagctatgcgcccgccaagaaggcattatccctgccctcgaaccatccc

SEQ ID NO: 281833 - DNA, 916 bp, Unknown
  Bacterial polypeptide expressing nucleotide sequence isolated from the Sargasso Sea
ctggttggacaaatcttattagctaaacacatgggcaaaaaaagaatcatagctgaaaccggtgcaggacagcatggtgtagctacggcctctgtagctgctagacatggtttagagtgtatagtttttatgggtgaagaagatatccaaagacaatcacttaatgtttttaggattaaattgcttggagcaaaggtagtaggagtgaactcaggaacatctactcttaaggacgctatgaacgaagctatgcgcgattgggtaaccaatgtagatgacacttattacataataggtagtgtggctggacctcatccttatcctcaaattgtaagagacttcaacgcggttgtgggagaagaagttttagagcaaagcaaatcagtaattggtaaagatccagatatgctcgtagcttgcgtaggaggaggttcaaatgctatgggactattttatcctttcatagaaaagaaaaatgttaggttagtgggtgttgaagcaggtggtttgggcttgagtacaggtaagcatgcagctcctcttaatgatggtaaggaaggagtacttcatggtatgagaacatacctaatgcaagacgatgccggtcaagttatcgaaacacattctgtttcagctggattagattatcctggagtcggtccagagcatgcatggttaaaagatataggtagagcagagtatgagtctgcagatgatgaagaagcattagacgcctttaaagaattaactagagttgaaggaattatgcctgcacttgaaacggcacatggcattgcttatgtaaaaaagattgcacccactatgagagaagatcaatcaatagtggtaaatgtttctggtagaggtgacaaagatataaacacagttgcttcaatagaaggaatagagctttgac

SEQ ID NO: 281834 - DNA, 1201 bp, Unknown
  Bacterial polypeptide expressing nucleotide sequence isolated from the Sargasso Sea
atgtctgaagaatatttaccggataacaaaggtcgttttggaatatatggcggcaggtatgtagccgaaacattagttcctgcattagatgaattatctgaaaaatataaacttattaaaaatgataaagattttttagaagaatttagaaatgatctatcacattacgtaggtagaccgtctccgctttattttgcgaagcgttggacggagttcttgggtggagcaaagatttacctaaaaagagaagatttaaatcatacgggagctcataaaatcaataacactgtagggcaaattcttttagcaaaacacatgggtaagaaaagaattattgctgaaaccggggctgggcagcatggtgttgcaagtgcaacagtagcggcacgtcatggcttggaatgtgttgtttatatgggagaagaagatataaaaagacagtctttaaatgtattcagaatgaagctcttaggcgcagatgtcgttgctgtaaactctggaaccagaacattaaaagacgcgatgaacgaagctatgagagattgggtaacaaatgttgatgatacttattacattataggaagcgttgctggccctcatccttacccagaaattgtaagagactttaatgcagtagttggtgaagaagtgatcgaacagagtaaagatcaaataggtaaaaatccagatgtcttaattgcatgtgttggaggcggatcaaatgctttaggtcttttttatccatttattaaatctaaagaagtgaagttaataggagtagaagcaggaggtttaggtttgagtacaggtaagcatgcagcccctttaaatgatggaaaggagggcgtactgcatggaatgagaacatatttgatgcaagatgatgctggacagatattagaaacacattcagtttcagctggtttagattatcctggagttggtccagagcattcttggttaaaagatactggaagagctgaatatgtagtagccgatgatgaagaagctttagatgcatttaaagaacttaccaaaatagaaggaattatgcctgctttagagactgctcatggattagcgtatgtcaaaaaattggcaccatcaatgaagcctgatcaaacaatagtggttaatgtttctggaagaggagataaagatataaatactgttgcctctatagaagggatagaactttagt

SEQ ID NO: 281835 - DNA, 1201 bp, Unknown
  Bacterial polypeptide expressing nucleotide sequence isolated from the Sargasso Sea
aatgtctgaagaatatttaccagataacaaaggacgttttggagtatatgggggtaggtatgtagctgaaaccttagtgcctgcattagatgagctatctgagcagtatcaacttatcaaaaatgataaagattttttagaggaatttagaaatgatttatcccattacgtaggtcgaccatcaccactttattttgcaaaacggtggactcaattattaggtggggcaaaggtttatctaaaaagagaagatctaaatcatacgggagcccataagataaacaatacggttggacagattcttttagcaaagcacatgggcaagaaaagaatcattgctgaaactggagcaggtcagcacggagttgcaagcgcaacagtagctgcacgccatggtttggaatgtattgtttatatgggagaagaggacataaaaagacagtcattaaatgtattcaggatgaagttattgggtgctgaggttgtaggagttacttctggaacgagaacgttgaaagatgcaatgaatgaagccatgagagactgggttacgaatgtagatgatacttattacatcattggaagtgttgctgggcctcatccctatcctcagattgtaagagattttaatgctgttgtcggtgaggaagtgattgaacaaagtaaaaatgagattggtaaaaaccctgatgttctaattgcatgtgttgggggagggtctaatgctttaggtcttttttacccttttattcaatctaaggaagtaagattaataggggttgaagccggaggattgggtttgagcacagggaaacacgcagcacctttaaatgacggaaaggaaggtgtattgcatggaatgagaacttatttgatgcaggatgatgcaggtcagatattagagacgcattctgtatcagctggtttagattacccaggggttggccctgaacattcttggttaaaggatactggaagagcagaatacgttgttgcagatgacgaagaagctttagatgcatttaaggaactgacaaaaatagaaggaattatgcctgctctagaaactgctcacggattagcatatgtaaaaaaattagccccaacaatgaaacctgatcaaataatagtagtcaatgtttctggtagaggagataaagatataaatactgtggcctctatagaagggatagaactttag

SEQ ID NO: 281836 - DNA, 615 bp, Unknown
  Bacterial polypeptide expressing nucleotide sequence isolated from the Sargasso Sea
catgagccgaattcaagcccgtttttccgccctgcaggccgccggtcgcaaggcgctgatcccttacattactgccggtgatcctgccccggcggtaaccctgccgctgatgcatgacctggttgctgccggtgcagatatcattgagctgggtatcccgttctccgacccgatggctgatggcccggtgatccagctcgctatggaacgtgcgctcgcgcacgaggtgagtctgcgacaggtgctggagatggttgccgagtttcgccagcgtgacaacgatacgccggtcgtgctgatggggtatctgaacccggtcgagcgtatgggctatgatgaatttgcccgtgaagctgctgaagccggcgttgacggtgtgctgaccgttgatctgccgccggaagaggctgtcgacgtcgtgccgctgttcaaggcgcgcggactggacacgattttcctgttggcgccgaccaccacggccgagcgcgcgcgctcaatttgtcagcaggccagcggctatgtctattatgtttccctgaaaggtgtgaccgggtccagtgctttggacgtcaccgatgtagcaaacaaattggacatgctgcgtacggtcaccga

SEQ ID NO: 281837 - DNA, 763 bp, Unknown
  Bacterial polypeptide expressing nucleotide sequence isolated from the Sargasso Sea
aatgaatagaattgacaaaaaattaaaagaagaaggtaaactattatctatatattttacagctggatatcctaatctagatgatacagttgatattatttttaagcttcaggaatctggtgttgatatgatagaaataggtctgccttttagtgatccacttgctgatgggcctacaattcaagacagctctacaaaggcaattaaaaatggcatgaatactaatttcctatttaatcagttaaaaagaattagagacaaagtttcaattcctctaataataatgggttatttcaatccgatccttcagtatggtgtagaagacttttgtaaaaaatgtaataaaattggaattgacggattaatcattcccgacttaccaattgactattatgaagcaaactataaatcaatatttgaagaaaatcatctttacaatatgtttttaatagctccacagacttcagatgaaagaattaaaaagattgactcaatatcaaatgggtttatctacatggtaagttcttccagtataactgggtccaagaacagttttagtcctgagcaaataaattattttgaaagaattgaaaaaatgaatctaaaaactcctagaataatcggttttggagttggaaataaagagacatttaatactgtagtaaaatattctaagggagcaataattggatccgcatttataaagaatattactgaaaatggagttgaatcaattgcttcatatatagattcaataagataa

SEQ ID NO: 281838 - DNA, 1045 bp, Unknown
  Bacterial polypeptide expressing nucleotide sequence isolated from the Sargasso Sea
atgaattataacttagacgaaaaaggttactacggaagttttggtggagcattcattcccgaaatgttatatccaaatgtaaatgaattaaaaaaaaattatctcaaaataatttctgaaaaaaattttcaaaaagaatttaatgaactattaaataaatatgtaggtagacctacacctctttattttgcgagtagattatccgagaaatataatactaaaatttatcttaaaagagaagatctctgtcacactggagcgcataaagtaaacaatactattggtcaaatacttttagcccaaagactaggtaaaaatagaataatagctgaaaccggagcagggcaacacggagttgctactgcaacagtttgcgctcttatgggaattgagtgcatagtttacatgggagaattagatattaaacgtcaagcacctaatgttgcaagaatgaaaatgttaggagcaaaagtcatttcagcaacatctggaagcaaaactctgaaggatgctacaaatgaggcaattagggactggataaataatcctgtaaacacacattacataattggttcagttgtgggtccacatccatatcctgatatggtggctaggtttcaatcaattattagtatagaaattcaaaatcaattaaaacaagttgaaggtagagattatccagattatttgattgcatgcgttggaggaggaagtaatgcggctggtttatattatcagtatttaaatgatattagagttaacattattgctgttgaagctgctggtaagggaatttactcaggagaaagtgcagcaacatcagcacttggaaaagaaggaattattcatggaagtaaaaccttgttaatgcaaacagctgatggacaaattaccgaaccttattcaatttctgcaggccttgattatcctggagttggtccattgcacgctaatttatacaggtctaaacgtgctgaatttatttcaatacctgaccaagaagcaatggactggggattaaccctatcacaaatggaaggtataa

SEQ ID NO: 281839 - DNA, 886 bp, Unknown
  Bacterial polypeptide expressing nucleotide sequence isolated from the Sargasso Sea
atggggaaaaaaaggataattgctgaaactggtgcaggccaacacggagttgcaactgctacagttgcggcgaggcttggattagattgtcatatatacatgggatctgaggatgtaaggagacaatcacttaacgtttacagaatgaagcttttaggagctgaagtccatgaagtaaattctggttcagcaactcttaaggatgctctcaatgaggctttaagagactgggttactaatattgaagatacatactacatcataggcagtgttacaggacctcatccttatccgatgattgtaagagatttcaatgcagtcgtaggatatgagttaattgaccaatcacaggaatcatttggaagaatgccagattcaataattgcctgtgttggaggcggatcaaatgctatgggtattttttatccttttattaaaatggataatgtagagctcattggtgtcgaggcagcaggtaaaggaatagaaacaggtgaacatgcagctccattaaatgatggaacccctggagtgcttcatggtgcaaaaagttatttgatgcaagatgaaagtggacaagtaaaaggaacggcttctatttcagcaggcttagattatccaggtgtagggcctgagcattcatggctaaaagatattaaaagagctaagtatgttgcagtttcagatgatgaggttatgaaagcttttcatatggtaaataaaatggaaggaatattgcctgcactagaaacagctcatgcatttgcttatctagatgagctaatgccaaaaatgaataaagatcagcatatcgttatcaatgtctcaggaagaggagacaaagatttaaatagcgtcgttgaaatagaggatatcaagctttgaa

SEQ ID NO: 281840 - DNA, 1207 bp, Unknown
  Bacterial polypeptide expressing nucleotide sequence isolated from the Sargasso Sea
tatgaaaaaaaattcatataaatcagggccagatactgatggtaattttggtttattcggcggacgatatgttgctgaaacattaatgcctctaataattgaacttgagaaagcttattcagatgctttaagtgatcatgatttcagaaacgaaattaaccaattttctaaagactatattggaagggagagtcccctatactttgcagagaggttaacaaattatcttgaaggagcaaaaatatatttcaaaagagatgagctaaatcatactggtagtcacaaaataaataattgtataggacaaatattattagcaaagagaatgagaaaaaatagaatcatagccgagactggagccggacagcatggagtggccgtagctacagtttgtgctcgatttggttttgaatgtgtgatttacatgggaaaaaaagatattgaacgccaaaagtcaaatgttttcaaaataaaattacttggcggacaaattgttcctgtggaatctggaaatggtactttgaaagatgccatgaatgaagcattgagagattgggttgccaatgttgaaaatacttactatttgattggtactgcagcaggccctcatccatatcctgaaatggttagagattttcaatcaattattggtgaagaagcaaaaagacaaattcttgataaagaaaatgtattacctgatgctttagtggcttgtattggcggaggatcaaatgcattaggtttattctacacatttttagatgatgatgtagatatgtatggggttgaagcagctgggatggggctagacggggatgagcatgctgcttcattatctaaaggagtaccaggaattttacatggtaatagaacttacttacttcaagatactgaaggtcagattagagaaggacattcaatttctgctggtcttgattatcccggtattgggccagaacactcctggttaaatgatcaaggaagagtaaattatgtatcttcaactgatgatgaggcgttaaatgcttttgaaatatgttcaaaatacgaaggaattattcctgctttagagccttcgcatgccctagcatttgttttcaagcttgcaaaagatatgagaaaagatcagataattatcgttaatttatgtggtcgaggggataaagatattgaaacggttgcagattatcttggtgtagaagtataa

SEQ ID NO: 281841 - DNA, 433 bp, Unknown
  Bacterial polypeptide expressing nucleotide sequence isolated from the Sargasso Sea
aatgaatagaagtatacaaaagggtaaatataattttccagaccaaaaaggccacttcggtgtatttggaggtagatttgttgctgaaacattaatatatcctttagatcaacttaaaaaaacttatttatctctcaaagaggataaggattttaatgcattaatgcaggatgactttgcaaactttgtaggaaggcctacgcctttatattttgcgaaaagattaactgacctatgtaaaggggcaaacatttatttcaaaagagaagatctttgccataccggagctcacaaaataaataatgctataggccaagcgatacttgctaaaaaaatgggtaaaaatagaatcatagcagaaacaggcgcaggtcaacacggagttgccaccgctacagttgccgctagattaggaatggaatgtgtgtctata

SEQ ID NO: 281842 - DNA, 844 bp, Unknown
  Bacterial polypeptide expressing nucleotide sequence isolated from the Sargasso Sea
catgagtcgattaaagcagattactagtagtgcgaatcaaaaaggccgtaagcttcttatcccctatttggtagcaggggatccaagtaaagaaacgactattgatcttatgcatgccctagtatcgaatggggctgatattattgagttgggtatacccttcagtgatccgtcttcagatggtgaagttattcaaaacagcatagagaggtctttgagaaaaggcaccagccttaatgatactcttgatattgtatctaaatttagagcacgaaacgaagtcacgccaattgtccttatgggttatttgaatcctgttgagataatggggatcgataattttgttcgaagagctcagaaagaaggcgtagatggagttttgatggttgatatgccacccgccgaggccggggtattgaacgctaagttgaaagaggtgaatattgactcaattttccttgttgcgcccacaacgactcaggaacgagttaaatcaattcttaatatgacaagtggctacgtttattacgtttcattgaaaggggtgacaggcgcatctataactgatgtagacgaagtagagcgaaatgtatgttctcttcgatcttccacagatttaccgatagtagttggttttggtatcaaggatggaaaaagtgcaaaggaaatggcaagagtttccgatggtgttatcgttggttctgcattagtcaataaaatagctagtttgacctcacacgaaaaaataagcgcagaagatattaagaatagcaccaatatcatcaaagaaattagggaagaacttgatctcgataatgaggttgttgatgaggagtatctgtga

SEQ ID NO: 281843 - DNA, 1207 bp, Unknown
  Bacterial polypeptide expressing nucleotide sequence isolated from the Sargasso Sea
aatgacaactaataaacataattggccagataaagatggtttctttggagaatatggtggcaagtttgttccagaaactcttatgcatgcattagaggaacttgaaaaaacttataataattttaaagacaagcccgaattcaaagaacaattttataaagatctgtctgaatttgtaggtcgaccatcgcctttatatttcgcagaaaggctaaccaatcactatggaacaggttcaatttggttaaaaagagaggaccttaatcatacaggagcacataaaataaataatactataggacaaattcttttagctaaatatatgggaaaggaaagaataattgctgagacaggggctggacaacatggagttgccacagcaacagtagcagcaagacttggtcttgaatgtcatatatatatgggtgctgaagatgtgcaaaggcagtctcttaatgtgtatagaatgaagcttttaggagcacaagttcattcagttgaatcaggttctgcaaccttaaaagatgcattaaatgaagctttaagagattgggttacaaatgttgataatacttattacattataggaagtgttacgggacctcatccttatccaatgatagttagagattttaattcagtagttggagaggaggttgtagctcaatctaaagatttgtttaatgatatgcctaatgcaattgttgcttgtgttggtggcggctcaaatgcaatgggtattttttatccctttattgatataaaagaaactagattaattggagtagaggcaggaggagagggtgttgagactggtgaacatgcagctccattaaatgatggaacacctggagtattgcatggagcattaagttatctaatgcaaaatgattctgggcaagtcaaggctacaaaatcagtttctgctggacttgattaccctggagtaggaccagaacattcattactcaaagactctggtagagcagaatatgttgctgtaactgacaaagcagcattaaaagcatttcatgaagtttccgagcttgaaggaataatacctgcacttgaaacagcacatgcatttgcatatttagatgtgttgatgaaagattttgattcatcagcaaatattattgttaatgtttctggaagaggtgataaagatatcaatactgttgctgaaatagatggaataaaattttga

SEQ ID NO: 281844 - DNA, 997 bp, Unknown
  Bacterial polypeptide expressing nucleotide sequence isolated from the Sargasso Sea
ttatgcaaaacaactcagtaaaaggtggggcgttgaggtttttctcaagcgagaggatttgactcatacaggtgctcacaagatcaataacgcactcggtcaagcgatgcttgcaaagaaattgggcgtgaaaaggattgttgcagaaactggcgctggacaacacggcgttgcttccgcagctgcatgtgccagagtgggactaccttgtacagtttatatgggcgcaattgatatcgagcgacaggctccaaatgtcgaccgaatgaaacaattgggtaccgaagtgatttctgtaatgagcggagaccaaactttgagggctgccattgatgaggcgtttagggattgggtatcagaccctgaaaatacacactatataatcggctctgtagtaggcccgcatcccttcccattcttggttagggaaatgcagtccattataggaaaagaagcaagacaacagatgttaaatctcgaagaaagccttccggatgcagtttttgcttgcgtaggtgggggctcaaatgcaattggactctttcacgcttttctaggtgatagcgaagtagagctatttgggatagaggcaggagggacaagcgatgatttgggtgaaaatgcagcgacacttgcctctggaaaaccaggcatcctccacggaacttattccatgttattacatgacaatgatggcttaattcaggaaacacattcagtatcggctgggcttgactatcctggcgttggtccagagcacgcattcttacaatcgataaaccgagtaaaatattcctcagcaagagatgatgaggccttggaattattgagagaggtttgtgaatatgaaggaatattaccagccattgaaagctcccatgcttttgtcgaagcaaaaaaatgggccaaagataacaaaggaaaacgaattttaatcgggctttctggaagaggcgacaaggatatgcccacgctcagtaaattaatgcatgaatga

SEQ ID NO: 281845 - DNA, 823 bp, Unknown
  Bacterial polypeptide expressing nucleotide sequence isolated from the Sargasso Sea
ttgtgctctttttatttgccttgtattatttaccatgggtgaaaaagatattgaaagacaatcaccaaatgtttttagaatgaaactcctaggcgctgaaattaaaagcgtttctagtggttctaaatcactaaaagatgctatgaatgaagctcttagggattgggtaacaaatgttaacgatactttctatataataggcacggttgcgggtcctcacccgtatccatctatggtaagagattttcagtcaataataggtaaagaagtaaaaaaacagatcctaaaatatgaaaaaaaattacctgatttattgttggcctgtattggaggtggatctaatgcgataggattatttcatgaatttttagatgataaagaagtaaaaatgatagcggttgaggcagccggtcttggtttaaatactgataagcatgctgcaagtctctcaggaggcaaaccaggtgttctgcatggaaataaaacttatttgttacaatctaaaaatggtcaaataaaagaagcacattcaatttctgctggactagactatcctggtattggacctgagcattcttttctttttgatgaaaaaagagttgaatatatgtctgcaacagatgaagaagcaattgaagcatttcaatattgttgcaaattagaaggtataattccagctttagagccatctcatgccttagcaattttaaaaaaaattgcccctaatatgaaacaagatgagatagttgttatgaacttgtgtggtagaggcgataaagatatttttacaatagctgaaaatcttaatataaacataaaatga

SEQ ID NO: 281846 - DNA, 1222 bp, Unknown
  Bacterial polypeptide expressing nucleotide sequence isolated from the Sargasso Sea
aatgaaaaataataaagttaatttcttatcactacctgactctaatggtagatttggtgattatggtggcaagtttgtatcagaaacactaatgcctgcactagatgaattagaaaaaaattataggaaaatcaaaaataatgataaattcaaaaaagatgtttcaaaattgctaaaagattttgttggtagaccaacacctttgtatttagctgaaagaactacaaaatctcttggtggtgcaaaaatttatcttaagagagaagatctggcccatacaggtgcccacaaaataaacaacacaatcggtcaagcaatacttgcaaaactaatgggtaaaaaaaggataattgctgaaacaggtgctggccaacatggggtagcaactgctacagtttgtgcacttcttggtttaaattgtgagatatatatgggagcaacagatactgttagacaatcagttaatgttcaaagaatggaattgcttggtgctaaagttatccctgtaacctcaggttctcagaccctaaaagatgcattaaatgaagctctaagggattgggttacgaatgtaagagatactttttatattatcggaagtgtcgctggccctcacccttatccaatgattgttagagattttcaatctattattggaaaagaatctagaaatcaaattctaaaattagaaggtaaactacctgatttactaatagcatgtgtcggtggaggttctaatgcaattggactttttcatcctttcttaaaagataaatcagtgaaaatggttggtgttgaagctggtggtagcggaatcaaatcaggacaacactcagctactattgtcgctggatcagttggggttttacatggcagtaaaacatacatcctgcaagataagcaaggccaggttgtcgaaactcactctgtatccgcaggtttagattatccaggtgttggacctgagcattcttatttaaatgatattaaaagagttgaatacaaatcggttaaagattttgaagctgtaaaagcattacaatatttctctgaaaaagaaggaatcattgctgctttagaaacttcacatgcacttttttatgcaatgaaagtagcaaaaacaatgaaaaagaaccaatctattatcgttaatttgtctggtagaggagataaagacctcgagtcagtcaatgcctttattaaaaaaaacaggtcaaactaa

SEQ ID NO: 281847 - DNA, 790 bp, Unknown
  Bacterial polypeptide expressing nucleotide sequence isolated from the Sargasso Sea
aatgtcaagaattgaagcgaagtttgcagatcttaagtcaaaaaaagaatccgcctttgttacctttttaatggccggggatccaactataaaggaatctcaaaccatatttaaaaaactcccaaaattaggtgtagacattatagaaataggaatgcctttcactgacccaatggctgatgggatattaattcaaaaagctggccaaagatctttaagtaatgagacaactctaaacaatatttttgatttagtaaaagaaatccgtaaagaagataataaaatacctataatcctaatgggatattataatcctatttattctatgggagtaaataaatttctaaatcaatcaaaaagttgtggagttgacggattttatagtggtgatcttcccccagaagaagaccaagaattttgtataccggcaagaaaaatggggcttgactttataaggctagctacaccaactactagttccaaaagaataccaaaagttttaaaaaatacttcaggttttatctattatgtctctgtaactggaataactggttctaggaatttggatatagaaaaagtagaaaaacaagtacaaattatcaaaagtcaaacaaatatacctgtctgtgttgggtttggaatcaaaacacctgaggatgcgaaaagtgtttccgctgtagcagatggtgttgttgttggatcatcgattgtagaattgattgagaaaaatacgccaattgataaaatttgcgactatatcaaaatgcttgcagatgcggttcatgaataa

SEQ ID NO: 281848 - DNA, 587 bp, Unknown
  Bacterial polypeptide expressing nucleotide sequence isolated from the Sargasso Sea
tgttagagattttaattctgttgttggtgaggaattgatttcacagtcaaaagagttatttgattcaatgcctgatgcaattgttgcatgtgttggtggtggatcaaatgcaatgggagctttttatccttttattaaatttaatgaaacaagacttataggtgttgaagctggtggggagggcatagaaacaggagaacatgcagcaccattaaatgacggtactcctggagttctccatggagcattaagttaccttatgcaagatgatagcggtcaagtaaaaggcacaaaatcagtttctgctggacttgattatcctggagttggaccagaacattcttggctaaaagactctggaagggctgaatacgttgctgttagcgatgatgctgcactaaaagcatttcatgaggtttctgagctggagggaataattcctgcacttgaaacagctcatgcttttgcatatctagatacattaatgaaagagtttgataagaattcaaatattattgttaatgtatcaggacgaggtgataaagatattaatactgttgcaaatattgatggaataaagatttgaa

SEQ ID NO: 281849 - DNA, 628 bp, Unknown
  Bacterial polypeptide expressing nucleotide sequence isolated from the Sargasso Sea
gccgatggcccagtgatccaaggtgcgaacctcagagccctcgccgcgggtacgacgcctacacagtgcttaaacttattagcgcaaattcgcgctaaataccctgaactgccgattggattattgctgtacgcgaacctcgtattcgctaatggcatcgatactttttatgccaaagcgcagcaagcgggcgtggactcagtgcttatcgccgatgtgccagtggaagaagcggcgccatttattcaagccgctaaggcccatggtatcgcgccgatttttatcgcgccgcccaatgccgatagcgaaacccttgaaaaagtgagccaaagtggcgaaggctatacctatctattgtcccgcgccggtgtgacaggcacagacactaaggcaggtacgcccgttgaagatattttagctaagctgcaagcattcaatgcgccgccaccgctattaggctttgggattgccgagcccactcaagtgagcgccgccatcaaagcgggcgcagcgggcgcgatttcaggctcggccgtggtgaaaattatcgaagcccatcaacaggatgaagctaggttactgtctaccttaggtgaatttacccgcgcgatgaaagcggcaacctaat

SEQ ID NO: 281850 - DNA, 1207 bp, Unknown
  Bacterial polypeptide expressing nucleotide sequence isolated from the Sargasso Sea
atgaataatttaactaatttaccgaatcccgatggtttctttggagagtatggaggaaagtttgttcctgaaacattaatgcatgctcttaaagagctagatgagacatactcaaaattaaagaataacccaaaatttattgaagaaattgatcaagatctagttcaatttgttggtagaccctctcctttatattatgcaaaaagattaactgatcattactctggacctcaaatatggttaaaaagagaagatctaaatcataccggagctcataagatcaataatactgttggacagatattgcttgcaaaagctatgggcaaaaaaaggataattgctgaaacaggggcgggacagcacggagtcgcaactgcaactgtcgcagcaaggctgggtcttgagtgtcatatctatatgggagccaaagatgtagagagacagtcacttaatgtttacagaattaagttattgggagcagaggttcatgctgttgactctggtaccgctacactcaaggatgccttgaatgaggccatgagagattgggtaacaaatattgaggatacttattacatcattggcagtgttacagggccgcatccttatccaatgatagtgagagattttaatgccattgttggaagagaactcagaaaacaatccatcgaacaattttctcaatatcctgatgcaattattgcttgtgttggtggtgggtcaaatgcaatgggaattttctatccttttcttgaggaatctaatgttgagctggtaggtgttgaagctgcaggcagtggtttaatgagcgggaagcatgcagctccattaaatgatggagagccaggcattctgcatggagctaagagttatttaatgcaagatgaaaatggccaggtaatagacactcactctgtttcagccggtttagattatccaggagttggcccagagcactcaaatttaaaagattctggaagagccaattatattgctgtagatgacaaagaagtattagattcatttcacttgattacaaaacttgaagggataatgcccgctttagagactgctcatgcatttgctgctctagatcatattgcaaaaaattatacatctaatcaacatatagtaattaatgtttctggtagaggagataaagacattaatacagttgcttcaatggatggaatatcccttgactaga

SEQ ID NO: 281851 - DNA, 703 bp, Unknown
  Bacterial polypeptide expressing nucleotide sequence isolated from the Sargasso Sea
atgcttaaaaatacatataaaagttatccaaatgaaaaaggctattttggtcaatttggaggtagatatgtttcagaaaccttaatgcctttaatccttgacgtagaaaaagaatatgaaaaaataaaaaatgataagaattttattgatgaatttaattattatttaaaaacatatgttggcaggccaagtccccttttctttgctgaaagaattagtaaagatcttgagggtccaaaaatttatttcaaaagagatgagttaaatcacacaggtgctcataaaatcaataattgtatgggacaaattttgttggcaaaaaaaatgggtaagtctagaataatagctgaaacaggagcaggtcagcacggtgtcgccacagcaacagtatgtgctctatttggtttaccatgcatagtttatatgggagaaaaggatatcgaaaggcaatctccaaatgttttcagaatgaaattactcggggcagaaatacgatcagtttcaactggatcaaaatcacttaaagatgcaatgaatgaagcattaagagattgggtaacaaatgttaaagatactttttatataattggaaccgctgcagggccacatccataccctgctatggttagagattttcaatctataattggcaaggaagttcgtaaacaacttgaagaattggaaggaaaggctccagatttat

SEQ ID NO: 281852 - DNA, 1134 bp, Unknown
  Bacterial polypeptide expressing nucleotide sequence isolated from the Sargasso Sea
tgcctttaattctatctttagaaagtgaatatgaaaaagtaaaaagtgataaaagcttttggaaagaaatggatttttttctaaaagattatgttggaagaccaagcccattatatttttcagagcgtttaactaaacattttggaggtgctaaaatttacctaaagagagatgagttaaatcatactggtgcacataaaattaataatgtacttggtcaaatattattggcaaagaggatgggaaaaaagagaataattgctgagactggagcaggtcagcatggagtagctacagcaacagtttgtgcccgatttggcttaaaatgtatcgtttttatgggtaaaacagatgtcgagagacaagctcctaatgtttttaggatgaagctcttaggtgctgatgtggtctctgttacttcagggcgtggaactttaaaagatgcaatgaatgaagctttaagggattgggtgaccaatgttgaagatactttttattgtattggcactgtagcaggacctcatccttatccttcaatggtacgtgattttcaatcaattattggtactgaaacaaagcaacaaattcttgataaagagggacgtttacccgacagtttaatcgcttgtataggcgggggatctaatgctatgggtctcttttttccttttttagatgataaagatgtgaagatgtttggagtagaggcaggtggaaaaggagttaacaataagatggagcatgcggcttccttaactggtggtaggcctggtattctccatggtaatagaacttatttattacaagatcaaaatggtcaaattatcgaaggtcattctatatctgctggattagactatccaggtattggaccagaacattcatacttacatgatattggaagagtagagtatgtatcaataacagatgaagagtcattagatgcatttaaattatgttgtgagaaggagggcattattcctgctttagaaccaagccatgctttagcttatgtaaaaaaaatcgccccaaaacttccaaaagatcatattatgataatgaatatgtgtggtcgtggtgataaagacatttttacagtagctgaatatttgggctttgacttaaaaaattaga

SEQ ID NO: 281853 - DNA, 295 bp, Unknown
  Bacterial polypeptide expressing nucleotide sequence isolated from the Sargasso Sea
tatgaaattagataagaataatttaccagataaaaatggtttttttggagaatatggaggtaagtttgttccagagacactaatgtatgctttagaagagcttgaagccacttacgaaaagttaaaaaataataacgaattcaaagagcagttctataaagatctttcagaatttgttggacgaccttcgccgttatattttgctgagagattaacaaaacattatggtacaggctcaatatggctgaagagagaagatctaaaccatactggtgcgcataaaataaacaatacc

SEQ ID NO: 281854 - DNA, 1207 bp, Unknown
  Bacterial polypeptide expressing nucleotide sequence isolated from the Sargasso Sea
tatgaaaaataaaatcaacttaaaagactatcccgatagatcaggtcattttgacagttttggcggtgtttatgtatctgagacattaatacatccactcaaagagttattcagtgcatataagtctattgcaacctctgcaagttttagaaaaatacttaaagctgaacttaaagattatgttgggaggccaactccaatctactatgctgaagctctgagcaaatatcttggtaaatctcacatatacctcaaaagagaagatttaaatcataccggtgcacacaaaatcaataacgctctaggacaagcattacttgcaaagaaaatgggtaaaacaagaattattgcagaaactggtgccgggcagcatggagtagcaacagcaacagcatgcgctaggttaaatttgaaatgcgttgtttatatgggagaacaagatattcaaagacagtcagtgaatgtttacagaatgaaacttttaggtgctgaagttgtgtcagtaaattctggtactaaaacactcaaagatgcacttaatgaggcactgagagattgggtaacaaatgttgatgatacacattatataattggttcagttgctggccctcacccttacccaatgatagtacgtgactttcaatcagtaattggtcacgaggcaagagctcaatttaaacgtgactataaatgcctgcctgattacttaatagcttgtgttggaggcggatctaatgctataggtttgttccatccttttttaaacgacgatgtaaaaattattggagttgaagctggtggttccggaattaaaacaggcaaacatgcggcacctttaagcgcgggaactcctggagtacttcatggtaacaagacatacattatggaagataaaaatggtcaaattaaaaatacacattctatttcagcaggattggactacccaggagttggtcctgaacattcatggcttaaagatttaaatagagtggagtatacatctgtaacagataaagaagctttaaatgcattttttacattaactcaaaaagaaggaattatccctgctcttgaaacagctcatgcacttgcatacgcatttgaacttgcaaaaaattctaaaaataagaagttattaattaatttgtctggaagaggagataaagacattgatacgattgctaaattaaaaaatattaaattatga

SEQ ID NO: 281855 - DNA, 688 bp, Unknown
  Bacterial polypeptide expressing nucleotide sequence isolated from the Sargasso Sea
atgaaattagacaagaataatttgccagataaaaatggtttttttggagaatatggaggtaagtttgttccagagacactaatgtatgctttagaagagcttgaaacaacttacgaaaagttaaaaaataataacgaattcaaagagcagttttataaagatctttcagaatttgttggacgaccttcgccattatattttgctgaaagattaacaaaacattatggcacaggctcaatatggttgaagagagaagatcttaaccataccggtgcacataaaataaataataccattggccaaatcttgcttgcaaaatacatgggtaagaaaagaattattgccgaaacaggtgcaggacaacatggcgttgctactgcaactgttgctgctaggcttggtcttgaatgtcatatttatatgggttcagaagatgttcaaagacaatcattaaatgtgtatagaattaaacttcttggagcacaagtgcattctgttgattctggatcagccacattaaaagatgcattgaatgaagccttaagggattgggtaacaaatgtagatgacacatactatattattggaagtgtcactgggcctcatccttatcctatgattgttagagattttaattctgttgttggtgaggaattgatttcacagtcaaaagagttattaattcaat

SEQ ID NO: 281856 - DNA, 1099 bp, Unknown
  Bacterial polypeptide expressing nucleotide sequence isolated from the Sargasso Sea
gaatatgaaaaattaaaacatgacgaaacatttattaaagattttaattactatcttgaaaaatatgttggcagaccaagtccattgttttttgctgagagaataacagaaaatcttaaaggaccccggatctattttaaaagagatgaactaaaccacacgggtgctcataaaattaataattgtattggtcagatattgcttgcaaaaaagatgggtaaaaaaaggattatagcagaaactggtgccggtcaacatggtgttgcaacagcaactgtttgtgctttgtttggattgccatgtataatttatatgggtgaaaaagatattgagagacaatcaccaaatgtatttagaatgaagttattaggtgccgaaattagaagtgtgacaacaggatcgaaatctcttaaagatgcaatgaatgatgcattaagagattgggtaactaatgttaatgatacattttatattattggcactgcagcaggacctcatccatatccatcaatggtcagagattttcaatcagtaataggaaaagaggtaagagaacaattaaatgaattagaaggtaggtctccagatctcttaatggcttgtattggaggtggatctaatgcattaggcttatttcatgaatttttagatgataaaaacgtaaaaatgatagcagttgaagcagcaggacatggtattaatacagagaatcatgctgcaagtcttactggagggaagcctggtgtattgcatggaaataaaacttatcttttacaatctgatacaggtcaaataaaggaggctcattcgatatctgcaggacttgattatcctggtattggcccagagcattcttatctatttgaaaaaggtagagtaaaatacgaatctgcaacagataaagaagctttagatgcatttcaatattgttgtaaactagaaggaataattccagcattagaaccagcacatgcattagccgttttaaaaaggattgctaaaaattatgatgaaaagacaattattgttatgaatatgtgcggaagaggagataaagatatttttacagttgcagatgaattacaaataaaattataat

SEQ ID NO: 281857 - DNA, 946 bp, Unknown
  Bacterial polypeptide expressing nucleotide sequence isolated from the Sargasso Sea
taaccatactggcgcacataaaatctgtaatacgatagggcatgctcttttagctaaaagaatgggcaaacctagggttattgcggagaccggagcaggccaacatggcgtagcaacagcaactgtagccgcgcgtttgggtttggaatgtgatgttttcatgggcgcagaagacgtcaaaagacaaagccccaatgtttatcgtatgaagctactcggtgccaatgttatacctgtacattcgggctcgaagactctcaaagatgcccttaatgaggctatgcgtgactgggttaccaatgttgatactacgcattacattattgggactgttgcgggccctcatccctaccctatgattgtgcgcgattttgcttcgataataggacaggagacacgcgcacagatcctagaacaagcggggaagttacccgacctaattgtcgcatgcgttggtgggggttccaacgcgatggggttgttttacccatttatagatgatgctgaggtccagatggtcggcgtagaggcgggtggtcatggtctggagagtggaaagcacgcggctcctctcaatgatggaaaggttggtgtcctgcatggcaatagaacctacttaatggctgatgaggacggacaaatcatggaaacgcattcgatttcagctggtctggactatcctggagtgggtccagagcactcgtttttgaaagatataggccgtgcaaaatatgactcggttaccgacgacgaagcaatgagtgcctttaggatgctaaataatctagaaggtatattgcccgctcttgaatcgagccatgcgttggcttgggtgatcaagaaggctccagcgatgtctgaagaagacattgttgttatgaacttatcaggcagaggagataaagatattctcactgtcgcagaaatggatgggatcctcgtctag

SEQ ID NO: 281858 - DNA, 700 bp, Unknown
  Bacterial polypeptide expressing nucleotide sequence isolated from the Sargasso Sea
accagatggattagtgcaaacaagtattaagaagataaaggataaatttcctgatttattagttatcagtgatattgctttagatccttatacatctcatgggcaagatggaataattgataagaagggttatattattaacgatgatacgaataacattcttgtaaaacaggcactaagccatgctgagtctggttctgatattatagctccctcagatatgatggatggaagaattaagcttattagaaaagaattagaaaagaatcaattttataatactaaaattttatcttactctgcaaaatattcatcaagttattatggtccttttagggatgcaattggctcattaaaagcactgggtaaatcggataaaaaaacttatcagatggattactcaaatagaaatgaggccattagagaaatagacttagacttaagagaaggtgcagatcttgttatggtgaaaccagctataccaaacttagatataatatctgatctcaaggaaacgtttaaggtccctattcttgcttatcatgtaagcggtgaatatttgatgatcaaatctgccgctaaaaaaaatgtgttcaatgagaaagatttagttatagagacacttacatcaattaaaagagcaggtgcatcgtcaattattacatattatgcgaaagaagcagcgaaatggatgaattga

SEQ ID NO: 281859 - DNA, 637 bp, Unknown
  Bacterial polypeptide expressing nucleotide sequence isolated from the Sargasso Sea
atgattaaaaattatttccctattgatcagtcaaaatctcttaaaaagaaaattttaattcaacctttatttgtggatcaaaaggtaaaaaattcaaaggaaattaaaggattaggtgataataagagttggtcatcttcatctataattaaggcaattgaaaaggatttaaaaaaaggtatcaataattttcttctttttatcgttccaaataaaaaacaaaaacatccggaggattttagctttcactatgaagttataagaaaaattaaaaattattttggaaaagatatagttttacttatagatacatgcttatgctcaataactgttgatgggcattgtggagttactcataaaaaatcaattgatcttaataagacacattactctttaggattagcggcaaatacatatcttgaggcgggagctgatataattgcaccaagtgacatgatgaaaaatacgactaaatatttgagaaaaatatttgttcaaaatggtttttcaaattctcaaataatgagttactcaacaaaatttaaaagtcacttctacggcccttttagagatgttgcaaaatcatcaccacagggatttgatcggtcatcatatcaattacctgtaaagacaaagt

SEQ ID NO: 281860 - DNA, 355 bp, Unknown
  Bacterial polypeptide expressing nucleotide sequence isolated from the Sargasso Sea
atttagggacgcagttggatcaaaaaagttattaaaaggtgataaaaaaacatatcaaatggattttagaaattcagatgagtctctgagagaagtttcattagatataaaagagggtgctgatatggttatggttaaacctggtatgccctatcttgatataattaaaaaagtaaaagacaatttcaaaataccggtatttgcatatcaagtttctggcgaatacagtttaataatgaatggaattaataaaaaattaatagacaaagcttcaataaaagagtctcttatttcatttaaaagagctggagcaaatagtattgtaacttattttgctgatcagattgatctttaa

SEQ ID NO: 281861 - DNA, 445 bp, Unknown
  Bacterial polypeptide expressing nucleotide sequence isolated from the Sargasso Sea
catggatatcgcttatcgcccccgccgactgcggcgcacgcctggcctgagggccatggtccgcgagcaccacgtcagtgcagccgatttcatctaccccctattcgtgcatgaaggggccagcaacgaaccgatcggcgccatgcctggcgcccaacgctggagcctcgatggcctgcttggtgaagttggccgcgcctgggatctcggcatccgctgcgtggtgctattccccaaggtggccgatggcctcaaaacggaagacggcagcgagtgcttcaacgacggcggcctaatccctcgcgccattcgccgcatcaagcaagagcatcccgggatgaccgtgatgacggatgtggcgctcgatccctactcatgcgatggccatgacggcatcgtcagcaatgacggcatcgtgctccacgatgaaaccgttgaaatcctc

SEQ ID NO: 281862 - DNA, 216 bp, Unknown
  Bacterial polypeptide expressing nucleotide sequence isolated from the Sargasso Sea
gaatgccatatcttgatataattagagaagttaaaaataattttaaaattccagttatcgcatatcaagtatcaggggaatatagtctgatacaaaatgcaatttcaaagaatatattagataaaaaatcgatatacgaaagcctagtttcttttaaaagagctggggcaaatggaattataacgtattttgctgatcaaataaaactagattaat

SEQ ID NO: 281863 - DNA, 196 bp, Unknown
  Bacterial polypeptide expressing nucleotide sequence isolated from the Sargasso Sea
gttcaatgtacccattatcgcttacaacgtgagtggtgaatattccatggttaaagcaggaaatcaaaaaaactatattgatgaaaaaagtgtgatgatggaaatcatgtattcaataaaaagagcgggagctaattcaataattacctatcatgcgttagaaattgctgaaattttaaaaaataatgaagtttaa

SEQ ID NO: 281864 - DNA, 622 bp, Unknown
  Bacterial polypeptide expressing nucleotide sequence isolated from the Sargasso Sea
atgtcagattttaatataggccaatttccaactacacgattaagaagacttcgtatgaaagatttttcgcgaagaatgattagtgaaaataaccttactgttaatgatttaatttggcccatatttgtatgtgaaggaaataatattgctgacaaaataaattctatgccaggcgtctttagatattctattgataacatcttaaaagaactagaaactgttgttaaattaaaaatacctgcgattgctttattccctcaaatagatagcgccttaaaaaataaagagggctctcaagcaatagatgaaaataatttaatttgccgaacaataagatctattaaaaaacaatttcctgaccttggagttatctgtgatgttgcgctagatccttttactgatcatggacacgatggactaattgttaatgatattgttgataatgacgcaacattaaaagttttagaaaaacaagcactggttcaggctaatgcaggatgtgatattattgcgccatcagatatgatggatggcagggttggaataattagaaaagcccttgatgaaaataattttcaaaacactttaatactctcttacgccgctaagtatgctcaaaatt

SEQ ID NO: 281865 - DNA, 637 bp, Unknown
  Bacterial polypeptide expressing nucleotide sequence isolated from the Sargasso Sea
tatgattacaggtaaatacccaaatttaaggcttagaagatcaagaaagtatgcttggtctagaaaattagtccaagaaagttctttatcttatagtgatttgatattgccaattttcataattgaaggaaaaaataaaaaagaatcaataaaatctatgccaaatgtatttaggtatagtatagacaaattaaatacagttgtaggtaaagcaataaaaaaaggtatacctatggttgctttgtttcctcacattagtccaaaaaaaaaggatgaaaaaggtacggaggctttaaatccagataatttagtttgtagaggtataaagttcattaaaaagaaatttaacaataaaattggtattatgtgtgacgtggccctagatccttacacttctcatggccatgatggattattaaagaaaaaaactattattaatgatcaaactgtagaaatacttaccaaacaagcagtgcttcaagccaaaataggatgcgatgtaatcgcgccttcagatatgatggatggcagaattggaaaaattcgatcagctttagataaagaaaatttaaatgatgtgcaaatattatcatatgcggttaagttttcatctagtttttatggaccatttagagaa

SEQ ID NO: 281866 - DNA, 340 bp, Unknown
  Bacterial polypeptide expressing nucleotide sequence isolated from the Sargasso Sea
ggatcaaaaaaattattaaaaggcgataaaaaatcatatcaaatggattttagaaattcagatgagtctttgagagaaatttcattagatataaaagaaggtgctgatatggttatggttaaacctggtatgccctatcttgatataataaaaaaagttaaagataatttcaaaataccagtatttgcatatcaagtttctggtgaatacagtttgatcatgaatggaattaataaaaaattaatagataaagcctcaataaaagagtctcttatttcgtttaaaagagctggagcaaacggtattgtaacttattttgccgatcaaataaatctttaat

SEQ ID NO: 281867 - DNA, 179 bp, Unknown
  Bacterial polypeptide expressing nucleotide sequence isolated from the Sargasso Sea
ttttgcctatcaagtaagcggcgaatactcgatgataaaagctgctggattaaatggctggctgagtgccgaacgttgtatgattgaaagtttgatctctttcaaacgcgccggtgcaaacggtatattaacctattttgctattgacgcggcgaggctaataaaaaacccccactaga

SEQ ID NO: 281868 - DNA, 631 bp, Unknown
  Bacterial polypeptide expressing nucleotide sequence isolated from the Sargasso Sea
tatgaaatttcaaggaaaatatcctaacactcgacttagaagaggaagaagtgaggattggataagaagattaattagtgaaaacaatttatcagtcgatgatttaataatgccaatttttatatgtgagggaagaaataaaattgagaaaattcactctatgcctggaatatatcgttattccatagataaattaggatcagcaataaaacgtatagagaaactaaaaatacctctcgtagctttatttccatatgtatcatcaaataagaaagataattttggatctgaagctttaaatgaaaacaacttaatctgcaaagctcttagagctattaaaaataatttcaaaataggtgtaatgtgtgatgttgctttagatcctttcacaaatcatggtcacgacggaatacttaaaaataattatgtattaaatgatgaaacgataagggtgttaattcagcaagccttattatatgcaaaaaatggttgtgatattattgctccatctgacatgatggatggtagaataggtctcataagaaaatctttggaaaaaaataagtttataaatacaaagatattatcatatgcagttaagtatgcttcaaatttttacggaccatttaga

SEQ ID NO: 281869 - DNA, 179 bp, Unknown
  Bacterial polypeptide expressing nucleotide sequence isolated from the Sargasso Sea
ccccatcgctgctacaacgtcagtggtgagtatcgatgtcaaggccgcggcggaacggggctggatcgatgaaaaggccgtcgtcttggagacgttgctgagcttcaagcgcgccggtgccgatctgattctcacgtaccacgcctgcgatgcagcggcctggttgaaggaggcctgat

SEQ ID NO: 281870 - DNA, 652 bp, Unknown
  Bacterial polypeptide expressing nucleotide sequence isolated from the Sargasso Sea
aatgagtaatatgttgatgagattaaagaaaaataaaattttacgcaatatgtgcgcagaaactacatttttaaatgatcaacttattcaaccaatttttgtaagtgaaaatttagaaagtaaaaaagagattcctggtattccaaataattttgttatgaatttaaaagaatctattcagcaaatagaattagatttaaaaaataatcaaaaaaattttttattatttatgattcctaaagataaaaaagatagtgactttaactttaattttcagcaaaatgtcatttcaacaattaaaaataaatttaaaaatgatatgttgttatgggcagatgtatgtctttgttcaatgactacgcatggtcattgctgtttatttgataacaacaaaaatattgatttaagtagtagtctttctagtctatcaaaagttgcattaaattatgctgaagcaggagtcgatggattagctccaagcgatatgatggatgggagaacaacttctataagaaaaattttagatgataataaatacaatttagttcctattatgagttatagtactaaatttgctagtaatttctatggaccatttcggtatgcagcagattctgcaccttcatttggagatagaaaacaatatcaacta

SEQ ID NO: 281871 - DNA, 434 bp, Unknown
  Bacterial polypeptide expressing nucleotide sequence isolated from the Sargasso Sea
tatgaaatatcctgaatccagattaagaaggcttagatataacaaaaacattagatcgcttgttcaggatgtcgaaataaatatctctgatttaatatatccaatttttgtatgtgaaggcaataatgtaaaggatgaaatagagtctcttaaaggacaatatagactttcaactgacaatgtaattgaaaaatgtgaacaattaattaagcttggaattaaatctatactattatttggggtatcagataaaaaagacagcaacggggagattgcatgttcaagcgatagtattgtcccaattactattaaagcaattaaagaaaggtttaaagacgaaattttaataattgcagatttatgtaattgcagctatacttctcatggacattgcggaacaattatagataatgatgttgataatgatgaaactt

SEQ ID NO: 281872 - DNA, 655 bp, Unknown
  Bacterial polypeptide expressing nucleotide sequence isolated from the Sargasso Sea
attgagaagagttcgcagttcgaactgggtaagaaggcttgtaacggagcacagtttatctgcaaatgatttgattttaccaatttttttgacagagggaaaaaataaaagagaaaaaattaaaaatatgcctgatatttttagatactctattgataatctaaatcaaatattagaccaagcatcaaagtatcgtataccaatgattgcattatttcctaacacgccaaattcaaaaaaagataaatttggaagcgaggctcttaatgataagaatattgtttgcaaggctttaaaaaaaataaaaaaaaattataaaaatttcggccttatgtgtgatgtagcgctggatccttacacagatcacggccatgatggattgttaattgatggaataatcgataatgacaagactttagaaattctgattaatcaagcagtcttgcaagctgaaatgggatgtgatgtaatcgcaccgtctgacatgatggatggtagaataggaagaattcgaaaagagttagataaaaataactttaaagacaccaaaattttatcttacgccgttaaatacgcgtcaaatttctacggtcctttcagaaatgctataggttcaaataaatttcttaaaggagataaaaaaacttatcaaatg

SEQ ID NO: 281873 - DNA, 430 bp, Unknown
  Bacterial polypeptide expressing nucleotide sequence isolated from the Sargasso Sea
aaacaaatttaaagatgtccagattatatcgtatgccgttaaatatgcttcaagttattacggcccctttagagatgcagttggatcaaaaaaatcattaattggtgataaaaaatcttatcagatggattttaaaaactcagatgaagcaattagagaggttgcgcttgatattaaggaaggtgcggacatgattatggttaagccagggctaccctaccttgatataataaataaagtaaaggacaaatttaaagtccctgttttggcttaccaagtttcaggagaatatagtttaataaaaaatggtattcaaaaaaaaatcattgatgaaaaaacaattatagaatcgttaatgagtcttaaaagagctggagcaaatgcgatagtttcatattttgccgacactattgacttttcaagtttttaa

SEQ ID NO: 281874 - DNA, 620 bp, Unknown
  Bacterial polypeptide expressing nucleotide sequence isolated from the Sargasso Sea
tatgggctcatttcccaatgtacgcatgcgccgattgcgtcaatgcccttcgattaggcgtatgatggctgaaacgcatctaagcgttaatgacttgatttttccactatttattcatcatggcaagggtgtcaagcagccgattgcgtcgatgcctggttgtttccaatatagcatcgatcagttgccgccattactggccgagatacagcaattgggggtttgctcagtgctggtatttggtatcccagtaagcaaagatagcactggctcagatgcctatgatgcgcatggtgtgctggctagcgccattaaaatgatcaaaaaagaagcgccaagcctatgggtgattgctgatatttgttgttgtgagtacaccgaccatggtcactgtggggtgctgcagcaagcaagtgatgcttatgaggttgataacgatgccactttggctgtgttggccaaacaggcgctggtacaagcccgtgcgggggttgattgtgtggcgcccagtggcatgatggacggcatggtgcaggcgatacgtgctgctttggatgctgagcatttccaggatgtggcggtcatgagctacgcggtcaaatatgcttcagctttgtatg

SEQ ID NO: 281875 - DNA, 253 bp, Unknown
  Bacterial polypeptide expressing nucleotide sequence isolated from the Sargasso Sea
gatattttgatggtaaaaccaggaatttcatacttggatatagtttatagattaagcactttttcaaataaacctatagctgcatacaacgttagtggggagtattccatggtaaagtctgctgctatgaagaactggattaacgaaaaagatattgttttagagacattgcttagttttaaaagagcaggagcaaaattaatactcacttatcatgcttgtgatgcatctcaatggttgcaggatacttaaa

SEQ ID NO: 281876 - DNA, 364 bp, Unknown
  Bacterial polypeptide expressing nucleotide sequence isolated from the Sargasso Sea
gatgccgtcgagggcatcttggcgctcttaccgggtgataaaaaaacatatcaaatggatatagcaaattctaatgaagcgcttcgattggtagcgagagaccttaaagaaggcgcggacatggtaatgataaaacctgggatgccctatcttgatatctgtagaagggtaaaggatacatttggcgctcccacttttgcatatcaagttagtggcgaatattcgatgttatccgcagcctttgaaaaaggatggcttgatcgaaataaaatcatcatcgaaaccttaatggcgttcaagcgttctggatgtgacggaatactaacttactttgccccagaagcagcaaaattattaaaataga

SEQ ID NO: 281877 - DNA, 903 bp, Unknown
  Bacterial polypeptide expressing nucleotide sequence isolated from the Sargasso Sea
tggtatggcctgtttttgtatgtgaaggaagtaatgtaaaagatgagattgaatctatgcctaatgtttttagatattcgatagacaatttaagcgaggtttatgatactgctgacaagcataatataaatcttatagccatatttccattcacgcctgaagaattaaaaacaaagtctggggatgaggcattaaacccaaacaatttagtttgcagatctattgaaaagcttaaaagccaaaaacctagctttggtattatgtgtgatgttgcattagatccatatacaaatcatggtcatgatggactattaagtgatgatggcaagattcttaacgacgaaacaaatggtgttttagtaaaacaatcgattcttcttgctcaatttggtgcagatattgtcgccccttcagatatgatggatggtaggattggaatgatcagagatgaattagaaaaacatcgattaaaagatactctcattttatcttatgccgctaaatattcctcaagtatgtattccccattcagagatgctgttggctcttccaagaacttaaaaacagataaaaaaacatatcaaatgaatatctataattctaatgaagccattagagaggcatcaatggacataagagaaggggccgatatgattatggttaagcctggcattagctatttggacattatttacagaattaaaaatgaattaaaatgccctacatttgcatatcaagtttcaggtgagtactcacttattaagtttggtgctaaaaaaggtgtaattgatgaaaaaaccactgttattgaacaattgtcttcttttaaaagagcgggagcagatgcaataattacttattatgcgcctgaagtttcacaatttttaaaactaattgattaaa

SEQ ID NO: 281878 - DNA, 517 bp, Unknown
  Bacterial polypeptide expressing nucleotide sequence isolated from the Sargasso Sea
tttttaaataaaaaaatagacaacgataaaacaattaatattttagttaaacaagctttactgcaggcagaaatgggctgcgatgtaatagctccatccgatatgatggatggtagaataggagtaataagaaaagcgttagataaaaataatttacaagatgtttgtattgtttcttatgcagcaaaatatgcatctggatattatgggccttttagagatgctattggaacgaaaaaaagattaaaaacagataaaaaaacttatcaaatggattttagaaatactagcgaaacttttcgtgaaattagtttagatattaaagaaagtgctgatattgttatgatcaaacctggactaccttatttagatataataagtaaaatcaaagataattttaaagttccagtttttgcataccaagtttcaggtgagtatagttcaataaaacatagtattgataaaaatcttttcacagaagatattattattgagaatttaacttccttcaaaaaag

SEQ ID NO: 281879 - DNA, 796 bp, Unknown
  Bacterial polypeptide expressing nucleotide sequence isolated from the Sargasso Sea
atgaaattatttaatagtaaaggttttccctatcatagaggtaggagattaagatcctttaattatctaagagatatggtatcagaaaatatcctaaccacacatgatcttgtaatgccatattttgttagagaagataatgacgattcgtcaattgaagggttaaaagatctaaaaagattttcaattactgaacttcttacagaattagatatcatctcaaagaatggattaaaagctatagcactatttccaaaagtagtaaaagaaaaaaagtccttaaaagctgaagaatgttacagtaataaaaacctaatatgcaggacaataaaatctatatctaagagatttccagaaatgataataatttgtgatgttgcccttgatgcttatactttaagcgggcacgatggtataatcgatgccaatggacaaattgataatgattttacaatagatttattatctaaaatggcagttaatttcgctgagtctgggtgtcgagttattgctccgagtgatatgatggatggaagggtaaagattattagagaaaatctagagaaaaatggtttttttgatacaaatatcttgtcctacagcgctaaattttgttccaatttctacacaccttttagagatgcactaggaagtaaagaaaatcttggtaattcaaaaaaaaattcatatcaaataaattatactaatagtagggaagcccttaaagaatctattgaagatatttatgagggagcagacataataatggttaaaccagctgggatattaccttgat

SEQ ID NO: 281880 - DNA, 730 bp, Unknown
  Bacterial polypeptide expressing nucleotide sequence isolated from the Sargasso Sea
atgattattggtaaatatcccaatcttagacttagaagaactagaaaagaatcgtggtcaagaagactgattcaagaaaatactttaagtccaaatgactttatattacctatttttttaatagaaggatctaataaacggaaaccaatttcatctatgccaggtgtatacaggtatactattaatagattgagccaaatagtagacagagcaataaaaaagaagataccaatggttgcactttttccaaaaacccaaaatgtacgtaaaaatgaattgggtactgagtcgcttaacgaaaaaaatttagtttgtagagcaattaaagaaattaaaaaaagatacaaaaatcaaataggtattatgtgtgacgtagcattagatccctacacatcacatggtcatgacggtttaataaaatctaacacaatacttaatgatgagactatagaggttcttattaatcaatcattacttcaagcagagatgggttgtgatgtactggctccttcagacatgatggatggcagaataggtaaaatcagaaaagctttagataaaaataaattccaaaatgttcaaatattatcttatgcagcaaaatatgcttcaagtttttatggaccttttagaaatgcaatcggttctaaaggttcgttaaagggagacaaaaaaacttatcagatggattatagaaattctaatgaagctttaagagaagttgcgttag

SEQ ID NO: 281881 - DNA, 178 bp, Unknown
  Bacterial polypeptide expressing nucleotide sequence isolated from the Sargasso Sea
gtttccggagaatatgccatggtcattgctgcagcagaaaaaggatggattgaccgggatatggccatgatggaaatgctcaattcaatcaagagagcaggtgcagatatgatccttacctactttgccaaagatgcagcaaaacgattaaagtctgattacggatctttcagttaat

SEQ ID NO: 281882 - DNA, 624 bp, Unknown
  Bacterial polypeptide expressing nucleotide sequence isolated from the Sargasso Sea
catgcaaaaaacattatttccaaaagttagaccaagaagattaagattgaataaaactataagaaatctggtttctgaaactagcattaacaaatctaaattaattcaaccacttttcgtttccgagattctaaagaataaagaagaaataccaacaatgccagatcaataccttttttcaaaaaatgatctaatgtttgaggtagatgaactagttagtttaggaattcatacaatcgcattatttcctaatacggataatgatttaaaagataattctggttccgaagcattaaaagaagataatttcatttgtagaattgtaagagaaataaagcaacgctttcctgaattggtaattattactgatgtagcattagatccttatacatctacaggtcatgacggaataattttagatgacaaagttgataatgatcttactcttgatgcattaacaaagatgtctttaaatctagcttcatctggtgcagatattcttgctccttcagacatgatggatggaagaataggtaaaataagagattcattagagaaaaataattttaaagacactattctgttaagttatgcagctaaatatgcatcaaacttctatggtcc

SEQ ID NO: 281883 - DNA, 289 bp, Unknown
  Bacterial polypeptide expressing nucleotide sequence isolated from the Sargasso Sea
tgatgaagctttaagagaagttgctcttgatatcaaagaaggtgcagacatggtgatggtaaaaccagggatgccttatttggatattatcaaatctgtaaaagaaaaatttaaaataccagtatttgcttatcaagtatctggtgaatacagtttaatttcaaatgcaatacaaaaaaaattagttaatgaagattctgttattgaaagcataatggcttttaaaagagctggtgcttctgctattgttagttactacgctgatagaattgataaaatcttaaaataa

SEQ ID NO: 281884 - DNA, 277 bp, Unknown
  Bacterial polypeptide expressing nucleotide sequence isolated from the Sargasso Sea
tgaagctttgcgagaagtttcattagatataaaagaaggtgctgatatggtcatggttaaacctggaatgccctatcttgatataataaaaaaagtaaaagataatttcaaaataccagtgtttgcttatcaagtttccggtgaatatagtttgataatgaatggaattaataaaaaattaatagacaaaacttcaataaaagagtctcttatttcgtttaaaagagctggagcaaacagtattgtaacatattttgctgatcaaattgaactttaa

SEQ ID NO: 281885 - DNA, 228 bp, Unknown
  Bacterial polypeptide expressing nucleotide sequence isolated from the Sargasso Sea
ctggaatgccttacctagatataattagaagtgtaaaagataaatttaaaataccagtaattgcctatcaggtatctggggaatatagcttaatgaaaaatggaataaataaaaaaattattgatgaaaaatctataattgaatctttatatgcatttaaaagagcaggtgcaaatgcaataatcacatactttgccgattcaattgatttagatttgcttaattaat

SEQ ID NO: 281886 - DNA, 274 bp, Unknown
  Bacterial polypeptide expressing nucleotide sequence isolated from the Sargasso Sea
agcgagagatcttgatgaaggcgcagacatgattatgattaaaccaggaatgccttacttggacatttgtaggcgagcaaaggatatgtttggagctccaacatttgcttaccaagtttcaggagagtattcgatgcttcaagcggcaataaagaatggttggctcaacgggaatatggttattatggaaagcctatactgcttcaaaagagcaggatgtgatggtattttgacttattttgccccaatagctgccaaagagcttattaattaa

SEQ ID NO: 281887 - DNA, 295 bp, Unknown
  Bacterial polypeptide expressing nucleotide sequence isolated from the Sargasso Sea
gaggctttaattgaatcagcattggatcagtatgaaggagctgatattttgatggtaaaaccaggaatttcatacttggatatagtttatagattaagcactttttcaaataaacctatagctgcatacaacgttagtggggagtattccatggtaaagtctgctgctatgaagaactggattaacgaaaaagatattgttttagagacattgcttagttttaaaagagcaggagcaaaattaatactcacttatcatgcttgtgatgcatctcaatggttgcaggatacttaaa

SEQ ID NO: 281888 - DNA, 715 bp, Unknown
  Bacterial polypeptide expressing nucleotide sequence isolated from the Sargasso Sea
aaaggtatcaataattttctactttttatcgttccaaataaaaaacaaaaaaatccggaggattttagctttcactatgaagttataagaagaattaaaaattattttggaaaagatatagttttacttatagatacatgcttatgctcaataactgttgatgggcattgtggagttactcataaaaaatcaattgatcttaataagacacattactctttaggattagcggcaaatacatatcttgaggcgggagctgatataattgcaccaagtgacatgatgaaaaatacgactaaatatttgagaaaaatatttgttcaaaatggtttttcaaattctcaaataatgagttactcaacaaaatttaaaagtcacttctacggcccttttagaaatgttgcaaaatcatcaccacagggatttgatcggtcatcatatcaattacctgttgaagacaaaacaaaggcgattaaaagctcaattagtaatgcagcccaaggtgcaaattatttaatggttaagcctggtatgacttcaatagatttaataagagatataaaaaaggagacactgcttcccacgggtgcgtaccaagtaagtggtgagtatgctagtctacaaatgctcagcaaagctaaatttggcaattatgttgatttgctcatagagtctttaacggtactcaaaagagctcaagcagattttattatta

SEQ ID NO: 281889 - DNA, 220 bp, Unknown
  Bacterial polypeptide expressing nucleotide sequence isolated from the Sargasso Sea
ttgccatatctagatatcataagaacaataaaaaataattttaaaataccagtctttgcatatcaagtttcaggcgaatacagcatgttagctaatgctataaataaaagaataataaagaaggatgctatatttgaaaatttaatgagttttaaaagagcgggagctaatgcaatcgtaagttattatgcagatagattaaatgaaattttactctaat

SEQ ID NO: 281890 - DNA, 679 bp, Unknown
  Bacterial polypeptide expressing nucleotide sequence isolated from the Sargasso Sea
ctgcccaaaacccgaccacggacccccgagcaaaccatgaccgatagtttcccctctgccagatttcccgccacccgtatgcgccgcaaccgccgcaccccctggctgcgccggctggtgcgagagagccaggtgactgtcaacgacctgatctggcccgtcttcgtggtcgatggggaaagccagcgtgtgccggtcgagtccatgccgggcgtcgatcgcctgagctgcgatttgatcggcgatgcggtcggtcaggcctgggacctaggtatcccgatgatcgctattttcccatacacaagcgagaggctgaagacacccgacgcccgcgaagcggtcaatccggacaatctagtttgccgggccgttcgagctatcaaggacagcgtccctgatatcggcgtcatgtgcgatgtggcgctggatccgttcaattccgatggacacgatggcattttacaagacggcatcatcctcaatgatggatccgttgagatcttatgccagcaagctctagtccaagcccaggctggttgtgacgttatcgcgccctcagacatgatggatggacgcgtcgccgcgatccgctcgaccctagatgggggcggatttgagcacgtagcgatcatgtcctacgcggctaagtacgcgtctgggtttacgaccccttccgcga

SEQ ID NO: 281891 - DNA, 1000 bp, Unknown
  Bacterial polypeptide expressing nucleotide sequence isolated from the Sargasso Sea
atgaaaactgttggatcttatcccaaaacaaggcttagaagattaagaaagtctaaatggctgagaaatctagtttctgaaaataatatttcaaacaatgatttagttttaccgatatttatcagagaaggtaaaaataaaatagagcaaataaaatctatgcctggtgttaatagatattctgtagataaactctatactattttaaatgaagtaagaaaatttaaaatacctatggttgctttatttccttatacaccaaataataaaaaagatgataaaggatctgaagctttaaatccaaataatttaatttgcagaggtttgaaagttattaaaacaaaatttcctgacattggtgttatgtgtgacgttgcattagatccatacacgtcacatggtcacgatggtattatgaaaaaaaataaaattgataatgatgaaacgataaaaatactggtcaaacaagctttacttcaagcagagatgggttgtgatattatagcaccatcagacatgatggatggaagggttggagcaataagaaaagccttagataaaaaaaaattttatgacgttagtgttttatcttatgcaataaaatacgcctcaaatttttatgatccctttagagatgctgttggaagcaaatcaaaacttaaaacaaataaaaaaacatatcaaatggactacagaaataagttagagtcttttagagaggtaggactagatatcaaagaaggggcggatctagtaatgataaagccaggaatgttttacttagatataatcagtaatataaaaaaaaattttaatattcctgtaatagtatatcaagtttctggagaatatagtttattaaaaaatgctataagaaataaaattttatcagaagatgcaatgattgaaagcttaacttcttttaaaagatctggagcatgtgctatagtaacttattttgcacttgaaattgcaaaaaaaataaaacaaattaattaaa

SEQ ID NO: 281892 - DNA, 305 bp, Unknown
  Bacterial polypeptide expressing nucleotide sequence isolated from the Sargasso Sea
tcaaatggattttagaaatcatgaagaatctcttagagaagtagctttagcttttaaagaaggtgcagacatgattattgttaagcctggaatgccctatttagatattattagaagtgtaaaagataaatttaaaataccgacaatagcttatcaggtttcaggtgagtacagtttaataaaaaatggaattcaaaaaaaaattgttgatgaaaattctataattgaatccttaatatcttttaaaagagctggagcgaatgctataataacgtattttgctgataaaataaatttagtttaac

SEQ ID NO: 281893 - DNA, 510 bp, Unknown
  Bacterial polypeptide expressing nucleotide sequence isolated from the Sargasso Sea
atcttgaggccggagctgatataattgcaccaagtgacatgatgaaaaatacgactaaatatttaagaaaaatatttgttcaaaatggtttttcaaattctcaaataatgagttactcaacaaaatttaaaagtcacttctacggcccgtttagagatgttgcaaaatcatcaccaaagggatttgatcgatcatcatatcaattacctgttgaagacaaagtaaaggcgattaaaagctcaattaataatgcagctcaaggtgcaaattatttaatggttaagcctggaatgacttcaatagatttaataagagatataaaaaaggagacgctgcttcccacgggtgcgtaccaagtaagtggtgagtatgctagtctacaaatgctcagcaaagctaaatttggcaattatgttgatttgctcctagagtctttaacggtactcaaaagagctcaagcagattttattattacttatggagctagagatattgcaaaatacctataac

SEQ ID NO: 281894 - DNA, 1006 bp, Unknown
  Bacterial polypeptide expressing nucleotide sequence isolated from the Sargasso Sea
atgaaaaaattatctaaacaatcattcccgtccttaaggatgagacggctaagaagtaccaataacataagaagacttgtaagagagacaaaattagctccagaaaatcttattcaaccaatatttttgattgagggaaaaaataagaaagaaaaaatatcatctatgcctgacatttgtagattaacgattgaccatgctttaaaagaaatcaaaaaactttcaactgcaggaattattgcagttgccttattcccaaagatatcagcatcaaaaaaaacatttaatgcagaagaagcatataaagcaaatggattagtacaaacatgtataaaaaagataaaggataaatttcctgatttgttagttataagtgatgttgctttagatccttatacatctcatgggcaagatggaataattgatgagaagggttatattgttaacgatgatacaaataacattcttgtaaaacaggcactaagccatgctgaatcaggttccgacattatagctccttcagatatgatggatggaagaattaagttcattagaaaagaactggaaaagaataaattttataacactaaaattttagcctactctgcgaaatattcatcgagttattatggtccttttagggatgcagttggctcattaaaagcattaggtaaatcggataaaaaaacctaccaaatggattactcaaatagaaatgaagccattagagaaatagacctagacttaagagaaggtgcggatcttgttatggtaaaaccagctacacctaacttagatataatatctgacctcaaggaaacttttaaagtccctgttcttgcttatcatgtgagcggcgaatatttgatgatcaaatctgccgttaaaaaaaatgtattcaatgaaaaagatttagttatagaaacacttacgtctattaaaagagcaggcgcatcatcaatcattacatactatgcaaaagaagcagcgaaatggatgagttgaa

SEQ ID NO: 281895 - DNA, 756 bp, Unknown
  Bacterial polypeptide expressing nucleotide sequence isolated from the Sargasso Sea
aatgattaaaagaacatttcctcaaacaaggttgcgcagaactcgcacaaaaagttttttaagagacttaattgctgagaataatttaaacactgacgatctaatacaaccaatttttatagccgatcaatctgaagataaagttgaaataccatcaatgccagggatacataggcataatttagattctttgtacttcgaggtagaagcactaacccaagtaggaattaaatcaattgccatttttcccgcaattgacgcaggcaaaaaagataaagatggatcatacgcgttagatgaaggcaatattgtatgtttagcattaactggcttagcagaaagatttccagacattattaaaattgcagatgtcgcacttgatccatatacagatcatgggcacgacggacttttgattaatggaagagtcgagaatgacgaaactgttaaattacttcaagatcaagcattgctgttagcgcaatctggtgctgatattattgctccatcagatatgatggatggaagaataaaggccattagggatactttagaatcgaataaattttttgatacgattatcttatcttatgctgccaaatatgcttctagtttttatggtcctttcagagaggccgttggatcagctgcaaatcttggtaaggcttcgaagaaaacatatcaaatgaattttgcaaatctcgatgaggctcttcatgaagtaggaatggatatagaagagggagcagatatagt

SEQ ID NO: 281896 - DNA, 195 bp, Unknown
  Bacterial polypeptide expressing nucleotide sequence isolated from the Sargasso Sea
aaatcagagtttcagttccaacatttgcctatcaagtatcaggggaatattcgatgattaaagcagctgttaacaatggatggttggaatcaaaagttattaaagagtctcttttatcatttaaaagagctggtgtagatggtattttaacctattttgctagagagattgctgaggaattacgggatgaatgaa

SEQ ID NO: 281897 - DNA, 705 bp, Unknown
  Bacterial polypeptide expressing nucleotide sequence isolated from the Sargasso Sea
tatgactaagcaagaaagaaaatttcctaatacaaggatgagaagaaatcgaatgaaaaaattttccagaaagcttacctctgagaatgcattatcagctaatgatatcatttggcctgtatttattaaagaggggaaagctataaaacaagttattgatgcgatgcctgacgtgttctgtttttcaatagacagtttgataaaagaattagagaaccccattcgtttaggactgaatgcgattgctttatttccaaatattgactctaagttaaaagacagagagggttctcaaggtattgatccaaacaatttgatatgtagagcgatcaaggaaataaaaaaagagtttccatcattgggtatcatttgcgatatagcattggacccattcactgatcatggtcatgatggagtggtatatggtggtattgttgataatgaccttacactagataaattaaataagcaggcattgatctatgcggaagcaggatgcgatattatagcaccatctgatatgatggatggcagagtcggctcaataaggacttgtcttgaaaagaataattttaaaaataccatgataatgtcctatgctgcaaaattctcatcctcatattatggaccatttcgcagcgcaatcggatcagaggaacttatccaaccaagagataaaaaatcatatcaactagattttgcaaa

SEQ ID NO: 281898 - DNA, 171 bp, Unknown
  Bacterial polypeptide expressing nucleotide sequence isolated from the Sargasso Sea
accaggtatctggtgagtattcgatgataaaagcagctgctgataaaggatatgttgatgagaatgaaattgtttatgaacaactaacttcctttaaaagagctggggcagatgcaattttgacttattttgcaccccaagttgccaacaaattaagatcaggaagttaat

SEQ ID NO: 281899 - DNA, 364 bp, Unknown
  Bacterial polypeptide expressing nucleotide sequence isolated from the Sargasso Sea
ttttagagatgcagtaggttctaaaggttcgttaaaaggagacaaaaaaacttatcagatggattatagaaattctgatgaagctttaagagaagttgcattagatattaaagaaggtgctgatatggtaatggttaaaccaggtatgccctacttagacataataaaatcaattaaagaaaaatttaaattacctgtatttgcctatcaagtatcaggagaatacagcttaatcgaaacagctataacaaaaaaattaattaataaagatgctatatatgaaagcttagttgcttttaagagagctggtgctaatgctatagtaagttattacgctgatagaattgataaaataataaaataa

SEQ ID NO: 281900 - DNA, 343 bp, Unknown
  Bacterial polypeptide expressing nucleotide sequence isolated from the Sargasso Sea
tgttggatcaaaaaaattattaaaaggcgataaaaaatcatatcaaatggattttagaaattcagatgagtctttgagagaagtttcattagatataaaagaaggtgctgatatggttatggttaaacctgggatgccctatcttgatataataaaaaaagttaaagataatttcaaaataccagtatttgcatatcaagtttctggtgaatacagtttgatcatgaatggaattaataaaaaattaatagataaagcctcaataaaagagtctcttatttcgtttaaaagagctggagcaaacggtattgtaacttattttgccgatcaaataaatctttaa

SEQ ID NO: 281901 - DNA, 628 bp, Unknown
  Bacterial polypeptide expressing nucleotide sequence isolated from the Sargasso Sea
tatgaattcgattattcgtcctagaagattaagaagaactgaagcaattagagaaatggttagagaaaatcatctaacggcatctgactttatatatccattatttattcatgaaaaagattttaaagaggaaatttcagcaatgcctggaacttatagatgggatattaatggcttaataaaggaggttactagggcatgggaattgggaatacggtgtgtggttcttttcccaaaaattaacgatagcttaaagactgaagatggagcagaatgttttaatgaagacggtttaatacctaaagctattcgaatattaaaaaaagagattccagaaatggcaataatgacagatgttgccttggacccgtactcttgtgatggtcatgatggattagttgatgaaactggaaaaatattgaatgatgaaacaatcgaaattttaaaaaaacaagccctaacacaagcaagagctggagcagattttattggccctagtgatatgatggatgggagagttggagcaattagagcttctcttgatagtcaaggatttagtgatgttggtattattagttacacagcaaaatattcatctgcttactatggtccatttagaactgcttag

SEQ ID NO: 281902 - DNA, 703 bp, Unknown
  Bacterial polypeptide expressing nucleotide sequence isolated from the Sargasso Sea
atgtctatttttagaaaatacccaagtacccgcttaagaagggtaagaaagaacctcaatcttattgaacttgtatctgaaactaacctaacatcaaaagatcttatacaaccaatcttcattaaagaaaattttgaaggcaaagaagaaatcgaatcaatgccaggtatcttcagatttggtttaaatcatgtgctgagtgaaatagaggaagttataaatgcaggcataaatgctatagctgttttcccagtcatagaatcttcaaaaaaagatgaaaaaggatcagaggcattaaacaaaagcaattttatcgctcattcaatcaataaaattaaacaagaatttcctgaattaatattaattgcagatgttgcattagatccttatacagatcatggtcatgacggtattttaataaataacgaagttgcaaatgatgaaactttagaagttctaattgagcaatctatattactcgctgaggctggggcggatattattgctccttctgatatgatggatgggagaattggattaataagagattctctagaaaaacaaaatttaaaagacacaatcttgttatcttatgctgctaaatataattcaaaattctatggaccatttagagatgcagtaaattctgcatcaaatcttggtaattcttcaaaatcatcataccaaatgaatatatctaaca

SEQ ID NO: 281903 - DNA, 521 bp, Unknown
  Bacterial polypeptide expressing nucleotide sequence isolated from the Sargasso Sea
aattttgcaagcacaaatgggttgtgatgtaattgctccgtcagacatgatggatggtaggataggcaaaattagaaaagccttagataaaaatggcttcaaatcagtgcaaatattatcttatgcagtaaaatatgcttcgaacttctatggacctttcagagatgctgtgggttcaaaaaaattattaaaaggaaataaaaaagattatcaaatggattttagcaactcaaaagaggctttaagggaggttgctttggatataagtgaaggagctgactttgtgatggtaaaacctggaatgccttatttagatataattaaattagttaaagatagttttaaaatacctgtttttgcataccaagtttctggtgaatatagtttaattatgaatggtataattaacaaaacattaaaagaagaagctatatatgaaagcttaatatcttttaaaagagctggagcaagtgcaatagtaacctattttgcagattttatagctaaaaaacttaaataaa

SEQ ID NO: 281904 - DNA, 331 bp, Unknown
  Bacterial polypeptide expressing nucleotide sequence isolated from the Sargasso Sea
caaaacgttcaaatattatcgtacgctgcaaaatatgcttcaagcttttatggaccttttagagatccagtcggttctaaaggttcattaaaaggagacaaaaaaacttatcaaatggattatagaaattctgatgaagctttaagagaagttccattagatattaaagaaggtgctgatatggtaatggttaaaccaggtatgccctacttagacataataaaatcaataaaagaaaaattcaaattacctgtattttcctatcaagtatcaggagaatacagcttaattgaaacagctataagaaaaaaattaattaataaagatgcta

SEQ ID NO: 281905 - DNA, 814 bp, Unknown
  Bacterial polypeptide expressing nucleotide sequence isolated from the Sargasso Sea
attgagactataaaatccatgccaggagtatttcgatactctatcgataagttaagtaatattgttaatcaagcaagtaaattaaaaattcctttggttgcaattttcccacacacgccaaataataaaaaaaattcttatggaactgagggtttagacgaagataaccttgtttgtagagctataagaaaaataaaaaaaaataatccaaatattggagtgatggctgacgtagctttagacccctatacagatcatggtcacgatggaattttaaaaaataatgaaattcttaacgatgagactattgaaattttgtctgaacaagctttacttcaagcacaaatgggttgtgatgttattgcaccatcagatatgatggatgggagagttggagttataagaaaaaccttagataaaaataattttaaaaatgttcaaattttatcctatgcagcaaagtatgcgtctaatttctatgggccatttagaaatgctattggatcgataaaaaaactcaagggtaataaaaaaagttatcagatggattataaaaattcttctgaggctttaagagaagtagctctagacattaaagaaggtgctgattttgtaatggtaaaacctgctcttccgtatctagatgttataaaattagtaaaagatcattttaaaatacctgtttttggttatcaagtatctggtgaatatacgatgatagctcaatcagtaaaaaagaatattttagaaaaagatgcaattttagaaagtttgatgtcaattaaaagagctggtgcttcagcaatagtaacgt

SEQ ID NO: 281906 - DNA, 355 bp, Unknown
  Bacterial polypeptide expressing nucleotide sequence isolated from the Sargasso Sea
aatttgtcaaaaaaatcaaaaaaaagttatcaaatggatccagcaaattcagctgaagcattaagagaagttagacaagatattaatgaaggggcagacatgataataattaaaccaggcatgccttatttagatattattagtaaagtaaaaaatgaatttaattttcctattattgcttatcaagtatctggggagtattcaatgataaaaggcgcaattcaaaatggctggtttgatgaagaaaaaattatatttgagaccttgttgtgttttaaaagagctggctgtgacggaataataacttattttgctccatttgttgcaaaaaaattaattaataaaactttttaaa

SEQ ID NO: 281907 - DNA, 661 bp, Unknown
  Bacterial polypeptide expressing nucleotide sequence isolated from the Sargasso Sea
tatgattattggtaaatatcctagtgttagacttagaagaagtagaaaagaatcttggtcaagaaaactaattcaagaaaataccttaagtccaaatgactttattctacctatttttttaattgaagggtcaaataaaagacaagaaatttcatcaatgccgggagtttacaggtatacaattaaccgattgagccaaattgtggataaagcattaaaattaggaataccaatgatagctcttttccctaaaactaaaaattcaaaaaaagatgaattgggaacagaatcactgaatgaaaataatttagtatgtaaagcgttacaagaaatcaaaaaaagatacaaaaaccaaattggcataatgtgtgatgttgctttagatccttacacatcacatggtcatgatggtttaatcaaatctaacactatattaaatgacgaaacaattaatgttttggttgatcaatcattacttcaggcagaaatgggctgtgatgttctggctccttcagatatgatggatggtagaataggaaaaataagaaaagctttagacaaaaataaatttcagaatgttcaaattttatcctatgcagcaaaatatgcatcaagcttttatggtccctttagagatgctgtgggttcaaaagctcattaa

SEQ ID NO: 281908 - DNA, 495 bp, Unknown
  Bacterial polypeptide expressing nucleotide sequence isolated from the Sargasso Sea
ctccttctgacatgatggatggaagaatagggaagataagagattcattagaaaagaataatcataaggacaccattttattaagttatgcagctaaatatgcatcaaacttctatggtccttttagagatgctgttggatctaaacaaactgaaggcatttcaaagaaaacatatcaaatggactcaaagaatcttaaagaggcctataaagaaattttgttagatataaacgaaggagcagatattctaatggttaagccagctatgccttatttagatgtaatcaacgatctaagccaaaagactaatgttccaatttttgcatatcaagtaagcggagagtactcaatgttaaaaatgggtattgacaaaaaaatatttgaccataatgtaatctctgagactttaataagtcttttcagagcaggctcatcttcagtaattacatattttgcaagatggacagcagaaaattatgacaatatcagttgat

SEQ ID NO: 281909 - DNA, 790 bp, Unknown
  Bacterial polypeptide expressing nucleotide sequence isolated from the Sargasso Sea
tgtcgatagagccctttcacaaaagataccaatggtggcactgtttccttctacaaattctaaattaaaaaataataatggttctgaagctcttaatgaagataatcttgtttgtcgtgcaataagatttataaaaaaaagatataaaaacaaaattggaattatgtgtgatgttgcattagatccatacacatcacatggtcatgatggcttaataaaatctaactatgtattaaatgatgaaactgttgaaattttaattaaacaatcattgcttcaagctcaaatgggatgtgatgtaattgccccatcagatatgatggatggaagagttggcagaataagaaaaaatttagataaaaatggatatcatttagttcaaatactttcttacgcagtaaaatatgcatctaatttttacggtccattcagagatgcggttggttcaaaaaatttattaaaaaatgataaaaaaaattatcaaatggattatagaaataaactagaagctttaagagaggttgctttagatataaaagaaggtgctgatatagtaatgattaaaccagggatgccttatttagatttaattagcttagtaaaagaaaacttcaaaataccagtttttgcataccaagtttctggtgaatatgctttaataagtaatggcattaggaggggtttaattaataaaaacgctattttagaaagtctaatatcatttaaaagagctggtgctaatgcaatagtaacttattacgcagaccaaatatcaaaattgctaaaatag

SEQ ID NO: 281910 - DNA, 361 bp, Unknown
  Bacterial polypeptide expressing nucleotide sequence isolated from the Sargasso Sea
ataggttctggttctaatttaggtaaagatggtaaattaacatatcaaatggatccatcaaacagtgatgaagctattagagaagttggattagatataagtgaaggtgcagatatggtaatggttaagcctggtatgccttatcttgatattatttctagaataaaatcagaatttaaagttccaacttttgcctaccaagtatctggtgaatattcgatgataaaagaatcaattaataaaggttggcttaatgaaaaagttgtaatggaatctcttttatcttttaaaagagctggggcaaatggtatactgacttactttgcactagaggctgctgaaaaattaaaaaatgaataac

SEQ ID NO: 281911 - DNA, 511 bp, Unknown
  Bacterial polypeptide expressing nucleotide sequence isolated from the Sargasso Sea
atgggatgcgatatcatcgctccatcagatatgatggatggacgtatcgggaaaataagacaagagttagatcgaaataattttaaagatgtaagtattttgtcatacgcagtaaaatacgcatcaaatttttatggtccctttagagatgcagtaggaagtaagtctaaacttaaaaatgataaaaaaacatatcaaatggacttcaggaatagctctgaagcatttagagaagttgcgttagacattaaagagggtgccgatatggtaatggtaaagcccggtatgatatatttggatattataaaacaaatcaaaaataatttcaaagttcctgtcttagcttatcaagtttcaggagaatattttttaattaaaaatgcgattcaaaaaaatattttagaagatgactcaataattgaaagtttgatagcatttaaaagagctggggcttgcgcaattgtaacgtatttcgcaattgatattgccaaaaaattaaaaaatatttaac

SEQ ID NO: 281912 - DNA, 721 bp, Unknown
  Bacterial polypeptide expressing nucleotide sequence isolated from the Sargasso Sea
atgattacaggaaaatatccaagtttaaggcttagaagatcaagaaaatattcatggtctagaagacttattcaggaaaattcattgtcatacagtgatttaatattacctatttttttaatagaaggaaaaaataaaaaagaatcgataaaatctatgccaaatgtttttagatacagcatagacaaattaaattctgtagttggcaaagctgtaaaaaaaggaattccaatggttgctttatttccttatacggaaacaaaaaaaaaagatgaatatggttcagaggcattaaatccaaataatttagtttgtagaggaataaaatttataaaaaaaaaatttaaaaataaaattggaatcatgtgtgatgtagcacttgatccttatacgtcacatggccacgatggattgttaaaaaaaagagatattctaaatgacgaaaccttggaaatacttacaaaacaagctgtgctccaagctaaaatgggatgtgatgtgattgcaccgtcagatatgatggatggaagaattggcaaaattagaaaagcattagataaagatggtttaaaagatgttcagatattatcatacgcagttaaattttcttctagcttttatgggccatttagagatgctgttggatcaaaaaaattgttaaaaggtgataaaaaaacataccaaatggattttagaaattctaatgaatcattgagagagg

SEQ ID NO: 281913 - DNA, 704 bp, Unknown
  Bacterial polypeptide expressing nucleotide sequence isolated from the Sargasso Sea
tgatttggttttacctatttttgtaattaaaggaaaaaacaaaaagattccaattaattctatgcctggcgtttataggtacacaattgatagattaaaacaaattgttgataaagcaatttcactaaaaattcctatggtagcaatttttccctatgttaatagatcattaaaaaataatttaggatcagagtcattaaataaaaataatttagtatgtaaggcaacatcatttattaaagataaatacaaagacaaaatcggaataatgtgtgatgttgcattagatccttatacaatccacggacatgatgggatacttaaaaatggaaaaattttaaatgatgaaacaattaaaatattagttgaacaatcaataatacaagcacaagcaggttgtgatgtaatagctccatcagatatgatggacggtagaattggcgttataaggaaatctttagacaaaaatggttttaaagatgttcaacttttatcctatgctgcaaaatatgcatctaacttctatggaccttttagagatgcggttggatcaaaatctctactaaaaggagataaaaaaacttatcaaatggattatagaaattcaaacgaagctttaagagaggttgcgctagatattaaagaaggtgcagacatggttatgattaaacccggactcccctatttagatattatcaaagaag

SEQ ID NO: 281914 - DNA, 693 bp, Unknown
  Bacterial polypeptide expressing nucleotide sequence isolated from the Sargasso Sea
catgaactatcctaattcaagattaagaagactgaggtataatccaaatgtcagaagactagtagaagatattgatttgaagacatctgatttaatatatccaatttttgtatgtgagggtgaaaatataaaggaagagattgtatcccttcctggacaatatagatattctattgacaaattattgatattgactgaagagctaattagtcttgatataagatcggttttattatttggagtatcagataataaagatgataatggtaaaatagcttgtagccataaaagtattatcccaaaagcagttaaaaagattaaagagaagcacaacaatgatatacttgttattgctgatttgtgcaattgtagttatacatctcatggacattgtgggactttaattgatggtgatgttgataatgatttaactattgagacattatgtagacaaggggttattcttgcagaatctggtgttgatatcatagctccctctgatatgatggatggaagaactggagagattagaaaagaattggataaaaacggatttcacaaaattccaatttttccctactcagtaaaatatgcatcctctttttatggaccattcagaggtgctgtatcaaattccttagatgaaggtgacagaaaaactcatcagatgagctttaaaaattcatctgatta

SEQ ID NO: 281915 - DNA, 643 bp, Unknown
  Bacterial polypeptide expressing nucleotide sequence isolated from the Sargasso Sea
atgagcgatacacccccatattctccaggtcgtattcgacctaggagactaagaaaaaaccaggtagttcgtgatctagtagctgaaacacatatttctccttcacaatttatcgtgccacacttcgtgctaggagcagaaaatgaagaaaaggctatcccttccatgccaggaatttcagaacttggcattgaaaatctagtaaaaaacgtcagcgctgatctaaaactaggtattcgttctgtattgctttttggacatcctgatgatgcagctcataaaacacctgatgggaaggctgcgtgggaccaaaaaggtgctgtgcaaagagctgtaaggaggcttaaaagtgagtttggaaatgatcttatagttatgacagatgtttgcctctgcgcctatacagatcatggccattgtggaattgttgagaatgggtatgttctgaatgatgcctccctaaatcctttggtacatactgctttaagtcatgcagaggcaggggcagacgtggttgctccatcggatatgatggatgggcgtatagctgctattcgagatggtctagatcaagggggacatgagaatgttattttacttgcgtacgcagtgaaatatgcatctgggtactatggaccctttc

SEQ ID NO: 281916 - DNA, 820 bp, Unknown
  Bacterial polypeptide expressing nucleotide sequence isolated from the Sargasso Sea
aatgaattcgattattcgtccaagaagattaagaagaactgaggcaattagagaaatggttagagaaaaccatctcacaccatctgactttatatatccattatttattcatgaaaaagattttaaagaggaaattttagcaatgcccggaacttttagatgggatattaatggcttaataaaggaggttactagggcatgggaattaggaataaggtgtgtggttcttttcccaaaaattaacgatagcttaaagactgaagatggagcagaatgttttaatgaagagggtttaatacctgaagctattcgaatattaaaaaaagagatcccagaaatggcaataatgacagatgttgccttggacccatactcttgtgatggtcatgatggattagttgatgaaactggaaaaatactgaacgacgaaacaatcgaaattttaaaaaaacaagctttaacacaggcaagagctggagcagattttattggccctagtgacatgatggatgggagagttggagcaattagagctgctcttgatagtcaaggatttagtgatgtaggtattattagttacacagcaaaatattcatctgcttattatggaccatttagaactgctttagattctgctcctagagaaaatagtaagaaaataattccagacaataagtctacatatcaaatggaccccgccaattcaaaagagtctttaatcgaatctgcattggatcagtatgaaggagctgatattttgatggtaaaaccagaatttcatactgggatattgtttatagataagcacttttctcaataa

SEQ ID NO: 281917 - DNA, 787 bp, Unknown
  Bacterial polypeptide expressing nucleotide sequence isolated from the Sargasso Sea
atgaagattttaggtggatatcctagtttaagattgagaaggaatcgcaagtctgcttgggttagaagattggtagaggaaaataatatttctgtgaatgacctaattttacctatttttgtaacagagggaaaaaataaagttcaagaaattaaaacaatgcctggaatttatagatattcagttgataaattaagtaatgttattaacagggcgagtaaggcaaatattccgttgattgcaatatttccaaatacacctaaatcaaaaaaagatttttatggaagtgaagcgctaaatgaaaataatttagtttgcaaggcaataagaaagataaaaaaaaataaccctaaaataggtataatggcagatgttgcattagatccatacacaagtcatggacatgatggaattattaaaaagaaaaagattttaaatgatgaaactttagaaattctatctaaacaagcagttcttcaagctcagatgggttgtgatgtaatagctccatcagacatgatggatggaagaattggtgttataagaaaagctcttgataaaaataatttaaaagatgtacaattgttatcatattccgcaaaatatgcatcgagtttttatggtccatttagaaatgcaattggatcaagtcaaacaaataaaatcaataagaaaacctatcaaatggactatagaaattctaatgaagctattcgtgaggtagcattagacattaaagagggcgcagattttgttatggtgaaacctggatataccatatcttgat

SEQ ID NO: 281918 - DNA, 905 bp, Unknown
  Bacterial polypeptide expressing nucleotide sequence isolated from the Sargasso Sea
tttaaggcttagaagatcacgaaagtacagttggtcaagaaggttgatccaggaaaatactttatcttataacgatcttgtattgccaatttttttgactgaaggtaagaataaaaaaataccgattcaatcaatgcctggtgtttttagatacactataaataaattaagtgaaattattgatagagctattaaaaaaaaaattcctatggttgctttatttcctcatatcaatccaaagaggaaaaattttaatggaagtgaagcgttaaatgaaaataatttaatttgccaaggcattaaatatataaaaaataaatacaaaaatgaaattggtataatgtgtgatgtggcacttgatccatatacaacgcatggacatgatggaattttaaaaaaaaataatattttaaatgatgaaacattagatattttagttgaacaatcattgatacaagcaagagcaggatgtgatattattgctccatctgatatgatggatggaagagttggaaaaattagaaaagctttagataaagaaaattttaaagatgtgcaaatattatcttatgcagttaaatattcatctagtttctatggaccttttagagatgcggttggatcaaaaaaactattaaaaggtgataagaaaacatatcaaatggattttagaaattatgaggagtcgttaagagaagtttcattagatataaaggaaggagcagatataataatgataaaacctgggctaccctatttagatataataagcaaagttaaagaaagatttaaaatacctgtaatggcataccaagtatcaggcgaatatagccttttaatgaatggtataaaaaataaagtaattgatgaaaaatcaatatttgaaaatctaatgtgttttaaaa

SEQ ID NO: 281919 - DNA, 834 bp, Unknown
  Bacterial polypeptide expressing nucleotide sequence isolated from the Sargasso Sea
tatgagtaagagttatccaagtactagaatgagaagaaatagatctgctaaatttattcgaaatctagttcgtgaaacttcatttgctgcagatgatctaatatacccaatttttattttgcctggaaaaaataaagaagaacttatagattccatgccaggaagaaaaagatattctgttgataagcttcttcctgagttaacgaaactttataagaaaggccttaatgcaatagctatttttccagtcatagatacagcaaagaaatcaaaagatgctaaagaggcttttaaccctaagggtttagttcagaatgctgtaaaaattattaaaaaagagttgccagatttaggaataataaccgatgtagctttagacccttatactgttagtggtcatgacgggctaatagacaaagatggttatgtattaaatgatcaaaccgtggatgttttaacaaaacaagcattatcacatgctgaagcaggggcagacattgttgcgccttctgatatgatggatggtagaataatggcaattcgaaataccctagaaaaaaataagtttcataatacaaaaatattatcttatgctgcaaaatatgcttcaaatttatatggcccgtttagaaacgcagtggactcatctgataatttaaaaggctcttcaaaagaaacatatcagatggattttgcaaatattacagaagcatcactcgaaattaaattggatatcaatgagggtgcagacatgattatcataaagccaggtctgccttatctagatatagttgcaaaaataaaaaataaattttctattccagtcttttcata

SEQ ID NO: 281920 - DNA, 546 bp, Unknown
  Bacterial polypeptide expressing nucleotide sequence isolated from the Sargasso Sea
gatggagctcacctaccgcccccgtcgtcttcggcgtacacccgcgctgcgcgccatggtgcgtgagcacagcctctcggctgcagacttcatttatcccctctttgtgcatgaaggcaccgaggtggagccgatcggtgcgatgccaggtgccagccgttggagtctggcctccctcaccggagaagttcagcgcgcttacgaccttggggtgcgatgcatcgttctcttcccgaaggtgtccgaggggctgaaaacagaagatggtgctgagtgcttcaacgccaacggcttgatcccgcgcgcgattcgccagatcaaacaagccattcctgagatggcgatcatgaccgatgtcgccctggatccctactcctgtgatggtcatgacgggatcgtcagtcaggacggagtcgtgctcaacgacgagacgattgaactgctctgcaagcaggcggttgtgcaggctgaagcgggtgctgatctgatcggtcccagcgacatgatggatggccgcgttggagccatccgtgaagccctcgacga

SEQ ID NO: 281921 - DNA, 463 bp, Unknown
  Bacterial polypeptide expressing nucleotide sequence isolated from the Sargasso Sea
aaggattggtgagataagaaaagaattagataaatatggatacgaaaaaatacaaattttatcttatgctgtaaaatattcatcatctttttatggtccttttagagatgccgtaggttcaaaaaaagcacttaaaggtgataaaaaaacttatcaaatggattatagcaatattggtgaagcattaagagaagtcgctcttgatataagggaaggagcagatatggtaatggtaaaaccaggactgccatacatagatgtaattaaagaggttaaaaataaatttaggattcctgtaattgcatatcaggtatccggagaatatagtttaattgaaaatgcaataaaaaataaaattttaaaaaaagaagcaatttatgaagtacttttatcttttaaaagagctggagcaaatgcaatagtaagttattatgcagattacataaataaaattcttaaataa

SEQ ID NO: 281922 - DNA, 511 bp, Unknown
  Bacterial polypeptide expressing nucleotide sequence isolated from the Sargasso Sea
gaagctggagctgacgtggtcgccccatcggggatgatggacggacaagttggcgctatcagacaagcgttagacgccaacggccacgaactccttccagtactcgcctattcagcaaaattcgcttcagccgaatatggcccattccgagaagcagttgacgtcaccatcacaggtggcggaaaccgcaagagctatcagcaggaccctgcgaacggcagagaagcgatggaggaaattcggctggatatcgcggaaggcgcagatgttgtcatggtgaaaccagcactggcttacctggatgtcattgctcaagcacgatcccaattcgacgtaccactcgctgcctatcacgtctcaggtgaatacgcgatgctgaaagcggcagcccaaaacggatggatcgacggcccattgacggcactcgaacatctcaccgcaataaaacgagccggggctgacatcattctcacctacctcgctcacgaaatggcagaaacactgcaataac

SEQ ID NO: 281923 - DNA, 628 bp, Unknown
  Bacterial polypeptide expressing nucleotide sequence isolated from the Sargasso Sea
aatgtgtgacgtagcattagacccctacacatcacatggtcatgacggtttaattaaatctaatactatacttaatgacgagactattgaggtcttgattaaacaatctttacttcaggcagagatgggttgtgatgttctagctccatcagacatgatggatggtagaataggaaaaataagaaaagtgttagataaaaataaattccaaaacgttcaaatattatcttacgctgcaaaatatgcttcaagcttttatggaccttttagaaatgcagtcggctctaaaaattcgttaaaaggagataaaaaaacttatcaaatggattacagaaattcggatgaagctttgagagaagtggcgctagacattaaagaaggtgcagatatgataatggttaaaccaggtatgccctacttagacataattaaatctataaaagaaaaattcaaattacctgtttttgcttaccaagtctcaggtgagtatagtttaatagaaactgctatagcaaaaaaattaattaacaaagatgctatatatgaaactctagtagcttttaaaagagctggtgccaatgctatagtaagttactatgcagacagaattgacaaaattattaaataa

SEQ ID NO: 281924 - DNA, 511 bp, Unknown
  Bacterial polypeptide expressing nucleotide sequence isolated from the Sargasso Sea
agattaagaaggactgaagcaataagagagatggtaaaagaaaatcatctctctcctaaagattttatatatccattatttattcatgaaaaggattttcaagaagaaatatctgcaatgcctggtacttttagatgggacatgcatggattaataagagaagtttctagagcctgggaattaggcattagatgtatcgtactttttccaaagattgacgatagtttaaaaacagaagatggatcagaatgtttcaatgaagcgggtttaatacccaaggctattcggatgttaaaaaaagagatacctaaaatggctattatgactgatgttgcattagatccttattcttgtgatggacatgatggcttggttgatgaaaatgggaaaatattgaatgatgaaactattgaaattttaaaaagacaagctattacccaagcaagagccggagctgattttattggccctagtgacatgatggatgggagagttggagctattaggaagg

SEQ ID NO: 281925 - DNA, 478 bp, Unknown
  Bacterial polypeptide expressing nucleotide sequence isolated from the Sargasso Sea
atggacggtagggttggtgcaataagaaaagctttagataaaaacaagttttatgatgtgagtattttatcttatgctgtaaaatatgcatccaatttttatggtccgttcagagatgcagttggaagtaagtcaaaattaaaatcagataaaaaaacttaccaaatggattatagaaattcatcagagtcctttagagaggttgcattagatattaaagaaggtgcagatatggttatggttaaacctggaattatttatttagatattattaatgaaattaaaaataaatttaaaattccaattatagcttatcaagtatccggtgaatacagtttgattaaaaatgctataaacaaacgaattttaaatgaagaatctattattgaaagcttaacatcatttaaaagagccggtgcaaatgcaattgtgacttattttgctcttgagattgcaaaaaaaataaaaaattattaat

SEQ ID NO: 281926 - DNA, 190 bp, Unknown
  Bacterial polypeptide expressing nucleotide sequence isolated from the Sargasso Sea
tgccgcatataatgtttctggagaatacgcgatgattgtttcggctgcagaaaaaggcttgattgaccgcgacttagccatgatggaaatgcttatttcaataaagcgtgctggggcagatatgatactaacctattttgcaaaagatgctgctgccattcttcgtgctgattttggaagttttaaatga

SEQ ID NO: 281927 - DNA, 388 bp, Unknown
  Bacterial polypeptide expressing nucleotide sequence isolated from the Sargasso Sea
gcgttggcctctgctccgcgcccgggtagcgaggattggaagatcccgaaggacaaggctgaataccaaatggacccggcgaactaccgcgagtgcttgcgcgaggcggcgctcgatgagcaagaaggcgccgatatcatgatggtcaagccggcgggtgcctacttagacatcatccgcgcgcttagagacaacaccacgctcccgatttctgcgtaccaagtgtccggtgaatactccatgttgaaggcggccgccgcggctggctacatcaacgagcgtgatgccgtgttggagtctttgatcgccatcaagcgcgcgggcgccgacttgacgctctcgtactacgccattgacgccgccaagtggatccaagagggcaactaag

SEQ ID NO: 281928 - DNA, 688 bp, Unknown
  Bacterial polypeptide expressing nucleotide sequence isolated from the Sargasso Sea
atgagtagaggtgaatatccggccacgcgaatgcgtcggaataggatgaaggccttctcgcgccggatgatggcggagagccggctttccgtcgatgatctgatatggccgatgttcgtcatcgagggaaccgacagcgccgaacctgtcggggcaatgccgggtgtcgagcgactcacggtggacaggcttgtggcccaggcacgcgaagccatggcgctgggcattcccgcgatcgccatttttccgtcggtcgacgcgtcactgaaagatgaagacggcacgctcgctctggacggcgacaaccttgtctgccggacggtgcgcgcggtcaaggaggcatgcccggacctcggcgtcatctgcgatgtggcgcttgacccctataccagccacggccatgacggcgtgcttcgggacgggcaggtcgccaacgacgaaaccgtcgccatcctttgccggcaggcagttcggcaggcggatgcgggctgtgacatcatcgcgccttcggacatgatggacggccgcgtcggcgaaatccgcagcgcgctcgacgaggcgggccataccgacgtgcagatcatgtcctatgccgcgaaatacgcctcgggcttttacggcccgttcagaagcgccgtcggcgccggcggcactgccggaaaggacggcaaatcgacttaccagagga

SEQ ID NO: 281929 - DNA, 407 bp, Unknown
  Bacterial polypeptide expressing nucleotide sequence isolated from the Sargasso Sea
tgtctattcagcaaaatatgcctcgagtttttatggtccatttcgagatgctattggatcaaaacaaaaaaaaagaattgataaaagaacttaccaaatggattacagaaattctgatgaagcaatacgtgaagtagctttagatatcaaggaaggtgctgattttgttatgattaaacctggattaccatatcttgatataattaaatccgttaaagaaaattttaaaattccggtttttgtttatcaagtatctggtgagtatagcatgataaaaaatgcaatcacaaatggaaatttagataaagagtctgtgattgaaagtttaattgcatttaaaagatcaggtgcatcagcgattgttacatattttgcactagatatcgcaaaaaaattatctaattagt

SEQ ID NO: 281930 - DNA, 436 bp, Unknown
  Bacterial polypeptide expressing nucleotide sequence isolated from the Sargasso Sea
tttagataaaaataatcttaaagatgttcaaatactatcctactctgcgaaatacgcttctagtttttacggtccttttagaaatgcgattggttcaaaacaaaaaaataagataaataaaaaaacttatcaaatgaattacagaaactctgaagaggctattcgtgaagtagccctagatataaaagagggtgcggattttgtcatgataaaacctgggttaccatatctggatattataaaatcagttaaagaaaattttaaaattcctgtttttgtttatcaagtctcaggtgaatacagcatgataaagaatagtataaaaactggtattcttgataatgagtcaataattgaaagtcttatatcttttaaaagatctggagcttcagcaatagtcacatactttgcgttagatattgcaaaaaaaatttaa

SEQ ID NO: 281931 - DNA, 454 bp, Unknown
  Bacterial polypeptide expressing nucleotide sequence isolated from the Sargasso Sea
agattcattagaaaagaataatcataaggacaccattttattaatttatgcagctaaatatgcatcaaacttctatggtccttttagagatgctgttggatctaaacaaactgaaggcatttcaaagaaaacatatcaaatggactcaaagaatcttaaagaggcctataaagaaattttgttagatataaacgaaggagcagatattctaatggttaagccagctatgccttatttagatgtaatcaacgatctaagccaaaagactaatgttccaatttttgcatatcaagtaagcggagagtactcaatgttaaaaatgggtattgacaaaaaaatatttgaccataatgtaatctctgagactttaataagtcttttcagagcaggctcatcttcagtaattacatattttgcaagatggacagcagaaaattatgacaatatcagttga

SEQ ID NO: 281932 - DNA, 691 bp, Unknown
  Bacterial polypeptide expressing nucleotide sequence isolated from the Sargasso Sea
atgaaaagaaaattccctaactcaagactcagaaggctcagacttaattcttcaataattgatcttgtaagtgaaaatactcttaactcagctgatttaattcaaccagttttcgtaaaagaaaatctaaatggttctgagccaattgaatcaatgccaaacgttaataggtatggtattgatagtattttaaaagaagttgaatcagtaatatcttctggtattaaaactattgctatatttccagtcattgattcaaataaaaaagatgatcttggcaaagaggcgttaaatgaagaaaatattatttcaaaaacaataaaactaataaaaaaagaatttcctgaattagtaataattgctgatgttgcattagatccatacacatctcatgggcatgatgggttgctaatcaataattatgttgataatgatgcaactttagaatcattagtttcacaatccttaatacttgcagcttctggagcagatatcattgcaccttcagatatgatggatggaaggataggaaaaataagagaagctctggaaaattcaaattttaaaaatactttgattttgtcttatgctgcaaaatataattcgaaattttatggaccttttagagacgcagtgaattcctcatcaaatcttggcaaatcctctaaatcatcctatcaaatgtctccag

SEQ ID NO: 281933 - DNA, 397 bp, Unknown
  Bacterial polypeptide expressing nucleotide sequence isolated from the Sargasso Sea
gctgtaaaatattcttcctcattctatggaccatttagagacgcaataggatcaaaaaattctttaaagggtaataaaaaaacatatcagatggattatggaaattcggatgaggcactaagagaagtgtcgattgacataaaagaaggagctgacatggtaatggtaaaaccaggattaccatatcttgatattattaaagatataaaaaatagatttaaaataccgattttagcatatcaggtgtccggtgaatatagtttattaacaaatgcgataaaaaataaaattttaaaacctgaagctatatacgaaaccttgctatcttttaaaagagctggtgctaacgcgattataagttatcacgcagattatttagataaaattcttaaataat

SEQ ID NO: 281934 - DNA, 844 bp, Unknown
  Bacterial polypeptide expressing nucleotide sequence isolated from the Sargasso Sea
aaaagaatcaataaagtctatgccaaatatttttagatatagtgtagacaaattaaattctgtagttggcaaagctataaaaaaaggaattccaatggttgctttatttccttatacagcatcaaaaaaaaaagatgaatatgggtcagaagcattaaatccaaacaatttagtttgcagaggaataaaatttattaaaaaaaaatttaaaaataaaattggaatcatgtgtgatgtagcacttgatccttatacttctcatggccacgatggattgctaaataaaagaaatattctgaatgatgaaactttggaaatacttaccaaacaagctgtactacaagctaaaattggatgtgatgtaattgctccatcagatatgatggatgggagaattggaaagataagaaaggcattggataaaaataatttaaatgatgttcaaatattatcatatgcagttaaattttcttctagcttttatgggccatttagagacgctgttggatcaaaaaaattattaaaaggtgataaaaaaacatatcagatggattttagaaattctgatgagtcattaagagaagtttcattagatgtcaaagaaggtgcagatatgataatggttaaacctggtatgccctatcttgatataattaagaaggtaaaagataattttaaaatgccggtatttgcatatcaagtctcaggtgagtacagtttaataatgaatggaattaataagaaactaatagataaagagtctataaaagagtctcttatttcttttaaaagagctggagcaagtagcattgtaacttattttgcagaccagattgacctttga

SEQ ID NO: 281935 - DNA, 876 bp, Unknown
  Bacterial polypeptide expressing nucleotide sequence isolated from the Sargasso Sea
tattatcggttcatacccaaaaacaaggttaagaagattaagaaaatcaaaatggctaagaaatcttatctctgagaccagtatatctcacaatgatcttatcctaccaatattcattagagaaggaaaaaataaaattgagccaattaaatcaatgcctggaattaaaagatatactttggataaactgtcatcaattctaaacaaagtaagagaatataaaatacctatggttgcattatttccatacactcctaattttaaaaaagataaacatggtacagaagctctgaatcctaacaatttaatttgcagagcaataaagttagttaaaaaaaaatttccagaaattggagttatgtgtgatgttgccttagatccttatacttcgcatggtcatgatggaataataataaataatcaaattgataacgatcaaactataaaaattttagtaaaacaagcattgctacaagcaaaaatgggatgcgatatcatagctccctcagatatgatggatggtcgaattggaaaaataagacaagagttggaccaaaataatcttaaagatgtaagtattttatcttacgcagtaaaatacgcctcaaatttttacggtccgtttagagatgctgtaggaagtaaatctaaacttaaaaatgataaaaaaacatatcaaatggacttcaggaatagttctgaagcatttagagaagttgcactggatataaaagaaggtgctgatatggttatggtaaagcctggtatgatatatttagatattataaaacaaatcaaaaataattttaaagttcctgtcttagcttatcaagtttcaggagaatattttttaattaaaaatgccatacaaaaaaa

SEQ ID NO: 281936 - DNA, 352 bp, Unknown
  Bacterial polypeptide expressing nucleotide sequence isolated from the Sargasso Sea
atcgtctgcgagcttagggtctggaagtaaagacacataccatatgtctgtcgcaaacatagatgaagcacttcatgaggtaaaaatggatatcgaagaaggagctgacatagttatggttaaaccgggtctaccttacttagatgtcatcaaatctgttaaagaaactttcaaagttcctacatttgcttatcaagttagtggggaatatgccatgctaaaagcggctatacaaaatggatggctttctgaagaagttatgatggaatctttgctgagctttaagagagcgggtgctgattgtattttgacctatgctgcaaaccaaattgcagagacattaaataggtag

SEQ ID NO: 281937 - DNA, 424 bp, Unknown
  Bacterial polypeptide expressing nucleotide sequence isolated from the Sargasso Sea
tgtaagtattttatcttatgcagtaaaatatgcatctactttttacgggccatttagagacgcagttggaagtaaatcaaaattaaaaaaagataaaaaaacataccagatggattatagaaattcttttgatatttttagagaagttggttttgatattaatgaaggtgcagatatggttatggtaaagcctggcatgctatatttagatataattaataagattaaagaaaattttaaaattcctatattggcctaccaggtctcagctgaatatagcctgatcaaaaatggaattcaaaagaagattttaaatgaagagtcaattattgaaagtattctttcatttaaaagggccggagcttgtgcgataataacctactttgcattagatttagcaaaaaaaataaattcaattaattaa

SEQ ID NO: 281938 - DNA, 765 bp, Unknown
  Bacterial polypeptide expressing nucleotide sequence isolated from the Sargasso Sea
atagttagtaagcttaatatacccgccattgcgctttttccacatattgaccaaggcctaaaggatagccatggaactgaagccttaaaagaaaataatctagtctgtgagacagtaaaaatggtaaaaaaagaatttcctcaattaggggttatatgtgatgtcgctctagacccttatacagaccatggtcatgatggggttctcattgatggtgaagtggacaatgatgagaccgtaggtatattatgcaaacaggcactcaaccaggcatctgccggatgtgatgtgatcgcgccatcagatatgatggacgggcgtgtgctctctatcagagagactcttgataataataaatttacaaatactcagataatgtcgtatgctgcaaaatatgcttctagtttttatggtccattccgtgatgccgtcggttcttctagtggtaaaaaagttatcgataaatcaagttatcaaatgagtccggaaaatagtgatgaggcggtgagggaggttaatctcgatataagtgaaggggcagatatggtaatcatcaaaccagggatgccttacctagatataatctatcgcattaaaaacgagtgcaatatcccggtttttgcgtaccaggtatctggtgaattttctatgatctcaatttcggccagtagtggtgcgttggacctcgacaaagctatgatggagtcgttattagggttcaagcgagcaggtgccgatggtgttttaacatatttcgctgttgag

SEQ ID NO: 281939 - DNA, 825 bp, Unknown
  Bacterial polypeptide expressing nucleotide sequence isolated from the Sargasso Sea
caaatatttttaggtactctattgataaattaaaacgtgtagttgataatgcactaaaattgggaataccaatggtagctttattcccttatacaaatccaaaaaaaaaagatcaatatgggaatgaagcattaaatgaaaataatttagtttgccaagcaataaaattcatcaaaaaaaattataagaatgagattggaataatgtgtgatgttgcattagatccatatacatcacatggtcatgatggaataattagaaaaaatgaaattttaaatgatgaaacattagaaattttaatcaaacaatcaatattgcaagcaaaaatgggttgcgatgtaattgccccatcagatatgatggatggtagaattttaaaaattcgtaaagctttagacaaaaataatcttaaagatgttcaaattctatcttatgcagttaaatatgcatcaagtttttatgggccatttagaaatgctgtaggatcaaaaaatctgctaaagggagataaaaaaacctatcaaatggattttaaaaataattatgaatcattaagagaggttgcattagatataaaagaaggtgcagacatgattatagtaaaaccaggaatgccatatcttgatataattagagaagttaaaaataattttaaaattcctgttatcgcatatcaagtatcaggagaatatagtttgatacaaaatgcaatttcaaagaatataatagataaaaaatcgatatatgaaagcctagtttctttcaaaagagctggagcaagtgcaattataacatattttgctgatcaaataaaactagattaat

SEQ ID NO: 281940 - DNA, 211 bp, Unknown
  Bacterial polypeptide expressing nucleotide sequence isolated from the Sargasso Sea
tctggacataattagatatgcgaaagacaattttaatgtacctattgctgcctatcaggtgtcaggcgaatattcgcgtttatgggcagcaagcatgaaaggttggcttgatcttgaagattgtgctctggaatctttaatttcaatcaaaagagcgggtgctgatttaatattaacttactttgcagaaaggtttagcaaactaatttag

SEQ ID NO: 281941 - DNA, 499 bp, Unknown
  Bacterial polypeptide expressing nucleotide sequence isolated from the Sargasso Sea
gttattgcgccttccgacatgatggatggaaaaattttagaaattagaaaatctttagaaaaaaataattttaaaaatgtgttaatattatcctacgctgcgaaattttcgtctggattttatggtccatttagagacggagttggctctagacaaaaacaaaaaatagataaatcaacttatcaaatggatttttcgaattcaatagatgcattacgacaaattaacaaagatattgaggatggctcagatatgattatgatcaaaccggctttatcatatttagatataatttccaaagcaaaagaaaattttaatgttcctattatcgcgtataatgtttcaggtgaatattcaatgctcaaacttgggataaaaaataatatttttgaggatgatattttaaaagaaataattatttcttttaaaagagctggcgcaaatgcgatcgtaagttatttcgcaaatgaatatattgaaaaatatattttaagataaa

SEQ ID NO: 281942 - DNA, 853 bp, Unknown
  Bacterial polypeptide expressing nucleotide sequence isolated from the Sargasso Sea
gatggaaaaaataaaacagtaaagataaaaaatatgcctgacgtatttagacattcgttagataaactaccaaaaatcgtggacaaggcattaaaattaaaattaccaatggtcgctttgtttccatatacatcaaataatttaaaaaactcacatggtacagaggcattaaacgaaaacaatttagtgtgtagagcacttagattaataaaaaaaagatataaaaatgagattggtttaatgactgatgtagctctcgatccttatactgatcatggacacgatggaattttaaaaaataattatgtgctaaatgatgaaacaaatttagttttaacaaaacaggctttattacaagcgcagatgggctgcgatgtaattgcaccatcagatatgatggatggacgagttaaggagataaggaaaattttggataaaaataaattaattaataccaaaatattatcttatgcagttaaatatgcctcaaacttttatggtccttttagagaagctgttggaactaaaaataaattaaaaaaagataagaaaaattatcaaatgaatttcatgaatattgatgaagcattgcgagaagtttcgctcgatattaaagaaggagcggatttaataatggtaaaaccaggtttaccttacgcagatataattaaacaaattaaagacaaatttaaaattcctgttttttcttaccaagtttctggtgaatatagtttaattaaagagggtataaaaaaaggaattattaataacgaggcaatatttgaaagtttaataagtcttaaaagagctggttcgacctgtataatatcttatttcgctgataaaatagaca

SEQ ID NO: 281943 - DNA, 679 bp, Unknown
  Bacterial polypeptide expressing nucleotide sequence isolated from the Sargasso Sea
catgataaccggaaaatatcctagtttaagactgcgtagaaccagaaaatacaaatggtctcgtagattagtgcaagaaaacaacttatctagcaacgatttaatttaccctatcttcctagtagagggtaaaaatacaaaacagtcgattaaatctatgccaggtgtttacagatatagcgttgatcaattaggagcaatcgtaaataatattattaaaaacaaaataccaatggtggctctttttcctttaacgccaaatattaagaaagataaatatggaaaagagtcattaaatgaaaataatttagtttgtaaagccattagatttattaaaaaaagatttaaaaatagcattggcataatgtgcgatgttgcattagatccctacacatcacatggtcacgatggtttactaaaaaataattatgttattaatgatgaaacagtcaatgtattggtcaaacaatctttgttacaagctcaaatgggctgtgatgtaatagcgccctcagatatgatggatggtagaattggaaaaattagaaaatcattagataaaaataattatcacgatgttcaaatactatcttatgcggttaaatatgcttctaacttttatggtccatttagagatgctgtaggatcaaaaaaatctttaaaaggtgataaaaaaaat

SEQ ID NO: 281944 - DNA, 640 bp, Unknown
  Bacterial polypeptide expressing nucleotide sequence isolated from the Sargasso Sea
gaaattggtttaatgtgtgatgtagcacttgatccatatactagtcatggacatgacggaatattaaagaacaattatgtagataatgatgaaacaataaagattttagttaaacaatcactcttacaagccgagatgggttgtgacttaattgcgccttcagatatgatggatggtagaattggtgaaataagaaaagctttggataaaaatggttttaaattagttcaaatattatcttatgcagtaaaatacgcttcgaacttctatggtccttttagaaatgcagttggctctagtcgctcattagtaggtgataaaaaaaattatcagatggattttaaaaattctaaagaagcattaaaagaagttgctttagacataaacgaaggagcagattttgtaatggtgaaacctggaatgccttaccttgatattattaaattgatcaaagataattttaaaatacctgtatttgcttatcaagtttctggagaatatagtttaataatgaatggaataaacaagaaaatactagatgagaaagctatttatgaaagcttaatatcttttaaaagagctggagcaagcgctatagtaacttattttgctgatcgaattgcaagcaaattaaaataac

SEQ ID NO: 281945 - DNA, 909 bp, Unknown
  Bacterial polypeptide expressing nucleotide sequence isolated from the Sargasso Sea
aatgtcaaaattcaatatcggtacttttccatctacacgactaagaagacttcgtatgaaagagttctcaagaagaatggtaagtgaaaataatttatctgttgatgatttaatttggccattatttgtctgtgaaggaaataatgttgcagaaaaaataaattccatgccaggtgtttttaggtactctattgataatattttaaaagaattagaaactgcagctaaattaaaaattcctgccatcgcattatttccacagattgataatactttaaaagatgaaaatggttctcaagcaattgatgaaaataatttaatttgccgaacaatcaaatcaatcaaaaaaaactttcctgacattggtgttatttgtgatgttgctctagatccttttactaaccatggacatgatgggttagtaattaatgatatagttgataatgatgcaactttatccgtattagaaaaacaagcccttgctcaagttagagcaggttgtgatattattgctccatcagatatgatggacggacgcgtgggaagaataaggaaaactcttgatgacaataattttcacaatacattaatactctcttatgcagcaaaatatgcgtcaaagttttatggtccttttagagaggctattagttcttcaggaaatttaaaaggtggaagtaaatctacttatcaaatggatatttcaaatagcgatgaagcattaagagaggttgctttagatataaatgaaggtgctgatatggtgatgattaaaccaggtatgccttatcttgatataattcaaagagtaaaatcagaattcaagattcctacttttgcctatcaagtatcaggtgaatatgccatgattaagggtgcaattgataataattggttagattctaaggt

SEQ ID NO: 281946 - DNA, 436 bp, Unknown
  Bacterial polypeptide expressing nucleotide sequence isolated from the Sargasso Sea
tttcaaggatacactaattatgtcatacgcagcaaaatttgcgtcagcttattacgggccttttagagaagcagttggagcgcaaggattactaaaaggtgataaaaaaacttatcaaattgatcctcctaacattcaagaagcaattagggaagttggagaggatataaatgaaggagctgatatggttatggtaaagcccggaatgccttaccttgatattatttcagaagtaaaacgaaagtttggctttccaacttttgcttaccaagtttcaggagaatattcgatgataaaaggagcgattgaaaataattggctcgataaaaatagtacaataattgaaagccttacttgctttaaaagagctggatgcgatggaatattaacctattttgcacttgaagctgcggacatattagataagagtagttga

SEQ ID NO: 281947 - DNA, 647 bp, Unknown
  Bacterial polypeptide expressing nucleotide sequence isolated from the Sargasso Sea
aatgtctatttttagaaaatatccaagtacccgcttaagaaggttaagaaagaacctcaatcttattgaacttgtatctgaaactaacctaacttcaaaagatcttatacaaccaatcttcattaaagaaaattttgaaggcaaagaagaaatcgaatcaatgccaggtatcttcagatttagtttaaatcatgtgctgagtgaaatagaggaagttataaatgcaggcataaatgctatagctgttttcccagtcatagaatcttcaaaaaaagatgagaaaggatcagaggcattaaataaaagcaattttatcgctcattcaatcaataaaattaaacaagaatttcctgaattaatattaattgcagatgttgcattagatccttatacagatcatggtcacgacggtattttaataaataacgaagttgcaaatgatgaaactttagaagttctaattgagcaatctatattactcgctgaggctggggcggatattattgctccttctgatatgatggatgggagaattggattaataagagattctctagaaaaacaaaatttaaaagacacaatcttgttatcttatgctgctaaatataattcaaaattctatggaccatttagagatgcagtaaatt

SEQ ID NO: 281948 - DNA, 257 bp, Unknown
  Bacterial polypeptide expressing nucleotide sequence isolated from the Sargasso Sea
gagcaatctatcttactcgctgaggctggggcggatattattgctccttctgatatgatggatggaagaattggtttaattagagattctctagaaaaacaaaattttaaagatacaatcttgttatcttatgctgctaaatataactcaaaattctatggaccattcagagatgcattaaattctgcatcaaatcttggtaattcatcaaaatcatcataccaaatgaatatatctaacaagaacgaagccttgca

SEQ ID NO: 281949 - DNA, 540 bp, Unknown
  Bacterial polypeptide expressing nucleotide sequence isolated from the Sargasso Sea
catgataaaccgtcctagaagaaaccgattgaccccaagaattcgcggtctcgttggagaaacaactatccaacctaaaaacttggtctggcctacttttgttcaagaaggcaaaagccaaagaacacctattgcttcaatgccggggatatcgcgactttctatagatcaattggttgctgattcaaaaaaagcttttgaattaggtgtcccagcggttgctctttttcctgccattgatgattctctaaaaactccagagggcaaagaaagtttgaatccggacggtctattgcaacgagcggttaaagaattaaaaaagcaggtgcctgaattggtcgttatcaccgatgtggcattggacccttattctagcgatgggcatgacggactcgtccagaatggacaaatactcaatgatgaaaccctgccgcttcttgccggtatggcagttgctcaagctgaggctggggttgatgtcgtcgctccttcagatatgatggatggacgaatagaagccattcgttgggctcttgatga

SEQ ID NO: 281950 - DNA, 356 bp, Unknown
  Bacterial polypeptide expressing nucleotide sequence isolated from the Sargasso Sea
cagtaaaaaaatatttccagacaataagtctacatatcaaatggaccctgccaattcaaaagaggctttaattgaatgtgcattggatcagtatgaaggagcggatattttgatggtaaaaccaggaatttcatacttggatattgtttatagattaagcactttttcaaataaacccatagctgcatacaacgttagcggggagtattccatggtaaagtctgctgctatgaagaactggattaacgaaaaagatattgttttagaaacattgcttagttttaaaagagcaggagcaaaattaatactcacttatcatgcttgtgatgcatctcaatggttgcaggatacttaaa

SEQ ID NO: 281951 - DNA, 664 bp, Unknown
  Bacterial polypeptide expressing nucleotide sequence isolated from the Sargasso Sea
ttagataaaaaaaaatataaaaataagattggcataatgtgtgatgttgcactagatccttttacatcacatggtcatgatggtttaattgataagaaagaaattttaaatgataagactattcaaattttaattgaacaatcattgttacaagcacaaatgggatgcgatgtaatagctccatcagatatgatggatggcagaattggtgaaataagaagagcattagataaaaatggctacgaaaaaattcaaatcctatcttatgctgtaaagtattcatcatctttttacggtcctttcagagatgctgttggttcaaaaaaagctcttaaaggagataaaaaaacatatcaaatggattttagtaatattgatgaagcgttaagagaagttgctttagatataaaggaaggtgcggatatggtaatggttaaacctggcctaccatacatagacgtaattaaagaagttaaagataaatttaaaatacctgtgttagcatatcaagtttcaggggaatatagcttaatttctaatgcaataaaaaataaaattttaagtaatgatgcaatatatgaaacacttttatcttttaaaagagctggtgcaaatgcaatcattacctattatgcagattatattgacaaaattattaaataat

SEQ ID NO: 281952 - DNA, 304 bp, Unknown
  Bacterial polypeptide expressing nucleotide sequence isolated from the Sargasso Sea
ttctaatgaggctctaagagaagttgaaatggatataaaggaaggcgctgatattgttatggtaaaacctgggataagctatcttgatataattagtaaaataaaatcagaatttaatttccctacttttgcttaccaggtatctggtgaatattcgatgataaaagctgctgctaacaaagaatatattaatgaggatgaaattgtttttgaacaactaacttcttttaaaagagctggagccgatgcaattttgacttattttgcaccccaagttgccaacaaattaagatcaggaagttag

SEQ ID NO: 281953 - DNA, 538 bp, Unknown
  Bacterial polypeptide expressing nucleotide sequence isolated from the Sargasso Sea
aatattggttaaacaatcattattacaagcagagatgggttgtgatgtaatttcaccctctgatatgatggatgggagagttggagaaataagaaaaaatttagacaaaaatgattttaaagatgttcagatactatcttatgctgttaaatatgcttcaagtttttatggtccttttagaaatgccgttggatcaaaaaacctactaaagggcgataaaaaaacatatcaaatggattatagcaataaattagaatcgataagagaagttgcattagatattaaagaaggtgctgatatgataatggtaaaacctggaatgccttatcttgatatcataagtacgatcaaaaataactttaaaattccagttttagcttatcaggtatctggtgaatacagtttaatttgtaatggaattcaaaaaggaataattgataaaaattcaataattgaaattttaactggattcaagagagctggcgctaatgctgttgtaacttactttgcgaataaaatagcaaaagatataaaataa

SEQ ID NO: 281954 - DNA, 337 bp, Unknown
  Bacterial polypeptide expressing nucleotide sequence isolated from the Sargasso Sea
tggcgctggtagtaaggatacttaccaaatgtccgttgcaaatattgaagaagcattgcatgaagtcaaaatggatattgaagaaggtgccgatatagttatggtcaagcctggaatgccttacttagacgttattaaagcagttaaagatacttttaaaatacccacctttgcctatcaggtaagtggtgaatatgccatgctgaaagctgcaatagaaaatggttggttggcagaagaagtcctagaggaatccttgttaagctttaaaagggctggagcagattgtgttctcacctacgctgctaatgaaatagcaataaagttaaatcagtaa

SEQ ID NO: 281955 - DNA, 802 bp, Unknown
  Bacterial polypeptide expressing nucleotide sequence isolated from the Sargasso Sea
atgaattcgattattcgtcctagaagattaagaagaactgaagcaattagagaaatggttagagaaaaccatctaacggcatctgactttatatatccattatttattcatgaaaaagattttaaagagaaaatttcatcaatgccaggaacttatagatgggatattaatggcttaataaaggaagttacaagagcatgggaattgggaataaggtgtgtggttcttttcccaaaaattaaagatagtttaaagactgaagatggagcagaatgttttaatgaagacggtttaattcctgaagctattcgaatattaaaaaaagagattccagaaatggcaataatgacggatgttgccttggacccatactcttgtgatggtcatgatggattagttgatgaaactggaaaaatattgaacgacgaaacaatcgaaattttaaaaaaacaagctttaacacaagcaagagctggagcagattttattggcccgagtgacatgatggatgggagagtcggagcgatcagagctgcgcttgatagccaaggatttagtgatgtaggtattattagttacacagcaaaatattcatctgcttattatggcccatttagaactgctttagattcggctcctagagaaaatagtaagaaagtaattccagacaataagtctacatatcaaatggaccctgccaattcaaaagaggctttaattgaatctgcattggatcagtatgaaggagctgatattttgatggtaaaacccaggaatttcatatttggatattgtttataga

SEQ ID NO: 281956 - DNA, 826 bp, Unknown
  Bacterial polypeptide expressing nucleotide sequence isolated from the Sargasso Sea
gtctatagatatagtgtagataaaatcccaatgatacttgataaagctgttaaatacaaaataccaatggttgctttatttccctacactaataaaaaattaaaaaatgaattgggctctgaagcgctaaatgaaaacaacttggtttgtagggctataagattaattaaaaaaaaatataaaaataagattggaattatgtgtgatgttgctcttgacccctatacatctcatggtcatgacggtcttttaaaagaaggaaaaattttgaacgatgaaacaatagaaattctaattagacaatccctgctacaagcgcaaatgggatgcgatgttatagctccgtctgatatgatggatggtagaattggaaaaattagaaaatatttagataaatataaatttcaagacgttcagatattatcttatgctgcgaaatatgcctcaagtttttatggaccatttagagaggctgttggatcaaataaatctctaaaaagtgataaaaaaacttatcagatggactttaataacagtttagaagcattaagggaggtttctttagatattaaagaaggtgccgatatagtaatggtaaaaccaggcatgccttacttggatgttattaaatccataaaagaaaattttaaaattcctgtgtttgcatatcaagtatcaggagaatattcattaattaaaaatgccattgacagaaaattaataaaagaagatagcgtaattgaaacattggtaggatttaaaagagctggagcttcagctgttgttacatattttgctgatcaaattgcaagatatttaaaataaa

SEQ ID NO: 281957 - DNA, 690 bp, Unknown
  Bacterial polypeptide expressing nucleotide sequence isolated from the Sargasso Sea
aatgattatcactggaaagtatccaaatttaaggcttagaagaaatcgaaaaagcgattgggcccgaagattagttcaagaaaatcacttatctgtaaatgatcttatacttccaatatttttaattgaaggaaggaataaaatggagtctatcaaaacaatgcctggtatatatagatatagtgtagacaaaattcctatgatactcgataaagctgtaggttataagattcctatgattgcgctatttccatatacaaacaaaaaattaaaaaatgaatcaggtcaagaagccttaaatgaaaataatttagtttgcaaagcaataaagttaattaaaaaaaaatataaaaataaaattggaattatgtgtgatgttgctcttgatccatatacatcacatggtcacgatggtcttttgaaagatggtaaaattttaaacgatgaaacgatagaaattttagttaaacaatcattattacaagctcaaatgggttgtgatgtcatcgcaccatctgatatgatggatggaagagttggaaaaattagaaaagccttagataaaaataattttaaagatgtacaaatattatcttacgctgcaaaatacgcctcaagtttttatggtccatttagagatgcagttggatcaaataaatcattaaaaggtgataagaaaactttatcaat

SEQ ID NO: 281958 - DNA, 387 bp, Unknown
  Bacterial polypeptide expressing nucleotide sequence isolated from the Sargasso Sea
tctatggaccatttagaaatgccattggatctgaaaaaaacctcagcagtaagtcaaaaaaaagttatcagatggacttttctaattctgatgaagcattacgagaagttggtttagatatttctgaaggagctgatatggttatggtaaaaccaggcatgccatatttggatataatttacagaataaaaactacttttaaaatgcctacatatgcttatcaggtatcaggtgagtatgctatgattatgtctgcagttaaaaatggatatattgataaagataaggctataatagaatctttaacttgttttaaaagagcaggagcaaatggcatattaagttactttgctatcgaagctgcaaaacttataaataaaggttaat

SEQ ID NO: 281959 - DNA, 736 bp, Unknown
  Bacterial polypeptide expressing nucleotide sequence isolated from the Sargasso Sea
atgattattggtaaatatccgagtcttagacttagaagaaatagaaaagaatcttggtcaagaagattgattcaagaaaataccttgactccaaatgactttatattacctatttttttaattgatggttcaaataaaaggcaagagatttcatcgatgcccggtgtatacagatatacaattaatagattgagtcaaatagtggatagagccataaaaaaaaagataccaatggttgcgctttttccaaaaacccaaaatgcgcataaagatgaattgggcacagaatcacttaatgaaaaaaatttagtttgtagagcgattaaagaaattaaaaaaagatacaaaaatcaaataggtataatgtgtgacgtggcattagacccttacacatcacatggtcatgacggtttgattaagtctaatactatactaaatgatgagactattgaggttttgattaatcaatcacttcttcaggcagagatgggttgtgatgttcttgcaccttcagatatgatggatggaagaataggaaaaataagaaaagctttagataaaaataaatttcaaaatgttcaaatattgtcctatgcagcaaaatatgcttcaagtttttatggaccttttagagatgctgtcggttcaaaaagttcgttaaaaggagacaaaaaaacttatcagatggattatagaaatgcggatgaggctttaagagaagttgcgttagatatta

SEQ ID NO: 281960 - DNA, 355 bp, Unknown
  Bacterial polypeptide expressing nucleotide sequence isolated from the Sargasso Sea
ggtgcttccggggcactcaaggggagataaaagcacttatcaaatggatccagccaacggagaagaagcactccgaacaatagcgcgagatcttgatgaaggcgcagacatgattatgattaaacctggaatgccttacttggacatttgtaggcgagcaaaggatatgtttggagctccaacatttgcttaccaagtttcaggagagtattcgatgcttcaagcggccataaagaatggttggctcaacgggaataaggttattatggaaagcctatactgcttcaaaagagcaggatgtgatggtattttgacttattttgccccaatagctgccaaagagcttaataattaa

SEQ ID NO: 281961 - DNA, 721 bp, Unknown
  Bacterial polypeptide expressing nucleotide sequence isolated from the Sargasso Sea
aatgtctatttttagaaaatatccaagtacccgcttaagaaggttaagaaagaacctcaatcttattgaacttgtatctgaaactaacctaactttaaaagatcttatacaaccaatcttcattaaagaaaattttgaaggcaaagaagaaatcgaatcaatgccaggtatcttcagatttggcttaaatcatgtgctgagtgaaatagaggaagttataaatgcaggcataaatgctatagctgttttcccagtcatagaatcttcaaaaaaagatgaaaaaggatcagaggcattaaacaaaagcaattttatcgctcattcaatcaataaaattaaacaagaatttcctgaattaatattaatcgcagatgttgcattagatccttatacagatcatggtcatgacggtattttaataagtaacgaagttgcaaatgatgaaactgtagaagttctaattaagcaatctatattacttgctgaggctggggcggatattattgctccttctgatatgatggatggaagaattggattaattagagattctttagaaaaacaaaatttgaaagacacaatcttgttatcttatgctgctaaatataattcaaaattctatggaccatttagagatgcagtaaattctgcatcaaatcttggtaattcttcaaaatcatcataccaaatgaatatatctaacaaggacgaagccttgcat

SEQ ID NO: 281962 - DNA, 472 bp, Unknown
  Bacterial polypeptide expressing nucleotide sequence isolated from the Sargasso Sea
gatggatggtagaataggaaaaataagaaaagctttagataaaaataaattccaaaatgttcaaatattatcatatgctgcaaaatatgcttcaagcttttatggaccttttagagatgcagttggttcaaaaggttcgttaaaaggagacaaaaaaacttatcagatggattatagaaattctgatgaagctttaagagaagttgcattagatattaaagaaggtgctgatatggtaatggttaaaccaggtatgccctacttagacataataaaatcaataaaagaaaaatttaaattacccgtatttgcctatcaagtatcaggagaatatagcttaattgaaacagctataacgaaaaaattaattaataaagatgctatatatgaaagcttagtagcttttaagagagccggtgccaatgctatagtaagttattatgctgatagaatagataaaataataaaataa

SEQ ID NO: 281963 - DNA, 914 bp, Unknown
  Bacterial polypeptide expressing nucleotide sequence isolated from the Sargasso Sea
catttgtggtcacgtaaattagttgaagaaaatacaatatcacccagtgatttagtgttaccaatttttattactgaaggtgctaataaaattgagtcaattaaaactatgccaggtgtttacagatattctattaataatttgtcaaaaataatcgataaagctctaaatttaaaaataccaatgattgctatatttccaaatatacgatcaaatttaaaaaatattaatggtagtgaagcactaaacgaaaacaacataacttgtcgggctataaggttcattaaagaaaaatataaaaataaaataggtataatgtgtgatgtagcactagatccatatacatcacacggtcatgatggtgtttttaaaaaaggaaaaatattaaatgataaaacaaatgaaatacttataaagcaatcattacttcaggctgaaatgggatgtgatgtgatagcaccttcagatatgatggatgggagaattggtcgtataagaaaagcacttgataaaaatggttatgacgaagttcagatattgtcttatgctgtaaagtatgcctcaagtttttatggaccctttagagaggctgtaggttcaaacaaaaatttaaaaagcgataaaaaaacataccaaatggatttcaaaaataaaaacgaagcattaagagaggtttcgctagatattaaagaaggggcagatatgataatggttaagccagggatgccgtatcttgatattatttcacttgtcaaaacaaattttaaaataccagtgatggcatatcaggtttcaggagaatacagcttgataatgaatggaataaagaaaaaacttattaacaaaaatgcaatttatgaatctttgatgagttttaaaagagctggggcatgtgctattataacttattttgc

SEQ ID NO: 281964 - DNA, 674 bp, Unknown
  Bacterial polypeptide expressing nucleotide sequence isolated from the Sargasso Sea
aatggatggaaaaaataaaaggcaatcaataaaaaacttaccgggagtttatagatatagtgttgataaattaccactaattcttgacaaagcagtaaaaaataaaattccaatgatcgcactctttccctacactaaatcaaatgtcaaagactacattgggtctgaagcattaaatgaaaataatttaatatgtaaagcattaagatttatcaaaaaaaaatataaaaatgaaataggaataatgtgtgatgttgctctagatccatatacatcacatggccatgatggaattatcaaaaaaaataaaatattaaatgatgaaacaatagaaattttaatcaaacaatctttacttcaggctgaaatgggatgtgatatcattgctccatctgatatgatggatggaagaataggtaaaatacgtaaatctttagataaaaaaaattttaaagatgttcagctattatcatatgcggttaaatatgcatcaagtttttatggacccttcagaaatgctgttggatcaaacaaaagtttaaaaggtgataaaaaaacttatcagatggattataaaaataaaatagagtcaattagagaagttagtctggatattaaagagggagctgacatggtaatggtaaaaccaggtctaccatatctggatattataa

SEQ ID NO: 281965 - DNA, 379 bp, Unknown
  Bacterial polypeptide expressing nucleotide sequence isolated from the Sargasso Sea
ttttatggtccctttagagatgcagttggatcaaaaaaatctttaaaaggtgacaagaaaacatatcagatggacttcagtaattccgatgaagctttaagagaagtggcattagatattaaagaaggagcagatctcgtgatggtgaaacctggtcttccctacctcgatataataaaaaaagtgaaagaaaattttaaaataccagttttggcttaccaagtttcaggtgaatatagtttgttaatgaacggtattaacaagggattaataaatgaaaactctattaatgaaacacttatgtcgtttaaaagagctggtgctaatgcaattatttcatattttgcagatagactcgataagattataaaaaattaag

SEQ ID NO: 281966 - DNA, 790 bp, Unknown
  Bacterial polypeptide expressing nucleotide sequence isolated from the Sargasso Sea
atgattatcactggaaagtatcctcagctacgtttaagaagaaatcgtaagagagaatggtctagaagattaacaagtgagaataatttatcggttaatgaccttattttaccaatattcattatagatggaaaaaataaaaaaatacctgttaaaactatgcctggtatttataggtattcacttgataaattaaattcagttgttgaaagagcgattaatttaggaatacccatgatagctctttttccatataccaaaaataatttaagaaattctctcggcagtgagtctttaaacccaaataatctagtttgcagagcttgcaagcaaattaagaaaaaatttaaatataatattggaataatgtgtgatgtagccttagatccttacacatcacacggtcatgatggtttaattgtaagaggtgatgtggaaaatgatgaaactgtaaaactactaattgaacagtcattgatacaagcatccgcaggttgcgatgtgttggcgccatccgacatgatggatgggcgagtaggtaaaatacgaaatgcattagataaaaataattttaaaaatgttcaaattttatcttatgctgtcaaatatgcatcaagctattatggcccattcagggatgctgttggatcaaaaaatcttttaaggggagataaaaaaacatatcaaatggactttaaaaattcggatgaatctttaagggaagttactttagatattaaagaaggagctgatatgattatagtaaaaccatggattaccgttatttaga

SEQ ID NO: 281967 - DNA, 807 bp, Unknown
  Bacterial polypeptide expressing nucleotide sequence isolated from the Sargasso Sea
aatgaagatattaggtaaatatccaagtttaagattgagaaggaatcgcaaatctagctgggcaagaaaacttgtagaggaacacaatatttcagttaatgatttgatattacctatctttgtaacagaaggtaaaaatagaattgaggaaattaagtctatgccaggagtttatagatatacagtagataaaattaataacgttgtaaataaagctaataaaatcggtattcctttaattgcaatatttcccaatacgccaaaatcaaaaaaaaacttttacggaagtgaagcattaaatgaaaataatttagtatgcagaacaataagaaaaattaaaaagaataatcccaatattggtataatgtcagatgttgccttagacccatacaccagtcatggtcatgatggaattgtgaaaaagaaacatgttttaaatgatgaaactatacaaatactttcaaaacaagcaattctacaagcacaaatgggttgtgatgtaattgctccgtctgacatgatggatgggagaattggtgtaataagaaaaagtttagatagaaataattataaagatgtacaaatactttcatattcagcgaaatacgcttctagtttctatggtccattcagaaatgcgataggatcaagtcaaaaaaagaaaattaataaaaagacttatcaaatggattatagaaattcagacgaagctttaagagaggtagcattagatataaaagaaggtgctgactttgtcatgattaaaccaggattaccgtatttggatataatcaaatctggtaaaag

SEQ ID NO: 281968 - DNA, 373 bp, Unknown
  Bacterial polypeptide expressing nucleotide sequence isolated from the Sargasso Sea
ttcaagtttttatggtccttttagagatgctgttggatctaaaaaagcactgaaaggtgataaaaaaacatatcaaatggattataaaaatagtgttgagtcgttaagagaagttgctctagatataaaagaaggtgcagacatggtgatggtcaaacctggaatgccctacttagatattattaaattagtaaaagataattttaaaataccagtttttgcatatcaagtatctggtgaatatagtttaataaaaaatggaataaaaaaagaacttataaataaagactcaatattagagtcactaatatctttcaaacgagctggtgctaatgcaatagtatcttattttgctgacaaaatatcactttaa

SEQ ID NO: 281969 - DNA, 674 bp, Unknown
  Bacterial polypeptide expressing nucleotide sequence isolated from the Sargasso Sea
aatgaaaaaatactcttccacagcgccatattttccacgaactcgtatgaggagaaacagggaaaatatattttctaaactaataactgctgaatctacgctttcagttaatgatttaattatgcctttatttgttgttgaaggtaaaggtgtatctcaatctatagaatcaatgcctaatatttttagatattctcctgataaaatattgaaggtggttgaagaagtagtctcattggaaatcgcagctattgcacttttcccaaaaatagaagatagttttaaggataaaagtggttcattagcatataatccagataatctaatttgtgagactgtaagactaattaaatccgaatttccaaatctaggagtaatctgcgatgttgccttagatccatatactgatcatggccatgatggtttattaattaatgatcaaattgataacgatgagactattaaagccttagtaaaacaatcgattgttcaagcagaggctggttgcgatgctattgcgccctctgatatgatggatggtagagtctctgcgattcgtgatgctttagatagcaagggactccaaggtactcaaataatttcatatgcagctaaatacgcatctagtttttatgggccatttcgtgaagccgtcggatcaaataatttgaaaa

SEQ ID NO: 281970 - DNA, 490 bp, Unknown
  Bacterial polypeptide expressing nucleotide sequence isolated from the Sargasso Sea
accctcagatatgatggatggaagaattggtgtaattagaaatgcgctagaggaagagaattttaaaaatacaatattactttcgtatgcagctaaatataattctaaattttatgggccttttagagatgctgttaaatcatcttcaaatttaggcaaatcatcaaagtcatcctatcagatgaatatcggcaataaagatgaagcgcttcatgaagttgctttagatatttctgaaggtgcagatattgttatggttaagcctgcaatgccatatttagatataattcatctaattaaagatagttttaaagttccaacttttgcatatcaagtaagtggagaattcagcatgctaaaacttgcaattaaacaaggatggctcgatgaaggggttatgttagaatcattaactagtattaaaagagctggagcagatgctattctttcttacgcagctaaggatatatcaaaggagataaataattaa

SEQ ID NO: 281971 - DNA, 386 bp, Unknown
  Bacterial polypeptide expressing nucleotide sequence isolated from the Sargasso Sea
cagtttttatggcccatttagagatgctgttggatctgctgcaaatttggggaaagcgtcaaaaaaaacgtatcaaatgaattttgcaaatctcgatgaagctcttcatgaagcaggaatggatatagaagaaggagcagatatagtaatggttaaacctggaactgcttaccttgatgtggttcatgcaattaaatcagcatttcaggttccaacttttgtttaccaagttagtggagaatattcaatgcttcaattgagcatcgagaaagggtggcttgacaaagatgttatgttagaatctttaatgtgctgcaaaagagctggtgctgacgccatacttacctatgcagcaaaacaaatagcatcggagctaaattcatgag

SEQ ID NO: 281972 - DNA, 789 bp, Unknown
  Bacterial polypeptide expressing nucleotide sequence isolated from the Sargasso Sea
aatgaaaaatgtaggcagatatccaagtgttagacttagaagaaatagaaaaactgaatggtcaagaagactagtcagtgaaaacaatctatcaactaatgatctgatttggccaatttttttaaaagatggaaaagatataaaagaaccaattaactcaatgcctggagtttaccgatattctcttgataaaattcctaaactagttgaaagagctgctaaaaaaaaaatccctttaattgctttatttcctcaaacagctcaatttaaaaaggactctagaggcacggaggctttaaataaaaataatttagtatgcaaagctttaagattaattaaaaaagaatttaatgaaataggagtaatgtgtgatgttgcgctagatccatatacaagccatggacatgatggaattttaaagaaggactacgttgacaacgatgaaacggtaaaaatattagtaaaacagtctttactatatgccaagatgggctgtgatgttatagccccctcagacatgatggacggcagaattggtgaaatacgtaaagctctagataaaaataattataaatcggtgcaattattatcatatgctgtcaagtatgcatctaatttttacggtccttttagagatgcggtcggatctaaaaaatctttaaaaggaaataaaaaaaattatcaaatggattataaaaattccaaagagtcgcttagagaagtgtctatggacataaacgaaggtgcggattttgtaatggtaaaccaggaatgccatatcttgatata

SEQ ID NO: 281973 - DNA, 722 bp, Unknown
  Bacterial polypeptide expressing nucleotide sequence isolated from the Sargasso Sea
aatgagtggtcacggagactagtagaggaaaataacctttcatcaagtgattttattttacctatatttttgatgaaaggaagaaacaaaaagcaagctattttgtctatgccaggtgtgtacaggtataccctagataaactagctcctcttatagataaagctattaaaattaaaatacctatggttgcactctttccttatatagactcaaaaaaaaaagatgaagtcggaactgaagcattaaatgaaaataatttagtttgtaaggctataagattaataaaaaaaaaatataaagatcaaattggcattatgtgtgatgtagctcttgatccgtacacatctcatggacatgatgggttattcaaatcaggatatgttttaaatgatgaaactattgaaatattagttaatcaatctttactacaagcacagatgggatgtgatgtaattgctccatctgatatgatggatggtaggattggtgagattagaaaatctcttgataagaatggtctcaaaatgactcaaattttatcttatgcagtaaaatattcatctaatttttatggaccttttcgtgatgctgttggatcaaaaaaacttttaaaaggagataaaaaaaattatcaaatggattttagaaatagtgatgaagctttaagagaggtatccctagatatcaaagagggagcggatatggttatggttaaacctgg

SEQ ID NO: 281974 - DNA, 651 bp, Unknown
  Bacterial polypeptide expressing nucleotide sequence isolated from the Sargasso Sea
catgcaaggcaactttccaagtacaagacttagacgtaatagaatgaaagaattttctcgtcgtttagttgctgaaaatactcttagtgtaaatgatttaatcttgcctctatttgtatgtgagggaaacaagattaatgaccctattaattcgatgcctggtgttagcagatactctattgataaacttttaaatgaagtagaaaaagctgttaaatttaatattcctgctattgcaatttttcctcaaattgaaagtggtcttaaaaattctgagggaagtttagctgtagatgaaaacaatttggtgtgcagatcaattaaaagtatcaaaaaaaattttccaaatattggtattgtatgtgatgttgcgttagatccttttacggaccatgggcatgatggtttagttataaatgataaaatagataatgataaaactttggaagttttggaactacaagctgtaatccaagcgaatgctggttgtgatgtaatcgccccgtcggatatgatggacggtagggttggaagaataagaagtgcattagattcaaataatttatcagatacccttatactttcttatgccgcaaaatatgcttcaggtttttatggcccttttagggatgctataggttctggttctaa

SEQ ID NO: 281975 - DNA, 190 bp, Unknown
  Bacterial polypeptide expressing nucleotide sequence isolated from the Sargasso Sea
tgctgcatacaatgtatctggagaatacgcgatgattgtttcagcagcagaaaaaggattacttgaccgtaacttagccatgatggaaatgcttatgtcaataaagcgtgctggagccgatatgatactaacttattttgcaaaagaggctgctgccattcttcgagctgatttcggaagttttaaatga

SEQ ID NO: 281976 - DNA, 313 bp, Unknown
  Bacterial polypeptide expressing nucleotide sequence isolated from the Sargasso Sea
atggatatgagaaattatgatgaggcacttagggaagttggttttgatataaaggaaggtgctgattttgttatggtaaaacccggcatgccctatctagatattattaatcttataaaacaaaattttaaaatacctgtattttcatatcaagtatctggcgaatatgcgatgattatgaactctatcaaaaataaagatttagacgaaaatataatagaagaaagtttaatttcactcaaacgtgcaggatcaaacgccattataacttattttgcattagatattgcaaaaaaattaaggaattactgag

SEQ ID NO: 281977 - DNA, 754 bp, Unknown
  Bacterial polypeptide expressing nucleotide sequence isolated from the Sargasso Sea
tatacgcctgaagaaaaaaaaactgatagtggagaagaatctataaattcgaaaaatcttgtttgcaaagctctaaaaaaaataaaatcacaaaaaaataattttggggttatgtgtgatgtcgcacttgatccttatacttcccatggtcatgatggattagtaaatagtgaaggagaaatagtcaatgatgaaacaaattcattgcttgttaaacaggctttattatttgctgaacatggagctgatattatagctccttcggacatgatggacggtagaataactaagattagaaataaacttgaggatgaaaagttctacaatactattatattatcgtatgccgcaaaatacgcttcaaaaatgtattcaccatttagagatgctgtcggatcatcatcaaatctaaaaacagacaagaagacttatcaaatgaatattgcaaattctgatgaagccctaagagaagtagcgatggacatcaaagagggtgcagacatagttatggtaaaacctgggataagctatcttgatataattagtaaaattaaatcaaaatttaattttccaacttttgcataccaggtttcaggagagtattctatgataaaggcagctgcagataaaagttttattaatgaagaagaaattgtctttgaacaactgacttcatttaaaagagctggggcagacgcaatactttcttactttgcgcctgaagttgctcgtaaattaaaatcaggaaattaat

SEQ ID NO: 281978 - DNA, 670 bp, Unknown
  Bacterial polypeptide expressing nucleotide sequence isolated from the Sargasso Sea
atgaattcgattattcgtcctagaagattaagaagaactgaagcaattagagaaatggttagagaaaaccatctaatggcatctgactttatatatccattatttattcatgaaaaagactttaaagaggaaatttcagcaatgcccggaacttatagatgggatattaatggcttaataaaggaggttactagggcatggcaattgggaataaggtgtgtagttcttttcccaaaagttaacgatagtttaaagactgaagatggagcagaatgttttaatgaagacggtttaattcctaaggctattcgaatattaaaaaaagagattccagaaatggcaataatgacagatgtcgccttggatccatactcttgtgatggtcatgatggattagttgatgaaactggaaaaatattgaacgacgaaacaatcgaaattttgaaaaaacaagctttaacacaagcaagagctggagcagattttattggtcctagtgacatgatggatgggagagttggagcaatcagagctgctctcgatagtcaaggatttagtgatgtaggtattattagttatacagcaaaatattcatctgcttattatggaccatttagaactgcattagattcggctcctagagaaaatagtaagaaaataatccagacaa

SEQ ID NO: 281979 - DNA, 658 bp, Unknown
  Bacterial polypeptide expressing nucleotide sequence isolated from the Sargasso Sea
attagtgatgtagctttggacacttatactgatcatggacatgatggtataattgacaccgctggcggtgtggataatgatgctagtatacaagtgttaaaaaaacaggctctttgtcatgcacaagctggagctgatatagttgcaccttctgatatgatggatggcagagttaaagaaatccgttcttatcttgatgagaatagtttatctaatgcacaaatactctcttatgcagttaaatatgcgtcaaatttttatagtcccttcagagatgctgtgggaagtagttctcagttaaaaacaaaaggtaaacacacttatcaaatggactatagcaatagtaatgaggctattatggaggcgagccttgatgtagaagaaggtgctgatatgcttatggttaaaccagcagggcattattgtgatattatttttagacttaaaaaagaattcatgttgccagtattttcttatcatgtttcaggagaatactctatgatcaaggctgccagtaaaatgggttggcttgatgaaaaactttgtgttcaagaggtgttacttagtctgattagagccgggagttctgcaattatgacatattatgctctgcaggtagcaaaatggctaaaagaggatgcctttgttgatctttagt

SEQ ID NO: 281980 - DNA, 603 bp, Unknown
  Bacterial polypeptide expressing nucleotide sequence isolated from the Sargasso Sea
atgatggtattctggagaatggtaaaattattaacgataaaactgttaaaatattgtgtgaacaagcattgataaactctcaggcgggatgtgacatagtagcaccttctgacatgatggatggaagaatagttcaaattagaaattatttagataagtgtaatcaagaagatactctgataatgtcttacactgcaaaatatgcatcttctatgtactcaccttttagagatgctatatcagcaagcaccaatctagggatagataaaaagaatacttatcaaatggacgcaagtaatattaaagaagctataaaagaagcgtcaatggatattagggagggagctgatatccttttagttaaaccaggaataatgtatcttgatgtattgaaggaaataaaaagaaattttaattttcctactttcagctaccaggtatctggtgagtattcaatgattaaaaatgcaattatatcaggaacctttaagaaagaagatattttaattgaaacaatgatttgttttaagcgagctggagctgatgcaattattagttattttgcattagaaatagcacagatgatgaaaaatggtcattaag

SEQ ID NO: 281981 - DNA, 757 bp, Unknown
  Bacterial polypeptide expressing nucleotide sequence isolated from the Sargasso Sea
catgattattggtaaatatccgagtcttagacttagaagaaatagaaaagaatcttggtcaagaagactgattcaagaaaataccttaagtccaaatgactttatactacctatttttttaattgaagggtcaaataaaaggcaagagatttcattgatgccgggcgtatacagatatacaattaatcgattgagtcaaatagtggatagagccataaaaaaaaagatacctatggttgcactttttccaaaaacccaaaatgcacataaagatgaattgggaacagaatcacttaatgaaaaaaatttagtttgtagagcaattaaagaaattaaaaaaagatacaaaaatcaaattggtataatgtgtgacgtagcattagatccctacacatcacatggtcatgacggtttaattaaatctaacactattttaaacgacgagactatagaggtattgattaatcaatcattacttcaggcagagatgggatgtgatgtaattgccccatcagatatgatggatggcagaataggaaaaataagaaaagctctagataaaaataaattcaaaaacgttcaaatattatcgtatgctgcaaaatatgcttcaagcttttatggaccttttagagatgcagtcggttctaaaggttcgttaaaaggagacaaaaaaacttatcagatggattatagaaattctgatgaagctttaagaagagttgcattagatattaaagaagtgcagatatggtaa

SEQ ID NO: 281982 - DNA, 409 bp, Unknown
  Bacterial polypeptide expressing nucleotide sequence isolated from the Sargasso Sea
ttatgccgtaaaatatgcttcaagtttttacggcccatttagagatgcagttggatcgaaaaataatttaaaatctgataaaaaaacttatcaaatggattttagaaattcaaatgagtcattaagagaagttggattagatattaaagaaggagctgatatggttatggtaaaacctggtttgccttatctagatattattaaaaaaattaaagataattttaaaattcctgtttttgcttatcaagtatcaggagaatatagcttaataaaatttgggataatgaataatcttataaaagaagaggcaatattagagagtttattagcattcaaaagagctggtgcgtcagcaatagtgacttattttgccatagatatagctcgtaaaataaaaaaaattaattaa

SEQ ID NO: 281983 - DNA, 769 bp, Unknown
  Bacterial polypeptide expressing nucleotide sequence isolated from the Sargasso Sea
aatgagtacacgcggagcttttccccacacccggatgcgtcggctcagggcctcggcttttgcccgcgacatggtgcgcgaaagcacgctgagtcccgcgaatttcatctacccggtattcgtgcttgaaggcagtgggcagcgtgaggccgtgccctccatgcctggcgtggaacgcctgagtgtcgacctgctggtggaactggccaaagcagcaaatgcgctgggcatccccgccctcgcactctttcccgtggtcggtcaggacagtaagtcactgctggccgaagcggcctatcacgctgacggattggtgcagcgcgcggtggccgaactgaaatcggcggtgcccgagattggcgtgatcacggatgtcgcattagacccctacaccacccatgggcaggacggcatcatcgatgacgcaggctacgtattgaacgatgtcaccagtgacaccttggtcaaacaggcactcagccatgcggcggcgggtgccgatatcgtagcgccttctgacatgatggacggacgcattggcgcgattcgcagcgcgctcgagagtgagggtcacatcaacaccctcattctttcttacgccgcgaaatatgcgtcaacctattacggcccgttccgcgatgcggtcgggtccgccgccaatatcaaaggcggcgacaagaagacctaccagatggacccgggcaacagtgacgaggcgattcatgaagtcgctttggatctgcaggaaggcgccgacatggtcatggtg

SEQ ID NO: 281984 - DNA, 751 bp, Unknown
  Bacterial polypeptide expressing nucleotide sequence isolated from the Sargasso Sea
atgagtattaatgcgcagttcccggcttggcgatctcggagactcaggcgcacaagcgctattcgaagactggtatctgaaacacagatttctattgatgatttcgttgcgcctctttttgtcaaggagggcattaaagagccgcaacaaatatcttcacttcctggtgttttccaacacacgcttgaaagcttaaaacttgaagttgattcattaagaaaacttggaatacccggaataattctttttgggattcctgagtcgaaagatgaagttggttcaggggcttgggacccagatgggatagttcagttagcactcaaagatttaaaagaaaattttggtgacgagatgacgcttattgcagatctttgcgttgatgagtacacgagtcatggtcattgtggaattttgtcgcaagatggaacagttgataatgatgcaacgcttgaaatttataatcagacggctttagcacaagcagatgctggtgccgacatttgtgcaccttcaggaatgatggatggacaagtttcttcgatccgtaatgcattagattcaaataatcatactcagaccattattcttgcatattccgctaagtatgcctcatccctttatggtccgtttagggatgcagtagatgtaactataaaaggtggtggagaccgtcgtggctaccaacaggactatgcgaactcgcgagaggccctagctgaaattaaagctgacatttctgaaggagccgaca

SEQ ID NO: 281985 - DNA, 767 bp, Unknown
  Bacterial polypeptide expressing nucleotide sequence isolated from the Sargasso Sea
aatgattatcacaggaaaatacccaaatttaagacttagaagaaaccgtaactcagattggtcacgtaggttagttagggaaaatacattatcagtaaatgatttgattctcccaatatttgttgtcgatggaagcaataaaaagcaatcaattaaaaatatgccagatatttatagatacagtgtaaatagattatctgaagttattgataaagctgtctataataaaattccaatggtggcaatatttccttatacagcaaaaaaattaaaaaatgattctggatcagaatctcttaatgaggacaatttagtttgcaaagcaattcaatatatcaaaaaaaaatataaaaattctattggtattatgtgtgatgtagctctcgatccttatacgtcacatggtcatgacggtcttttaaataatgggaaaatattaaacgatgaaacagtaaaaatattagttaaacaatctttattacaggcacaaatggggtgtgatgttatatcaccttctgacatgatggatggaagaattggagaaataagaaagaatttagataaaaataattttaaagatgttcaaatattatcatatgctgttaagtatgcttcaagtttttatggtccttttagagacgctgtaggatcaaaaagtcttcttagaggagataaaaaaacctatcaaatggattatggtaacagtcaagaagcaattagagaagttgcgctagatataaaagaaggtacagatatggtgatggtta

SEQ ID NO: 281986 - DNA, 991 bp, Unknown
  Bacterial polypeptide expressing nucleotide sequence isolated from the Sargasso Sea
catgattacaggaaaatatccaaatttaagattacgaagaaacagaaaggaatcgtggactagaaggttggttcaagaaaacacactcagtccaaatgattttatattaccaattttcttaatagatggatcaaacaaaaaagaatcaatatctacgatgccaggtgtttttagatacacaataaatagagtttctcaaatagtagataaagcaattaaaaaaggtattccaatggttgctctttttcctaaaacaaaaaatactttaaaaaatgatttgggcactgagtcattaaatgaaaataatttagtttgcagggccatactagaaattaaaaaaaaatacaaaaaccaaattggaattatgtgtgatgttgctttagatccttatacatcacatggtcatgatggattaataaagtctaatcaaataattaatgatgaaacaattgaagtactaataaatcaatctctattacaggctgaaatgggatgtgatgttcttgctccttcagacatgatggatgggagaataggaaaaataagaaaagcacttgataattctaattttaaaaatactcaaattttatcctatgcagcaaagtatgcctctagtttttatggaccttttagagatgctgttggttctaaaaactcccttaagggtgataaaaaaacttatcaaatggactttagaaatagtgatgaggctatgcgtgaagttgctttagatataaaggaaggtgcagatatgattatggttaaaccagggatgccatatttggacataattaaatcaataaaagaaaaatttaaaattccagtattggcataccaagtttctggtgaatatagtcttttagaaactgctattaataaaaaactaatacaaaaaaacgcagtttatgaaagtttagtctcttttaaacgttcaggagcaaatgccattgtctcatattacgctgatagaatagacaaaattttagaataa

SEQ ID NO: 281987 - DNA, 529 bp, Unknown
  Bacterial polypeptide expressing nucleotide sequence isolated from the Sargasso Sea
ttgaggcgtaaccgcatgaaatctttttcaagaaaattgatttcagaaaatgtattaactgttaatgatttgatacttcctttatttgtcactgaaggtgtaaataaaaaagaggatattccttcaatgcctgcggtatatagaaattccatagatgaattacttaaagaagcagagtatgccgctaaactagatataccagcaatagctattttcccacatattgaaaaggatttgaaagatgcaaaaggatcaaacgctattgataataaaaacttggtttgtagatcaataaaagctgtaaagaaagaattcccagatttaggaattataactgatgttgctcttgatccctttactgatcatgggcatgacggtttaatcataaacgaagaagtccataatgatgaaactctgaaagttttaggcaaacaggctttagttcaagcagaggccggttgtgatatgatcgcaccatcagatatgatggatgggcgggttgcgcatatcagacaagttctagatgaag

SEQ ID NO: 281988 - DNA, 724 bp, Unknown
  Bacterial polypeptide expressing nucleotide sequence isolated from the Sargasso Sea
aaaaattattatggttctgaagccttgaatgaaaataatcttgtttgtaaagctataagattaataaaaaaaaaatataaaaatcaaataggtataatgtgtgatgtagcattagatccttatacatctcatggacatgatggattgtttaaatctggatatgttttaaatgatgaaactgttgaaattttagttaagcaatctctattgcaagcggaaatgggttgcgatgttattgccccttcagacatgatggatggaagagtaggaaaaattagaaaagctttagataaaaatggttatgaattagtacaaattttatcatatgcagttaaatatgcttcaagtttttatggtccatttagagatgctgtaggatcaagaggttttttaaaaggagataaaaaaaactatcagatggattataaaaatgaaactgaagctttaagagaagtcgctcttgatatcaaagaaggttcggacatgataatggttaaaccagcgctaccgtatttagatataattaaaaatattaaaaataattttaaaattcctgtaatagggtatcaggtttctggcgaatatagtttaataagtaatggtattaaaaaaggtataattaatcaagacgctataatagaaagtttgatatcaattaaaagagctggagcttcagctattgtcacttattatgcagataaaatttctaaatttttaaaataat

SEQ ID NO: 281989 - DNA, 997 bp, Unknown
  Bacterial polypeptide expressing nucleotide sequence isolated from the Sargasso Sea
gatgaaaatagagagaacatttccagaaacacgaatgagaagaattagaaaaaattctggacttagagaaatgcttgctgaaacaaatttatcgaaaacagatctcatacaaccaatattcataaaagaagatttatctggagctgaggcaattaaaactatgccaggaataaatagatttggtcttgatatcttaaatgatgaagtaggtaaaattgtcgatcttggtataaaatctattgcagtttttccagtaattaatgaagaaaaaaaagatgaaagtggttctcaagctaccatagatgataactttatttgccgtgccatatcttcaataaagaaaagctatcctgatttaatggttattgcggatgtagcactagatccatacaccaatcatggtcatgatgggttattagatgagacaggtgatgtggacaatgatttaactcttcctgttttaaaagaacaggcagttgtcttagctaaggcaggaacagatataattgctccttcagatatgatggatggaagaattaagataattagagatgcattagagcaaaatgattttatcaatactctcatacttgcttattcagcaaagtttagttcaaagttttatggtccttttaaagatgcagtagagtcagcaaaattttttggtgacaaaactaaagacacatatcagatgccagttggaaatattaatgaggctttgcatgaggttgctttggatattcgagaaggagctgacattgttatgattaaacctggaatgccctacctagatgttatcaaagctgtcaaagatgaatttaaggttccaacttttgcctatcaagtaagtggtgaatattcgatgctaaaaaatgctgtagactcgaaactactaagtaatgatgttatcaaagagtctctcttatctttcaaaagagcaggagcagattgtatcttaacttattttgcttcagaaattgctagaagtttatcctaa

SEQ ID NO: 281990 - DNA, 697 bp, Unknown
  Bacterial polypeptide expressing nucleotide sequence isolated from the Sargasso Sea
gatgtttaacagaaaatttccaaattctagattaagaagactaagaacctcaaataatttgattgatttagtcagcgaaacaactcttaccaaacatgacttaatccaaccattcttcatcaaagaaggtcttaaaggttcggaagctgtagattccatgccaaaaataagtagacatggacttgatatcatttcaagcaaagttgagcaggcaataactgcaggtatctcatctattgccgtttttccagtaatagattccaataagaaagatcaagaaggaagtgaagccttaaatccaaataatttaatatgttctgctatttcttcattaaagaaacaatttcctgaaataatcataattgctgatgttgctttggatccgtatacgaaccatggtcatgatggagttcttaaaggaaataaaatagataatgatgagactttaaaattactgggagaacaagctacctttctagctgatgcgggggcagatattattgcaccatcagacatgatggatggtcgcattggttacattagatctaaacttgacgagttcaatcataaagatacgatcatcttatcctatgctgctaagtaccattcaagtttttatggtccatttcgggatgcagtcggttcgaaaaaccaattgcaaggggcaagtaaatcatcttatcagatgaatattgcg

SEQ ID NO: 281991 - DNA, 745 bp, Unknown
  Bacterial polypeptide expressing nucleotide sequence isolated from the Sargasso Sea
aatgtctatctttagaaaatatccaagtacccgcttaagaaggttaagaaaaaacttaaatctaattgagcttgtatctgaaactaatttaacctcaaaagatctgatacaaccaatcttcattaaagaaaattttgaaggcaaagaacaaatcgaatcaatgcaagatatcttcagatttggcttaaatcatgtactgagtgaaatagaggaacttataaatgtaggcataaatgctatagctgttttcccagtcatagaatcttcaaaaaaagatgaaaaaggattagaggcattaaacaaaagcaattttatcgttcaatcaataaataaaattaaaaaagaatttcctgaattaatattaatcgcagatgttgcattagatccttatacagatcatggtcatgacggcattttaataaataacgaagttgcaaatgatgaaactgtagaagttctaattgagcaatcaatcttacttgctgaggctggggcggatattattgctccttctgatatgatggatggaagaattggtttaattagagattctctagaaaaacaaaatttaaaagatacaatcttgttatcttatgctgctaaatataactcaaaattctatggaccattcagagatgcagtaaattctgcatcaaatcttggtaattcatcaaaatcatcataccaaatgaacatatctaacaagaacgaagccttgcatgaagtcgccttagatataaatgag

SEQ ID NO: 281992 - DNA, 997 bp, Unknown
  Bacterial polypeptide expressing nucleotide sequence isolated from the Sargasso Sea
atgtttaaaagaaaatatccaaatacaaggcttagaaggttgcgaaagaattctaatttaattgacttaatatctgaaaccaatatttcttcaaatgatcttattcaaccaatttttataaaagaaaactttaaaggtaccgaagaaattaattcaatgcctggagtattcagacttggggttgaccaagccctaatagaggttgaaaatattttaaacgcaggagttaattcaattgcagtattcccaattattgataatgacaaaaaagatagtgttggaagtgaggcaataaaacaaggcaattttatctcttcttcaataaaaaaaattaaagatagatttccagaaattgttttaattgctgatgttgctttagatccatatacagatcatggacatgatgggattcttgaagataacaaagtaattaatgacgaaacaattgatattcttgttaaccaagcacttttattggcagacgcaggagctgacatgattgccccatctgacatgatggacggcagaataggggctataagaaaagctttagaaaaacaaaattttaaaaatactattcttttatcatatgctgcaaaatataattcaaaattttatggaccttttagagatgcagtcaactctgcttcaagcctaggcaagtcatcaaaatcttcatatcagatggatgtccgaaacaaaaatgaagcaattcaagaggttgcaatggatatcaatgagggagctgatatcgttatgattaaacctgcattggcatatttggatatcattcatgtaattaaagagacattcaaaattcctacttttgcctatcaagttagtggagaatttagtatgttaaagcatgcaataaatcaaaagtggcttgatagcgatgttatgttagaatcactgctaagtattaaaagggcaggagcagatgcgatactttcatatgctgctaaagatatatctatggagataaaaaataaatgag

SEQ ID NO: 281993 - DNA, 814 bp, Unknown
  Bacterial polypeptide expressing nucleotide sequence isolated from the Sargasso Sea
atgattaaaagaacttttcctcaatcaagacttcgaagaacacgcactaaaggatatttgagagaccttattgccgaaaatcacataagtaccaatgacttgattcagccaatttttattgctgatcaatcagaggcgaaagttgagataccatctatgcccggaatatttaggcacagcttagaatcactatatgctgaaaccgaagaattaattaaaaaaggtataaaatctgttgctattttccctgcaattgattcaagcaaaaaagatcaaaaaggctctcatgcttttgatgacaaaaatatagtgtgcatggcgttaagaggcttagctgaaaaatttccagaggttattaagattgctgatgttgcactagatcccttcacagatcatgggcatgatggagttttgcttgatggtaaagtagataatgataaaactttagaacttcttaaagaccaagctttgcttttagctcaatctggagcagatgtgcttgctccctcagatatgatggacggaagagtgagaatgattcgagatactttagagtctaacggattcgttgatacagtaatattatcttatgctgctaaatacgcctctagtttttatggaccgtttagagaagccgtgggatcctctgccaatcttggcaaggcttcaaagaaaacctatcagatgaattttgcaaaccttgatgaggccctccatgagacagcaatggacatagaagagggagcagacatcgttatggttaaacctggtactgcatatcttgatgtagttcatgcaattaaatctgaattaa

SEQ ID NO: 281994 - DNA, 994 bp, Unknown
  Bacterial polypeptide expressing nucleotide sequence isolated from the Sargasso Sea
aatgattatcactggaaaatatccaaatttaaggctcagaagaaacagaaaaagtgattggtgtagaagattagttgaagaaaatactctttcagtaaatgatttaatattacctatatttattactgatggaaagaataaaaaagaatcaattaaatcaatgccaggaatttatagatatagtgtagataaaataccaacaattcttgatggagctgttaaaaacgaaataccgatggttgctctatttccatacacaaattttaagttaaaaaataatatgggtactgaagctctaaatgagaataatttagtttgcaaagctataagatttattaaaaaaaagtataaggataagattggagtaatgtctgatgtagcccttgatccttatacatcacatggtcatgacggaattttaaaaaaagcgaatattttaaatgatgaaactgttgatatattagttaaacaatcagtattacaagctcaaatgggttgtgatgttattgcaccgtcagatatgatggatggaagaattggaagaataagaaaagctctagataaaaataatttacaaaatacacaaatattatcttatgcagtcaaatatgcttcaagtttttatggaccttttagagatgctgtgggatcaaaaaaaaatttaaaaggtaacaagaaaacttatcaaatggattacaaaaattccaatgaagcaattagagaaatttctttagatataaaagaaggtgcagatatgataatgataaagccagcattgccatacttagatataataaaattagctaaagaaaattttaaaattcctataatagcttatcaagtatcaggggaatatagtttgttgactaatgctattaaaaagggattgattgatgacaattctataattgaaactctttattcttttaaaagagctggttctaatgcaatagtaacttacttcgctgatagaatagtcaaatttattaaatag

SEQ ID NO: 281995 - DNA, 406 bp, Unknown
  Bacterial polypeptide expressing nucleotide sequence isolated from the Sargasso Sea
gctgcaaaatatgcgtcaggattttatggtccatttagagacggcgtaggatcaactcaaaaagaaggaattgacaaaagctcttatcaacttgatagtgcaaattctgatgatgcattaagacaaatagaaggggatctaaaagatggtgcagacatgatcatgataaaaccaggtttaacttatttagatattatatctcaaacaaaagataaatataatgttccaattgtagcttataatgtttcaggtgagtattctatgattaaaaatggaattaaaaataatatatttaatgaaaatattttaaaagaaatcatgatatcatttaaaagagctggtgctagcgcaattgttagttattttgctatcgaatatattgagaaatttttaaatcaaaaataat

SEQ ID NO: 281996 - DNA, 997 bp, Unknown
  Bacterial polypeptide expressing nucleotide sequence isolated from the Sargasso Sea
aatgaaaatagaaagatcatatccagatacaaggatgcgtagaattaggaaaagttctgccttgagagaaatgcttgcggaaacaacattatcaaaagcagatcttatacagcctatatttataaaggaagatttgaagggtagagaagccattaaatcaatgcctggaataaatcgcttaggtcttgatgttttaaatgacgaaataaagaaaattatagatttaggtataaaatcagtagcggtttttccagtcattaatgaagaaaaaaaagatgaaataggctctcaagcaacaatcgaaaataattttatttgcgagtctatatctgcaattaaaaaaagctatcctgatttagtggttatagcagatgtagcattggatccttacactgatcatgggcatgatggattactaaatgatactggtgatgtggataatgatttaacacttccagctttaagagagcaggcacttgtcttagctaaagcaggaacagatataattgctccctcagatatgatggatggaagaattaaaataattagagatgcattagaacaaaatgattttataaatacactcatacttgcttattcagcaaagtttagttcaaaattttatggaccttttaaagatgcagtagaatcagcaaaattttttggcaataaaactaaagatacatatcagatgccaatccaaaatataaacgaagcattacatgaagtagctttggatattcgagaaggagctgacattgtaatggttaagcctggtatgccctacctcgatgttatcaaggctgtcaaagatgagtttaagattccaactttcgcctatcaagtaagtggtgaatattcaatgcttaaaaatgctgtcgattctggactactaagcaatgatgtcatcaaagaatcacttttatcattcaaaagagctggggctgattgtgtattaacctactttgcctcggaaattgctagagaactatcttaa

SEQ ID NO: 281997 - DNA, 709 bp, Unknown
  Bacterial polypeptide expressing nucleotide sequence isolated from the Sargasso Sea
caaaatgggtctgaagcgcttaatgaaaataatctggtttgtagaggaattaaatttataaaaaaaagatttaaaaacaaaattgggattatgtgtgatgtggcattagatccttatacatctcatggtcatgatggattgttaaaaaataaaaaaatattaaatgatgagaccgttgagatactaacaaaacaggctgttctccaagctaaaatgggttgtgatgtaattgcaccatcagatatgatggatggtagaattggaaaaattagatctgctttagataaaaataattttaatgatgtccagatattgtcatatgcagttaaatattcatctagtttttatgggccatttagagatgcagtaggatcaaaaaaattattaaaaggtgataaaaaaacataccaaatggattataggaattctgatgagtcgttaagagaagtttcattagatataaaagaaggtgctgatatgataatggttaagccaggtatgccttatcttgatgttataaaaaaagtaaaagataaatttaaaataccagtactcgcatatcaagtttctggcgaatatagtttaattatgaatggaattaatcaaaaattaatagacaaaacatctattaaagaatctcttatttcttttaaaagagctggagcaagtagcattgtaacttattttgcagaccaaattgatctttaac

SEQ ID NO: 281998 - DNA, 736 bp, Unknown
  Bacterial polypeptide expressing nucleotide sequence isolated from the Sargasso Sea
aatgactataaatagaaagtttccaaatacaaggttaagaagattaagaagaaattcaaatttaattgatttagtagcagagaccaatttaagttctcaagacttaattcaaccaatatttataaaagaaaacttcaatggaattgaatcaattgaaagtatgccagggattaatagatttggtatcgatgaagtattaaaagaaatagaagaggttattgaatctggcataaatactatcgcagtctttcctgtagttgaatcagataagaaagatactaaaggtagcgaagcaactaaagaagataattttatatcttcagctataaaaactataaagaagaattttcctgagattatattgatagcagatgtggcattagatccttataccgatcatggtcatgatgggattcttattaatgatgaaattgataatgatgcgacaattaaagttctcatagagcaatctttaatattagctgaagctggtgcagatattattgctccttcagatatgatggatggaagaattggatcaatcagacaatctctagaagattctaattttaagaatacaattttattatcatatgcggccaagtataactcaaagttttatgggccttttagagatgcagtaaattcagcttctaatcttggtaaagcaaccaaatcttcttatcaaatgtctatccacaataaagatgaagctattcatgaagtagctatagat

SEQ ID NO: 281999 - DNA, 1003 bp, Unknown
  Bacterial polypeptide expressing nucleotide sequence isolated from the Sargasso Sea
atgaaagaaaattatagtcattacccaaatactagaatgcgaagattacgcagaacaagtgcaatccgtaatttagttagtgaaacttctctgagctcgcatgatttaatttatcctgcattcataactgaaagtgaagaaagcgaagatattggatcaatgccaggtactaaaagattgtgtttgaatgatttgctgcagttggctgaaaaattagtgtcattaagcataccggcaattgcactatttccagtcattcaaaatgaaaaaaagacagttgatggaaaagaggcatttaactccaatggtcttattcaaaaggccatttcaaaactaaaatctcaatttcctgagctgattgtaatttcagatgtagcgcttgatccatataccacacacggtcaggatggaattatcgatgaaaacagttatgtgctaaatgacctcaccaatgaaacactcaaaaaacaagcattatctcatgctgaagctggtgcagacatagtcgcaccctcagacatgatggacgggagaattggtttaatcagagaagagtttgaaaagaatcaattccataatacgatgattttatcctacgctgctaaatatgcttcatgtttctataatccatttcgtgatgcagtaaattcaaaaggcaatctggcttccggtgataaacgaacttatcaaatggatccaagcaattcagatgaaagttatagagaagtagcgatggatatcaatgagggtgcagatatcgttatgatcaagccagcgatgatgtatcaagatattatttccaatataagatccaaattttctatacccgtttttgcttatcaagtaagcggtgaatacgcgatgattcgagcagctgctgacgcaggttatttgaaccataaagatgctgttatggaatcagtattatcaatcaaaagatctggtgcatcaggaattttgacatacagcgctatagatatcgctcaatggctcagtgagtaac

SEQ ID NO: 282000 - DNA, 916 bp, Unknown
  Bacterial polypeptide expressing nucleotide sequence isolated from the Sargasso Sea
aactaatctcacaactaaagatttgatccaaccaatttttattaaagaaaactataatgatgctgaaccaataaattctatgcctgatatttatagatatggaatagaaaaagctctattcgagatcgaagatatattaaaaaataatataaaagcattagcactttttccagttattgaaaatatcaataaagatgagaaaggaagtgaggcctttaaaaaaaataattttatttctaatgtgattcaaaaaattaaagctgaattccctgaaattattttgattgctgatgtagccctggatccttatacagatcacggacatgatggaattatagttaataaagaagttgataatgatgagacaatagaagttctcattaagcaatcacaaattcttgctgaagtcggcgcagatataattgctccatcagacatgatggatggaagaattggaaaaattagagaggcgctggaaaaaaataattttaaagataccattttgttatcttatgcagctaaatataattccagtttttatggcccatttagagatgctgtgaactctgcatcaaatcttggcaagtcctcaaaatcgtcataccaaatgtcatataagagtataaacgaggcaattcatgaggttgaaatggatataaatgaaggagctgatatagtcatgattaagccagctatgccttacctagatattattactagaattaaacaaaattttaaaattcctactttcgcttatcaagttagtggtgagtacagtatgttaaaaaatgcaattaatcaaggatggctcaatgagactgttatgttagaatctttatatagtataaaaaggtcaggcgcagatgcagttttaacctatgctgcgaaagaaatagctaaggagctaagtaaatga

SEQ ID NO: 282001 - DNA, 397 bp, Unknown
  Bacterial polypeptide expressing nucleotide sequence isolated from the Sargasso Sea
gcatcaaatttttatggacctttcagagatgctgtcggctcccacaaaagcttaaaatctaataaaaaaagttatcaaatgaatttctcaaattcaaacgaagctcttcgagaagccgctcttgatatttcagaaggtgcagatcttattatggtaaaacctggaataagctatcttgatattattagtaaaattaaaaatgaatttaaatttcctacattcgcgtatcaagtgtctggagaatattcaatgataaaagctgcaggtgaaaagggttggattgacgaagatgcagtaattattgaacagcttacatctttcaaaagagcaggtgccgatgctatacttacatactttgctccttatattgcaaaaactcttaattcatctaagtagt

SEQ ID NO: 282002 - DNA, 463 bp, Unknown
  Bacterial polypeptide expressing nucleotide sequence isolated from the Sargasso Sea
agaattggatccataagacagtctctagaaaattcggggtataagaatacaatcctgttatcttatgctgcaaaatataattccaaattttatgggccttttagagatgctgttgattcagcttctaatcttggaaaatcaagtaaatccgcatatcagatgtctatcagaaacaaagatgaagccctacatgaagtagcaatcgatattaatgaaggagctgatattgtcatgattaaacctgcgatgccatatcttgatattatccatttagttaaagaaagatttaaaatacctacttttgcatatcaggttagtggagaatatagtatgttaaaacaagcgataaaagaggggtggctcgatgaaatggttatgctagaatcattaattagtatcaagagagcgggagcagatgcaattcttacatatgctgcaaaagaagtatcaaaggagatttaaa

SEQ ID NO: 282003 - DNA, 997 bp, Unknown
  Bacterial polypeptide expressing nucleotide sequence isolated from the Sargasso Sea
atgtttaaaagaaaatatccaaatacaaggcttagaagattgcgaaagaattcaaatttaattgatttaatatctgaaactaatatttcttcaaatgatcttattcaaccaatttttataaaagaaaactttaaaggtaccgaagaaattaattcaatgcctggaatattaagacttgggctcgatcaagccctaatagaggttgaaaatattttaaatgcaggagttaactcaatcgcagtattcccaatcattgataatgacaaaaaagatagtgttggaagtgaggcaattaaacaaggcaattttatctcttcttcaataaaaaaaattaaagatcgatttccagaaattgttttaattgctgatgttgccctagacccatatacggatcatgggcatgatgggattcttgaagataataaagttattaatgacgaaacaattgatgttcttgttaaccaagcacttttattagcagatgcaggagctgatatgattgcaccatctgacatgatggatggcagaataggagctataagaaaagctttagaaaaggaaaattttaaagatactattcttttatcatatgctgcaaaatataattcaaaattttatggcccttttagagatgcagttaactctgcagcaaaccttggtaagtcatcaaaatcttcataccaaatggacgttcgaaacaaaaatgaagcaattcaagaggttgcaatggatattaatgagggagctgatattattatgattaaacctgcattggcatatttagatgtcattcatgtaattaaggaaacatttaaaatacctacttttgcctatcaagttagtggtgaatttagtatgttaaaaaatgcaataaatcagaagtggcttgataatgatgttatgttagaatcacttcttagcatcaaaagggcaggagcagatgcaatactttcttatgctgctaaagatatatctaaggagataaataataaatgag

SEQ ID NO: 282004 - DNA, 967 bp, Unknown
  Bacterial polypeptide expressing nucleotide sequence isolated from the Sargasso Sea
tttgaggcttaggagaaaccgaaaaagtgattggtgtagaagattagttgaagaaaatactctttcagcaaatgatttaattctacctatatttattactgatggaaggaataaaaaggaatcaattaaatctatgccaggaatttatagatatagtgtagacaaaataccaacaattcttgatggagctgttaaaaacaaaataccgatggttgctttatttccatacacaaattttaagttaaaaaataatatgggtactgaagctctaaatgagaataacttagtttgcaaagctataagattaattaaaaaaaagtataaggataagattggagtaatgtctgatgtggcccttgatccttatacatcacatggtcatgatggaattttaaaaaaaggaaatgttttaaatgatgaaactgttgatatcttaattaaacaatcagtgttacaagctcaaatgggttgtgatgttattgcgccgtcagatatgatggatggaagaattggaagaataagaaaagctttagatagtaataatttacaaagtacacaaatattatcttatgcagtcaaatatgcttcgagtttttatggaccttttagagatgctgtgggatccaaaaaaaatttaaaaggtaacaagaaaacttatcaaatggattacaaaaattccaatgaagcaattagagaaatttctttagatataaaagaaggtgcggatatgataatggtaaaacctgcaatgccatacttagatataataaaattagctaaagaaagttttaaaattcctgtaatagcttatcaagtatctggtgaatatagtttgttgactaatgctatcagaaagggattgattgatgacaattctataattgaaactctttattcttttaaaagagctggctctaatgcaatagtaacttacttcgctgatagaatagtcaaatttattaaatag

SEQ ID NO: 282005 - DNA, 301 bp, Unknown
  Bacterial polypeptide expressing nucleotide sequence isolated from the Sargasso Sea
aacagtgaggaagcgattagagaagttggattagatataagtgaaggagcagatatggtaatggttaagcctggtatgccctatcttgatattatttctagaataaaatcagaatttaaagttccaacttttgcctaccaagtatctggtgaatattcgatgataaaagaatcaattaataaaggttggttcaatgaaaaagttataatggaatctcttttatcttttaaaagagctggggcaaatggtatactaacttacttcgcattagaagctgctgaaaaattaaataatgaataac

SEQ ID NO: 282006 - DNA, 988 bp, Unknown
  Bacterial polypeptide expressing nucleotide sequence isolated from the Sargasso Sea
aatgataacaagaaactttccaaaaaccagagctagaagactcagaaaaaattctgtgattagagatttaatttcagaaacatctttaaatcataaaaaactaattcaaccattgtttgtttcggacacagttaaaggagtggaagaaattagttcgatgccaaatcaatttagatttgatcagaattcagttttaaaagaaattgaagaactgaaaggacttggtataaacacaattgctttgtttccacatctcaagtctattaaaaaggataatgagggttctgaggcactaaatccagaaaattttttatgcgacacactcaaaaaaataaaacaacattttcctgatttagttgtgattgttgacgtcgcattagatccctatacaacttcagggcatgatggaattttaaaagacgggaaagttgataatgacctcactcttgatgcgctttctaagatgtcaattacactcactcattctggagctgatattcttgcaccatcggatatgatggacggtagaattggatatattagagatgagttagagaagaatgatttcaaagatactgttattcttagttacgccgtaaaatacgcctctagttattacgggccattcagagatgcagtaggctctaagcagaaagaggggatatcaaaaaaaacctatcaaatggattttagaaattcaaaagaagcaagaaaagaagttgaattagacatacaagagggtgctgacatattgatggttaaacccgcacttccaaatttagatgttatcaaagttgtttcagaggaatacgatttacctgtatttgcatatcaagtaagtggagagtattcaatgctgatgaatggtattgacaaaaatttattcgactctaatgtaatacctgaaactctagtgagtatatttagagctggtagttcatcagtattaacatacttcgctaagtggatcgcagaaaataatggctaa

SEQ ID NO: 282007 - DNA, 985 bp, Unknown
  Bacterial polypeptide expressing nucleotide sequence isolated from the Sargasso Sea
atgaatagaaaatttccagatactagattgcgaaggttgcgcagtaatccgtcactgctaaaaataactgcagaaaccaacctaacagtcgacgatttaatacaacctatctttgtcaaggaagggattaaaaaagctgaagcaattgaatccatgccaaacgtaaacagatattcaaaggaaggtgtgattgattactgcaaaagcttaatggatctgggaataaaagctgtcgctcttttccctgtgatagattctaaaaaaaaggatttagagggcatcgaagcatttaatcgaaaaaacttaatatgtgggactgtcgagtcgattaaaaaaaagattccagaattagttcttattgtagacgttgcccttgatccctataccgtgcatggtcacgatggaatattggacaaaaaagattacgttgataatgacaaaacagtcgaagtattaaaaaagcaagccttagttctagcagatgcgggagcagatgtaatagcaccatcagatatgatggatgggagaattggtgctataagaaaagagcttgagctaaataatttttttaacacagtaattctttcttacgctgcaaaatacagttcaaaattttatggtcccttcagagaagctgttcagtcatcatctaatttaggcaaaggaaataaagattcttatcaaatgtcgcctcataatattaatgaagctctacacgaagttgagatggatcttaatgaaggagcagatgccgtaatggtaaaacctggcatgccttacttggatgtaatacgtgcggtaaaagaaaaattcaaagtaccaacatttgcttatcaagtatcaggtgaatactcaatgctgaaaggtgcaatagaaaaagggtggttacaggaagaagttttgatggaagttttacattcttttaaaagagcaggctctgactgcatactgacttatgctgcagaagaagtgcacagaaattgag

SEQ ID NO: 282008 - DNA, 952 bp, Unknown
  Bacterial polypeptide expressing nucleotide sequence isolated from the Sargasso Sea
agaaaaagttctagccttagagaaatgcttgcggaaacaacattatcaaaaacagatcttatacaacctatatttataaaagaagatttggaaggtagagaagttattaaatcaatgcctggaataaatcgtttgggtcttgatgttttaaatgacgaaataaagaaaatcatagatttgggtataaaatcagtagcagtttttccagttattaatgaagaaaaaaaagatgaaattggttctcaagcaataatagaaaacaattttatttgtgctgctatatcttcaataaagaaaaattatcctgatttaattgttatagcagatgtagcattagatccctacactgatcatggacatgatggattactaaatgaggatggtgatgtggataatgatttaacgcttccagctttaagagagcaagcaattgttttagctaaagcaggaacagatataattgctccatcagatatgatggatggaagaattaaaataattagagattcattagaacaaaatgattttataaatacactcatacttgcttactcagcaaagtttagttcaaaattttatggaccttttaaagatgcagtagaatcagcaaaattttttggtaacaaaactaaagacacatatcaaatgcctgttggaaatattaatgaggctttacatgaggttgctttggatattcaagaaggtgctgatattgttatgattaaacctggaatgccctacctagatgtcatcaaagctgtcaaagatgaatttaaggttccaacttttgcttatcaagtaagtggtgaatattcaatgctaaaaaatgctgtagactcagaactgctaagtaatgatatcatcaaagagtctctcttatctttcaaaagagcaggtgcagattgtatcttaacatactttgcttcagaaattgctgaaagtttatcctaac

SEQ ID NO: 282009 - DNA, 991 bp, Unknown
  Bacterial polypeptide expressing nucleotide sequence isolated from the Sargasso Sea
catgattacaggaaaatatccaagtttgagacttagacgcagccgaaaatatgattggtcgagaagattaattgaagaaaacaatctttcttcaagtgattttatactgcctatttttcttattgatggaaaaaataagagacaaacaataaaatctatgcctaatgtgtacaaatattcaatcgataaccttaattcaatagttgataaagctattaaaaatggattacctatggtcgccttgtttcctaataccaataaaaacaagaaaaacttactcggtactgaagctctaaatgaaaacaatttagtttgtaaagctattagacatattaaaaaaaaatatagaaacgagataggaattatgtgtgatgttgctttagatccatatacatctcatggtcatgatggcttaataaaatctaattatattctaaatgatgaaacaattaaaatattaattgagcaatctcttattcaagcacaaatgggatgtgatgtacttgctccttcagatatgatggatggtaggattggagaaattagaaaaacattagataaaaataattttgaaatgactcaaatactatcctatgcagttaaatatgcatcaagtttttatggtcctttcagagaagccgttggttctaaaggattattaaaaggagataaaaaaagttatcaaatggattttaagaataagaatgaagctttaagagaagtagctttagatattaaagaaggtgctgatatggttatggtaaaacccggtatgccgtatctagatataataaaatcggtaaaagaaaattttaagatacctgttatggcttatcaagtttcaggagaatatagcttattaagtaatagcataaacaagaaacttattgataagtatgcaatattggaaagcttgatatcatttaaaagggctggagcaaatgctattgttagttattacgcagatagacttgataaaattctgagataa

SEQ ID NO: 282010 - DNA, 588 bp, Unknown
  Bacterial polypeptide expressing nucleotide sequence isolated from the Sargasso Sea
tatggctacaactcttccaggcgcctttccgggtcgccgtctgcgccgggtgcgcaaacatgatttcagccgtcgtctggtgcgcgagaacgtactgaccgccaacgatctcatctatcccgtgttcgtgctggagggggagaaccgtcgtgaggccgtcacctccatgccgggggtggacaggctctccatcgatctgctgctgaaagaggctgccgagctggttgcgctgggcgtgccggccatcgccctgttcccggtcaccccgctggagcagaagagcctgctggcggaagaggcctacaacccggacgggctggcccagcgggcgacgcgcgccctcaaggcgagcttcccggagctgggggtcatcaccgacgtggcgctcgatccgttcaccacccacggtcaggacggcatcatcgatgacgaaggctatgtgctgaacgacatcaccaccgagatcctggtgaagcaggcgctctcccacgccgctgccggggtcgatatcgtggcgccgtccgacatgatggacggccgcatcggcgccatccgcgcggcactggaagagaacggcttcatcaacac

SEQ ID NO: 282011 - DNA, 325 bp, Unknown
  Bacterial polypeptide expressing nucleotide sequence isolated from the Sargasso Sea
gatggatccgccaaacagcaacgaagccctgcacgaggtggcgctggatatccaggaaggggccgacagcgtgatggtcaagccgggcatgccctatctggacgtgatccgtcaagtgaaggatcagttcggcgtgccgaccttcgcctatcaggtgagcggcgagtacgccatgcacatggcggccatccagaacggctggctgaaggagaaggagagcatcatggagtccctgctctgcttcaagcgggctggcgccgacggcatcctcacctacttcgccaagcgggctgcccagtggctgcaggaagacgccagacgctga

SEQ ID NO: 282012 - DNA, 958 bp, Unknown
  Bacterial polypeptide expressing nucleotide sequence isolated from the Sargasso Sea
atgattattggtaaatatccgagtcttagacttagaagaaatagaaaagaatcttggtcaagaagactgattcaagaaaataccttaagtccaaatgactttatattacctatttttttaattgaaggatcaaataaacgggaagagatttcatcaatgccgggcgtatatagatatacaattaatcgattaagtcaaatagtggatagagccataaaaaaaaagataccaatggttgcactttttccaaaaacccaaaatgtacataaagatgaattgggaacagaatcccttaatgaaaataatttagtttgtagagcaattaaagaaattaaaaaaaaatacaataatcaaataggtataatgtgtgatgtagcattagatccctacacatcacatggtcatgacggattagtaaaatctaacactattctaaatgatgagactatagaggtgctgattaatcaatccttacttcaggcagagatcggttgtgatgtcattgccccatcagatatgatggatggcagaataggaaaaataagaaaagctttagataaaaataaatttcaaaacgtgcaaatattatcttatgctgcaaaatatgcttcaagcttctatggaccttttagagatgctgttggatctaaaggttctttaaaaggagacaaaaaaacttatcagatggattttaggaattctgatgaagccttaagagaagttgccttagatattaaagaaggtgctgatatggtaatggttaagccaggtatgccctacttagatattataaagtctataaaagaaaaatttaaattacctgtatttgcctatcaggtatcaggagaatatagtttgattgaaacagctatagcaaaaaaattaattaataaagatgcaatatacgaaagcttagttgcttttaagagggccggagcaaatgctatagtaagttatt

SEQ ID NO: 282013 - DNA, 454 bp, Unknown
  Bacterial polypeptide expressing nucleotide sequence isolated from the Sargasso Sea
gaactgcattagattcaaacaatttagcagatacccttattctctcttatgccgcaaatatgcttcgggtttttatggaccttttagagatgctataggttctggttctaatttgggtaaagatggtaaattaacatatcaaatggatccatcaaacagtgatgaagctattagagaagttggattagatataagtgaaggtgcagatatggtaatggttaaacctggtatgccttatcttgatattatttctagaataaaatcagaatttaaagttccaacttttgcctaccaagtatctggtgaatattcgatgataaaagagtcaattaataaaggttggcttaatgaaaaagttgtaatggaatctcttttatcttttaaaagagctggggcaaatggtatactgacttacttttcattagaagctgctgaaaaattaaaaaatgaataa

SEQ ID NO: 282014 - DNA, 766 bp, Unknown
  Bacterial polypeptide expressing nucleotide sequence isolated from the Sargasso Sea
atgagaagaaatagaatgaagcttttttcgagaaatttaattcgtgaaacttcattgtctgtaaatgaccttatatacccaatttttgttacctttggttcaagaaaaaaggaaccaattaaagaaatgccaaatatttatagattttctttagacatgtttgaattagaaattaaaagaatagttaaattaaaaataccagctgtagctattttcccgaatattgaaaaaaataaaaaagatggagcaggaacagaagcattaaatgaaaaaaatttaatatgtaaagcaatcaaaatagctaaaaatgtatctaatgatttaggagtaatttgtgatgtagctttagatccttttacagaccatggtcatgacggagttttttttaatggtgaaatagataatgataagactttagaaattttaattaaacaggcccttgttcaagttaaagctggatgtgatataattgctccaagtgacatgatggatggaaggataggggtcataagagacgctttagaaagaaaagattttaaaaatattcaaattatgtcttatacagcaaaatacgcatccgcattttatggaccttttagatcagcagtaggttcagcaggtttgataggtaaaaaagataaaacttcatatcaaatggactattctaattcaacagaggcaattagagaagctgaattagatattgcagaaggagcagatatgttaatggttaaacctgggttaccatatttagatattatacaaa

SEQ ID NO: 282015 - DNA, 736 bp, Unknown
  Bacterial polypeptide expressing nucleotide sequence isolated from the Sargasso Sea
tactaataaaaaattaaaaaatgataagggatctgaagcaataaatgaaaataatcttatttgccaagcaataaaatatattaaaaaaaaatatagaaataaaattggaataatgtgtgatgttgccttagacccttacacttctcacggccacgatggtttattaaaaaaaaacgaaattctaaatgatgaaactatagaagttttaattcaacaagctattttacaagctaaaatgggttgtgatgtaatagcaccgtcagatatgatggacggaagaattggaaaaataaggaaagctttagatctaaatggttttaataatatccagatcatttcttatgctgccaagtatgcatctagcttctatggtccatttagagatgcagttggatcaaaaagtatgcttaagggtgataaaaaaacatatcaaatggactataaaaattcaaacgaggcattaagagaggtagctttagatattaaagaaggtgcagacatgattattattaaaccgggcatgccttatttggatgtgattaaaaaagttaaagataaatttaaaataccagtaatagcttaccaagtttcaggtgaatatagcatgattattaacgctatcaaagggaatataattaacgagaatgcaattttagaatctttactttcatttaaaagagcgggagctactggaataattacatactttgcactaaaaatttgtgaaaaactttaa

SEQ ID NO: 282016 - DNA, 628 bp, Unknown
  Bacterial polypeptide expressing nucleotide sequence isolated from the Sargasso Sea
tgatgttgccttacatccttacacagatcatggtcatgatggaattttggagaatgatgagatcttaaatgatcaaacactagaggctctcgcagagcaatctcttgttctagcaaaagctggtgcagatattattgctccttcagacatgatggatggtcgcatcggagttattagaaaaaaattagatgaaaataactttgaagacaaaataattttgtcatatgcagcaaaatataattcaaaattctatgggcccttcagagatgctgttaattctaaaaataatctaggtacttctgataaatcttcttatcagatgaatcctgccaattcacttgaagcccttaacgaggttgctatggatattgaagagggcgctgatatcgtaatggtaaaaccaggcatgccttatttagatattatttctaagattaaagaagaatttaaggttccaacttttgcataccaagttagcggagagtatgcaatgataatggaatcagttaataaaggatggcttgataaaggtgttataatagaatctttaacaagcttcaaaagagctggtgcagatgcagttcttacatatttcgctaaagatttaataaaggaatttaatttatga

SEQ ID NO: 282017 - DNA, 764 bp, Unknown
  Bacterial polypeptide expressing nucleotide sequence isolated from the Sargasso Sea
caacgatagcttaaagactgaagatggagcagaatgttttaatgaagacggtttaatacctaaagctattcgaatactaaaaaaagaggttccagagatggcaataatgacagatgttgccttggatccatactcttgtgatggtcatgatggattagttgatgaaactggaaaaatattgaacgacgaaacaatcgaaattttaataaaacaagctttaacacaagcaagagctggtgcagattttataggacctagtgacatgatggatgggagagttggagcaataagaactgctcttgatagtcaaggatttagtgatgtaggtattattagttacacggcaaaatattcatctgcctattatggtccatttagaacggctttagattctgctcctagggaaaatagtaagaaaataattccagacaataagtctacttatcaaatggatcctgccaattcaaaggaggctttaattgaatctgcattagatcagtatgaaggagctgatattttgatggtaaaaccaggaatttcatacttggatattgtttatagattaagcactttttcaaataaacctatagctgcatacaacgttagtggggagtattccatggtaaagtctgctgctatgaagaactggattaacgaaaaagatattgttttagaaacattgcttagttttaaaagagcaggcgcaaaattaatacttacttatcatgcttgcgacgcatctcaatggttgcaggatacttaaa

SEQ ID NO: 282018 - DNA, 979 bp, Unknown
  Bacterial polypeptide expressing nucleotide sequence isolated from the Sargasso Sea
atgattatcactggtaaatatccaaatttaagacttagaagaaatagaaaaaaagactggtctagaagattagttcaagaaaatactttgtcggttaatgatttaattctgccagtctttcttattgagggaaaaaataaaaaacagccaataaaaactatgccgggtgtcttcaggtatacaatagataaacttcctttgattcttaataatgctgtaaaaaataaaatcccaatggttgcattatttccatacacaaatagaaagttcaaagatatgcatggttctgaatcattaaatgaagataatttagtttgcaaagcaataaaatttatcaagaaaaaatatgaaaataaaataggtgtaatgtgcgatgttgctttagatccttatacatcacatggtcatgatggtttaattaaaaatggtgaaatagttaatgatgaaaccatagaagtgctagtcaaacaatctttactacaggctaaaatgggttgtgatgtaattgctccttcagatatgatggatggtagagttggaataattagaaaacatctagataaaaataattttgaaaatgttcaaattttatcttatgcagcaaagtttgcttcaagtttttatggaccttttagagatgctgttggttctaacaaatctcttaaaggtgataaaaaaacttatcaaatggattataaaaatagcttggagtcattaagagaagttgcaatggacataaaagaaggtgccgatatggttatggtaaaacctggtatgccatatttagatatcattaagattgttaaagaaaattttaaaataccagttttagcatatcaagtttccggtgaatatagtcttattatgaatggaataaataaaggcttaattgatgaacaatgtattatagaaagcctaattgcatttaaaagatctggtgcaaacgcagtggtaacttattttgctgacaggatagcat

SEQ ID NO: 282019 - DNA, 716 bp, Unknown
  Bacterial polypeptide expressing nucleotide sequence isolated from the Sargasso Sea
aagtttagctgtagatgaaaacaacttggtgtgcagatctattaaaagtatcaaaaaagattttccaaatattggtatcgtatgtgatgttgcgttagatccttttacggaccatgggcacgacggtttagttataaatgataaaatagataatgataaaactttggagattttggaacaacaggctctagtccaagcgaatgctggttgtgatgtaatcgccccgtcggatatgatggatggaagagttggaagaataagaactgcattagattcaaataatttaacagatacccttatactttcttacgctgctaaatatgcttcaggtttttatggtccttttagagatgctataggctctggttctagtttaggtaaagatggtaaattaacatatcaaatggatccatcaaacagtgaggaagcgattagagaagttggattagatataagtgaaggagcagatatggtaatggttaagcctggtatgccttatcttgatattatttctagaataaaatctgaatttaaagttccaacttttgcctaccaagtatctggtgaatattcgatgataaaagaatcaattaataaaggttggctcaatgaaaaagttataattgaatctcttttatcttttaaaagagctggggcaaatggtatactaacttacttcgcattagaagctgctgaaaaattaaaaaatgaataac

SEQ ID NO: 282020 - DNA, 964 bp, Unknown
  Bacterial polypeptide expressing nucleotide sequence isolated from the Sargasso Sea
atgagaagatcaagaaaaactgattggatgagaagattagttagagagaattctctttctagcaatgattttatattaccaatctttgtaacagagggaaaaaataaaaagattccaattaaaactatgcctcaagtttttagatatagtgtcgatagacttgaccaaattgttgatagagccttaaaacttaaaattccaatggtggcaatttttcctcaaacaaatagtggtttaaaagactcttatggtagtgaagctttaaatgaaaacaatttagtttgtaaggctattagaaaaattaaagataaatacaaaaatgaaatcggtataatgactgatgtcgctttagatccttatacatctcatggacatgatggaattttaagaaataaaagcattcttaatgatgaaacgatagaaatattaattcaacaatctcttttacaagctcaaatgggtagtgatgttatagcgccatcagatatgatggatgggcgtattggtgagattagacaagaacttgataataattcgcttaaagatattaaaatattatcttatgctgtaaaatacgcatcttctttttatggtccctttcgagatgcagttggatcaaaaaaatctttaaaaggtgacaagaaaacatatcagatggacttcagtaattccgatgaagctttaagagaagttgcgttagatattaaagaaggagcagatctcgtaatggtaaaacctggtcttccctacctcgatataataaaaaaagttaaagaaaattttaaaataccagttttggcttaccaggtttcaggtgaatatagtttgttaatgaatggtattaacaaggaattaataaatgaaaactctatttatgaaatacttatgtcatttaaaagagctggcgctaatgcaattatttcatattttgcagatagaatagacaaaattattaaaaattaag

SEQ ID NO: 282021 - DNA, 691 bp, Unknown
  Bacterial polypeptide expressing nucleotide sequence isolated from the Sargasso Sea
atggatatcgcttatcgcccccgccgactgcggcgcacgccaggcctgagggccatggtccgcgagcaccacgtcagtgcagccgatttcatttaccccctgttcgtgcatgaaggggccagcaacgaatcgatcggcgccatgcctggtgcccaacgctggagcctcgatggcctgcttggtgaagttggccgggcctgggatctcggcatccgctgcgtggtgctgttcccgaaggtggccgatggcctcaaaacggaagacggcagcgagtgcttcaacgatggcggcctgatcccccgcgctatccgccgcatcaagcaagagcatcccgggatgaccgtgatgacggatgtggcgctcgatccctactcatgcgatggccatgacggcatcgtcagcaatgacggcatcgtgctcaacgatgaaaccgttgaaatcctctgcaaacaggcggtgacccaagcggcggcaggagccgatctggtgggacccagcgacatgatggacggtcgcgtcggagcaatccgcgaagccctcgacgatgaggggttcagccatgtggggatcatcagctacacggcgaaatacgcctccgcgtattacgggcctttccgtgaagcgcttgattcagcgcctcgcgccgcaacaggcaagccaatcccgaacgataaaagcacctatcagatgg

SEQ ID NO: 282022 - DNA, 418 bp, Unknown
  Bacterial polypeptide expressing nucleotide sequence isolated from the Sargasso Sea
aaatacgcctccgcgtattacgggcctttccgtgaagcgcttgattcagcgcctcgcgccgcaacaggcaagccaatcccgaacgataaaagcacctatcagatggacccggccaacagccgcgaggccctcaccgaagccctgctcgatgagcaagagggcgccgacatcatgatggtcaagccaggactggcctacctcgacatcatccatcgcctacgcgctgaaaccgagctccccattgccgcgtacaacgtcagtggtgagtacgccatggtcaaagccgcggccgagaaaggttggatcgatgagcgtgcagttgtgctcgagaccctgttgagcttcaagcgggcaggggccgatctgatcctcacgtatcacgcctgcgatgcagccgcctggctgcgccacggctaag

SEQ ID NO: 282023 - DNA, 955 bp, Unknown
  Bacterial polypeptide expressing nucleotide sequence isolated from the Sargasso Sea
ctagaaagaaatagaaaatctaattggtcgagaagacttgtcagtgaaaatacattatcagttaacgatttaatacttcctatatttgttattgaaggtaaaaataagaaaatacctattaaatctatgccaggtatatttagatattctattgataaacttaatcaagttgtaggaaatgcggtctcattaaaaatacctatggttgctatatttccctatattaataaaaatttaaaaaatccaaaaggtacggaagctttaaataaagataatttagtttgtagagctactaattttattaaaaaaaaatacaaagataaaattggtgtaatgtgcgatgttgccttagacccatacacttcacatgggcacgatggtatacttaaatcaggaaaaataataaatgatgaaactattaaaattcttatttctcaatcattaatccaagcagaggcaggctgtgatgtcattgcaccctcagatatgatggatggtagaattggattaataagaaaagcgctagataaaaataactttcaacatgtgcagttgttatcatatgcagttaaatatgcttcaagtttttatggaccttttagagatgcggtcgggtctaaaaatttattaaaaggagataaaaagacatatcaaatggattatagtaatagtgatgaggcaattagagaggttactttagatattaaagaaggtgctgatatggtgatggtaaaacctggtttaccttatttagatattattaaaaatataaaagacaaatttaagattccagtttttgcatatcaagtttctggtgagtatagcttaattgttaactcaattaatcaaggtattgtaagtgataaaatcatcttagaaacattaattagctttaaaagagctggcgcaaatgcgattataacttattttgctgataaaattgccagagattaaa

SEQ ID NO: 282024 - DNA, 772 bp, Unknown
  Bacterial polypeptide expressing nucleotide sequence isolated from the Sargasso Sea
ggccctggcgcttttcccggtggtagatgccagcggcaaaacaccagacgccaaagagtcgttcaatcccgatggactggtgccaagggtggtgaccgcgcttcgcgagaccgtgcccgacatgggggtgattaccgacgtggccctggatccctacaccagtcatggtcaggacggcctgctcgatgagtcaggatacgtgaccaacgacgccacggtggataccctggtgcagcaggccttgtgccatgctcgagctggcgcgcaagtggtcgcaccttcagacatgatggatggccggatcggcgccattcgcgaggcattggaatccgagggcctggtcaatacccggatcctcgcgtactccgcaaaatatgcgtcgtccttttatggcccgtttcgcgatgcggtgggatcggcgggtaatctggggggcggcaacaagtacacctatcagatggatccggcgaacagcgatgaggctttgcgtgagatcgagctcgatcttgacgagggcgcggatatggtcatggtcaagcccggtatgccttatctcgatattgtgcttcgggtgaaacaggagtttggcgtgccgactttggtgtatcaggtcagtggcgagtacgcgatgctgtgtgctgcggccaacaatggatggctggatcgcgatgcggtagtgatggaagcgctgctgggctttaagcgcgccggtgccgatgccatactgacctacttcgccgaggaagtcgcggcagcactgcagcgggactga

SEQ ID NO: 282025 - DNA, 403 bp, Unknown
  Bacterial polypeptide expressing nucleotide sequence isolated from the Sargasso Sea
caaaataattttgtcatatgcagcaaaatataattcaaaattctatgggccctttagagatgctgttaattctaaaaacaatctaggtacttctgataaatcttcttatcagatgaatcctgcaaattcacttgaagcccttaacgaggttgctatggacattgaagagggtgctgatatcgtaatggtaaagccaggcatgccttatttagatattatctctaaaattaaagaagaatttaaggttccaacttttgcataccaggtaagcggagagtatgcaatgataatggaatcagttaataaaggatggcttgataaaggtgttataatagaatctttaacaagcttcaaaagagctggtgcagatgcagttcttacatatttcgctaaagatttaata

SEQ ID NO: 282026 - DNA, 832 bp, Unknown
  Bacterial polypeptide expressing nucleotide sequence isolated from the Sargasso Sea
tatgcctaattgctatagatggtctttagatttacttttaaaagaaattgaatcttgtataaaaattggcatcaacaactttgttctttttcctgcagttgaagatgaattaaaagataaaacagcaacatacagttattcagcccaaaacttttatctgaaagcaataagaaaaattaaagcaacatttccaaacattagtttaatgagtgatgttgctatggatccttattcttctgatggacatgatggtcttgttagaaatggtgaaatcatcaacgatgaaacattaaccatattggctaaaatggctgtagcacaagcagaggctggtattgacatcattggtccatctgacatgatggatggaaggattggtttcattagaaacagtttggataacaatggtttttcaaatgcaagtataatgagttacacagccaaatatgcaagtgcttactatggaccatttagagatgctttggattctgctccaaaacttggagataaaaaaacctatcaaatggatccaagaaatacgaaagaagctctcagagaagctaaacttgatataattgaaggagcagacatattaatggtaaaaccagccatgtgctatttagatgttattcatcaactaaacaattcatttgacttacctatttctgcttacaatgttagcggtgaatacgctatgatacatgctgctgctcaaaaaggatggttggattatgaagctactatgatggaaacattaaccagtatcaaaagagcaggagcttctattattctcacctatttcgctaaagattttgctaaattaaatcaatga

SEQ ID NO: 282027 - DNA, 502 bp, Unknown
  Bacterial polypeptide expressing nucleotide sequence isolated from the Sargasso Sea
aatgggttgtgatgttatcgctccatcagacatgatggatggaaggataggcaaaataagaaaatatttagacaaaaatagctatcaagatgttcagcttctttcatatgcagttaagtatgcatcaaatttttatggcccctttagagatgctgttggttcgaaaaaaaaattaaaaagtgataaaaaaaattatcaaatggattttgctaatagtaatgaagcttacagagaagttgctttagatattaaagaaggtgctgatatggtaatggtaaaaccaggtatgccgtacctagatgtcattaaatcaattaaggaaaattttaagattcctgttttagcttatcaagtttctggagaatatagcttaataaaaaatggtattaaaaataatcttattaataaagaagcaatactagagagcttaatgtgttttaaaagagctggtgcttcagctatagttacatattttgcattagaaatagctaaaaatttgtaa

SEQ ID NO: 282028 - DNA, 588 bp, Unknown
  Bacterial polypeptide expressing nucleotide sequence isolated from the Sargasso Sea
acgatggattgattaaatctaattatgtattaaatgatgaaacaattaaagtcttaattgatcaatctttactacaggctcaaatgggttgtgatgtactagcaccttctgacatgatggatggtagaataggagaaataagaaaaaacttagactcaaatggatataatatgactcaaattctatcttatgctgttaaatatgcctcaaatttctatggaccattcagagatgctgttggttcgaaaaaattgcttaaaggtgacaaaaaaaactatcaaatggactttagaaataatgatgaggctttgagagaagttacgctcgatatcaaagaaggtgctgatatggtaatggttaaacctggtctaccatatttagatataataaaatcggtaaaggaaaatttcaaaatacctgtaatagcttaccaggtatcaggtgaatatagcttattatctaatgggataaataaaggccttgtaaataaagatgtaattttagaaaacttgatatcattcaaaagagctggagctaacgcaattatcacttattatgcagataggataaataatattatatcttagt

SEQ ID NO: 282029 - DNA, 945 bp, Unknown
  Bacterial polypeptide expressing nucleotide sequence isolated from the Sargasso Sea
ttccagtactagacttagacgtaatagaatgaaagaattttctcgtcgtttagtttctgaaaatactcttagtgttaatgatttaatcctgcctctatttgtatgtgagggaaacaaggttgatgatcctatcaattcgatgcctggtgttagcagatactctattgataaacttttaagcaaagtagaaaaagctgttaaactaaaaattcctgctattgcaatttttcctcaaattgaaagtggtcttaaaaattctgagggaagtttagctgtagatgaaaacaatttggtgtgcagatcgattaaaagtataaaaaaagattttccaaatattggtattgtatgtgatgttgcgttagatccttttacggatcatggacatgatggtttggttataaatgacaaaatagataatgataaaaccttggaggttttggaacgacaagctctaattcaagcaaatgctggttgtgatgtaatcgccccgtcagatatgatggacggtagagttggaagaataagaagtgcattagattcaaataatttaatagatacccttatactatcttacgctgctaaatatgcttcaggtttttatggtccttttagagatgctataggctctggttctaatttaggtaaagatggtaaattaacatatcaaatggacccatcaaatagtgatgaagcaattagagaagttggattagatattagtgaaggagcggatttggtaatggttaaacctggtatgccgtatcttgatattatttctaggataaaatcagaatttaaaattccaacctttgcctatcaagtatctggtgaatattccatgataaaagagtcaattaataaaggttggcttaatgaaaaagttataatggaatctcttttatcttttaaaagagctggagcaaatggtatactaacctactttgc

SEQ ID NO: 282030 - DNA, 550 bp, Unknown
  Bacterial polypeptide expressing nucleotide sequence isolated from the Sargasso Sea
tttaacaaagcagtcactagttcaagcagaatctggtgctgatattttaggtccatcggatatgatggatggtagagtaaaattaattcgagaaaatttggaaaaaaataattttaaaaatacattaattcttagttattctgctaaattttcttctggattttatggtccatttagagctgcaattggatcttctggtaatttaaaaggcgataaaaaatcttatcaattaaattatttaaatagcaatgaagccttgaaagatgtggctttagatttgaaagaaggcgcagatatggtaatggtcaaacctggaatgccttaccttgatttatgtagacaaataagtgatacatttaaggtacctacttttgcttatcaagtatccggtgaatatgctatgcttgcgcaaggggttaaaaatggaatatttgataaaaaaaatattttgattgaaaccatctcttgttttaaaagagctggatgtaatggagttttaacatattttgcatatgaaattgcaaaacttttagagaataaagacctttaa

SEQ ID NO: 282031 - DNA, 412 bp, Unknown
  Bacterial polypeptide expressing nucleotide sequence isolated from the Sargasso Sea
ggcctattccgcaaagtacgcatcgagctactatggcccattccgtgatgccgttggctcaagttctaccattggtagcggcgacaaaaaaacttaccaaatggatccagcaaacggcgatgaagcgatccacgaagtaggactcgatattgacgagggtgctgacatggtcatggttaaaccggggatgccctatctagacatattgcaaagagtaaaggcaacctatcggctaccgaccttcgcttatcaggtaagcggcgaatacagcatgcacgctgcagcaattgcaaacggctggctgggagagtcagtaatccatgagtcattattatgcttcaagcgcgcgggcgctgacggtattctcagttacttcacaaaacgttggctagagacgcaaacccggcgctga

SEQ ID NO: 282032 - DNA, 772 bp, Unknown
  Bacterial polypeptide expressing nucleotide sequence isolated from the Sargasso Sea
gctttgtttccgtacaccccagaggttttaaaaacccctaaatgtgaagaagcttggaatccagataatttggttaataagactacaaaattgcttaaaaaagaagttccagaaataggagtaatgttagacgtagcgctggatccatataattccttaggtcacgatggactagtagagggcaaggaaatattgaacgacgagactcttgaagctttggaacgtcaatcactcgttcaagctgcgtctggggctgacattttaggaccctcagatatgatggatggaaggatcggcgtgatcagaaaagcattagaatcaaatggatataaaagtactttaataatgtcatattctgccaaattctcatcgtctttttatggccccttccgagatgcagttggagcatcgttagcattatctggtaacaagaaaacttatcaaattgacagtactaacttaagcgaagctgtaagagaaattgcttcagaccttagcgaaggagcagacatggtaatgataaagcctggtatgccataccttgatgtctgtaggattgtaaaaaataagttcaaggtaccaacatttgcctaccaagtctcaggtgaatacgcaatgattgaggcggcaagtttaaatggctggattgacggtgactctgctatgatagagagtataaaatgttttaaaagagcaggatgcgatggaatactaacgtattttgcgccacgagcagcgaaaatgttaagttggaaaactaaggaaatttaaa

SEQ ID NO: 282033 - DNA, 642 bp, Unknown
  Bacterial polypeptide expressing nucleotide sequence isolated from the Sargasso Sea
aaatcggtataatgactgatgtagctttagatccatatacatctcatggacatgatggaattttacgagataaaagaattcttaatgatgaaacgatagaaatattaattcaacaatctcttttacaagctcaaatgggtagtgatgttatagcgccatcagatatgatggatgggcgtattggtgagattagacaagaacttgataataattcgcttaaagatattaagatattatcttatgctgtaaaatatgcatcttctttttatggtccctttagggatgcagttggatcaaaaaaatctttaaaaggtgacaaaaaaacatatcaaatggacttcagtaattctgaagaagctttaagagaagtggcattagatattaaagaaggagcagatcttgtaatggtgaaacctggtcttccctatctcgatataattaaaaaagtaaaagaaaattttaaaatacctgtgttggcttaccaggtttcaggtgaatatagtttgttaatgaatggtattaacaaaggattaataaatgaaaactccatttatgaaactcttatgtcatttaaaagagctggcgctaatgcaattatttcatattttgcagatagaattgacaaaattattaaaaattaag

SEQ ID NO: 282034 - DNA, 769 bp, Unknown
  Bacterial polypeptide expressing nucleotide sequence isolated from the Sargasso Sea
ttttagatgggatatgaatggcttaataaaggaggttactagagcatgggaattaggaataaggtgtgttgttcttttcccaaaaataaatgatagtttaaagactgaagatggagcagagtgttttaatgaagatggtttaatacctaaagctattcgaatattaaaaaaagagattccagaaatggcaataatgacagatgttgccttggacccatactcttgcgatggacatgatggattagttgatgacactggaaaaatattgaatgatgaaacaatcgaaatcttaaaaaaacaagctttaacacaagctagagctggagcagattttattggtcctagtgacatgatggatgggagagttggagaaattagaactgctcttgatagtaaaggatttagtgatataggtattattagttatacagcaaaatattcatctgcttattatggtccatttagaaccgctttagattcagctccaagagaaaatagtaaaaaaataattccagataataagtctacatatcaaatggaccctgctaattcaaaagaggctttaattgaatctgcattggatcagtatgaaggagctgatattttaatggtaaaacctggaatttcatatttggatattgtttatagactaagcacgttttcaaataaacctatagctgcatacaacgttagtggggagtattcaatggtaaagtctgctgctatgaagaactggattaatgaaaaagatattgttttagaaacgtta

SEQ ID NO: 282035 - DNA, 706 bp, Unknown
  Bacterial polypeptide expressing nucleotide sequence isolated from the Sargasso Sea
cggcgaggaggcctacaacccgaacggcatcgtccctcgcgcggtcggcatgctcaaggacgcgctgcccgacgcgatcgtgtgcaccgacgtggcgctcgacccgtactcgagcaaggggcacgacggcatcgtcgaggatggcaaaatcctcaacgacgacacgatcgagcagctgtgcaagcagtcgatcatgcaggctcgcgcgggctccgatgtcgtcgccccgtcggacatgatggacggccgcgtgggcgccatccgcgacgcgctcgactcggagggcttcaccgacgtctcgatcctcgcgtacactgccaagtacgcctcgtcgtactacggccccttccgcgacgcgctcgactcgcaccctggcttcggtgataagaagacctaccagcaggacccggccaacgggcgcgaggcctacatagaggcggcgctcgacgagctcgagggcgccgacatgctcatggtgaagccgggcctgccgtacctcgacgtcatccaccggctgcgcctcgcgagcaacctgcccatcgccgcctaccacgtttcgggagagtactcgatgctcaaggccgcggtcgagcgcggctggctcgatgagaagaaggtggcgctcgagaccctcacgtgcttccgccgcgcgggcgccgacgtcatcctcacctactacgccaagcaggcctccaagtggatctgc

SEQ ID NO: 282036 - DNA, 628 bp, Unknown
  Bacterial polypeptide expressing nucleotide sequence isolated from the Sargasso Sea
tatgtgtgatgtagctttagatccatatacttctcacgggcatgatggtttaattaaaaatggttatgtaattaatgatgaaactgtcgaaattttaaaaaaccaatctttattacaagcacaaatgggttgtgatgttcttgcaccatcagacatgatggatggtagaattggtgaaataagaaaatgtcttgataaaaatggataccaaatgacacaaattttatcttacgcggttaaatatgcatcaaacttttatggaccattccgtgatgcggttggttcaaaaaagttactagagggaaataaaaaaaattaccaaatggattataggaatagtgatgaagctttaagggaaatcgctttagacataaaagaaggagcagatatgataatggttaaaccaggactgccttatttggacattataagattggtaaaagataattttaagattcctgttatggcatatcaagtttcaggtgaatatagtatgctcgttaatggaattaataaaaaacttgtaaataatgatgttataattgagagtttaatttcattcaaaagagctggggctaatgcaatagtaagttattttgcagataggttagataaatttctagattaa

SEQ ID NO: 282037 - DNA, 672 bp, Unknown
  Bacterial polypeptide expressing nucleotide sequence isolated from the Sargasso Sea
caattaagtatataaaaaaaaaatacaaaaactctataggagtaatgtgtgatgttgctcttgatccatatacatcacatggtcatgatgggttattgtataagggtaaaatattaaatgacgaaacgataaaaattttagttgaacaatcattattacaagcacaaatgggatgtgatgtaatttcaccttcggatatgatggatggtagagttggtgaaataagaaaaaatttagataaaaataattttaaaaatgtacaaattttatcttatgcagttaaatatgcgtcaagtttttatgggccatttagaaatgctgttggatcaaaaagtttgcttaagggtgataaaaaaacttatcaaatggattatagtaatagcttagaatccttgagagaagtagcattagacattaaagaaggtgctgatatggttatggtaaaaccgggaatgccttatttagatgtaatcaaaatggtaaaagataattttaaaattcctgttttagcttaccaggtttcgggtgaatatagtttaatatataatggaattagtaaaggcatagtagataaaagtacaattattgaagtattaactggttttaaaagagctggagcaaatgctgtaataacatactttgcaaatgaaatagcaaaagatctaaggtaaa

SEQ ID NO: 282038 - DNA, 687 bp, Unknown
  Bacterial polypeptide expressing nucleotide sequence isolated from the Sargasso Sea
tgtgcagggcagtaagagaggttaaacagaaattgccagaagttggagtaatgtgtgatgttgcgcttgatccgttcagctccgatggccatgatgggttatatcaaaatggccaaattttaaatgatgaaacattgccaattttgtgcgctcaggctttagtgcaagctgaggcgggttgcgatattattggcccctcagatatgatggatggccgagttggacaaattagagcctcactcgatgaaaacaaattcttggacgtaagtattatggcatattctgcaaagtacgcttcgggtttttatggcccttttagagatgcagtggggtcttcaaaaaacctaaaaggcgataagaaaacttaccaaatggatccaaccaacagtgatgaggcaattcgtgaagctggaatggatattgctgaaggagcggatatggtcatgataaagcctggtttgccatatttagatgttattaaattgataaaacaatgtttttgtgttcccactttcgcctataacgtaagcggagaatatgcgatgttaaaagctgcaagtgaagttggttggctagactacaatactgtgatgttagagaccttaacaagctttaaaagggcaggtgcagatggcattttaacctatcatgccagagaagctgcccttatactaaagaaatcataac

SEQ ID NO: 282039 - DNA, 522 bp, Unknown
  Bacterial polypeptide expressing nucleotide sequence isolated from the Sargasso Sea
ttctagcagaagctggtgcagatattattgctccttcagacatgatggatggtcgcatcggagttattagaaaaaaattagatgaaaataactttgaagacaaaataattttgtcatatgcagcaaaatataattcaaaattctatgggcccttcagagatgctgttaattctaaaaataatctaggtacttctgataaatcttcttatcagatgaatcctgccaattcacttgaagcgcttaatgaggttgctatggatattgaagagggcgctgatatcgtaatggtaaaaccaggcatgccttatttagatattatttctaagattaaagaagaatttaaggttccaacttttgcataccaagttagcggagagtatgcaatgataatggaatcagttaataaaggatggcttgataaaggtgttataatagaatctttaacaagcttcaaaagagctggtgcagatgcagttcttacatatttcgctaaagatttaataaaggaatttaatttatgag

SEQ ID NO: 282040 - DNA, 592 bp, Unknown
  Bacterial polypeptide expressing nucleotide sequence isolated from the Sargasso Sea
catggacacgatggagtgataaataaaaaacaggttttaaatgatgaaactattaaaatattatcaaagcaagcgattctgcaagcagagatgggttgtgatgttatagcgccatcagacatgatggatggtcgtgttggaataattagaaaaagtttagataaaaataatcataaagatgttcaaatactatcctactctgcaaaatacgcttcgagtttttatggtccttttagaaatgcgattggttcaaaacaaaaaagtaagataaataaaaaaacttatcagatgaattacagaaactctgaagaagctattcgtgaagtagctttagatataaaggagggtgcggattttgttatgataaaacctgggttaccatatctagatattataaaatcagtcaaagaaaattttaaaattcctgtttttgtttatcaagtctctggtgaatacagtatgataaagaatggtataaaaactggtattcttgataatgagtcaataattgaaagtctaatatcttttaaaagatctggagcttctgcaatagtcacatactttgcgttggatattgcaaaaaaaatttaat

SEQ ID NO: 282041 - DNA, 725 bp, Unknown
  Bacterial polypeptide expressing nucleotide sequence isolated from the Sargasso Sea
aaagaatgaaataggtttagaatcgctaaatgagaataacttagtttgcaaagcaatcacacaaattaaaaaaaagtacaaaaatcaaatagggataatgtgtgatgtagctctagacccctacacctcacatggacatgatggattgatcaaatcaaatcaaataattaatgacgaaactattgaggttttaataaatcaatcattacttcaagctgaaatgggttgtgatgtattagctccatctgacatgatggatggtagaattggaaaaattagaaaggctttagataagtcaaattttcaaaatgttcaaattttgtcttatgctgcaaaatatgcatcaagtttttatggcccatttagagatgcagttggttctaaaaggtctttgaaaggtgataaaaaaacctatcaaatggattatagaaatagcgatgaagccttgagagaggtagctttagatattaaagaaggtgcagatatggtcatggttaaaccaggaatgccttacctggatattattaaatcaataaaagaaaaatttaaaataccagttttagcatatcaggtttctggtgagtacagtttgatttcaaatgcaatccataaaaagttagtaaatgaagacgctgtatatgagagtctagttgcatttaaaagatctggagctaacgctatagttagttattatgctgatagattagataaaattttagtttaat

SEQ ID NO: 282042 - DNA, 820 bp, Unknown
  Bacterial polypeptide expressing nucleotide sequence isolated from the Sargasso Sea
ttctattgataacatcttaaaagaactagaaactgttgttaaattaaaaatacctgcgattgctttattccctcaaatagatagcgccttaaaaaataaagagggctctcaagcaatagatgaaaataatttaatttgccgaacaataagatctattaaaaaacaatttcctgaccttggggttatttgtgatgttgcgctagatccttttactgatcatggacacgatggactaattgttaatgatattgttgataatgacgcaacattaaaagttttagaaaaacaagcactggttcaggctaatgcaggatgtgatattattgcgccatcagatatgatggatggcagggttggaataattagaaaagcccttgatgaaaataattttcaaaacactttaatactttcttacgccgctaagtatgcttcaaaattttatggcccgtttagagatgcaataagctcttctggaaatttaaaaggtggaagtaagtctacttatcaaatggatacagcaaatagcaatgaggctctaagagaggttgccttagatattaaggagggtgctgatatggtaatggttaagccagggatgccttatcttgatattattcaaagaataaaatcagattttaatattcctacttttgcctatcaagtatcaggtgagtattccatgataaagggtgcaattgataataattggctagattcaaaagtgataaaggaatctcttttatcatttaaaagagctggcgctgatggtattttaacttattttgcaaaagaaattgctgaggaattaaataatgaatga

SEQ ID NO: 282043 - DNA, 558 bp, Unknown
  Bacterial polypeptide expressing nucleotide sequence isolated from the Sargasso Sea
aaactgccctcagtcatgttgttgccggagcggatatggtggcgccttcagatatgatggacggtagaattgggcatattcgtgaaatccttgacagcaatggatttaatgagactccaataatgtcttatgcgtcaaaatacgcgagtgcgttttatggaccttttcgagttgcagctgaaagtgctcctgcatttggagatcgttctacctatcaaatggatccagcaaattctcgagaagcgattagggaagttgcgatagatatacaggaaggcgcggatatcattttggtgaaacccgcacttccatatttagatgttctttcgaaagtaagatcaaagttcgatattccggttgcggcatacaatgtttctggagagtacgccatgttagttgcagcgatgaaagcaggttggttggatccagaaaaagctttcatggagtctctcgtttctatacgtagagcaggtgctgattttattatcacttattttgcgaaagatgcctcaagaaggttgctcggtgatttcgaaactccacttagttggatgtaaa

SEQ ID NO: 282044 - DNA, 469 bp, Unknown
  Bacterial polypeptide expressing nucleotide sequence isolated from the Sargasso Sea
agggatatccggtatcagaaattctctagagtctaataactttgctaacacgattattctttcttatgcagcaaaatatagttcaaaattttatggtccatttagagatgccgtaggatcttccgcaaatcttggtgttggcagtaaagatacctatcaaatgtcggttgcaaatatcgatgaagcattgcacgaagtgaaaatggatatagaagaaggtgcagatatagtgatggttaaaccgggaatgccttatcttgatgtcatcaaagcagttaaagatacttttaaagttccaacgtttgcttatcaagtaagtggtgaatatgccatgctgaaagctgctatagaaaatgattggttatcagatgaagtaatgctggaatccttattaagctttaaaagagctggggcagattgcgttctaacctatgctgccaatgaaatagcaataaagttaaatcaatag

SEQ ID NO: 282045 - DNA, 940 bp, Unknown
  Bacterial polypeptide expressing nucleotide sequence isolated from the Sargasso Sea
ccttgggttagaagattggtagaggaaaataatatttctgtgaatgacctaattttacctatttttgtaacagagggaaaaaataaagttcaagaaattaaaacaatgcctggaatttatagatattcagttgataaattaagtaatgttattaacggggcgagtaaggcaaatattccattaattgcaatatttccaaatacaccaaaatcaaaaaaagatttttatggaagtgaagcgttaaatgaaaataatttagtttgcaaggcaataagaaagataaaaaaaaataactctaaaataggtataatggcagatgttgcattagatccatacacaagtcatggacatgatggaattattgaaaagaaaaaggttttaaatgatgaaactttagaaattctatctaaacaagccgttcttcaagctcagatgggttgtgatgtaatagctccatcagacatgatggatggaagaattggtgtaataagaaaagctcttgataaaaataatttaaaagatgtacaattgttatcatattccgcaaaatatgcatcaagtttttatggtccatttagaaatgcaattggatcaagtcaaaaaaataaaatcaataagaaaacctatcaaatggactatagaaattctaatgaagctattcgtgaggtagcattagacattaaagagggtgcagattttgttatggtgaaacctggattaccatatcttgatgtaattaaatctataaaagataattttaaaattccagtttttgtttatcaagtatccggtgaatacagcatgataaaaaatgcaattggtaaaggtctgttagacaaagaatctataattgaaagtttaatttcatttaaaaggtccggggcatcagcaatagtaacttattttgctttagatatagccaaaaagttatctaattagc

SEQ ID NO: 282046 - DNA, 693 bp, Unknown
  Bacterial polypeptide expressing nucleotide sequence isolated from the Sargasso Sea
gaagatggtttaatacctaatgctattcgaatattaaaaaaagagattccagaaatggcaataatgacagatgttgccttggacccatactcttgtgatggtcatgatggattagttgatgaaactggaaaaatattgaatgacgaaacaatcgaaatcttaaaaaaacaagctttaacacaagcaagagctggagctgattttattggtcctagtgatatgatggatgggagagttggagcaatcagagcttctcttgatactaaaggatttagtgatgtaggtattattagttacacagcaaaatattcatctgcttattacggtccatttagaactgctttagattccgctcctagagaaaatagtaagaaaataattccagacaataagtctacatatcaaatggatcctgccaattcaaaagaggctttaattgaatcagtattggatcagtatgaaggagctgatattttgatggtaaaaccaggaatttcatacttggatatagtttatagattaagcactttttcaaataaacccatagctgcatacaacgttagtggggagtattccatggtaaagtctgctgctatgaagaactggattaacgaaaaagatattgttttagagacattgcttagttttaaaagagcaggagcaaaattaatactcacttatcatgcttgtgat

SEQ ID NO: 282047 - DNA, 898 bp, Unknown
  Bacterial polypeptide expressing nucleotide sequence isolated from the Sargasso Sea
gattttaggcaaatttccatcaacaagattgagaagagttcgcaactcagattgggtaagaagattaatatcagaaaataacttgtctgcaaatgatttaattttaccaatatttttaactgaaggtaaaaataaaaaagaaaaaatcaataccatgccaggtatctacagatattctttagataaattatcaagcattttagatgaagcggaaaaatttaagataccaatgatagcgctttttccaaatacttctaatcatcaaagagactataacggttcagaagcgctaaatgaaaataatcttgtttgtagggcaataaaattgattaaaaaaaaatataataaatttggaattatgactgatgttgctttagatccatatacatctcacggtcacgatggaataatactaaacggtaaaattgataatgatgaaactctaaagattttagagaaacaagctttattacaagcatcagtaggctctgacgttattgctccttcagatatgatggatgggaggataggaattattagaaagtctctagataagaaaaaatttaaagacactcaaatactctcttatgctgtaaaatacgcttcaaatttttatgggccattcagggatgcaataggatcgaaacaaaaattaaaaggtgataaaaaaacttaccaaatggatatgaggaattatactgagtctttaagagaagttggtttagatattaaagagggagctgactttgttatggtaaaacctggaatgccttatcttgacattataagtcgaataaaacaaaattttaaaataccagtattttcatatcaagtttcaggggagtattcgatgattgttaattctattaaaaataaaagtcttaatgaaaatgttatc

SEQ ID NO: 282048 - DNA, 661 bp, Unknown
  Bacterial polypeptide expressing nucleotide sequence isolated from the Sargasso Sea
caaaattttcctgatcttggtgttatttgtgatgttgcacttgatccatatacaaatcatggacatgatggcattattgttgatgacattattcataatgatgcaactctggaaatattggagaagcaagcacttgttcaagctgttgcaggctgtgatattattgctccttcagatatgatggatggaagaattggaagaataagaaatgttttggatcaaaacaaatatgaaaatactttgatcctttcgtatgctgcaaaatatgcatcaaaattttatggtccttttagagatgctattagttcttctgggaatttgaaaggaggaagtaaatcttcctaccagatggatgttgcaaatagtaacgaagcccttagagaggttgcactagatattaaagaaggtgctgatatggtaatgattaaaccaggcatgccttatcttgatattattcaacgcgttaaatcagagtttcaagttccaacatttgcctatcaagtatcaggggaatattcgatgattaaaggagctgttaataatggatggttggaatcaaaagttattaaagagtctcttttatcatttaaaagagctggtgtagatggtattttaacctattttgctagagagattgctgaggaattacaggatgaatgaa

SEQ ID NO: 282049 - DNA, 442 bp, Unknown
  Bacterial polypeptide expressing nucleotide sequence isolated from the Sargasso Sea
aaatatgtaaacacaaaaatactagcgtactctgctaaatatgcttctagtttttatgggccttttagagatgcagttggttccagtaaaaatctcggtaatgcaaataaatatacataccaaatgaatcctgcaaatactaacgaggctgttactgaagttgagcttgatttaaacgagggagccgacatggtaatgataaaaccaggtttaccttatcttgatatcgtatatcgtattaaagaaacatttgctagaccaacttttgtatatcatgtgagtggtgagtatgcgatgataaaagcagcctccagcaaaggatggctaaacgagaaagatgccgttatggaatcaattctggcatttaaacgtgccggtgcagatgcaattttaacttattatgctaaacaaattgctgaatggattgaaaaagaagaataaa

SEQ ID NO: 282050 - DNA, 628 bp, Unknown
  Bacterial polypeptide expressing nucleotide sequence isolated from the Sargasso Sea
tatgtgtgacgtagcgttagatccctacacatcacatggtcatgacggtttaatcaaatctaatactatacttaacgatgaaacaattgaggttttgattaatcagtcattactacaagctgagatgggttgtgatgtacttgctccttcagacatgatggacggcagaataggaaaaataagaaaagctttagataaaaataaattccaaaacgttcaaatattatcgtacgctgcaaaatatgcttcaagcttttatggaccttttagagatgcagtcggatctaaaggttctttaaaaggtgacaaaaaaacttatcagatggattatagaaattctgatgaagctttaagagaagttgcattagatattaaagaaggtgctgatatggtaatggttaaaccaggtatgccctatttagacataataaaattaataaaagaaaaatttaaattgcctgtatttgcctatcaagtatcaggagaatacagcttaattgaaacagctataaagaaaaaattaattaataaagatgctgtatatgaaagcttagttgcttttaaaagagctggggccaacgctatagtaagttattacgctgatagaattgataaaataataaaataa

SEQ ID NO: 282051 - DNA, 799 bp, Unknown
  Bacterial polypeptide expressing nucleotide sequence isolated from the Sargasso Sea
aaataatatatctttagatgacttgatttatcctatttttattacttacggctcaaatgtaaaagaggaagttgtgtctatgcctggaatatatagatattcgttggatttacttcataaagaaatagaatatatatcctctttatttattccggctattgctttctttcctaaagtacaaaatgaattaaaaacttctgatggtaaagaagcactcaacaaaaataacttaatatgtaaagccattgaaatttcaaaaaaggttaaccctaaattaggagttatttgtgacgtggctcttgatccatatacggatcacggccatgacggcatcataattaataatcaaattgataatgacgaaactttgtcaatattatgcaaacaagcgcttgttcaggctgaagcaggttgtgatataattgcaccaagtgacatgatggatggtagggttggttttattagagatgctcttgataaaaatggttttacaaatatacaaataatgtcatatgcagcaaaatatgcatcagctttctatgggccttttagagatgccgttggatcaaatttatctctattaaaaaaatctaaaaagagttaccaaatggatcctgctaattctgatgaagctctgaaagaaatagctcttgatataagcgaaggagcagacatggttattgtaaagcctggaatgccctatttagatataatttatagagtgaaacaagaatttaaaatgccaacatacgcttatcaagtgtcaggtgagtattctatgataaaaaacgctaattga

SEQ ID NO: 282052 - DNA, 715 bp, Unknown
  Bacterial polypeptide expressing nucleotide sequence isolated from the Sargasso Sea
tttaggaacagaggcattaaatgaaaataatcttgtttgtagagctttacagttaattaaaaaaagatttaaaaatgatattggcataatgtgtgatgtagccttagatccttatacctcacatggccatgatggattgatagatgataattatgttttaaatgatgagactgtagatgtattaattaatcagtcaatactacaagcacaaatgggttgtgatgttcttgctccatctgacatgatggatggtagaataggtaaaataagaaaatctctagataaaaatggttttaagatgacacaaattttatcttatgccgtaaaatattcatcaaatttttatggtccttttagagatgctgttgggtctaaaggtctattaaaaggtgacaaaaaaaattatcaaatggattttagaaatagtaatgaagctttacgtgaagttgctttggatattaaagaaggagcagacatggtaatggttaaaccaggccttccctacctcgatataattaaatctgtaaaagaaaattttaagattccagttttagcctaccaagtatcaggagagtatagtctgctatctaatggaataaataataaattaattagtagagatgtaattctagaaagtttgatttcttttaaaagagctggcgctaatgctatagtaagctattatgctgatagacttgataaaatattagattaa

SEQ ID NO: 282053 - DNA, 530 bp, Unknown
  Bacterial polypeptide expressing nucleotide sequence isolated from the Sargasso Sea
agttcaagcaaacgccggatgtgatattatctcgccgtccgacatgatggatggccgcgtcggggaaataagaagggcactagacaagaataattttgatgatgttcaaataatgtcctactcagcaaaatacgcttcgagcttttacggtccatttagagacgccctgggttcaaccgcgacgttagctagaggcagcaaagcaacgtatcaaatggatccaaggaattcagatgaggctatgcgcgaaatagctctcgatatagcagagggagccgacatgattatgattaaacctggtttgctttatcttgatatcatttatcggacaaaacaaaagttcggtatacctacatacggatatcaggtgagtggcgaatattctatgatcaaagcagcagccagtaatgattggatcaatctcgacggctgtatgattgaaagtttaattgcctttaaaagagctggcgcgaatggaattctgacttattttgcgttagaagctgcgcgtcttctaaaaaaaatgtaga

SEQ ID NO: 282054 - DNA, 789 bp, Unknown
  Bacterial polypeptide expressing nucleotide sequence isolated from the Sargasso Sea
aatgaataacatacaaggtaagtttccaagtacaagacttagacgtaacagaatgaaagaattctctcgccgtttagttgctgaaaatacacttagtgttaatgatttaatcttacctctatttgtatgcgaaggaaacaaggttgatgatccaattaattcgatgcctggtgtaagcagatactctattgataaacttttaagcaaagtagaaaaagctgttaaatttaatattcctgctattgcaatttttccgcaaattgaaagtggtcttaaaaattctgagggaagtttagctgtagatgaaaacaacttggtttgcagatctattaaaagtatcaaaaaagattttccaaatattggtatcttatgtgatgttgcgttagatccttttacggaccatgggcatgatggtttagttataaataataaaatagataatgataaaactttggaggttttagaacaacaagctctaatccaagcgaatgctggttgtgatgtaatcgccccttcggatatgatggatggaagagttggaagaataagaactgcattagattcaaacaatttaacagatacccttattctctcttatgctgcaaaatatgcttcaggtttttatggaccttttagagatgctataggttctggttctaatttagggaaagatggtaaattaacttatcaaatggatccatcaaacagtgatgaagctattagagaagttggattagatataagtgaaggtgcagatatggtaatggttaagcctggtatgccttatct

SEQ ID NO: 282055 - DNA, 721 bp, Unknown
  Bacterial polypeptide expressing nucleotide sequence isolated from the Sargasso Sea
agagattaaatcaatgcctggtgtttatcgatatacattggataagattaatcctgttgtagacaaagcaattaaaaaaggccttccgatgatagctttgtttccttataccgaaaaaaaaaagaaaaattttattggtgccgaagcattaaacgaagacaatttagtttgtaaagcattaaaattaataaaaaaaaaatataagagtcaaatcggaataatgtgtgatgttgctttagatccatatacatctcatggacatgatggattattaaaaaaagattatgttcttaatgatgaaacaattaaaattttgatagatcaatctttactacaagctcagatgggatgtgatgttcttgctccatcagatatgatggacggtcgaattggtgaaattagaaaaacattagacaagaacggatttaaaatgactcaaattttatcttatgcagtaaaatatgcatcaagtttttatggaccttttcgtgatgcagtaggatctaagggtctacttaagagtagtaagaaaaattatcaaatggatttcagaaatagtaatgaagctcttagagaagtagcattagacattaaagaaggagctgacatggtaatggttaaacctggtctaccttaccttgacataatcaaattagttaaagaaaattttaaaataccagttatggattatcaagtttcaggagagtacagtcttttagaa

SEQ ID NO: 282056 - DNA, 823 bp, Unknown
  Bacterial polypeptide expressing nucleotide sequence isolated from the Sargasso Sea
gatgagaagatcaagaaaagaagaatggtcaagaagacttgttagagaaaatactctttctggtagcgattttgttttacctatatttttgactgatgggaaaaataagaagcaggaaataaagttaatgaaaggagtctatagatatagtgtcgataatttatcagtaattattgatcgtgcaattaaaaataaaattccaatgatagcgttatttcctaatactaatatcaaattaaaagataaaagtggttctgaagcattaaacgaaaataatctagtttctaaagctatagttagaattaaaaaaagatataataataaaattggaataatgtgtgatgtagcacttgatccatacacaactcacggtcatgatggtatattagaaaaaaacgaaattttaaatgacaagaccattgaaattttaatcaaacaatccttattgcaggctcaaatgggatgtgatgtaatagctccatcagacatgatggatggaaggattggagaaataagaaaagagctagacaagaacggttacgaaaatattcaattactttcatatgcggtcaagtattcatcttctttttatggaccttttagagacgccgtaggatcaaaaaaagcattacaaggaaataaaaaaacgtatcaaatggattatagtaatctaaacgaggctttgagagaggtatcaatggacataaaggaaggagcagatatggttatggtaaaacctggtttaccatatctagatattattaaagcagtaaaagacaattttaaaatacctgttctagcataccaagtatccggagaatat

SEQ ID NO: 282057 - DNA, 663 bp, Unknown
  Bacterial polypeptide expressing nucleotide sequence isolated from the Sargasso Sea
attttataaaaaaaagatttaaaaatgatattggagtgatgtgtgatgttgccttggatccttatacgtcacatggccatgatggagttttgaaaaaaaactatgttttgaatgataagacagtcaacattctaatgaagcaagctctactgcaagctcaaatgggttgtgatgttattgctccatcagacatgatggatggaaggattggtaaaataagaaaatatttagataataataactatcaagatgttcagcttctttcatatgcagtaaagtatgcatcaaatttttacggaccttttagagatgctgttggttcaaaaaaaacactaaaaagtgataaaaaaagttatcaaatgaattttgctaatatcaatgaagcgtatagggaagttgctttagatattagagagggtgcagatatggtaatggtaaaaccaggaatgccttacctggatgtcattaaatcaattaaagaaaattttaagattcctgttttagcttatcaagtttctggggaatatagcttaattaagaatggcattaaaaataatcttgtaaataaagaagcaatacttgaaagcctaatgtgttttaaaagggctggcgcttcagctatagttacgtattttgcattagaaatagctaaaaatttgtaat

SEQ ID NO: 282058 - DNA, 435 bp, Unknown
  Bacterial polypeptide expressing nucleotide sequence isolated from the Sargasso Sea
aagaaaatttacaaaatgtacaaattttatcttatgcagttaaatatgcttcaagtttttacggtccttttagagacgcagttggttcaagaaaagctttaaaaggagataaaaaaacttatcaaatggattttagaaataattctgaagctattagagaagttgctcttgatattaaggaaggtgcagacatggtaatggttaaacctggaatgccatatctggacataattagagaaataaaaaataattttaaagttccagtaatgacttaccaagtatcaggtgaatatgctttattaaaaaatggaattaataaaaaaattattgatcaaaaatcaattttggagtcattaatgtcttttaaaagagctggcgctaatgctatcataacatattttgctgatagtattgattttaaatcatttgattaaa

SEQ ID NO: 282059 - DNA, 504 bp, Unknown
  Bacterial polypeptide expressing nucleotide sequence isolated from the Sargasso Sea
atgttatagccccatcagatatgatggatggaagagttggagttataagaaaagctttagataaacacaattataaaaatgttcaaattttatcttatgctgctaagtattcctcaaatttttatggtccttttagagatgctattggatcaaaaaaaaaattaaagggaaataaaaaaagctatcaaatggattataaaaactcacatgaggctattagagaagttggtttagatattaaagaaggcgctgactttgtaatggttaaacctgccttgccatacttagatatattaaaattaattaaggatacatttaaaatacctgtctttgcttatcaggtttcgggtgaatattctatgatagcacaatctgtaaaaaatggtgtattaaaggaagatgcaattattgaaagccttatgtcaattaaaagatctggtgcatcaggagtagtcacatattttgctttaaaaattgcaaaaaaattaaataataaattataaa

SEQ ID NO: 282060 - DNA, 514 bp, Unknown
  Bacterial polypeptide expressing nucleotide sequence isolated from the Sargasso Sea
ggagctgacattgtagcaccatcagatatgatggatggtcgtgtagtcaaaataagagaagcattagatagaaaaggttttcataataccgcaataatgtcatatgcagcaaaatttgcctcatcactttacggaccctttagagaagctttaaattcagaaccaaaaagcggtgataaaaaatcatatcaaataaaccctaaaaattaccgtgaagctataaaagagatactcctagatgaggctgaaggtgcagatttattaatagttaaaccggcttccttctatcttgatgttataagaacatcttcagaggcttcagttctcccaatagttgcgtatcaggttagcggtgagtattcgatgattaaggcagctgccaagaaaggttacattgataatgattctgtaatgaaagaatctctagaatcaatcaagcgagcaggagcaacagcaattattacttactttgcgttagaaattgccaatttacttaaaaaatcaaaccaatgaa

SEQ ID NO: 282061 - DNA, 556 bp, Unknown
  Bacterial polypeptide expressing nucleotide sequence isolated from the Sargasso Sea
ctaccccgtgttcgtgcacgagggcacgaaccgcagcgaggccgtgacctccatgcccggcgtggaccgcctgagcctggacctgctgctgcccgtggccgcggactgcgtgaagctgggcatcccggtgctggcgctgttcccggcgattgacccgtcgctcaagacgccggacggcaaggaggccctgaaccccgacggcctgatcccgcgcgtggtgcgggcgctgaagaaggagtttcccgacctgggcgtgatgaccgacgtggcgctggacccctacaccagccacggccaggacggcgtgctggacgagaccggctacatcatcaacgacgagacggtggagatcctcactggccaggcgctcacgcatgccgaggcgggcgtggacatcgtcgcccccagcgacatgatggacgggcgcatcggtgcgatccgcgaggcgctggaggtgcagggccacatccacacccgcatcatggcctacagcgccaaatacgccagcgccttctacggcccgttccgcgacgcggtgggcacgcgcggcgccctg

SEQ ID NO: 282062 - DNA, 808 bp, Unknown
  Bacterial polypeptide expressing nucleotide sequence isolated from the Sargasso Sea
tgttcgtgagtgtgaagagctatattctcttggtgttggcgcaatcaacctatttggattttcttcggtcaaagatgaaattgcaacaaagtcatatgaccctgaagggctgattcaaaatgcaatccgtaaagttaagggcgctatcccagaaatgtgtgttcaaacagatgttgcccttgacccctatacaactcacggacatgacggtctagttattaatggagagattgtaaatgatgaatctgtggaagtcctatgcaaaatggctctttctcacgcagaagcaggagcagactggattgcaccatctgatatgatggacggaagagttggagcaattagaaaagctttagatttaaagggcttttctcatgttggaatacttgcttactctgcaaaatacgcttcatgtttttatgggcctttcagaggagcccttcagtcagctccaagcggacacaaaaaaacttatcagatggacccggccaactctcgtgaagcaatgagagaaattgccttggacttagaagaaggagcagacgttgttatgataaagcctgctctggcttacttggatgtaatcactcgcgttagagaaacctttgactatccaattgccgcatacaatgtttccggagaatacgcgatggttgtttcagcagctgaaaaaggattgcttgatcgtgaacttgccattatggaaatacttatttcaataaagcgggctggggcagatatgatcctgacctattttgcaaaagatgccgctgcaattcttcgtgcggattacggaagttttaaatga

SEQ ID NO: 282063 - DNA, 742 bp, Unknown
  Bacterial polypeptide expressing nucleotide sequence isolated from the Sargasso Sea
aatgatcgcgagcttccccgaccatcgtccgcgccgcatgcgccgcgacgatttctcccgccgcatgatgcgcgaatcgcgcctcactcccgacgacctcatctaccccgtcttcatcctggaaggcaccaatgtgcgccaagccgtgccgtccatgccgggcgtggagcgcgtgtcgatcgatgtactgttgggcgtggcagagcagtgcgtgcagcttggcattccagtgctggcgctgttccctgtcatcgagccgtcgctcaagacgccggatggcatcgaggccgccaatgcggacggactgatcccgcgcgcggtgaaagcgctcaaggcgcgcttccctgaactggggattctgaccgacgtggcgctcgatccgtacacgagccacggccaggacggcgtgctcgatgccaacggctatgtgctcaacgaagagaccgtcgacattctgatacgccaggcgctggtgcaagccgaggcgggcgtggacatcgtcgcgccgtcggacatgatggatggccgcatcggtgcgatccgcctggcgctggagaacgacgaccacatctacacccgcatcatggcctatgcggcaaagtacgcttcggcgttctacggcccgttccgtgatgcggtgggctcggccgccaatctgggcaagagcaacaagatgacttaccagatggacccggccaactcggacgaggcgttgcgcgaagggcactcgacatcgccgaag

SEQ ID NO: 282064 - DNA, 626 bp, Unknown
  Bacterial polypeptide expressing nucleotide sequence isolated from the Sargasso Sea
tgtagctttagatccttatactaatcatggtcatgatggtattttacataaaaaggaaattattaatgatgagactgttaatattctttctaaacaagctttgcttcaagctgaaatgggttgtgatgtaatagcaccttcagatatgatggatgggagagttggtgtgataagaaaagttttagataaaaatggttttaagaatgtacaaattttatcatacgcagctaaatattcctctggattttatggtccatttagggatgcgattggatcaaagaaaaaattaaaaggtaataaaaaaacttatcaaatggattataaaaattctaatgagtcactaagagaagttggtttagatattaaggagggtgcagattttgtgatggtaaagcctggtatgccttatttagatattataaaaggaattaaagataattttaaaattccagtttttgcatatcaagtatctggtgaatactctatgatagtgaaatcaataaaagatggcactttaaataacgaggccattacagaaagcctaatgtcattaaaaagggctggtgcatcagcaattgtgacatactttgcccttgatattgcaaaaaaattaaaaaaaaattaaa

SEQ ID NO: 282065 - DNA, 667 bp, Unknown
  Bacterial polypeptide expressing nucleotide sequence isolated from the Sargasso Sea
ttctataaaaactaaatttcctgagatgctagtcattgctgatgttgccttagatccttacacagatcatggtcatgatggaattttggagaatgatgagatcttaaatgatcaaacactagatgttctcgcagagcaatctcttgttctagcagaagctggtgcagatattattgctccttcagatatgatggatggccgcatcggagttattagaaaaaaattagatgaaaataactttgaagacaaaataattttgtcatatgcggcaaaatataattcaaaattctatggacccttcagagatgctgttaactctaaaaataatctaggtacttctgataaatcttcttatcagatgaatccagcaaattcacttgaagcccttaacgaggttgctatggatattgaagagggtgctgatatcgtaatggtaaaaccaggtatgccttatttagatattatttctaaaattaaagaagaatttaaggttccaacttttgcatatcaagtaagcggagagtatgcaatgataatggaatcagttaataaaggatggcttgataaaggtgttataatagaatctttaacaagcttcaaaagagctggtgcagatgcagttcttacatatttcgctaaagatttaataaaggaatttaatttatga

SEQ ID NO: 282066 - DNA, 811 bp, Unknown
  Bacterial polypeptide expressing nucleotide sequence isolated from the Sargasso Sea
ttcagtagataaattaaatataataatgaagaaggctaaaaaatacaaaattccaatggtagctatatttccctacacaccaaaaaataaaaaagataattttggcactgaggctctcaatgaaaataatttaatttgtaaatccttaaaatttataaaaaaaagatactctggcataggagtgatgtgtgatgttgcgttagatccctacacttctcatggacatgatgggattttagttaataaaaaaatagataatgacaaaacaattaaaattctggttaaacaagcattattacaagcaaagatgggatgtgatgtgattgctccctcagatatgatggatggtagagttggagcaattagaaaagcattagacaaaagaaattttcaaaatgtaagtatattatcttatgcagctaaatatgcttcaagtttctacggaccatttagagatgctgttggttctaaagttaatttaaaatctgataaaaaaacttatcaaatggattttagaaattccaatgaagcatttagagaaattggactagacgtaaaagaaggagctgatatggttatggtaaaacctggtcttccctatttagatataattaaaagtataaaagataatttcaaaattccagttttcgcatatcaagtctcaggcgaatatagtttaataaaaaaaggaattaaagataaactaataaatgatgatgccatactggaaagtttgatagcttttaaaagagctggtgcgtctgctatagtgacatactttgcgttggaaatagcaagcaaaattaaataa

SEQ ID NO: 282067 - DNA, 670 bp, Unknown
  Bacterial polypeptide expressing nucleotide sequence isolated from the Sargasso Sea
ataatagaaattaaaaaaaggtacaaaaatcaaataggaataatgtgtgatgtagctttggatccatatacatcacatggtcacgatggattaatcaaatcaaatcaaattataaatgatgaaacaatagaagttttgataaatcaatcattacttcaagcagaaatgggttgcgatatacttgctccttcagacatgatggatggaagaattggaaaaataagaaaagctctagataaatcaaattaccaaaatgttcagattctctcttatgcagctaagtatgcgtcaagtttttatggaccatttcgagatgcagtaggatcaaaaggatctttaaaaggtgataagaaaacctatcaaatggattttagaaatagcgatgaagcattaagagaagttgctttagacattaaagagggtgcggatatggtcatggttaaaccaggaatgccttatttagatattattaaatcaataaaagataaatttaaattaccggtatttgcctatcaagtatccggagaatacagtttaatttcaaatgcaattaaaaagaaactaataaataatgattcaatttacgaaagtttagtagcttttaaaagagctggagcaaatgcaattgtcagctattatgcagatagaattgataaaattatagaataat

SEQ ID NO: 282068 - DNA, 547 bp, Unknown
  Bacterial polypeptide expressing nucleotide sequence isolated from the Sargasso Sea
aatgataaaactttaaaaatacttaccaaacaagcagttctacaagcaaaaatgggatgtgatgttatcgctccttcagatatgatggatggaagaattggtataattcggtcagctttagataaaaataatttaattgacgtacaaattttatcatatgcggttaaattttcatcaagcttttatggaccatttagagatgccgttggatcaaaaaaattattaaaaggtgataaaaaaacataccaaatggattttagaaattcagatgaatctttaagagaagtttcattagatataaaagaaggtgctgatatggtcatggttaaacctggtatgccctatcttgatataattaaaaaagttaaagatagtttcaaaataccagtatttgcatatcaagtttctggtgaatacagtttgataatgaatggaattaataaaaaattaatagacaaagactcaattaaagagtctcttatttcgtttaaaagggctggagcaaacagtattgtaacttattttgccgatcaaattgatctttaat

SEQ ID NO: 282069 - DNA, 639 bp, Unknown
  Bacterial polypeptide expressing nucleotide sequence isolated from the Sargasso Sea
aaattggaataatgtgtgatgttgcactcgatccatatacttctcatggccatgatggagtattaaaatcaaataatatagttaacgatgaaactgttgatatattgattaaacaatctttactacaagcacaaatgggatgtgatgtaatagctccttctgacatgatggatggaagaattggaaaaataagaaaaaatcttgataagaatggctttaaacaaattcaaatactgtcatatgctgttaaatattcatcaaatttttatgggccatttagagatgcagttggatcaatgaaaaacttaaaaggcgataaaaaaacttaccaaatggactttaaaaataaagatgaagctttaagagaagttgctttagatataaaagaaggtgcggatatagttatggtcaaacccggcatgccatatttagatataatcaaatctgtaaaagaaaattttaaaattcctgtatttgcttatcaagtttcaggggaatattctcttattgcaaatggcattaaagataaaataatcaataaaaatgcaataattgaaagtttgatagcttttaaaagagctggtgcaaacgctataattacatattttgcagataaaatttcaaaagaattaaaataaa

SEQ ID NO: 282070 - DNA, 821 bp, Unknown
  Bacterial polypeptide expressing nucleotide sequence isolated from the Sargasso Sea
gaagttcagcgcgcctgggacctgggggtccgttgcatcgttctgttcccccaaggtttccgaaggcttgaaaacagaagacggcgctgagtgcttcaacgccaatggcctgattcccagagccatccgtcagatcaagcatgaggtgccggggatggcgatcatgactgacgtggcactcgatccctattcctgcgatggtcacgatggcatcgtcagcgcagagggggtcgtcctcaacgacgagacgatcgaattgctctgtaaacaggctgtggttcaagccgaagccggtgctgatctgatcggccccagcgacatgatggatgggcgtgtcggggccattcgtgaggccttggacgacgaagggttcgagcacgtcggaatcatcagttacaccgcgaagtactcctcggcctattacgggccattccgtgaagccctggattcggccccccgtgctgccggcagcaagccgattccaaccaacaaggacacgtatcaaatggaccccgccaatgcccgggaagccatcacggaagcgcagctggatgagcaagaaggcgccgacatcatgatggtgaagccgggtttggcttacctggacatcattcaccgactgcgcgatgagtcggagctgcccattgctgcttacaacgtcagtggtgagtattcgatggtgaaggccgccgccgaacgcggttggatcgacgagcgtgctgtggttctcgaaaccctgctcagcttcaagcgggccggtgcggatctgatccttacgtatcacgcctgtgatgccgcggaatggctgcgacagggctgag

SEQ ID NO: 282071 - DNA, 460 bp, Unknown
  Bacterial polypeptide expressing nucleotide sequence isolated from the Sargasso Sea
gctttggacgtacaggggcttttctaatgttggaatacttgcttactcagcaaaatacgcttcatgtttttatggacctttccgaggtgcgcttcagtccgctccaagcggacataagaaaacttatcagatggaccccgccaacgctcgtgaagcaatgagagaaattgccttagatctcgaagaaggagcagatgttgtgatgataaaacctgctttagcttatctggatgtaatcactcgtgttagggaagcctttgatgctccaattgccgcatacaatgtttccggagaatacgcgatggttgtatcagccgctgaaaagggcttgcttgaccgtgaccaggccatgatggaaatccttacttcaataaagcgtgcaggggcagatatgatcctgacttattttgcaaaagacgctgctgctattcttcgagcggatttcggaagttttaaatga

SEQ ID NO: 282072 - DNA, 445 bp, Unknown
  Bacterial polypeptide expressing nucleotide sequence isolated from the Sargasso Sea
ttagatgaaaataactttgaagacaaaatctttttgtcatatgcagcaaaatataattcaaaattctatgggcccttcagagatgctgttaattctaaaaataatctaggtacttctgataaatcttcttatcagatgaatcctgccaattcacttgaagcgcttaatgaggttgctatggatattgaagagggcgctgatatcgtaatggtaaaaccaggcatgccttatttagatattatttctaagattaaagaagaatttaaggttccaacttttgcataccaagttagcggagagtatgcaatgataatggaatcagttaataaaggatggcttgataaaggtgttataatagaatctttaacaagcttcaaaagagctggtgcagatgcagttcttacatatttcgctaaagatttaataaaggaatttaatttatgag

SEQ ID NO: 282073 - DNA, 737 bp, Unknown
  Bacterial polypeptide expressing nucleotide sequence isolated from the Sargasso Sea
caagaccctggacgccgccgaagcctggaacccccaggggattgcccagcgtgccacccgtgccctgcgcgagcgtttcccggagctgggcgtgatcaccgacgtggccctggaccctttcaccacccacggccaggatggcattcttgacgaagacggttatgttcagaacgacatcaccgtcgatgcactggtcaagcaggcgttgtcccacgcggctgcgggcgcccaggtggttgcaccgtcggacatgatggacgggcgcatccaggcgattcgcgaagcccttgagctggccggtcacgtcaatgtgcggatcatggcctactcggccaaatacgccagcgcctactacggcccattccgcgatgcggtaggctcggcgctgaacctgggcaaggccaacaaggcctcgtaccagatggacccggccaatagccaggaagccctgcacgaagtggccaccgacctggccgaaggcgccgatatggtgatggtcaagccggggatgccttacctggacattctttaccgggtcaaagaggaattcaaggtgccgacctttgtctatcaggtcagcggtgaatacgccatgcacatggcggcgatccagaatggttggttgagtgaaggggtgatcctcgaatccctgactgcctttaaacgtgccggcgctgatggcattctgacctacttcgccgcccgcgccgcccaattgcttagagagcaacaatagc

SEQ ID NO: 282074 - DNA, 875 bp, Unknown
  Bacterial polypeptide expressing nucleotide sequence isolated from the Sargasso Sea
aggagaaatcgaaaaagcgattggacaagaagattagtacaagaaaacaatttgtcagtgaatgacctaatactcccaatatttgttattgatggaaaaaataaaaaggaatcaattaaaacaatgccagatgtttatagatacagtgttgatagactaccgataataattgataaagctgtaaattctaagatacctttggttgcaatatttccatatacaaattcaaatttaaaaaataattttggacatgaagctttaaatgaaaacaatctagtttgtagagctataaggttaattaagaaaaaatataaaaataaaattggaattatgtgtgatgttgctttggacccttacacatcacacggacatgatggtttattatcaaaaggaaaaattttaaatgatgaaactgtaaatatattagttaaacaatcattgttacaagctgagatgggatgtgatgtgattgcaccttcagatatgatggatggcaggattggaaagattagaaaagcattagataaaaaaaaatttcaagatgtacaaatactttcctatgcagcaaagtatgcgtcaagtttttatggtccatttagagatgctgtaggatcaaaaaatttacttaaaggtgataaaaaaacttatcaaatggatttttctaataatcaagaagcattaagagaaatagcattagatattaaagaaggagcagacatggtaatggtaaagccaggtatgccctatctagatattatcaaatccgtaaaagaaaattttaaaatacctgtttttgcttatcaagtttctggagaatacagtttaattaaaaatggtattaataaaaagataattaatgagaatagtattataga

SEQ ID NO: 282075 - DNA, 802 bp, Unknown
  Bacterial polypeptide expressing nucleotide sequence isolated from the Sargasso Sea
aactaatgttttagataaggctgaagatttaaaaattccaatgatcgcactatttccttatactcccaacagtaaaaaaaacaatgatgggtctgaagccttaaatgaaaataatttagtttgtagagctatacgaactatcaaaaaaaaatataaagattttggaataatgactgatgtagcattggatccttatacgtctcatggtcatgatggaataattattaacaataaaattgataatgatgaaactctaaagttgttagaaaaacaagctattttacaagcctctatgggttcagatgtgattgctccatcagatatgatggatggaagaattggtttaatcagaaagtctttggataaacataaactcaaggatattaaaattttatcttatgctgttaaatatgcttctaacttttacggaccatttagagatgctgtcggttcaaaaaaaaaattaaaaggaaacaaaaaaacttatcaaatggatataagaaattataatgaagcttttagagaggtaggcctggatataaaagaaggtgctgatttcgtcatggtaaagcctggtatgccttatttggatataataagtttaataaaacaaaattttaaagtgcctgtattttcttaccaagtatctggtgagtatgcaatgattgcaaatgctattaaaaacaagaatttaaatcaaaatgcaatatatgaaagtttaatatctcttaaaagagcaggatctaatgctatagttacatactttgcattggatatggcaaaaaaaataagttctatttag

SEQ ID NO: 282076 - DNA, 739 bp, Unknown
  Bacterial polypeptide expressing nucleotide sequence isolated from the Sargasso Sea
acagcaaaaaaattaaaaaataactcaggttcagaatcgcttaatgaggactatttagtatgtaaagccattcaatatattaaaaaaaaatataaaaactcaattggcattatgtgtgatgtagcgcttgatccttatacgtctcatggtcatgatggtcttttaaataaaggcaaaatattaaacgacgagactgtaaaaatcttagttaagcaatctttattacaagctcaaatgggatgtgatgtaatatcaccttcagatatgatggatggaagaattggtgaaataagaaaaaatttagacaaaaataattttaaagatattcagatattgtcatacgctgttaaatatgcttcaagtttttatggaccctttagagacgcggtgggttcaaaaaaccttcttaaaggcaataaaaaaacttaccaaatggattatagtaatagtcatgaagcattaagagaggttgctctagatataaaagaaggtgcagatatggtaatggtgaaacctggtatgccttatcttgatgtaattaaatcaataaaagaaaactttaaaatacctgtattagcttaccaagtttccggtgaatatagtttaatctgtaatggtataaataagaatataattgataaaaacactatactagaagtcttaacaggatttaaacgagctggtgcaaacgctgtagttacttattttgcagataaaattgctaaggatctaaaataaa

SEQ ID NO: 282077 - DNA, 697 bp, Unknown
  Bacterial polypeptide expressing nucleotide sequence isolated from the Sargasso Sea
ttagtttgcaaggcattagataaaataaaaaatcagcaacttagttttggagtaatgtgtgatgttgctttagatccatatacatcccatgggcatgatggcttactaaatgatagtaacgagattttgaatgatgaaaccaatcaagttttggttcaacaatctttgttattggcaaagcataaagcggatattattgcaccatctgatatgatggatggtcgtattggactgataagagaagcattagaaaataatgattataaaaatattctgttgctttcatatgctgctaaatatgcatcaaatttttatgggcctttccgagatgctgttggctctcacaaaagcctaaaatctgataaaaaaagttatcaaatgaatttctctaattcaaatgaagctcttcgagaagttgctcttgatatttcagaaggtgcagatcttattatggttaaacctgggataagctatcttgatattattagtaaaattaaaaacgagtttaagtttcctacattcgcttatcaagtatctggggagtattcaatgataaaagccgccggtgaaaggggatggattgacgaagatgcagcaattattgaacagcttacatctttcaaaagagcaggtgccgacgctatacttacatactttgctccatatgtaacaaaaattctcagttcatctgactagt

SEQ ID NO: 282078 - DNA, 384 bp, Unknown
  Bacterial polypeptide expressing nucleotide sequence isolated from the Sargasso Sea
ttaaacgacgaaactgtagaaattttaataaaacaatctttacttcaagcagaaatggggtgtgatgttatagcaccatcagatatgatggatggtagaattggaaaaattagaaaagcacttgataaaaataattttaaagatgttcaaatattgtcatatgcaatcaaatatgcatctaatttttatggaccctttagagatgctgttggatctaaaaaaaacctaaaaggtgataaaaaaacttatcagatggattataataaccattctgaggcaattagagaagttgccctagatattaaagaaggtgctgatatggtgatggtaaaacctggcatgccatatttagatataataaaggaggtaaaagaaaattttaaa

SEQ ID NO: 282079 - DNA, 710 bp, Unknown
  Bacterial polypeptide expressing nucleotide sequence isolated from the Sargasso Sea
agggcttgctcagcaagctatgagagcgctcaaaaaggcgtttcctgaagtaatgctgatgtctgatatcgcattagatccatttacgtctcatggtcaagatggcctcttagacgaaactggttatgtgatgaacgacgaaacagtcgaggtgctcattaagcaagcgttatcgcatgctgaagctggcgctgatattgttgcgccttctgacatgatggatgggcgcattggcaatatccgaaaagcacttgaagaagcaggtcacatcaatacgtgtattatggcttattctgctaaatacgcgtctgcgtactacggtccatttcgtgatgccgtcggctccgctgcaaatataaagggcggcaacaagaaaacctatcaaatggatcctgccaacaccgatgaagctctccacgaaattgcgcttgatatagaagagggcgctgacatggtaatggtgaagccaggtatgccgtatttagatgttgtgcgtcgttgtaaagacgaatttaaagtaccgacattcgcctatcaagtaagtggcgagtacgctatgcatcaagctgcttttgctaatggttggctaaatgaagacgcggtgatcctagaatcgttattagcgtttaagcgcgctggcgccgacgggattctgacttatttcgctccgcaagctgctgcgcttttagcgaagcaaaacgacaagtaat

SEQ ID NO: 282080 - DNA, 793 bp, Unknown
  Bacterial polypeptide expressing nucleotide sequence isolated from the Sargasso Sea
ttgcgaagagttcgcaattcagcttggatacgaagacttgtgtcagaaaacaatttgagtattaacgatttaatattaccaatatttgttagagatggtaagggaaagatagagtcaattaaatctatgcctggtgtctacagatactcaatagacaaattaaatgtaataatgaataaagcaaaaaaaaacaaaattcctatggtagctctttttccttatacatcgaaaaacaaaaaagataagcacggaacagaagcgcttaatgaaaataatttaatttgtaaatctttaagatttatcaaaaaaaaataccctagaattggagtaatgtgcgatgttgcgctagatccctatacatctcatggacacgatggaataatagttaataaaaaaattgataatgataaaactatcaaaatacttgtaaaacaagctttgctacaagcaaagatgggatgtgatgttattgctccgtcggatatgatggatggtagagtcggagtaattagaaaagctttagacaaaagaaattttcataacgtttgtatattgtcttatgcagcaaaatatgcctcgagtttttatggaccatttagagatgctgtgggatcaaaaataaatttaaaatcagataaaaagtcttatcaaatggactttagaaattcgaatgaagctttaagagaaattggtttagatataaaagaaggggctgacattgtcatggttaaacctggactgccctatttagatattataaagaagattaaagataattttaagattcctgttt

SEQ ID NO: 282081 - DNA, 882 bp, Unknown
  Bacterial polypeptide expressing nucleotide sequence isolated from the Sargasso Sea
atggttaccctgcaataagaatgcgcagaaatagaatgaaagttttttccagaagaatgatatctgaaacctatctaaatgcaaataatcttatacagccattatttgttactcaaggaaaatatgaaaatacttatatagaatcaatgcctggaattaaaagacattcaattaaatcagttgcaaacgaagctatggaaatttacaaattaggaataccagcgattgcaatatttccttatataccaaatgatttgaaagatgaaaatggtactgaaagtttaaataaaaacaatattatttgcaaagctattaaagaaattaaaaattcatgcccagaaatagggataatttgtgatgttgcacttgatccatacacaaaccatggacatgacggaattattattaatagtgaaataaataatgataaaacaattgaaattttatgtaaacaagctgttatacaagcagaggcaggatgtgatatcatagctccgagtgatatgatggatggaagagtaaaatcaatcaggtctgctttagataaaaaaaatctaattaatacatctatattgtcttactctgcaaaatatgcttcttctttttatggaccttttagggatgcattaggcactaaaattaacagtgaccatgtatttgacaagaaatcttatcaaatggaccctgctaattctagagaagcattaagagaaattgaattagatattaatgaaggtgctgatataataatgataaagccagctttaagctatttagatattataaatttagcaaaacaaaattttgaaataccaatatttgcttatcaagtttcaggagaatattctatgattaaagctgcttctgaaaagggtggataaa

SEQ ID NO: 282082 - DNA, 619 bp, Unknown
  Bacterial polypeptide expressing nucleotide sequence isolated from the Sargasso Sea
tatgtgtgatgtggccctagatccttacacttctcatggccttgatggattattaaagaaaaaaattattattaatgataaaactgtagaaatacttaccaaacaagcagtgctacaagccaaaataggatgcgatgtaatcgcgccttcagatatgatggatggcagaattggtaaaattcgatcagctttagataaaaataatttaaatgacgtacaaattttgtcatatgcggttaaattttcatctagtttttatggaccatttagagacgctgttggatcaaaaaaattattaaaaggtgataaaaaaacataccaaatggattttagaaattcagatgagtctttaagagaagtttccttagatataaaagaaggtgctgatatggtcatggttaaacctggtatgccctatcttgatataataagaaaagttaaagataatttcaaaataccagtatttgcatatcaagtttctggtgaatacagtttgataatgaatggaattaataaaaaattaatagataaagcttcaataaaagagtctcttatttcatttaaaagggctggagcaaatagtattgtaacttattttgccgatcaaattgatctttaa

SEQ ID NO: 282083 - DNA, 674 bp, Unknown
  Bacterial polypeptide expressing nucleotide sequence isolated from the Sargasso Sea
aaaaagcataaaaaaagaattttctgagattggaattatttgtgatgtggcacttgatccgtttacagatcatggacatgatggattagtaataaataataaaattgataatgataaaactttagaagtattagaaaagcaagccttagttcaagtacatgctggttgtgatgtaattgcaccctctgatatgatggatgggcgcattggaagaattagaacagttttagataataataattttcaagatacgcttattttatcctatgctgcaaaatatgcatcagcattttatggtccgtttagagatgccattggttcaggttcgaaattgggcaaggatggaaaattaacttatcagatggatccatcaaatagtgatgaagcacttagggaagtggcttttgatattaatgaaggagctgatatggttatggtcaagcctggcatgccttatttagatataatttctagaattaaatcagaatttaaagtaccaacatttgcttatcaagtatctggtgagtactccatgatcaaggactcaataaacaaaggttggttaaacgaaaaagtaattaaggagtctcttttatcttttaaaagagcaggagcaaatggtatacttacttactttgctttagaaatagctgaaaaacttaaaaatgaataac

SEQ ID NO: 282084 - DNA, 877 bp, Unknown
  Bacterial polypeptide expressing nucleotide sequence isolated from the Sargasso Sea
atgattacaggtaaatatccaggattaagacttagacgaagtcgaaaaaatgattggtctagaagactaatcgaagaaaataatttgacccataatgattttatattaccaatttttttgattgatgggaaaaataaaaaacaagagattaaatcaatgcctggagtttatcgatatacattggataagattaattctgttgtagaaaaagcaattaaaaaaggccttccaatggtagctttatttccttataccgaaaaaaaaaagaaaaattttattggtgccgaagcattaaacgaagacaatttagtttgtagagcaataaaattaataaaaaagaaatataagaatcaaatcggaataatgtgtgatgttgctttagatccatatacatctcatgggcatgatggattattaaaaaaagattatgttcttaatgatgaaacaattaaaattttgatagatcaatctttactacaagctcagatggggtgtgatgttcttgctccatcagatatgatggatggacgaattggtgaaattagaaaagcattagacaacaatggatttaagatgacacaaattttatcttatgcagtaaaatatgcatcaagtttttatggaccttttcgtgatgcggtaggatctaagggtctacttaagagtagtaagaaaaattatcaaatggatttcagaaatagtaatgaagctattagagaagtagcattagatattaaagaaggagctgacatggtaatggttaaacctggcctaccataccttgacataatcaaattagttaaagaaaattttaaaataccagttatggcttatcaagtttcaggggagtacagtcttttagaagaatggtattaaa

SEQ ID NO: 282085 - DNA, 865 bp, Unknown
  Bacterial polypeptide expressing nucleotide sequence isolated from the Sargasso Sea
ttttctatgaatagctctccaagagttagaatgcgaagaaataggatgtcagaattttcgagaagattagtgtctgaaaataatttatcaatcgatgatttaatttatcctatcttcataacatttggatcaaataaaaaagaaagaattaaatctatgcctgggatatacagatattcgatagatttattgcaaaaagaaattgaatatattgcttcattaaatattcctgcaattgctttttttcctcaaatacaaaaaaaattgaaaactgcggatggaaaagaggcatttaacaaaaataacttgatatgcaaagccataaaaattgcaaagaagacaagtccaaaattaggggtaatatgtgatgttgctttagatccttatacagatcatggacacgatggagttattgttaacaacgaaattgataatgataaaactttaaaaattttatgtaaacaagcgttagttcaggctaaagctggatgtgacatcattgctccaagcgatatgatggatggaagagtcggactgataagaaacactctcgatgataatggattaactaatgttcaaataatgtcatatgcagcaaaatatgcatctgcattttatggaccttttagagatgccgtagggtcatctgtaaacttgtctaacaaatcaaaagaaagttatcaaatggacccatctaattcagatgaggctctaaaagaaattgcacttgatctaaacgaaggtgcagacatggtaattataaaaccaggcatgccttatttagatattatccagaaagttaaaaaagaatttaaggttcctacatatgcttatcaagtatcaggagagtactctatgataaggg

SEQ ID NO: 282086 - DNA, 565 bp, Unknown
  Bacterial polypeptide expressing nucleotide sequence isolated from the Sargasso Sea
gaagaaactgtagacgtcttagtcaaacaggccatttcccatgcgcaggccggagctgatatagtagctccatctgatatgatggacggccgaattggtgctattagaaatgcttttgaagaaacaaagctaattcactcgcgaatactcgcgtattccgctaaatatgcttcgaattattatggtccctttagagatgccgtagggtctggcaaaagtctcggaaaatcaggtaagcatagttaccaaatggatatttccaatagtgacgaggcgcttcaagaaattgcatttgacctggcagagggtgcagatatagtaatggtgaaacctggcatgccctacttagacatagtcaaccgagtaaaggaagagttccgcgtcccaacatttgtttatcaagttagcggcgagtactccatgcatatggcagcagctcaaaatggatggctacaggaaaaagaaatagcactggagtcgttaatttgtattaaacgcgcaggtgccgatgcgatccttacatacttcgctaagagagcggccaagtggttggcagaaacttaaa

SEQ ID NO: 282087 - DNA, 743 bp, Unknown
  Bacterial polypeptide expressing nucleotide sequence isolated from the Sargasso Sea
atttcctgtgattccagatgaaaagaaagacttttttgcctcagaagcggtgaatcctagaggtgtactgtgtagggcgattaagttgattaagtcagcttatccttctttggttcttgtgagtgatgttgccttagatccttattctattttagggcatgatggtttggtcagtgagggagaggtcttaaatgatgagactgtagaggtcttggccaaaatggcggttttgcatgcaaaggctggggttgatattgtggccccttccgatatgatggatggtcgtgtgggtgccattcgacaggctttggataaggcaggctttcatacggtgtctattttatcgtatgcggccaaatatgcctctcagctctattctccatttagagatgcgcttcagtcggaactcaaggatggggataaacaaagctatcaaatggatatttcgaatcgacgagaagcgattagagaggtctctcttgacctggaagagggggcggatatggtcatggtgaagccagggaccttttacttggatattatacgagaaattcgggatcgttttgactgcccgattgccgcctatcatgtgagtggagaatataccatgattaaattagcggctcagcataatattttagatgataaactagtcctgaaagaagctctggtggcccttaaacgtgccggagccgatgtgattatttcctacggtgccttggaaattgctgaattattataag

SEQ ID NO: 282088 - DNA, 463 bp, Unknown
  Bacterial polypeptide expressing nucleotide sequence isolated from the Sargasso Sea
cttcaggcagaaatgggttgtgatgtaattgccccatcagatatgatggacggtagaataggaaaaataagaaaagctttagataaaaataaattccaacacgttcaaattttatcatacgctgcaaaatacgcatcaagcttttatggaccttttagagatgctgttggatctaaaggttcgttaaagggagataaaaaaacttatcagatggattttagaaattcagatgaagccttaagggaagttgcgttagatattaaagaaggtgctgatatagtaatggttaaaccaggtatgccatacttggacataataaaatctataaaagaaaaatttaaactacctgtatttgcctatcaagtatcaggagaatacagcttaattgaaacagctataacaaaaaagttaattaataaaaatgctatatatgaaagcttagttgcttttaagagagctggtg

SEQ ID NO: 282089 - DNA, 715 bp, Unknown
  Bacterial polypeptide expressing nucleotide sequence isolated from the Sargasso Sea
atttggaagtgagtcattgaatgaaaataatcttgtttgtcgtgctcttaaaatctcaaaacaaagatacaaaaatgaaataggattgatgacagatgtagctttagatccttatacttcacatggacatgatggcttattaaaaaataataaaattttaaatgatgaaactttagatatcttaataaaacaatctttattacaggcagaaatgggctctgatgttttggcgccttcagacatgatggatggaaggataggaaaaatccgaagagctttagataaaaataatttaaaagaagttcagcttctttcttacgctgttaagtatgcttcaaatttttatggaccattcagagatgcggttggatcaaaactggcacttaaaggtgataaaaaaacataccaaatggattactcaaattcgaatgaagcagtaagagaggtcgcacttgatattaaagaaggtgcagatttagttatggtaaaacctggaatgccatatttagatataatcagaactataaaaagtaaatttaaaatacctgtacttgcttatcaagtatcaggcgaatactcattaattaaaaacggtattaaaagtaaaattcttaatcaagatgcgattttagaaagtctaatatccttcaaacgagctggggctagtgcgattgttacatattttgctagtgaaatagcaaataaattagattaa

SEQ ID NO: 282090 - DNA, 852 bp, Unknown
  Bacterial polypeptide expressing nucleotide sequence isolated from the Sargasso Sea
aatgtctatttttagaaaatatccaagtacccgcttaagaaggttaagaaagaacctcaatcttattgaacttgtatctgaaactaacctaacttcaaaagatcttatacaaccaatcttcattaaagaaaattttgaaggcaaagaagaaatcgaatcaatgccaggtatcttcagatttggcttaaatcatgtactgagtgaaatagaggaagttataaatgcaggcataaatgctatagctgttttcccagtcatagaatcttcaaaaaaagatgaaaaaggatcagaggcattaaacaaaagtaattttatcgctcattcaatcaataaaattaaacaagaatttcctgaattaatattaatcgcagatgttgcattagatccttatacagatcatggtcatgacggtattttaataaataacgaagttgcaaatgatgaaactgtagaagttctaattgagcaatctatattactcgctgaagctggggcggatattattgctccttctgatatgatggatggaagaattggattaattagagattctctagaaaaacaaaatttaaaagacacaatcttgttatcttatgctgctaaatataattcaaaattctatggaccatttagagatgcagtaaattctgcatcaaatcttggtaattcttcaaaatcatcataccaaatgaatatatctaacaagaacgaagccttgcatgaagtcgccttagatataaatgagggcgcagacatagtaatggtaaaaccggcaatgccttatttagatgttattcaatcgattaaaaaagaatttaaagtaccaacttttgcttatcaggttagtggtga

SEQ ID NO: 282091 - DNA, 837 bp, Unknown
  Bacterial polypeptide expressing nucleotide sequence isolated from the Sargasso Sea
ttggtctagaagattagttcaagaaaacaacttatctagcagtgatttaatttatccaatttttctcatagatggaaaaaataaaaaacaagcaattaaatcaatgccaggtgtttataggtattcagttgatcaactaggcaagattgtgaataacgttatcaggtataaaataccaatggtagctctttttccttcaacttctaatactaaaaaagataaatatggaagtgaagctttaaatgaaaataatttagtttgtaaagcaataagatttataaaaaaaagatttaagaataacgtaggtataatgtgtgacgttgcgttagatccctacaccactcatggtcatgatggtttattaaaagataattacgttatgaatgatgaaactgttagtgttttgataaaacaatctattcttcaagcacaaatggggtgtgatgtaatagcaccgtcagatatgatggatggaagaataggaaaaattagaaaatctttagataaaaacaaatatcatgacgttcaaatactttcttatgccgttaaatatgcctcaaatttttatggtcctttcagggacgctgttgggtcaaagaaatcattaaaaggtgataaaaaaaattatcaaatggatttctcaaacagcaatgagtcacttcgagaagttgccttggatatcaaagaaggtgcagatatggttatggttaaaccaggattgccatacttagacattatccaaaaagttaaaacaaattttaaaataccagtgttggcttatcaagtttcaggtgaatatagtttaataaagaatggtattaaaaacaatttaataaa

SEQ ID NO: 282092 - DNA, 748 bp, Unknown
  Bacterial polypeptide expressing nucleotide sequence isolated from the Sargasso Sea
ctcaatagatagcgccttaaaaaataaagagggctctcaagcaatagatgaaaataatttaatttgccgaacaataagatctattaaaaaacaatttcctgaccttggggttatttgtgatgttgctctagatccttttactgatcatggacacgatggactaattgttaatgatattgttgataatgacacaacattaaaagttttagaaaaacaagcactggttcaggctaatgcaggatgtgatattattgcgccatcagatatgatggatggcagggttggaataattagaaaagcccttgataaaaataattttcaaaatactttaatactttcttacgccgctaagtatgcttcaaaattttatggcccgtttagagatgcaataagctcttctggaaatttaaaaggtggaagtaagtctacttaccaaatggatacagcaaatagcaatgaggctctaagagaaattgccttagatattaaggagggcgctgatatggtaatggttaagccaggaatgccttatcttgatattattcaaagaataaaatcagattttaatattcctacttttgcctatcaagtatcaggtgagtactctatgataaaaggagctatagataataattggctagattcaaaagtgataaaggaatctcttttatcatttaaaagagctggcgctgatggtattttaacttattttgcaaaagaaattgctgaggaattaaataatgaatga

SEQ ID NO: 282093 - DNA, 463 bp, Unknown
  Bacterial polypeptide expressing nucleotide sequence isolated from the Sargasso Sea
gaaagctttggacgtacagggcttttctaatgttggaatacttgcttactcagcaaaatacgcttcatgtttttatggacctttccgaggtgcgcttcagtccgctccaagcggacataagaaaacttatcagatggaccccgccaacgctcgtgaagcaatgagagaaattgccttagatctcgaagaaggagcagatgttgtgatgataaaacctgctttagcttatctggatgtaatcactcgtgttagggaagcctttgatgctccaattgccgcatacaatgtttccggagaatacgcgatggttgtatcagccgctgaaaagggcttgcttgaccgtgaccaggccatgatggaaatccttacttcaataaagcgtgcaggggcagatatgatcctgacttattttgcaaaagacgctgctgctattcttcgagcggatttcggaagttttaaatga

SEQ ID NO: 282094 - DNA, 661 bp, Unknown
  Bacterial polypeptide expressing nucleotide sequence isolated from the Sargasso Sea
aatggctgtctttccagttaataatggggtgggacaatttcccacaactcgaatgcgtcgaaatcggcagacagactggtcgcggcgcttagtgagcgaaaacaccgtaaccgttaatgatttaatctggcctatctttgtgcaagaagggaataataagattgcgactccagtagaaagcatgcctggagtttctcgactatcaataggaatgttagaggaatctgctcgagaggccgtggatatgggaatcccagctattgcgatcttccccgtcattgagcagaaatacaaaaattccagaggaagcgaagccctcaatccggataatctagtctgccaagcaatacgtgctatctctgaacaagatcttaatattggaattatttgcgacgtggcactcgacccttttactgaccatggtcatgacggtattataaaagatggatatgttgttaatgatgaaagtgtagaaatattaacacaacaggcaataatccaagcaagagctggctgctcagtaatagccccttctgacatgatggatggtcgtgtaggtaaaatcagaaagacattagacgaagaggagttaactcatactcaaattctgtcctacgccgcaaagtacgcctcagcattttatgggccatttcgcgacgcc

SEQ ID NO: 282095 - DNA, 803 bp, Unknown
  Bacterial polypeptide expressing nucleotide sequence isolated from the Sargasso Sea
aaaaaataaaaagattccaattaaaacaatgcctgaattttttagatatagtgtcgataaacttgaccagattgttgatagagccctgaaacttaaaattccaatggtggcaatttttcctcaaacaaatagtggtttaaaagactcttatggtagtgaagctttaaatgaaaacaatttagtttgtaaggctattagaaaaattaaagataaatacaaaaatgaaatcggtataatgactgatgtcgctttagatccttatacatctcatggacatgatggaattttaagaaataaaagtattcttaatgatgaaacgatagaaatattaattcaacaatctcttttacaagctcaaatgggtagtgatgttatagcaccatcagatatgatggatgggcgtattggtgagattagacaagaacttgataataattcgcttaaagatattaaaatattatcttatgctgtaaaatatgcatcttctttttatggtccctttagagatgcagttggatcaaaaaaatctttaaaaggtgacaaaaaaacatatcaaatggactttagtaattctgaagaagctttaagagaagttgcattagatattaaagaaggagcagatcttgtgatggtgaaacctggtcttccttacctcgatataataaaaaaagtgaaagaaaattttaaaataccagttttggcttaccaagtttcaggtgaatatagtttgttaatgaatggtattaacaaaggattaataaatgaaaactccatttacgaaactcttatgtcatttaaaaaga

SEQ ID NO: 282096 - DNA, 702 bp, Unknown
  Bacterial polypeptide expressing nucleotide sequence isolated from the Sargasso Sea
taaatgaaaataatttaatttgccaagctataaaatatattaaaaaaagatataagaaccaaattgggataatgtgcgacgtagctcttgatccatatacatcacatggtcatgatggaattttaaaaaaaaataatattttaaacgatgaaacaataaacatactggtagaacaggctttaattcaagcaaaaatgggttgcgatgtaattgctccatcagatatgatggatggaagaattggaaaaattagaaaaaagttagatagagaaaatctaaatgatgttcaaattttatcctatgctgttaaatattcatcaagcttttatggacctttcagagatgctgttggatcaaaaaaaaatttaaaaggtgataaaaaaacctatcaaatggactatagaaataacaatgaagctcttagagaagtttctttagatattaaagaaggagcagatatagtaatggttaaaccagggataccgtaccttgatataataagaaaagtaaaagataattttaaaataccagttatggcttatcaagtttcaggtgaatatagcttattaatgaatggtattaaaaataaaattatcgatgaaaaatctatatttgaaactctaatgagttttaaaagagctggtgcaaatagcatcgtaacatattttgctgataaaattaatttggactcatttgattgaa

SEQ ID NO: 282097 - DNA, 742 bp, Unknown
  Bacterial polypeptide expressing nucleotide sequence isolated from the Sargasso Sea
gaaagtggtcttaaaaattcttgagggaaatttagctgtagatgaaaacaacttggtgtgcagatcaattaaaagtatcaaaaaagattttccaaatattggtattgtatgtgatgttgcgttagatccttttactgatcatgggcatgatggtttagttataaataataaaatagataatgataaaactttggaggttttggaacaacaagctctaatccaagcaaatgctggttgtgatgtaatcgccccgtcagatatgatggatggaagagttggaagaataagaactgcattagattcaaataatttaacagatactcttatactttcttatgctgcaaaatatgcttcaggtttttatggtccttttagagacgctataggctctggttctaatttaggtaaagatggtaaattaacatatcaaatggatccatcgaacagtgatgaagctattagagaagttggtttagatataagtgaaggtgcagatatggtaatggttaagcctggtatgccctatcttgatattatttctaggataaaatcagaatttaaaattccaacttttgcctaccaagtatccggtgaatattcgatgataaaagaatcaattaataaaggttggcttaatgaaaaagttataatggagtctcttttatcttttaaaagagctggggcaaatggtatactgacttactttgcattagaagctgctaaaaaattaaaaaatgaataa

SEQ ID NO: 282098 - DNA, 550 bp, Unknown
  Bacterial polypeptide expressing nucleotide sequence isolated from the Sargasso Sea
actagaggttctcgcagagcaatctcttatcctcgcagaagctggagcagatattattgctccttcagacatgatggatggccgtatcggagttataagaaaaaaattagatgaaaataactttgaagacaaaataattttgtcatatgcagcaaaatataattcaaaattctatgggcccttcagagatgctgttaattctaaaaataatctaggtacttctgataaatcttcttatcagatgaatcctgcaaattcacttgaagcccttaacgaggttgccatggatattgaagagggcgctgatatcgtaatggtaaaaccaggcatgccttatttagatattatttctaaaattaaagaagaatttaaggttccaacttttgcataccaagtaagcggagagtatgcaatgataatggagtcagttaataaaggatggcttgataaaggtgttataatagaatctttaacaagcttcaaaagagctggtgcagatgcagttcttacatatttcgctaaagatttaataaaggaatttaatttatga

SEQ ID NO: 282099 - DNA, 577 bp, Unknown
  Bacterial polypeptide expressing nucleotide sequence isolated from the Sargasso Sea
ttttaattctggatatgttttaaatgacgagactatagacatattaattaaacaatctttattacaggctgaaatgggatgtgatgtgttggcaccttctgacatgatggatggacgaattgggaaaataagaaatgcattagataaaaaagattttaaaaatgtacaattactatcttatgcagttaaatatgcctctaatttttatgggccttttagagatgctgtaggttcgaaaatttctttaaagggagataaaaagacataccaaatggatttcaagaataatgatgaagcattaagagaagtagctttggatattaaagaaggcgctgatatggttatggttaaaccaggtttgccatacttagatattataaaaacaataaaaaataattttaaaataccagtctttgcatatcaagtttcaggtgaatacagcatgttagctaatgctataaataaaaaaataataaagaaagatgctatatttgaaaatttaatgagttttaaaagagccggagctagtgcaatagtaagttattatgccgacagattaaataaaattttgccttaa

SEQ ID NO: 282100 - DNA, 670 bp, Unknown
  Bacterial polypeptide expressing nucleotide sequence isolated from the Sargasso Sea
tgcagaggtattcagttaattaaaaagaaatttaagaataaaattggtattatgtgtgatgtggccctagacccttatacttctcatggccatgacggattattaaagaaacacaatattctaaatgataaaactgtagaaattcttaccaagcaagcagtgctacaagccaaaatgggatgtgatgtgatagcgccttcggatatgatggatggaagaataggtaaaattcgatcagccttagataaaaatagtttaaatgatgtacaaatattgtcatatgcagttaaattttcatctagcttttatggaccatttagagacgctgttggatcaaaaaaattactaaaaggtgataaaaaaacataccaaatggattttagaaattcagatgaatctttgagagaagtttcattagatattaaagaaggtgctgatatggtcatggttaaacctggtatgccctatcttgatataataaaaaaagtaaaagataatttcaaaataccggtatttgcatatcaagtttctggtgaatacagtttgataatgaatggaattaataaaaaattaatagataaagactcaattaaagagtctcttatttcgtttaaaagagctggagcaaatggtattgttacttattttgccgatcaaattgatctttaat

SEQ ID NO: 282101 - DNA, 661 bp, Unknown
  Bacterial polypeptide expressing nucleotide sequence isolated from the Sargasso Sea
catgaaacaacggtctaataaacaattctccataaatagttttccaagagtaagaatgagaagaaatcgtttgtcagaattttccagaaaaattgtaagtgaaaataatttttcagttaatgatttgatttacccaatttttattacttatggatcaaaagttaaagaagaaataaattccatgccaggaatttatcgattttcattagatcaacttcataaagaaattgaatatatttcttctttgaatattcctgcaattgctctttttccaaaaattgaaaatgaattgaaaacacctgatggtaaagaagctctaaatagcaataatttgatatgtcaagctattaagatttcaaaaaaagttaacccagatctaggtgttataactgatgttgcattagatccttatacagatcatggccatgacggtataatacataataatcaaattgataatgacttaacgctaaatatcctatgtaaacaagctattgtgcaggcacaagctggatgtgatattatagcaccaagtgacatgatggatggaagagttggagcaattagagacactttagatgaacatgaacttaacaacgttcaaatcatgtcatatgctgctaaatatgcatcatcattttatggtccttttagagatgca

SEQ ID NO: 282102 - DNA, 916 bp, Unknown
  Bacterial polypeptide expressing nucleotide sequence isolated from the Sargasso Sea
atgattaccggtaaatttccaagcttaagactacgtagaactagaaaatttacttggtccaggagattgattcaggaaaataacctatcaactaatgatttcatttatccaatttttttaatagagggaaaaaataataaacagcctataaaatcaatgcccgacatttacaaatatacgatagacaaactggggcccttagtagacaaagctataaaaaataaaatacctatgattgctcttttcccttctacacccaataagaagaaagattatcatggcaatgaagctttaaatgaaaataatttagtttgtaaagccactcgttttataaaaaaaagatttaaaaatgatattggtatcatgtgtgacgttgctttagatccatatacatctcatggtcatgatggattattgaaaaaagattatgttctaaatgataaaacaattgaagttttgaaaaagcaatctttgttacaagctcagatggggtgtgatgttattgctccatcggacatgatggacgggcgaattggtaaaataagaaaatttttagataaaaatggataccatgatgtgcaactactttcatatgctgtcaaatatgcatctaatttttatggaccatttagagatgcaataggaacaaaaaaatctttaataagtaacaaaaaaaattaccagatggactttgcaaacattaatgaatctataagagaggttgctctagatataaaagaaggagctgatatggtaatggtcaaacctggtatgccctacttagatgtaattaaaaatataaaagataagtttaaaataccagttttggcttatcaagtttcaggagagtacagtttaataaagaacggtattaagaataagcttattaaagaaaacgctattatagaaagcttaa

SEQ ID NO: 282103 - DNA, 451 bp, Unknown
  Bacterial polypeptide expressing nucleotide sequence isolated from the Sargasso Sea
tgtattagattcaaacaatttaacagataccctaattctctcttatgctgcaaaatatgcttcggttttttatggaccttttagagatgctataggttctggttctaatttgggtaaagatggtaaattaacatatcaaatggatccatcaaacagtgatgaagctattagagaagttggattagatataagtgaaggtgcagatatggtaatggttaaacctggtatgccttatcttgatattatttctagaataaaatcagaatttaaagttccaacttttgcctaccaagtatctggtgaatattcgatgataaaagagtcaattaataaaggttggcttaatgaaaaagttgtaatggaatctcttttatcttttaaaagagctggggcaaatggtatactgacttactttgcattagaagctgctgaaaaattaaaaaatgaataa

SEQ ID NO: 282104 - DNA, 781 bp, Unknown
  Bacterial polypeptide expressing nucleotide sequence isolated from the Sargasso Sea
atgtctatctatagaaaatatccaagtacccgcttaagaaggttaagaaagaaccttaatctaattgaacttgtatctgaaactaacttaacttcaaaagatcttatacaaccaattttcattaaagaaaattttgaaggcaaagaagaaatcgaatcaatgccaggtatcttcagatttggcttaaatcatgtaatgagtgaaatagaggaacttataaatgcaggcataaatgctatagctgttttcccagtcgtagaatcttcaaaaaaagatgaaaaaggatcagaggcattaaacaaaagtaattttatcgttcaatcaatcaatgaaattaaacaagaatttcctgaattaatattaatcgcagatgttgcattagatccttatacagatcatggtcatgacggcattttaataaataacgaagttgcgaatgatgaaactgtagaagttctaattgagcaatctatattactcgctgaggctggggcggatattattgctccttctgatatgatggatggaagaattggtttaattagagattctctagaaaaacaaaacttaaaagatacaatcttgttatcttatgcttctaaatataactcaaaattctatggaccatttagagatgcagtaaattctgcatcaaatcttggtgattcttcaaaatcatcataccaaatgaatatatctaacaagaacgaagccttgcatgaagtcgccttagatataaatgagggtgcagatatagtaatggtaaaacctgcaatgcctt

SEQ ID NO: 282105 - DNA, 644 bp, Unknown
  Bacterial polypeptide expressing nucleotide sequence isolated from the Sargasso Sea
ggttattaagattgctgatgttgcgttagatccattcaccgatcatgggcatgatggggtcttgcttgatggcaaagtagataacgataaaactttagagttgcttagagaccaggctttgctcttggcccaatctggagcagatgtgcttgctccctcagatatgatggatggaagagttggagtgattcgagacactttagagtcaaatggattcgtggatactgtaatcttatcttatgctgctaaatatgcctctagtttttatggaccatttagagaagcagtaggatcctcagcaaaccttggcagggcttcaaagaaaacatatcagatgaattttgcaaatcttaacgaggctctccatgaaacagccatggacatagaagaaggagcagatattgttatggttaagcctggcacagcctatcttgatgtggttcatgcaattaaaaccaaatttcaaattccaacttttgtttatcaagtgagtggagaatattcaatgctgcagttaagtatagagaaggggtggctagataaaaatgttatgttagaatcattaatgtgttgcaaacgagctggtgcagacgccatcttaacctacgcagcaaagcaagtagcatcggagttaaattcatgag

SEQ ID NO: 282106 - DNA, 895 bp, Unknown
  Bacterial polypeptide expressing nucleotide sequence isolated from the Sargasso Sea
atgcgcagaaatagaatgaaagatttttccagaagaataatatctgaaacccatctaaatgcaaataatcttatacagccattatttgtcactcaaggaaagtatgaaaatacttatatagaagcaatgcctggaattaaaagacattcaatcaaatcagttgccaaagaagctattgaaatttacaaattaggaataccagcgattgcaatatttccttatataccaaatgatttgaaagatgaaaatggttctgaaagcttaaataaaaataatgttatttgcaaagctatcaaagaaattaaaaattcatgcccagaaatagggataatttgtgatgttgcacttgacccgtacacaaaccatggacacgacggtattattattaatagcgaaataaataatgataaaacaattgaaattttatgtaaacaagctgttattcaagcagaggctggatgtgacatcgttgctccaagtgatatgatggatggaagagttaagtcaatcaggtctgctttagataaagaaaatctaattaatacctcaatattgtcttactctgcaaaatatgcgtcttctttttttggaccttttagagatgcattaggcactaaaattaacagtgactatgtatatgacaagaaatcttatcaaatggatcctgctaattcgagagaagctttaagagaaattgaattagatataaatgaaggtgctgatataataatgataaagccagctttaagctatttagatattataaatttagcaaaacaaaattttgaaataccaatttttgcttatcaagtttcaggagaatattctatgattaaagccgcttctgaaaagaattggataaatgaacaagatataatttttgaaactttattaa

SEQ ID NO: 282107 - DNA, 649 bp, Unknown
  Bacterial polypeptide expressing nucleotide sequence isolated from the Sargasso Sea
aaaaagaaattaagaaataaaattgggattatgtgtgatgtggccctagatccttatacatctcatggccatgatggattattaaaaaaaaacagtattctaaatgataaaactgtagaaatacttgtcaagcaagcagtgttacaagcaaaaatgggatgtgatgtaatcgcgccttcggatatgatggatggcagaattggtaaaattcgatctgctttagataaaaataatttaaatgatgttcaaatattgtcatatgcagttaaattttcatcaagcttttatggaccatttagagacgctgttggatcaaaaaaattattaaaaggtgataaaaaaacataccaaatggattttagaaattcagatgagtctttgagagaagtttcactggatataaaagaaggtgctgatatggttatggtcaaacctggcatgccctatcttgatataattaaaagagtaaaagataacttcaaaataccagtatttgcatatcaagtttctggtgaatacagtttaattatgagtggaattaataaaaaaataatagacaaagcttcgataaaagagtctttgatttcgtttaaaagggctggagcaaatagtattgtaacttattttgctgatcaaattgatctttaat

SEQ ID NO: 282108 - DNA, 767 bp, Unknown
  Bacterial polypeptide expressing nucleotide sequence isolated from the Sargasso Sea
tggaatacctatggtatcaatttttccttacacgaatcaaaaattaaaaaatttaaaaggattagaatctttaaatgaagacaatcttgtttgcaaaagcattcgatacataaaagatagatataaaaatcaaattggcataatgactgatgtagctttagatccatatacatcgcacgggcatgatggaatactagaaaataattacgttaataatgacaaaactgtagagatattatgtaaacaatcattactacaagcacaaatgggatgtgatgtaatagcgccatctgacatgatggatggaagagttggtcaaataagaaagattttagataaaaataatttggaattagtacaaatactttcttatgctgttaaatttgcatctaattactatggaccatttagagaagctataggatctagaaaaaatttaaaaaatgataaaaaagattatcaaatggattatagaaataaaaaagaagcgtttagagaggtatcgcttgatattaaagaaggtgcagacattgtgatggttaaacctggtttgccatatttagacattatcagttctataaaagaagaattcaaaataccagtttttgcttatcaagtttcaggtgaatactcacttataatgaatggtataaaaagaaaaataattaaagatgaggcaattttagaaagtttaatttcattcaaaagagccggttgcagtgcaatagttacatactttgcatatcaattagcaagagtgttataat

SEQ ID NO: 282109 - DNA, 782 bp, Unknown
  Bacterial polypeptide expressing nucleotide sequence isolated from the Sargasso Sea
gatgtctaattcttctttcattcgaagcttccccaagacccgcatgcgccgcatgcgcaaagatgagttcagtcgcgaactcatgaaagaaactcgacttagtgtaaaagatttgatttatccagtattcatagtcgatggacaagataaacgtcaaccaattgaatctatgccatcgatttatcgcttgagtatcgacaatctaatagaggaggcggcagagttaacagaacttggaatcccggccatagccttattccccgtggttgaagataagaacaagtcgcaaaacggtgaggaatcgtatagtcaagatggcttaatccaaaacgcaataaaggaaattaagagtaatttccctactttaggagtcatttcagacgtggctcttgatccatataccacccatggacaagacgggataatcgatgagtcgggatacgtactcaatgaaaaaaccgtggaaatccttgtcaagcaggcgatatcccatgctgtagcgggagccgatatagtcgccccatctgacatgatggacggacgggttggagcaattcgcggtgcctttgaagacaaaaaccttattcacactcgaattcttgcatactctgccaaatatgcgtcaaattattacggccccttcagagatgctgtgggttcgggaaaaagtcttggaagttcggataagtatagttaccaaatggatttctcaaatagtgacgaagcactccaagaaattgcttccgacttggccgaaggagcagatatggtaatggtgaagc

SEQ ID NO: 282110 - DNA, 532 bp, Unknown
  Bacterial polypeptide expressing nucleotide sequence isolated from the Sargasso Sea
cttctacttgccgaacattgtgcagatattatagcaccatcagatatgatggatggtcgaattggtttgataagaaataatttagaagacaaaggttttaaaaacacaattctactatcctactcagcaaaatatgcttcaggattttatggcccttttagagatgcggtcggttcccgcggtaacttagtttcagataaaaaaacttatcaaatggattatgcaaattcagatgaagcgcttagagaagttgcattagatattgctgaaggtgcagatattattatggttaagccaggcatcagttatttagacgttattcatagaattaagtctgaatataattttcctacatttgcttatcaagtttctggtgaatatgccatggtcaaagctgcggcaagaaataattggattgacgaggaaaaaattataatagagcaactgacttcatttaaaagagctggagccaacgctatacttagttattttgcaatagacgctgcaaaaattattaattcaacgagttaat

SEQ ID NO: 282111 - DNA, 514 bp, Unknown
  Bacterial polypeptide expressing nucleotide sequence isolated from the Sargasso Sea
tgcaggttgtgatattattgctccatctgatatgatggatggaagggttggcagaattagaaatgctttggataaaaataaatatgaaaatactttgatcctttcctatgcagcaaaatatgcatcgaaattttatggaccttttcgagatgctattaattcatcaagtaatttaaaagggggaagcaaatcttcttatcagatggatgtttcaaatactaatgaagctttaagagaggttgctatggacatcaacgagggcgctgatatggttatgattaaaccaggaatgccttatctcgatattattcagcgtattaaatcagaatttcaaattccaacatttgcctatcaggtgtcaggggaatattcgatgattaaaggtgctgttaataatggttggctggattcaaaagttataaaagaatctcttttgtcatttaaaagagctggcgcagatggtattttaacttattttgctagagagattgctaaggaattacaaaatgagtga

SEQ ID NO: 282112 - DNA, 808 bp, Unknown
  Bacterial polypeptide expressing nucleotide sequence isolated from the Sargasso Sea
atgattataggtaaatatccaggattaagactaagaagaaatagaaaaatatcctgggcaagaaaactggttcaagaaaataccctaagttctagtgactttattttgcctatatttttgatagatggatcaaataaaaaagagtcaatatcatcaatgccaggggtctatagatataccatagatagattaagtcagataattgataaagctatcaaaaaaggtattccaatggtcgctctttttcctaaaacaaaaaatagtttaaaaaatgaaataggctctgaggctcttaatgaaaacaacttggtttgtaaagcaattgtacaagtcaaaaaaagatataaaaatcaaattggaataatgtgtgatgttgctcttgatccatacacttcacatggacatgatggattaattaaatcaaatcagattattaatgatgaaactattgaaatattaattgaccagtcattactccaagctgagatgggttgtgatgttctggcaccatctgacatgatggatggtagaattggaaaaattagaaaagctcttgataaatcaaactttcaaaatgttcaaattttatcttatgctgcaaaatatgcttcaagtttttatgggccatttagagatgctgttggatcgagaagatctttaaagggagataaaaaaacctaccagatggatttcagaaacagtgatgaagctttacgagaagttgctttagatattaaagaaggtgcagacatggtaatggttaaaccaggaatgccttatttagatattataaaatctataaaagaaa

SEQ ID NO: 282113 - DNA, 557 bp, Unknown
  Bacterial polypeptide expressing nucleotide sequence isolated from the Sargasso Sea
tactttagaggcattatcaaagatgtctattaacttagcttcatctggtgcagatattcttgctccttctgacatgatggatggaagaatagggaagataagagattcattagaaaagaataatcataaggacaccattttattaagttatgcagctaaatatgcatcaaacttctatggtccttttagagatgctgttggatctaaacaaactgaaggcatttcaaagaaaacataccaaatggactcaaagaatcttaaagaggcctataaagaaattttgttagatataaacgaaggagcagatattgtaatggttaagccagctatgccttatttagatataatcaacgatctaagccaaaagactaatgttccaatttttgcatatcaagtaagcggagagtactcaatgttaaaaatgggtattgacaaaaaaatatttgaccataatgtaatccctgagactttaataagtcttttcagagcaggctcatcttcagtaattacatattttgcaagatggacagcagaaaattatgacaatatcagttgat

SEQ ID NO: 282114 - DNA, 749 bp, Unknown
  Bacterial polypeptide expressing nucleotide sequence isolated from the Sargasso Sea
catgaaagaacagtcaaataaacaattttctataaatggttttccaagagtaagaatgagaagaaatcgtttatcagaattttctagaagacttatatctgaaaataatttgtcagttaacgatttaatttatccaatttttattacttatggatcaaaagttaaagaagaaataagttccatgcctggaatttatcgatattccttagatttacttcacaaagaaattgaatatatttcttctttaaatattcctgcaattgcattatttccaaaaattgaaaatgaattaaaaacacctgatggtaaagaggctctaaataataataatttaatatgcaaagctatacagatttctaaaaaagttaaccctgatctaggtgttataactgacgttgcactagatccttacacagatcatggccatgatggaataataaaagaagatcaaattgataatgacttaacgctagatattctatgcaaacaggcaattgttcaggcagaagctggatgtgatattatagcacctagtgacatgatggatggaagagttggagctattagagatactttagatggacatggtcttattaacgttcaaatcatgtcatatgctgctaaatatgcatcatcatattatggcccttttagagatgcagttggttcagcggtcaatttatcaaataaatcaaaaaaaagttatcaaatggacccagcaaattcagctgaggcattaagagaaatta

SEQ ID NO: 282115 - DNA, 901 bp, Unknown
  Bacterial polypeptide expressing nucleotide sequence isolated from the Sargasso Sea
actgcgaagaattcgcaactacgattgggttaggcggcttgtctctgagaacaatttatctacaaatgatttaatacttcctttgtttattaaagaaggaaaaaatcaaaaagaatcgatcaagtcaatgccaggtgtatacagatatagtatagataaaataaacaaagttatagatcaagcctgtaagttatctatacctatgattgcactttttccttatacgccaaataaaaaaaaggattcacttggaagtgaggccttaaatgagaataatttaatttgtagagcgttaagacaaattaaaactaaaaaaagaaatattggtgtaatgtgtgatgttgctttagatccttatactagtcatggtcatgacggagtattaaaaaattcatatgtcgataacgataaaactctagaaattttagctaaacaatcattgttgcaagcacaaatgggatgtgatgtgattgcaccatcggatatgatggatggaagagttggaaaaataagaaaaattcttgataaaaacggttgcattaatacaaagatactttcttatgctgtaaagtattcttcaaacttttatgggccatttcgtgatgcggttggttctaaaaaatctcttaaaggagataaaaaaacatatcaaatggattatagaaatacaaacgaagctatgaaggaagtttctttagatattaaagaaggtgcagacatggttatggtaaaaccaggaatgccttatttagatataatcaaaacagtgagagaaaatttcaaaataccagtattttcttatcaagtatcaggtgaatatagcctcataaaatacggaattaaaaataaacttataaacgaagacgcaatattagaaagcctcgtttctcttaaaagagca

SEQ ID NO: 282116 - DNA, 601 bp, Unknown
  Bacterial polypeptide expressing nucleotide sequence isolated from the Sargasso Sea
atggatttagttttccgtcctagaagacttcgacgaaatggtcccattcgaggactggttcgggagacagaacttgctcccagacaattgatatatccaatcttcgttgcagaagggaatcgtgtgagggaggaaatcaataccatgccggggcaattccgtttatcagttgatgaagttgttcgcgattgcgaagtcctttatgaactgggcatcggagcggtcaacctttttggatattccgaggaaaaagacgaactggcaaccaaatcctatgactcttcaggtttagttcaaaggtgtatacgagaaattaaaaaaaagatccccgatttatgtgtccaaacggatgtcgcactggatccctatacgacccatggccatgatggtctcgtcatcgaaggagagattgttaatgatgaaaccgttggagtactttgtaagatggcgctttctcatgctgaagccggagcagactggattgccccttcggacatgatggatggcagagttggagccatcagggatgcacttgatgagcagggttttcatcatgtgggcattcttgcctattccgccaaatacgcttcatgttcttcgg

SEQ ID NO: 282117 - DNA, 744 bp, Unknown
  Bacterial polypeptide expressing nucleotide sequence isolated from the Sargasso Sea
tttatttcctcatactgaaacgaaaaaaaaaagatgaatatggttctgaggccttaaatcctgacaatttagtttgtaggggaatagaatatataaaagggaaatttaaaaataaaattggagtcatgtgtgatgtggcacttgatccttacacatcacatggtcatgacggattgttaaaaaaaaacaatattttaaatgacgaaacagtagaaatattaactaagcaagctgttttacaagctaaaatgggatgtgatgttattgctccttcagatatgatggatggaaggattggcaaaataagaaaggcattagacataaataatttaaatgatgttcagatattgtcatacgcagttaaattttcctctagcttttatggaccatttagagacgctgttggatcaaaaaaattattaaaaggtgataaaaaaacataccaaatggattttagaaattctgatgagtctttaagagaggtttcattagatgtgaaagaaggtgctgatatagtaatggttaaacctggcatgccttatcttgatataattaaaaaagtaaaagataattttaaaattccagtgttggcttatcaagtatctggtgagtacagtttaataatgaatggaattaataaaaatataataaacaaagattctattatagagtctcttacttctcttaaaagagctggagcaaacggcatagtaacatattttgcaaatcaaattgatctttaat

SEQ ID NO: 282118 - DNA, 551 bp, Unknown
  Bacterial polypeptide expressing nucleotide sequence isolated from the Sargasso Sea
tcgaactatagaaatattaactaaacaatcattattacaggcaaagatgggttgcgatgtaatcgcaccatctgacatgatggatggaagagttgctgctattagaaaagttttggataaagaaaactttaaagacgtaagtatattatcttatgcaattaaatttgcctcaagtttttatgggccttttagagatgctgttgggagtaaaaaaaaattaaaaactaataaaaaaacctatcaaatggactacagaaataaatttgattcatttagagaagtaggttttgatcttaaggaaggtgcagatatgattatagtaaaacctggattaccctatttagatataattagtaaaattaaagaaaaatttagcgttcccgtaattgcttatcaggtatcaggtgaatacaccctaattaaaaatgctatcgataaaaaatttttatccgaagagtcaattattgaaagtattatttcttttaaaagagctggcgcttgcgcaataattacttattttgctttagaaattgcaaaaaaattaaaataaa

SEQ ID NO: 282119 - DNA, 672 bp, Unknown
  Bacterial polypeptide expressing nucleotide sequence isolated from the Sargasso Sea
caatacgactcataaaaaaaaagtataaaaatgaaatcggaattatgtgtgatgttgcattggatccctatacatctcatggtcacgacggaataataaaatctggttatgttttaaatgatgaaacaaataaaattttaatacaacaatcattacttcaagctgaaatgggttgtgatgtgctcgcaccttcagatatgatggatggaagaataggagaaattagaaaatcacttgataagaatgggtacaaaatgactcaaattctatcttatgctgtaaaatattcttcgaatttttatggtccattcagagatgctgttggatcaaaaaaaaatcttcaaggtgacaagaaaaattatcaaatggattttagaaataaagatgaagcattaagagaagttgcaatggatataaaagaaggtgctgatatggttatggttaaaccagggctaccttatttagatataattagttcagtcaaagaaaaatttaagattccagtaatggcctatcaagtttctggtgaatatagtttattaactaatggaataaataaaaattttttagataagaatgtaattatagaaagtttaattgcatttaaaagagccggtgcgaatgccatagtaagttattatgcagatagattagataagattattaaataat

SEQ ID NO: 282120 - DNA, 715 bp, Unknown
  Bacterial polypeptide expressing nucleotide sequence isolated from the Sargasso Sea
ttagggagtgaagctctaaatgaggataatttagtttgtaaggctataaaatatattaaaaaaagatacaaaaacaaaattggaataatgtgtgatgtagctctagatccttacacaaaacatggtcatgatggaattctcaaatcaaaaaatataatgaatgacgaaactatagagatcttaattcagcaatctttattacaagcacaaatgggatgtgatgtgttagcaccatcagatatgatggatgggcgaattggtagaattagaaaagctttagacaaagaaaatttcaaaaatactcaaattctatcttatgctgttaaatatgcctctaacttttatgggccttttagagatgccgtaggatctaaggtatccttaaaaggagataaaaaaacctatcaaatggattttaggaattatgatgaagcaataagagaggtggctctagatataaaagagggtgcagatatggtcatggtaaaacctggtttaccctatcttgatattattagatcaataaaaaataaattcaaaatcccagtttttgcctatcaagtttctggtgaatatagcatgttatccaatgctgtagaaaaaaagataataaataaggatgcgatctttgaaaatttgatgagttttaaaagagctggtgctaatgcaatagtaagttattacgccgatagattaaacgaaattttaccttaat

SEQ ID NO: 282121 - DNA, 587 bp, Unknown
  Bacterial polypeptide expressing nucleotide sequence isolated from the Sargasso Sea
aacaattatagataatgatgttgataatgatgaaactttaaaaacattatcaagtcagggattaactcttgtaaaatctggagcagatattttagccccttctgatatgatggacggaagagttcaaagaataagagatactttagatatgaatggatttgaaaaaataccaattttcccatattcagttaaatatgcatcatcattttatggtccattcagaaacgctgttgatagcaaattagaaattggagacagaaaaacccatcaaatgaattttaaaaatactaatgagtttataagggaaatagagtacgacataaatgaaggatgtgatgcaataataataaaacctgctctagcttacttagatattatatcaaaagccaaagaaaattttaatattccaataatagcatataatgttagtggggaatatgctatggttaaatctgccgctgaaaataatcaggtggatgagtatgaacttacaatggaaatactttatgcaataaagcgtgcaggagcttcagcaattataacatataatgcagaagagatcgctaaaatattatcaaataaataga

SEQ ID NO: 282122 - DNA, 739 bp, Unknown
  Bacterial polypeptide expressing nucleotide sequence isolated from the Sargasso Sea
gaaaaagatttaaaagatgaaaatggaaccaattcttataatccaaataatttaatttgcagggcgattaaaacagtgaaagcttccttccctgaattaggtataattgctgatattgcattggatccctataccattcatggacatgatggtttaataagaggaaataaagtagcaaatgacgaaacaattgcagtattaaaaaaacaagctatagtgtatgcagaagctggatgtgacattttagctccttcagatatgatggatggaagagtgggtgctcttcgacgagagttagaggaaaataatatgcatgatacagtaatcatgtcctatgctgcaaagtacgcctcttcattctatggcccctttcgagatgcgattaaggctcaaaaattgagcggaatcaaagataaaaaaacataccaaatggattctgccaattctgatgaggcgatgcatgagattgctttggatatcaatgaaggaactgatatggtaattataaaaccaggaatgccgtatcttgatgtaatctacagatgcaaaaaagaattccaaattccaacatttgcttatcaagtttctggcgagtattcaatgattttatcagcagtaagtggagaaagtaaatacgatataattaaagaaagtatgtttagttttaaaagggcgggcgctgatggtattctatcatactttactccatttctcaaagagtctttgaataaaagataat

SEQ ID NO: 282123 - DNA, 772 bp, Unknown
  Bacterial polypeptide expressing nucleotide sequence isolated from the Sargasso Sea
gtagatgacttaatacaacctatatttgtaaaggaagatttagatggattagaaaatatagattctttgccggggattagcaggtacggacttaatgctttagatgaagaaatagaaaagatacaaaacaataaaataaaggcagttgctatatttcccgtcatcaatcctgataaaaaagatgagaccggaagtgactcattaaatgaagacaatttagtatgcactgccatcaagcaaatcaagaaaaactctgaactggccgtgatagcagatgttgccctagatccttacacttcacatgggcatgatggtgtgcttgatgagaatggatatgttgaaaacgataagagtctttcactgctcgtagaacaagccctcactcttgccaaagctggagcagacatggttgctccttcagatatgatggatggaaggatatccggtatcaggaattctctagagtctaataactttaccaacacgattattctttcttatgcagcaaaatatagttcaaaattttatggtccattcagagatgccgtaggatcttccgcaaatcttggtgtgggcagtaaagatacctatcaaatgtcagttgcaaatatcgatgaagcattgtacgaagtgaaaatggatatagaagaaggtgcagatatagtgatggttaaaccgggaatgccttatcttgatgtcatcaaagcagttaaagatacttttaaagttccaacgtttgcttatcaagtaagtggtgaatatgccatgctta

SEQ ID NO: 282124 - DNA, 610 bp, Unknown
  Bacterial polypeptide expressing nucleotide sequence isolated from the Sargasso Sea
cctaatcatggtcatgatggaattttgaaaaaaaaagaaatattaaatgatgaaacaattaaaattttatcaaaacaagctttgcttcaagcagagatgggttgtgatgttatagccccatcggacatgatggatggaagagttggtgttatcagaaaaattttagacaaaaataattataaaaatgtgcaaattttatcatatgcagcgaaatactcttccagtttttatggaccgtttagagatgctattggatcaaagaaaaaattaaaaggagataaaaaaacttaccaaatggattataaaaattcatatgaggctcttagagaagttgcgatggatattaaagaaggggcagattttgtgatggttaaaccaggattaccttatttagatgtaattaaattaatcaaagaaaattttaaaattcctgtctttgcatatcaagtatcgggtgagtactccatgataaaaaatgcgataaaaaatcaggtaataaatgatgaatcaattattgaaagtttgatgtctttcaaaagagctggtgcatcagctgttataacctattttgcattggaagtagcacttaagttaaaaaaaggattataat

SEQ ID NO: 282125 - DNA, 554 bp, Unknown
  Bacterial polypeptide expressing nucleotide sequence isolated from the Sargasso Sea
tgtagaagttctaatgagccaatctatcttactcgctgaggctggggcggatattattgctccttctgatatgatggatggaagaattggtttaattagagattctctagaaaaacaaaattttaaagatacaatcttgttatcttatgctgctaaatataactcaaaattctatggaccattcagagatgcagtaaattctgcatcaaatcttggtaattcatcaaaatcatcataccaaatgaatatatctaacaagaacgaagccttacatgaagtcgccttagatataaatgagggcgcagacatagtaatggtaaaacctgcaatgccttatttagatgttattcaatcgatcaaaaaagaattcaaagtaccaacttttgcttatcaggttagtggagaatttagtatgcttaaaaatgctattaatcatggatggcttgataaagaggttatgctagaatcattagtaagtataaaaagagctggtgctgatgcaattctttcatacgcagctaaagaaatttcaaaggagataaataaagtatgag

SEQ ID NO: 282126 - DNA, 727 bp, Unknown
  Bacterial polypeptide expressing nucleotide sequence isolated from the Sargasso Sea
tccaaaaaaaaaagatgaatatggaaatgaagcattaaatgaaaataatttagtttgccaagcaataaaattcatcaaaaaaaattataaaaacgaaattggaataatgtgtgatgttgcattagatccatatacatcacatggtcatgatggaataattagaaaaaatgaaattttaaatgatgaaacgttagaaatattaattaaacaatcaatattacaggcaaaaatgggttgcgatgtgattgcaccctcagatatgatggatggtagagttttaaaaattcgtaaagctttagataaaaataatcttaaagatgttcaaattctatcttatgcagttaaatatgcatcaagtttttatggcccattcagaaatgctgttggttcgaaaaatctcttaaaaggagacaaaaaaacttatcaaatggattttaaaaacaattatgaatcattaagagaagttgcattagatataaaagaaggggcagatatgattatagtaaaaccaggaatgccatatcttgatattattagggaagttaaaaataattttaaaattccagttatcgcgtatcaagtatcaggagaatatagcctaatacaaaatgcaatttcaaaaaaaatattagataaaaaatcagtatatgagagcctagtttcttttaaaagagctggtgcgaatgcaattataacgtattttgctgatcaaattaaactagattaa

SEQ ID NO: 282127 - DNA, 505 bp, Unknown
  Bacterial polypeptide expressing nucleotide sequence isolated from the Sargasso Sea
gatgggttgtgatgttttagctccatcggatatgatggatggcagaattgggcaaatcagaaaagctctagataataacggacaccatatgacacaaatactttcctatgcagttaaatatgcttcaagtttttatggaccctttagagatgcagttggatcaaaaggtcttctcaaaggaaataaaaaaaattatcaaatggattttaaaaacagtaatgaagctttaagagaggttgctttagatattaaagagggtgcagatatggtaatggttaaaccaggtcttccttatttagacataattaaattagttaaagaaaattttaaaattcccgttatggcttatcaagtatcgggtgaatacagtttgttggctaattctataaatcaaggatttgtgcataaagaagttattattgagagtttaattagttttaaaagagccggagcaaatgcaatagttagctactatgcagatagattgggcgaaattttgaagtaa

SEQ ID NO: 282128 - DNA, 1000 bp, Unknown
  Bacterial polypeptide expressing nucleotide sequence isolated from the Sargasso Sea
atgagcttctacccgcactaccgtccgcgccgcatgcgccgtgacgacttctcgcgccgtctgatgcgagaaaatatcctgaccacgaacgatctgatctatcccgtgtttgtcgtcgaaggcaccaacgtgcggcaagccgtaccgtcgatgccgggcgtcgagcgcgtgtcggtggatctgctgatgggtgtcgccgagcaatgcgtcgagttgggcgtaccggtgctgtcgctctttccggcaatcgagccttcgctgaagacgcccgatggccgcgaagcgacgaatcccgccggtttgatcccgcgcgcggttcgcgaactgaaaaagaacttccctgagctcggcgtgctgaccgacgtcgcgctcgatccgtatacgagccacggccaggatggcgtgctcgacgaagccggctatgtgatcaacgacgaaaccgtcgaaatcctcgtagaccaggcgcgtgcgcaagctgaagcgggtgtcgatatcgttgcgccctcggacatgatggacgggcgcatcggtgcgatccgcgaaatgctcgagagcgaggactatatccatacgcgcatcatggcttatgcggctaaattcgcttcggcgttttacggcccgttccgcgatgccgtcggttctgcggcgaacctcggtaagggcaacaagatgacttaccagattgacccggcaaattcgaatgaagcgctgcgcgaagtgcaggcagacatcgaggaaggcgcggacatggtgatggtcaagcccggcatgccgtatctggacatcgtgcgtcgcgtgaaggacgaattcaagttcccgacttacgtgtaccaggtcagcggcgaatacgcgatgttgaaagccgccgcgcagaacggctggctcgatcacgacaaggcgatgatggaatcgctgctggcgttcaagcgggctggcgcggatggcgtgctgacctacttcgcactggatgccgcgcgaattttgcgcgcacagaagtaat

SEQ ID NO: 282129 - DNA, 967 bp, Unknown
  Bacterial polypeptide expressing nucleotide sequence isolated from the Sargasso Sea
attgcgaagagttcgcaactctggttggatacgaagacttgtatcagaaaataatttgagcattgatgatttaatactgccaatctttgttcgagatggtcacggtaaggtggaatcaattaaatcaatgccaggtgttaatagatattcggtagacaaactaaatttgattatgaataaagctaaaaaatataaaattccaatggtagctctttttccatacactcccaaaaataaaaaagacaaatttggaaccgaagctcttaatagaaataatctaatttgtaaatccttaaagtttatcaagaaaagatatactggggttggagtaatgtgtgatgttgctctagatccttatacatctcatggtcatgatggtataatagtaaataaacaaattgataatgataaaacagttaagattcttgttaagcaagctttattacaagcggaaatgggatgcgatgtcattgcaccttccgatatgatggatggaagagttggagcaataagaagagccttggacaaacgaaattttaaaaatgtgagcatattatcttatgcagcaaaatatgcatcgagtttttacggaccatttagagatgcggtgggatctaagaaaaatttaaaatcagataaaaaaacttatcaaatggattatagaaatttaaatgaagcatttagagaaattagcctggatataaaagaaggtgcagatattgttatggttaagcctggtcttccctacttagatattattaaaaatataaaagatagttttaaaattccagttttcgcatatcaagtgtctggcgagtatagtttaataaaacatggaataaagaataaattaattagtgatgaagctatattagaaagtgtaatggcctttaaaagagcaggtgcatcagctatagtgacttattttgctttagaaatagcaaataaaattaaaaaatttagctaa

SEQ ID NO: 282130 - DNA, 914 bp, Unknown
  Bacterial polypeptide expressing nucleotide sequence isolated from the Sargasso Sea
aatgattatcacaggaaaatatccaaatttaagacttaggagaaatagaaaatctaattggtcgagaagactggtcagtgaaaatacattatcagttaatgatttaatacttcctatatttgttattgaaggtaaaaataaaaaaatacctattaaatctatgcctggtatatttagatattctattgataaattaaatcaagttgttggaaatgcggtatcattaaaaatacctatggttgctatatttccttacattaagaataatttaaaaaacacaagaggcacggaagctttaaataaaaataatttagtatgtaaggctacaaatttaataaaaaaaaaatacaatgataaaattggcgtaatgtgtgatgttgcattagacccatatacttcacatggtcatgatggtttacttaaatcaggtaaaatagtaaacgatgaaactataaaaattcttatttctcaatcattaatccaagctgaggcaggctgcgatgtaattgcaccatcagatatgatggatggtagaattggattaataagaaaagctctagataaaaataactttcaacatgtccagttattatcatatgcagttaaatatgcttcaagtttttatggaccttttagagacgcagttggatctaaaaatttattaaaaggagacaaaaaaacttatcaaatggattatagaaatagcgatgaagcaattagagaagttaccttagatattaaagaaggtgcagatatggtgatggtaaaacctggattaccttatttagatataattagaaatataaaaaacaaatttaagattcctatttttgcatatcaagtttctggtgaatatagcttatttgttaactcaattaataaagggattgtaagtgataaaatcatcttagaaa

SEQ ID NO: 282131 - DNA, 958 bp, Unknown
  Bacterial polypeptide expressing nucleotide sequence isolated from the Sargasso Sea
gatgagaagatcaagaaaaaatagttggtcacgtaggcttgtacaggaaaatagtctttcttataacgatctgattcttccaatttttttaacagatggctctaaccaaaaaattcctattaaatctatgcctaacatttatagatattcaatagatagactttcaaagataatagacaaatcaattaaaaaaaaaattcctatggttgcactgtttcctcaaacaaaaattaagttaaaaaatccattaggctctgaagcattaaacgaaaataatttagtatgtaaggctattagatacattaaaaaaagatataaaaatgaaattggtataatgtgtgatgttgctcttgatccatatacttctcacggtcatgacggattgttaaaaaatagtaaaattgttaatgatgaaacaataaatgttttagttaaacaatcactattacaagcatcaatgggctgtgatgtaatagcaccatcagatatgatggatggaagaattggaaaaataagaaaagagttagataaaaataaatttgaagatgttcagatagtctcttatgcagtaaaatatgcatcaagtttctatggaccatttagagatgctgtaggatcaaaaggtgctttacgaggagataagaaaacttatcaaatggactttaaaaatactaatgaagcattgagagaagtttcaatcgatattaaagagggtgcagatatggtaatggtaaaaccaggtttaccttatctagatataattaaaaacgtcaaagaaaattttaaaattccagttttagcctatcaggtttcaggagagtacagtcttatagctaatggtattaaacaaggaataatagacgataatgtcatttatgaaactcttatggcatttaaaagagctggatcaaacgctataatttcatattttgctgatcaaataaacttagatttttaa

SEQ ID NO: 282132 - DNA, 997 bp, Unknown
  Bacterial polypeptide expressing nucleotide sequence isolated from the Sargasso Sea
catgcaaaaaacattatttccaagagttaggcctagaagattaaggctaaatgaaacaattagagatttggtctcagaaactaatattaataggtcaaaacttattcaacccctttttgtatctgacactctcaaacaaaaggaagaaatagtgacaatgcctggccaatatctttattctaaggatgatattctgtctgagatagatgaattagcagatttaggcatcaatacaattgcattattccctaatatagaaagcgatttaaaagatatttccggttctgaagcattaaaagaagataattttatttgcagcattgtaaggcaaataaaagaacgttttcctaaattagtcattattactgatgtagctttagatccttatacatcttcaggacatgatggaataattttagacggcaagattgataatgatcttactttagaagcattatcaaagatgtccattaacttagcttcatctggtgcagatattcttgctccttctgacatgatggatggaagaatagggaagataagagattcattagaaaagaataatcataaggacaccattttattaagttatgcagctaaatatgcatcaaacttctatggtccttttagagatgctgttggatctaaacaaactgaaggcatttcaaagaaaacatatcaaatggactcaaagaatcttaaagaggcctataaagaaattttgttagatataaacgaaggagcagatattctaatggttaagccagctatgccttatttagatgtaatcaacgatctaagccaaaagactaatgttccaatttttgcatatcaagtaagcggagagtactcaatgttaaaaatgggtattgacaaaaaaatatttgaccataatgtaatctctgagactttaataagtcttttcagagcaggctcatcttcagtaattacatattttgcaagatggacagcagaaaattatgacaatatcagttga

SEQ ID NO: 282133 - DNA, 1003 bp, Unknown
  Bacterial polypeptide expressing nucleotide sequence isolated from the Sargasso Sea
tatgactaacattcaaggcaagtttccaagcactagacttagacgtaatagaatgagagagttttcacgtaggctagttgctgaaaataatcttggttctagtgatttaatactacctttgtttgtgtgtgagggtgataatgttgaagatcctattcaatcaatgccaggtgttaatagatattctattgataaacttttacatagagttgaagatgcggttagactgtcaattcctgcgatcgctatatttccacaaatagatactgggctaaaaaatgcacaaggaagcttagcaattgatgaaaataatttagtttgcagatctatcaaaagtataaaaaaagaattttctgaaattggaattatttgtgatgttgctcttgatccatttactgatcatggacacgatgggttagtagtagataataaaattgataatgataagactctagaaatattagaaaggcaggctttagttcaagtaaatgctggttgtgatgtaattgcaccttctgatatgatggatgggcgcgtaggaagaattagaaaatgcttagataataataattttcaaaatacacttattttgtcatatgctgctaaatatgcttctggtttttatgggccatttagagatgctataggctcaggttcaaatttgggtaaaaatggcaaattaacttatcaaatggatccttcaaatagtgatgaggcactgagagaagtagcttttgatattaatgagggagctgacatggttatggtaaaaccaggtatgccttatctagatataatttctaaaataaaatcagagtttaaagttccaacttttgcttatcaagtgtctggggagtactctatgatcaaagagtcaattaataaaggttggttaaacgaaaaagtaattaaggagtctcttttgtcttttaaaagagcaggtgcaaatggtatacttacttactttgcattagaaatagccgaaaaactgaaaaatgagtaa

SEQ ID NO: 282134 - DNA, 991 bp, Unknown
  Bacterial polypeptide expressing nucleotide sequence isolated from the Sargasso Sea
atgattattggtaaatatccgagtcttagacttagaagaaatagaaaagaatcttggtcaagaagactgattcaagaaaataccttaagtccaaatgactttatattacctatttttttaattgaagggtcaaataaacggcaagaaatttcatcgatgccgggtgtatacagatatacaattaatcgattaagtcaaatagtggatagagccataaaaaaaaagataccaatggttgcgctttttccaaaaacccaaaatgtacataaagatgaattgggaacagaatcacttaatgaaaaaaatttagtttgtagagcaattaaagaaattaaaaaaagatacaaaaatcaaataggtataatgtgtgacgtagcattagatccctacacatcacatggtcatgacggtttaattaaatctaacactatacttaacgacgagactatagaggtactgattaatcaatcattacttcaggcagagatgggttgtgatgtcattgccccatcagatatgatggatggcagaattggaaaaataagaaaagctttagataaaaataaattccaaaacgttcaaatattatcttatgccgcaaaatatgcatcaagcttctatggaccttttagagatgctgttggatctaaaggctcattaaaaggagacaaaaaaacttatcagatggattatagaaattcagatgaagctttaagagaagttgcattagatattaaagaaggtgctgatatggtaatggtaaaaccaggtatgccctacttagatattataaagtctataaaagaaaaatttaaattaccagtttttgcctatcaagtatcaggagaatatagtttgattgaaacagctatagcaaaaaaattaattaataaagatgccatatatgaaagcttagttgcttttaagagagctggtgcaaatgctatagtaagttattatgctgatagaattgataaaataattaaataat

SEQ ID NO: 282135 - DNA, 1003 bp, Unknown
  Bacterial polypeptide expressing nucleotide sequence isolated from the Sargasso Sea
tatgaataagagttatccaaataccagaatgagaagaaatagatctgccaaattcgtgcgtaatttggttcgcgagacatcattttcagttaacgatttaatctatccagtttttatacttccaggaaaaaataaacaagagccaataaaatcaatgcctggaaaaaaaagatactctgttgatatgttgttgcctataattggtaaacttcataaaaagggacttaacgcaattgcattatttcctgtcattggcaaagaaaagaaatctaaagatgcaaaagaagctttcaatccaaggggtttggtccaaagtgcagtaaaaaaaattaaaaaagaatatccaaatttaggaataataactgatatagctttagacccttttacactaagtgggcacgatggaatagttgatagtaaagggtatgtattaaatgataaaaccgttaaagttttaactaggcaagccttgtcacatgctgaagcaggtgcagatatagttgccccgtcagatatgatggatggaaggatattagctattagagatgtttttgaaaagaataaatttcataatactaaaattttatcctatgcagctaaatatgcttctaatttttatggtcctttcagagacgcggttgattcatcaaaaaatttaaatgactcttcaaaagaaacttaccaaatggattttgcaaatataacggaagcatcgttagaaattaatttagacattaatgaaggagctgatatggttattataaaaccaggcttaccttatttagacattgttgcaaaaataaaaaataaattctctataccaatattctcttatcatgtgagtggcgaatactctatgataaaaagtgcagccttaaaggggtgtattaatgaaaagtcatctgtgttagaagcgatgtattgttttaaaagagctggctgtaatgctgttctaacatattatacgcctgaaataataaaatggttagatggtaacaaatga

SEQ ID NO: 282136 - DNA, 991 bp, Unknown
  Bacterial polypeptide expressing nucleotide sequence isolated from the Sargasso Sea
atgattattggtaaatacccgagtcttagacttagaaggaatagaaaagagtcttggtcaagaagactgattcaagaaaataccttaagtccaaatgactttatattacctatttttttaattgaaggatcaaataaacggcaagagatttcatcgatgccaggtgtatacagatatacaattaatcgattaagtcaaatagtggatagagccataaaaaaaaagattccaatggttgctctttttccaaaaacccaaaatgtacataaagatgagttgggaacagaatcactaaatgagaaaaatttagtttgtagagcaattaaagaaattaaaaaaagatacaaaaatcaaataggtataatgtgtgacgtagcattagatccctacacatcacatggtcatgacggtttaattaaatctaacactattctaaacgatgagactatagagatactgattaatcaatcattacttcaggcagagatgggttgtgatgtaattgccccatcagatatgatggatggcagaataggaaaaataaggaaagctttagataaaaataaattccaaaacattcaaatattatcgtacgctgcaaaatatgcctcaagcttttatggaccttttagagatgcagtcggttctaaagactcgttaaaaggagacaaaaaaacatatcaaatggattatagaaattctgatgaagctttaagagaaattgcattagatatcaaagaaggtgcagatatggtaatggttaaaccaggtatgccctacttagacataataaaatcaataaaagataaatttaaattgcctgtatttgcttatcaagtatcaggagaatacagcttaattgaaacagctatagcgaaaaaattaattaataaagatgccatatatgaaagcctagttgcttttaagagagctggtgccaatgccatagtaagttattatgctgacagaattgataaaataataaaataat

SEQ ID NO: 282137 - DNA, 916 bp, Unknown
  Bacterial polypeptide expressing nucleotide sequence isolated from the Sargasso Sea
aatgaggataattggtaaatacccaagtgttagattgagaaggaatcgcaagtccgactggtcaagaagacttgttgcagaaaacaacttaacagccgatgatcttatacttccaattttcgttactgagggaaaaaataaagttgaaccaattaaaagtatgcctgatatctacaaatatactttggacagagttgcgcaggttgtgaataaagcaagtaaattaaagattccattagtagccatttttccaaatattccaaataataaaaaaaataataatggaactgagtccttaaatgaaaaaaatcttatatgtagatctattaaaaaaattaaagaaaccaatcctgagattggagtgatgactgatgttgctttagatccttatacaaaccatggtcatgacggcattttaaagaaaaatgaaattcttaatgatgaaactatagaagttctgactaagcaagctcttcttcaagctgaaatgggttgtgatgttatagctccttcggacatgatggatggaagaattggagctataagaaaaactttggataaaaataattttgaaaaagttcaaattttatcttatgccgtaaagtattcttcaaatttctatggtccatttcgagatgcaattggatcaagaaagaaattaaagggagataaaaagagttaccagatggatttcaaaaactcaaatgaagctttaagagaggttgcgttagatttaaaagagggagctgattttgttatggtaaaacctggtttaccctatttagacatagtcagatctattaaagataattttaaagtaccggtttttgtttatcaagtttcaggtgaatacagcatgataatgaactcaataaaaaaaggatattttcatgctgatgcaataactgaaagttaa

SEQ ID NO: 282138 - DNA, 976 bp, Unknown
  Bacterial polypeptide expressing nucleotide sequence isolated from the Sargasso Sea
aatgcgccgcatgcgtaaacatgactttagccgtcgcctgatggctgaaaaccatctaacagtcaatgacttgatctatcccatgtttgtgctcgaaggcactaatcgcagtgaaaaagtcgcctctatgccaggggttgagcgctactctatcgacttactgttaaaagaagccgaagagctagtcgaactcggtattccgttaattgccctgttccctgttacgccagcagagaagaaatcgctgatggcagaagaagcctacaatgccgacgctttagtgcaacgtgccgtacgtgaactgaaaaaggccttcccacagctgggtatcatgactgacgtggcattagatcctttcaccacccatggtcaagacggcattatcgatgaaacaggctacatcctgaatgacatcaccacggagatcttagtgaaacaagccctgtcccacgccgaagcgggcgcagatattgttgccccatcggacatgatggatggtcgcataggtgcgattcgccaagcactcgaagccgcaggccatgtaaacacccaaatcatggcctattcagccaaatactcctcaagctactatggccccttccgtgatgccgtcggctcagcaggcaacctaaaaggtggcaataaacatagctatcaaatggatccggccaacagcgatgaagcgctgcatgaagttgcgctagacatccaagaaggcgcagacatggtgatggtgaagcctggtatgccttacctagatatcgttcaccgcgtaaaaaccgaattagctgtgcctaccttcgcttaccaagtgagtggcgaatatgccatgcatatggcagccattcaaaatggttggttagcggaaaaggccatcgtcatggaatcgctgctatgcttcaaacgcgctggcgcagatggtatccttacctactttgccaaacgtgcagcacagtggctaaaagaagctaaataa

SEQ ID NO: 282139 - DNA, 862 bp, Unknown
  Bacterial polypeptide expressing nucleotide sequence isolated from the Sargasso Sea
attgagaaggaatcgcaaatctagttgggctagaagacttgttgaagaaaataatatatctgtaaatgatttgattttacctatttttgtaacagagggtaaaaataaaatagaagaaattaaaacaatgcccggtatatacagatattcaattgataaaatcaataatattgtaaataaagcaagcaagttaaaaatacctcttgttgcgatatttcctaatacccccaaatcaaaaaaagatattattggaagtgaagctctaaatgaaaataatttagtttgtagagcgataagaaaaataaaaaaaaataaccctgaaattggagttatggctgatgttgcgcttgacccatatactagccatggacacgatgggataataaataaaaaggaagttttgaatgatgaaactattaaaatattatccaaacaagcaattttacaagcagagatgggttgtgatgttatagctccatcagacatgatggatggtagggttggtataattagaaaaagtttagataaaaataatcataaagatgttcaaatactatcttactctgcaaaatacgcttcaagtttttacggtccttttagaaatgcgattggttcaaaacaaaaaagtaagataaataaaaaaacttaccagatgaattacagaaactctgaagaagctatccgtgaagtagctctagatataaaagagggtgcggattttgttatgataaaacctggattaccatacctagatattgtaaaatcagttaaagaaaattttaaaattcctgtttttgtttatcaagtctcgggtgaatacagcatgataaaaaatggtataaaaactggtatacttgataat

SEQ ID NO: 282140 - DNA, 1003 bp, Unknown
  Bacterial polypeptide expressing nucleotide sequence isolated from the Sargasso Sea
tatgaaaaaaaaatctttaagtaacttttcttttccttctacacgtttaaggcgcaaccgtatgaaagaattttcacgaaaacttatttcagaaaacattttaacaactaatgatttaatatggcctctatttgtatctgaaggaaacaaaattaaagataaaatttcctcaatgccaggaatttatagaaattctatagacgaactaattaaagaagctgaacaagctgttaaattaaaaattccagctatagcaatttttccccacatagattcttcattaaaagattcaaaaggatcaaatgctattgataacaataacctgatttgtagatccattaaagcagtaaaaaatgaatttcctgacttaggaattattagtgatgttgctctagatccttttactgatcatggacatgatggcttagtcataaatgacgaagttaataatgatgagacattaaaggtcttaggacaacaagccttaattcaggcacaagctggatgtgatattattgccccttcagatatgatggatggaagagtagggtatattcgttcaattcttgatgaagcaggatttattaatactcaaatattatcctatgcagcaaagtatgcatcaggattttatgggcccttcagagatgcaatcggttcaaaactagcaggagcaacaaaatcaacctatcagctagatccggctaacagcgatgaagctataagagaagttgagctagatatattggaaggagcagatatggtaatgatcaaaccaggaatgccttatctagatatagttcataaagtaaaaaatacttttaacatacccacgtttgtataccaagtatctggagaatatgcgatgattatggctgctattaaaaagaattggttagattctgataaagttattatggaaagccttttatcttttaaaagagctggtgcaaatggtatattaacttattttgcaaaagatatagcaaaaaaattgaaataa

SEQ ID NO: 282141 - DNA, 1000 bp, Unknown
  Bacterial polypeptide expressing nucleotide sequence isolated from the Sargasso Sea
atgagctgtaccagagataatccccttaaaccccttcgccgtttaagacgcctacgccgcacagaagcgatgcgtgacctagtgcgtgaaacccagatttccctaagcgacttagtccacccactctttattgaagagcacatcacccaagccgtgcccatttcaaccttgccggggatcagccgtctgcccgagagtgcgcttgctgatgaaattcaaaggctttacgcattagggatccgctatgtgatgccctttggcatttcacacaccaaagatgcgcagggcagcgacacgtgggatgacaatggcttactcgcgcggatgatccgcaccatcaaaaccgccgcgccagagatgatggtgatccccgatatttgtttttgtgaatataccgaccacggacactgcggcgtattgcaccatgacgaagtctgtaacgatcaaaccgtggctaacttagtcaaacaatccattacagccgccaaagccggagccgatatgctggcgccatcggccatgatggacggccagattaaagccattcgccaagggctggatgaggtaggctttgagcacattgccattttggcccatgcagccaagttcgcctcatccttctatgggccttttagggccgcagtggattgcgaacttagcggaaaccgtaagggctaccagctcgattacgccaatggtcgccaagccttgctcgaagcgttgctcgatgaagaagaaggcgcggatatattgatggtgaaacccggcacgccctatttggatgtgttaagtcgcctaagacaagaaacccaccttcccttagcggcttatcaagtcggcggcgaatatgccggcattaagtttgccgccctggcgggcgccctcgatgagcgcgccgtcgtcaccgaaacctttatcgggttaaagcgtgccggcgccgatttaattgttagttattacgcaaaacaatatgccgagtggttagcgcaatcccgttaat

SEQ ID NO: 282142 - DNA, 796 bp, Unknown
  Bacterial polypeptide expressing nucleotide sequence isolated from the Sargasso Sea
taatatagtagacagagctattaaaaaaggcatacctatgattgccttgtttccatacactgaaaaaagaaaaaaaaacgacttaggcactgaggctcttaacgaaaataatctggtttgtagggcattacaaagaataaagaataaatataaaaatgagattggaataatgtgtgatgttgcattagatccatatacctcacatggtcatgatggacttttacaaaacaaatatgtgttaaatgacgaaaccataaaaattttattagatcaatctttattgcaagcacaaatgggttgtgatgttttagcaccatctgacatgatggatggtcgaattggtgaaattagaaagtacctagacaaacataattttaaaatgacacaaatactttcttatgctgttaaatatgcttcaagtttttatggcccttttagagatgcagttggttcaaaaaacttattaaaaggaaataaaaagaattatcaaatggattatagaaatagtgatgaagccttaagagaggttgctttggatataaaagaaggagctgatatggttatggttaaacctggactaccatatcttgatataattaaaaaagttaaagaaaactttaagattccagttatggcatatcaagtctcaggtgaatattctttattagaacatggaattaaaaatgatttaactgatcgaaacattattttagaaagtcttatttcttttaaaagagctggagcaaatgctattgttagctattacgctgatagattagaccaaattatcaaataa

SEQ ID NO: 282143 - DNA, 1000 bp, Unknown
  Bacterial polypeptide expressing nucleotide sequence isolated from the Sargasso Sea
tatgtttattcaaagaaaatttccaaatactagattaagaagattaagaagaaataataatcttattaatttagtgtctgaaacaaacttaacaaaagatgatctaatacaacctatttttgtaaaagaaaattttgatggagaagaagaaattgaatctatgccaaatatttataggtatggtataaatcaagctcttaatgaaatagaggacataatcaaatccggcattaactccttagcaatctttccagtaattgattcagaaaacaaggatcacaaaggcagccaagctacaaagactaataattttatctctaaatcaattaaagaaatcaaaagacaatttcctgatcttgttctgattgcagatgttgcactagatccatatacagatcacggacatgacggaattattgttaatggtgatgttgataacgatgaaacaaataagatattaattgagcagtcattaattttagcagatgcaggtgccgatattattgcgccatcagatatgatggacggaagaatagggctgatcagagaagctcttgaaagtcaaaactttaaaaatacaattttgctatcttacgctgctaaatttagttctaaattttatggaccatttagagatgcggttggttcatcatcaaatttaggcgaatcatctaagtcctcttatcaaatgtctcttaaaaataagcaagaagcacttcatgaagttgctttggatataaatgaaggtgcagatattgttatggttaaaccagcaatgccatacttggatatcattcatagcatcaaagatagttttcagattcccaccttcgcatatcaagttagtggcgaatatagtatgttaaaactttcaataagcaagggatggctagattcaggggttatgctagaatcactaatcggtattaaaagagcaggagcagatgctatccttacttatgctgctaaagaaatatcaaaggagatacaaaacaaatga

SEQ ID NO: 282144 - DNA, 782 bp, Unknown
  Bacterial polypeptide expressing nucleotide sequence isolated from the Sargasso Sea
tgtaggtaaagcaataaaaaaaggtatacctatggttgctttatttcctcacataagtccaaaaaaaaaggatgaaacaggtacagaggctttaaatccagacaatttagtttgtagaggtataaaattcattaaaaagaaatttaagaataaaattggtattatgtgtgatgtggccctagatccttacacttctcatggccatgatggactattaaagaaaaaaattattattaatgataaaactgtagaaatacttaccaaacaagcagtgctacaagccaaaataggatgcgatgtaatcgcgccttcagatatgatggatggtagaattggaaaaatacgatcagctttagataaagaaaatttaaatgatgtgcaaatattatcatatgcggttaagttttcatctagtttttatggaccatttagagacgctgttggatcaaaaaaattattaaaaggtgataaaaaaacataccaaatggattttagaaattcagatgagtcattgagagaagtttcattggatataagagaaggtgctgatatggttatggttaaacctggcatgccctatcttgatataattaagagagtaaaagataatttcaaaataccagtatttgcatatcaagtttctggtgaatacagtttaataatgaatggaattaatcaaaaattaatagataaagcttcaataaaagagtctcttatttcatttaaaagagctggagcaaacagtattgtaacttattttgccgatcaaattgatctttaat

SEQ ID NO: 282145 - DNA, 994 bp, Unknown
  Bacterial polypeptide expressing nucleotide sequence isolated from the Sargasso Sea
atgatttcaaggaaatatccatcaactagattacgaagattaaggcagtcagaatccataattgatttgaccagcgaatgtgcgttgactaaaaatgatctaatccaacctgtatttgtaaaagaaggtttaagtgataaagagcctatagaatcaatgcctggtatctttagatttggtgaagactctgttttaaaagagattgaagaaattaaccagcttggaataagagcaatagctatatttcctgttatagatccttcaaaaaaagactccaaaggcaccgaagccacaaaaagagataattttatttcaagagtattaggttctataaaaactaaatttcctgagatgctagtcattgctgatgttgccttagatccttacacagatcatggtcatgatggaattttggagaatgatgagatcttaaatgatcaaacactagatgttctcgcagagcaatctcttgttctagcagaagctggtgcagatattattgctccttcagacatgatggatggccgcatcggagttattagaaaaaaattagatgaaaataactttgaagacaaaataattttgtcatatgcggcaaaatataattcaaaattctatggacccttcagagatgctgttaactctaaaaataatctaggtacttctgataaatcttcttatcagatgaatccagcaaattcacttgaagcccttaacgaggttgctatggatattgaagagggtgctgatatcgtaatggtaaaaccaggtatgccttatttagatattatttctaaaattaaagaagaatttaaggttccaacttttgcatatcaagtaagcggagagtatgcaatgataatggaatcagttaataaaggatggcttgataaaggtgttataatagaatctttaacaagcttcaaaagagctggtgcagatgcagttcttacatatttcgctaaagatttaataaaggaatttaatttatgag

SEQ ID NO: 282146 - DNA, 997 bp, Unknown
  Bacterial polypeptide expressing nucleotide sequence isolated from the Sargasso Sea
catgaacgtatccagaaaataccctcaatcaagattaaggcgaacaagatttacttcttcaattaggagtttagttgcagagaacaccctcagtgtggacgaccttatacagcctatatttgtaaaggaagacttagatggaacggaaagtatagattccctaccagggattaacaggtatggtcttaacgctttagatgaagaaattgaaaaaatacaaagcaataagatcaaggctgttgctatttttccggtcataaatcctgataaaaaggatgagcaaggaagtgactcattaaatgaagataatttagtttgtactgctataaaacaaattaagaaaaattctgagctagccgtaatagcagatgttgctttagatccctacacgtctcatgggcatgacggcgttttggatgaaaatggatatgtcgaaaatgacagaagtctttctctacttgtaaaacaagcacttacccttgcaaaagctggggcagatatggtggctccatcagacatgatggacggaagaatagcaggtatcagagagtccttagaatccaatgattttgtaaataccatcattctttcttatgccgctaaatatagttcaaaattttatggcccttttagggatgctgtaggatcatccgcaaatcttggagtaggaagtaaagatacctaccaaatgtctgtggcaaatgtagaagaagctctgcatgaagtgaaaatggatattgaagaaggtgccgatatagttatggttaaacctggaatgccttatcttgatgttattaaagcagttaaagatacatttagagtccctacttttgcatatcaggtaagtggtgaatatgccatgttgaaagcagcaatagaaaatggatggttatcagaagaagttttacaggaatccttgttaagcttcaaaagagccggtgcagattgtgttttgacctatgctgccaatgaaatagccttaaagttaaatcgatag

SEQ ID NO: 282147 - DNA, 1000 bp, Unknown
  Bacterial polypeptide expressing nucleotide sequence isolated from the Sargasso Sea
atgaagattttagggaaatttccatcaacaagattgagaagggttcgcagttcagattgggtaagaagattaatctctgaaaataatcttacttctgatgatttaattttaccgatttttttaactgagggtaaaaacaagattgaagtaattaaaactatgcctggtatttatagatatacagtagacaacattccaagaattttagataaggcatcaaaatataaaattccaatggtatctttatttcctcaaacaccgtataaaaaaaaagatttaagcggttcagaagcacttaatgaaaataatttggtttgtaggggcatcagagaaattaaaaaaagatataaaggtatgggagtgatgagtgatgtggctttggatccttatacatctcacgggcatgatggccttttaattaatggtaaaattcataatgataaaactctagaggttttagttcaacaatcattattacaagccgaaatgggatgtgatgtgattgctccatcagatatgatggacggaagaataggtttaattaggaaatctttggataaaaaaggcttcaaagatacaaaaatattatcatatgcggtaaaatatgcttcaaatttttatggaccgtttagagatgctgttggttctaaaaatttactcaaaggagataaaaaaacttatcaaatggactataaaaataaagacgaatgcataagagaggtaggattggatataaaagaaggagcagatttcgttttgataaaacctggaatgccttacttagatataatttcattaataaaacaaacttttaaaataccagtattttcatatcaagtatcaggtgaatattccatgataatgaatggcattaaaaataaaattttaaatgaaaacacaatactagaaagtctaatatctttaaaaagagctggatcaaatgcaattataacttattttgctttagaagctttaaaaaaaataaataatattaaataaa

SEQ ID NO: 282148 - DNA, 973 bp, Unknown
  Bacterial polypeptide expressing nucleotide sequence isolated from the Sargasso Sea
atgtttattcgtggtagaagattaaggcagaatcaaaatataaggaatcttgtagaagaaacaagtatctctgttaatgatttaataatgccaatttttttaatagagggtaaaaataagtctgaaaaaatagactcaatgcctgagatttacaggaaaacccttgataaacaattagaagacatcaagtctgcagccaaattaggaataaatgcgataataatattccctgctattaaagaaaaattaaaagacccctttggtaaggaagcgctaaacaaaaaaggcttagtgccgaaagcaataaaggctattaaaaaagcatttcccaaaatgcttataattaccgatgttgcacttgatccgtataactcagatggacatgatgggattcttaaagatggtgaaatattaaatgataaaactgttgaaattctatgcagacaagcttgtatacatgctgagtttggagctgacattgtagctccatcagatatgatggatggtcgtgtagtcaaaataagagaagcattagatagaaaaggttttcataatactgcaataatgtcatatgcggcaaaatttgcctcatcactttatggaccttttagagaagctttaaattcagaaccaaaaagtggtgataaaaaatcatatcaaataaacccaaaaaattaccgtgaagctataaaagagatactcttggacgaggctgaaggtgcagatctattaatagttaaacccgcttctttctatcttgatgttataagaacatcttcagaggcctcagttcttccaatagttgcatatcaggttagcggtgagtattcgatgattaaggcagctgctaagaatggctacattgataatgattctgtaatgaaagaatcactagaatcaatgaaacgtgctggcgcaactataattattacatacttcgctcttgaaatggcaaaactgctaaaaaaataaa

SEQ ID NO: 282149 - DNA, 997 bp, Unknown
  Bacterial polypeptide expressing nucleotide sequence isolated from the Sargasso Sea
aatgaaaatagaaagatcatatccagatacaaggatgcgtagaattaggaaaagttctgccttgagagaaatgcttgcggaaacaacattatcaaaagcagatcttatacagcctatatttataaaagaagatttggagggcagagaagccattaaatcaatgcctggaataaatcgtttaggtcttgatattttgaatgacgaaataaagaaaattatagatttaggtataaaatcagtagcagtttttccagtcatcaatgaagaaaaaaaagatgaaataggctctcaagcaacaatcgaaaataattttatttgcgaggctatatctgcaataaagaaaaactatcctgatttggtggttatagcagatgtagcattagatccttacactgatcatgggcatgatggattactaaatgacactggtgatgtggataatgatttaacacttccagctttaagggaacaggcacttgtcttagctaaggcaggaacagatataattgctccttcagatatgatggatggaagaattaaaataattagagatgcactagaacaaaatgattttataaatacacttatacttgcttattcagcaaagtttagttcaaaattttatggaccttttaaagatgcagtagaatcagcaaaattttttggtaacaaaactaaagatacatatcaaatgcccgtccagaatataaatgaagcattacatgaagtagctttggatattcaagaaggagctgacattgtaatggttaaacctggtatgccttatttagatgtaattaaagctgttaaagacgaatttaaggttccaacttttgcttatcaagtaagtggtgagtactcaatgctaaaaaatgctgtggaaactgggctcttaagtgatgatgttattaaagagtccctcttatctttcaaaagagcaggagcagattgtatcttaacctactttgcttcagaaattgctaaagacttatcctaa

SEQ ID NO: 282150 - DNA, 712 bp, Unknown
  Bacterial polypeptide expressing nucleotide sequence isolated from the Sargasso Sea
atggcccaatctggactagaccttttcccatatactcgtatgcgcagaatgcgccgcgatgacttttctcgtcgtctaatggccgaaaaccaacttagtgtaaatgaccttatttaccctgtttttgtactagaaggtaagaatcgccgagaagtcatcgaatcaatgcctggaattgaacgtttatcgattgattttttgcttgaagaagcaaaagagcttgtagatataggtgtacctgccgtggctatttttccggtaactcctggtgacaaaaaatcactgatggctgaagaagccttcaatgaagatggcttagcacaacgtactgtgcgcgctttaaaagaagcttttcctgagcttggggttattaccgatgtagcccttgacccatttactactcacggtcaagacggcattattgatgataaaggttatgtaattaatgatataaccactgaaattcttgttaagcaggcgctttcgcacgccgaggcaggcgcagatgtagttgcgccatctgacatgatggatggtcgtattggcgctattcgcgaagcacttgaagcagatggccatattcatacacgtattatggcttactcagctaaatatgcgtctagctactacgggccttttagagatgctgtaggctctgcaggtaacttaaaaggggccgataagaaaacctatcaaatggatcctgccaact

SEQ ID NO: 282151 - DNA, 1015 bp, Unknown
  Bacterial polypeptide expressing nucleotide sequence isolated from the Sargasso Sea
atgtctaatttttctttcagccgaagcttccccaagacccgcatgcggcgtatgcgcaaagatgagttcagccgcgaactcgtgaaagaaactcgacttagtgtaaaagatttgatttatccagtgttcatagtcgatggacaagataaacgccaaccagttgaatctatgccctcgatatatcgcttgagtatcgataatctgattgaagaggcgtcagagttaacggaacttggaatcccggccatagccctattcccggtggttgaagataacaaaaagtcgcaaaatggagaggagtcatacaatcaagacggcttaatccaaaacgcaatacagcagcttaagcgaagcttccccacgttaggagtcatttcagacgtagctcttgatccttataccacccatggacaagatgggataatcgatgagtcagggtacgtattgaatgaaaaaacggtggaagtccttgtcaagcaggcgatatcccatgctgtagcgggagccgatatagtcgccccatctgacatgatggacggacgtgttagggcaattcgcgatgcctttgaagagaaaaaactaattcacacgcgaattcttgcatattctgccaaatatgcttcaaattattatggccccttcagagacgctgtcggttcgggcaaaagtcttggtgggtcagaaaagcatagctaccaaatggacttctcaaatagtgacgaagcactccaagaagttgctttagacttggccgaaggcgcagacttagtaatggtgaaacctggcatgccatatttggatatcgtgcatcgcgtaaaagcggaatttcgcgtcccgacatttgtttatcaagttagtggagagtatgcgatgcacatggctgccattgaaaatggatggttgaaggaagacgaggtagtgttagagtctctaatgtgtattaagcgtgcaggcgcagatgccatcctaacttactttgccaagaaagctgccagattgatccaaggttcctaga

SEQ ID NO: 282152 - DNA, 991 bp, Unknown
  Bacterial polypeptide expressing nucleotide sequence isolated from the Sargasso Sea
atgattattggtaaatatcctagtcttagactcagaagaagcagaaaagatccttggtcaagaagattgattcaagaaaataccttaagtccaaatgactttatactccctatttttttaattgaagggtcaaataaacgacaagaaatttcatcaatgcctggcgtttacaggtatacaattaatcgattgagccaagttgtggataaagcaataaaattaggaataccaatgatagctcttttcccaaagacacaaaactcaaaaaaagatgaattgggaacagaatcactgaatgaaaataatttagtctgtaaagcgatacaagaaatcaaaaaaagatacaaaaacaaaatcggtataatgtgtgatgttgctttagatccttatacatcacatggtcatgatggtttgatcaaatctaacaatatattaaatgacgaaacaattgaggttttgatcaatcagtcattactacaagctgagatgggttgtgatgtactggctccttcagacatgatggatggcagaataggaaaaataagaaaagctttagataaaaataaattccaaaacgttcaaatattatcgtacgctgcaaaatatgcttcaagcttttatggaccttttagagatgcagtcggatctaaaggttctttaaaaggtgacaaaaaaacttatcagatggattatagaaattctaatgaagctttaagagaagttgcgttagatattaaagaaggtgccgatatggtaatggttaaaccaggtatgccctacttagacataataaagtcaataaaagaaaaatttaaattgcctgtatttgcctatcaagtatcaggagaatacagcttaattcaaacagctataacgaaaaaaataattaataaagatgctgtatatgaaagcttagttgcttttaagagagctggtgccaatgctatagtaagttattacgctgatagaattgataaaataataaaataat

SEQ ID NO: 282153 - DNA, 862 bp, Unknown
  Bacterial polypeptide expressing nucleotide sequence isolated from the Sargasso Sea
gatggaaggaaaaaataaaaaagaaacaataaaatctatgccaaatgtattcaggtatagtgtagacaaactgaatatagctgtaggtaaagcaattaaaaaaggaatacctatggttgctttatttccatacataagcaaaacaaaaaaagatgaaaatggttctgaagcattaaatccagataatttagtttgtagagggataaaatttattaaaaaaaaatttaagaataaaattggtattatgtgcgatgtggccctagatccttacacttctcatggccatgatggattattaaagaaaaataatattctaaatgataaaactatagaaatacttaccaaacaagcggtgctgcaagccaaaatgggatgtgatgttattgcaccctcagatatgatggatggcagaattggtaaaattcgatcagcattagataaaaataatttaaatgacgtgcaaatattatcatatgcagttaaattttcatctagcttttatggaccatttagagatgctgttggatcaaaaaaattactaaaaggtgataaaaaaacataccaaatggattttagaaattcagatgaatctttgagagaagtttcattagatataaaagaaggtgctgatatggtcatggttaaacctggtatgccctatcttgatataataaaaaaagtaaaagataatttcaaaataccagtatttgcatatcaagtttcaggtgaatacagtttgataatgaatggaattaataaaaaattaatagataaagcctcaataaaagagtctcttatttcgtttaaaagagctggagcaaatggtattgtaacttattttgccgatcaaattgatctttaa

SEQ ID NO: 282154 - DNA, 416 bp, Unknown
  Bacterial polypeptide expressing nucleotide sequence isolated from the Sargasso Sea
gagcatcatgtcttataccgctaaatatgccagtgctttttacgggccatttagagacgctctaagctctgcacctaagcatggagataaaaagacctatcaaatgaaccccgctaacaaaagagaggcgcttttagaggcacaactcgattttgaggagggagcagacatgatcatggtaaaacctgcgctttgctacttggatgtgattcaaacactaagagaaagcatgcctattcctattacggcctacaatgtgagtggcgaatgcgccatgattcatgccgcttctcaaaatggttggattgattacgaacctgctgtagcagagttattacttagcattcgaagagctggagcggatggaatcctcacctattttgctaaagattttgcgaaatttagcaaaggctgat

SEQ ID NO: 282155 - DNA, 946 bp, Unknown
  Bacterial polypeptide expressing nucleotide sequence isolated from the Sargasso Sea
agattttctcgtcgtttagttgctgaaaatacacttagtgttaatgatttaatcttgcctctatttgtatgcgagggaaacaaggttgatgatcctattaattcgatgcctggtgtaagcagatactctattgataaacttttaagtgaagtagaaaaagctgttaaatttaatattcctgctattgcaatttttccgcaaattgaaagtggccttaaaaattctgagggaagtttagctgtagatgaaaacaatttggtatgcagatcaattaaaagtatcaaaaaagattttccaaatattggtattgtatgtgatgttgcgttagatccttttacggaccatgggcatgatggtttagttataaatgataaaatagataatgataaaactttggaggttttggaacaacaggctctagtccaagcgaatgctggttgtgatgtaatcgccccgtcggatatgatggatggaagagtgggaagaataagaactgcattagattcaaacaatttagcagatacccttattctctcttatgctgcaaaatatgcttcgggtttttatggaccttttagagatgctataggttctggttctaatttgggtaaagatggtaaattaacatatcaaatggatccatcaaacagtgatgaagctataagagaagttggattagatataagtgaaggtgcagatatggtaatggttaaacctggtatgccttatcttgatattatttctagaataaaatcagaatttaaagttccaacttttgcctaccaagtatctggtgaatattcgatgataaaagagtcaattaataaaggttggcttaatgaaaaagttataatggaatctcttttatcttttaaaagagctggggcaaatggtatactgacttactttgcattagaagctgctgaaaaattaaaaaatgaataac

SEQ ID NO: 282156 - DNA, 814 bp, Unknown
  Bacterial polypeptide expressing nucleotide sequence isolated from the Sargasso Sea
atggatttagttttccgtcctagaagacttcgacgaaatggtcccattcgaggactggttcgggagacagaacttgctcccagacaattgatttatccaatcttcgttgcagaaggaaatcgtgtaagggaggaaatcaagaccatgccggggcaattccgtttgtcagttgatgaagttgttcgcgaatgcgaagtcctttatgaactgggcatcggagcggtcaacctctttggatattccgaggaaaaagacgaactggcaaccaaatcctatgactcttcaggtttagttcaaaggtgtatccgagaaattaaaaaaaagatccccgatttatgtgtccaaacggatgtcgcactggacccctatacaacccatggccatgacggtctcgtcatcgacggagagattgttaatgatgaaaccgttggagtactttgtaagatggcgctttctcatgctgaagccggggcagactggattgccccttcggacatgatggatggtagagttggagccatcagggatgcgcttgatgagcagggtttacatcatgtgggcattcttgcctattccgccaaatatgcttcctgtttctacgggcctttcaggggagctctaaaatccaccccgaaaaaaggggataagaagacctatcagatggacccggccaactcacgtgaagccctcagggaagtttctttggatctcgatgaaggtgccgatgttgtgatggttaaaccggcattggcttatctggatgttattgccagagtgagaagcgaatttgatgctcccagtggcggcttataat

SEQ ID NO: 282157 - DNA, 1006 bp, Unknown
  Bacterial polypeptide expressing nucleotide sequence isolated from the Sargasso Sea
tatgtcaaatattaaagtaggacaatttccatcaacgcgattaagaagacttcgcatgaaagatttttcacgaagaatgattagtgaaaataatttatcagtaaatgatcttatatggcctatctttgtgtgcgagggcaacaatattgctgatgaaataaaatcaatgccaggtgtttttagatattcaattgataatatcttaaaggaattagaaaatgttatgaacttaaaaatacctgctgttgcattatttcctcaaattgataattcactaaaagatgaaaatggatcccaagcagttgatgaaaataatttaatttgcagaaccataaaagctattaaacaaaactttccttatcttggtgttatttgtgatgttgcacttgatccatatacgaaccatgggcatgatggcattattgttgataacattattcataatgatgcgacgctagacatcttggagcagcaggcacttattcaagctattgcaggttgtgatattattgctccgtctgatatgatggatggaagggtcggcagaattagaaatgctttggataaaaataaatatgaaaatactttgatcctttcatatgcagcaaaatatgcatcgaaattttatggaccttttcgagatgctattagttcctcaggtaatttaaaagggggaagcaaatcttcctatcagatggatatttcaaatagtaatgaagctttaagagaagttgcgatggacatcaacgagggcgctgatatggttatggttaaaccaggaatgccttatctcgatattattcagcgtattaaatcagaatttcaaattccaacatttgcctatcaggtgtcaggagaatattcgatgattaaaggtgctgttaataatggttggctggattcaaaagttatcaaagaatctcttttgtcatttaaaagagctggtgcagatggtattttaacttattttgctagagagattgcaaaggaattacaaaatgactga

SEQ ID NO: 282158 - DNA, 451 bp, Unknown
  Bacterial polypeptide expressing nucleotide sequence isolated from the Sargasso Sea
agtaattcgtaaggctttagataaaaatggttttaaaaatgttcaactactatcttatgcagttaaatacgcttcaaatttttatggaccttttagggacgctgtaggaacaaaaaatttgcttaaaggtgataagaaatcttatcaaatggattttagaaattctaatgaagctataagagaagtggcattagacattaaagaaggtgcagatatggttattgtaaaacctggtttgccatacctagatattattaaaaaaataaaaaataaatttaaaattccagtggttgcttaccaagtttcaggtgaatacagtatgataacaagctctgtacaaaaaaaaataataaataaggatgctattctagaaacccttttaagttttaaaaggtcaggagctaacgcaataattacttactttgcaatccaagttgctaaagaactataa

SEQ ID NO: 282159 - DNA, 1006 bp, Unknown
  Bacterial polypeptide expressing nucleotide sequence isolated from the Sargasso Sea
atgtcagattttaatatagggcaatatccaactacgcgactaagaagacttcgtatgaaagacttttcgagaagaatgattagtgaaaataatctttctgttaatgatttaatttggcccatatttgtttgtgaaggaaataatattgctgacaaagtaaattctatgccaggcgtctctagatattctattgataatatcttaaaagaattagaaactgttattaaattaaaaatacctgctattgctttattccctcaaatagatagcgccttaaaagataaagatggctctcaagcaatagatgaaaataatctaatttgccgaacaataatatctattaaaaaaaattttcctgaccttggtattatttgtgatgttgcactagatccttttactgatcatggacacgatggactaattgttaatgatattgttgataatgatgcaacattaaaagttttagaaaaacaagcactggttcaagctaatgcaggatgtgatattattgccccatcagatatgatggatggcagggttggaataataagaaaagcccttgatgaaaataattttcaaaacactttaatactctcttatgctgctaagtatgcttcaaaattttatgggccgtttagagatgcaataagttcttctggaaatttaaaaagtggaagtaaatcttcataccaaatgaatatagcaaatagcaatgaggctctaagagaagttgctctagatattaaggaaggtgctgatatggtaatggttaaaccaggaatgccttatcttgatattattcaaagaataaaatcagattttaatattcctacttttgcttatcaagtatcaggtgagtacagtatgatcaaaggagcaatagataataattggctagattcaaaagtgataaaagagtctcttttgtcatttaaaagagctggtgctgatggtattttaacttattttgcaaaagagattgctgaggaattaagtaatgagtgat

SEQ ID NO: 282160 - DNA, 859 bp, Unknown
  Bacterial polypeptide expressing nucleotide sequence isolated from the Sargasso Sea
aaaaaaagaaattatttcaatgccagattattttcaactaagcataaataatgctgaaaaagaggtcaaagagttatgggatataggtataaaagctattttactttttgttaaaattgaagataatttaaaagataataagggctctgaggcaataaataataatggactaatgcaaagggcgattaaatctatcaaaaataaagtgccggagatgttagttataactgatgttgctcttgacccttattcatgctttggacatgacggtattgtagaaaactttgaagttttaaatgatcctactttagaagttttatctaaaatgtctgtttctcatgccaactctggggccgactttgtagctccaagtgatatgatggatggtagagttttaagaatccgtcaggccctagagaaagaagggttttttaataccgggattatgagttatggagttaaatatgcatcatctttatatggtccatttagaaatgctctagattcaaatccaggttttggtgacaaaaaaacataccaaattgactattctaattcaaaacaggctttaaacgaagtaaataaagatatcgaagagggagctgatataataatggtgaaaccaggtatgccatacatcgatattttgaattctttatataaaaaaattgatgtcccactagcagtatatcaagtcagtggtgaatattcaatgctaaaatctgcagcatctaaaggttttttagattatgataaagtagttttagagcagctattttcatttaagcgagcaggagctgcaatgatagcaacatatcatgcaaaggaagctgtcaaactgctaaaccaaattctatga

SEQ ID NO: 282161 - DNA, 1000 bp, Unknown
  Bacterial polypeptide expressing nucleotide sequence isolated from the Sargasso Sea
atgactataaatagaaagtttccaaatacaaggttaagaagattaagaagaaattcaaatttaattgatttagtagcagagaccaatttaagttctcaagacttaattcaaccaatatttataaaagaaaacttcaatggaattgaatcaattgaaagtatgccagggattaatagatttggtatcgatgaagtattaaaagaaatagaagaggttattgaatctggcataaatactatcgcagtctttcctgtagttgaatcagataagaaagatagtaaaggtagcgaagcaactaaagaagataattttatatcttcagctataaaaactataaagaagaattttcctgagattatattaatagcagatgtggcattagatccttataccgatcatggtcatgatgggattcttattaatgatgaaattgataatgatgcgacaattaaagttctcatagagcaatctttaatattagctgaagctggtgcagatattattgctccttcagatatgatggatggaagaattggatcaatcagacaatctctagaagattctaattttaagaatacaattttattatcatatgcggccaagtataactcaaagttttatgggccttttagagatgcagtaaattcagcttctaatcttggtaaagcaaccaaatcttcttatcaaatgtctatccacaataaagatgaagctattcatgaagtagctatagatattaatgaaggagctgatattgttatggttaaaccagcaatgccatatctagatattattcatcttattaaagagaaatttaaaatacctacttttgcatatcaggtaagtggagaatacagtatgttaaaacttgccattaaagaaggatggcttgatcaaaaggttatgctagaatcattggttagtattaaaagagcaggttcggacgcgattctgacatatgctgcaaaagaaatatcaaaggagatgcaaaataaatgag

SEQ ID NO: 282162 - DNA, 716 bp, Unknown
  Bacterial polypeptide expressing nucleotide sequence isolated from the Sargasso Sea
aatgcgcagaaatagaatgaaagctttttccagaagaatgatatctgaaacccatctaaatacaaataatcttatacagccattatttgtcactgaaggaaagtatgaaaatacttatatagaatcaatgcctggaattaaaagacattcaattaaatcagttgtaaaagaagctatggaaatttacaaattaggaatacctgcgattgcaatatttccttatataccaaataatttgaaagatgaaaatggtactgaaagcttaaataaaaacaatattatttgcaaagctattaaagaaattaaaaattcttgtcctgaaatagggataatttgtgatgtcgcacttgatccatacacaaaccatggacacgacggtattattattaataacgaaattaataatgataaaacaattgaaattttatgtaaacaagctgtgattcaagcagaggcaggatgtgatatcatagctccaagtgatatgatggatggcagagtcaaatcaatcaggtctgctttagataaaaaaaatctaattaatacctctatattgtcttactctgcaaaatatgcttcttctttttatggaccttttagagatgcattaggaactaaaattaatagtgaccatgtatttgacaagcaatcttatcaaatggacccagctaattctagagaagcattaagagaaattgaattagatataaatgaag

SEQ ID NO: 282163 - DNA, 1000 bp, Unknown
  Bacterial polypeptide expressing nucleotide sequence isolated from the Sargasso Sea
aatgagcagtaccagagaaaatacccttaaacccctgcgccgtttaagacgcctacgccgcaccgaagcgatgcgtgacctagtgcgtgaaacccagattaccctaagcgacttagtccacccactctttattgaagagcacatcagccaagccgtgcccatttcaaccttgccggggatcagtcgtctgcccgagagtgcgcttgccgatgagatccaaaggctttacgcattagggatccgctatgtgatgccctttggaatatcccacaccaaagatgcacagggcagcgacacttgggatgacaatggcttactcgcacggatgatccgcaccatcaaagccgccgcgccagagatgatggtgatccccgatatttgtttttgtgaatataccgaccacggacactgcggcgtattgcaccatgacgaagtctgtaacgatcaaaccgtggctaacttagttaaacaatccattaccgccgccaaagcgggagccgatatgctggcgccatcggccatgatggacggccagattaaagccattcgccaagggctggatgaggcaggctttgagcacattgccattttggcccatgctgccaagttcgcctcatccttctatgggccttttagggccgcggtggattgcgaactaagcggaaaccgtaaaggctaccaactcgattacgccaatggtcgccaagccttgctcgaagcgctgctcgatgaagaggaaggcgcggatatattgatggtgaaacccggcacgccctatttggatgtgttaagtcgactaagacaggaaacccaccttcccttagcggcttatcaagtcggcggcgaatatgccggcattaagtttgccgcactggcgggcgccctcgatgagcgcgccgtcgtcaccgaaacctttatcgggttaaagcgtgccggcgccgatttaattgtcagttattacgcgaaacaatatgccgaatggttagcgcaatcccgctaa

SEQ ID NO: 282164 - DNA, 991 bp, Unknown
  Bacterial polypeptide expressing nucleotide sequence isolated from the Sargasso Sea
atggatttagttttccgtcctagaagacttcgacgaaatggtcccattcgaggactggttcgggagacagaacttgctcccagacaattgatttatccaatcttcgttgcagaagggaatcgtgtgagggaagaaatccagaccatgcctgggcaattacgtttgtcagttgatgaagttgttcgcgaatgcgaagtcctttatgaacttggcatcggagcagtcaacctttttggatattccgaggaaaaagacgaactggcgaccaaatcatatgactctactggtttagttcaaaggtctatccgagaaattaaaaaaaaaatccccgatttatgtatccaaacggatgtcgcacttgacccctatactatccatggccatgacggtctcgttatcgacggagagattgtcaatgatgaaaccgttggagtactttgtaagatggcgctttctcatgctgaagccggggcagactggattgccccttcagacatgatggatggcagagttggagccatcagggatgcgcttgatgagcagggtttaaatcatgtggggattcttgcctattctgccaaatatgcatcatgcttctatgggcctttcaggggagccctcaaatccgctccgaaaaaaggagataagaagacctaccagatggacccaaccaactcccgtgaagctctgagggaagtatctcttgatctggacgaaggcgccgatgttgtgatggttaaaccggcgttggcttatctggatgtaattgccagagtgagaagggagtttgatgttccagtggcggcctataatgtttccggagaatatgccatggtcattgctgcagcagaaaaagggtgggttgaccgggatatggccatgatggaaatgcttcattcaatcagaagggcaggtgcagatatgatccttacctactttgcaaaagatgcggcaaaacgattaaagtctgattacggatctttcagttgat

SEQ ID NO: 282165 - DNA, 1003 bp, Unknown
  Bacterial polypeptide expressing nucleotide sequence isolated from the Sargasso Sea
atggagctcacctaccgcccccgtcgtttacgccggaccccggccctgcgcgccatggtgcgggagcaccagttgtccgcagcggatttcatctatccactgtttgtccatgagggggccgacgtcgaacccatcggtgccatgccaggtgcgagtcggtggagtctggcggccctgaccggagaagttcagcgcgcctggaacctgggggtccgctgcatcgttctgttccccaaggttgccgaggggctgaaaactgaagacggcgctgagtgcttcaacgccaatggcctgattcccagagccattcgtcagatcaagcaggaggtgcctgggatggcgatcatgactgacgtggcactcgatccctattcctgcgacggccacgatggcatcgtcagcgcagcgggggtcgtcctcaacgacgagacgatcgaattgctctgtaaacaggctgtggttcaagccgaagccggtgccgatctgatcggccccagcgacatgatggacggacgtgtcggggccattcgtgaggccttggacgacgaaggctttgagcacgtcggaatcatcagctacaccgcgaagtactcctctgcctattacgggccattccgtgaggccctggattcagccccccgtgctgccggcagcaagccgattccaaccaacaaggacacatatcagatggaccccgccaatgcccgggaagccatcacggaagcccagctggatgagcaggaaggcgcagatatcatgatggtgaagccgggtttggcctacctggacatcattcaccgactgcgcaatgagtcggagctgcccattgctgcttacaacgtcagcggtgagtattcgatggtgaaggccgccgccgaacgcggttggatcgatgagcgtgctgtggttctcgaaaccctgctcagcttcaagcgggccggtgcggatctgatcctcacgtatcacgcctgtgatgccgcggaatggctgcgtcagggctgag

SEQ ID NO: 282166 - DNA, 997 bp, Unknown
  Bacterial polypeptide expressing nucleotide sequence isolated from the Sargasso Sea
aatgaaatttaatagatcatatccagactcaagaatgcgcagaataagaaaaagttctggtttaagagatatgctcgcggaaacaacattatcaaaatcagatcttatccagcctatttttataaaagagagtttaaagggaactgaagagattaaatcaatgcctggcattaatcgcttaggactagatatattagatggtgaaattgaaaaaattatagatttaggaataaagtctattgctgtttttccagtaattgatgaagataaaaaagatgaaattggttcacaagcaactgaagaaaataattttatttgccaggccatatcttcaatcaaaaaaaacttccctgatttagttgtgatagctgatgttgctctcgacccatacactgaccatggtcatgatggtttgttggacgcttctggagatgtagataatgatttaactcttccagctttaagagatcaagcacttgtattagcaaaagctggaacagatattattgctccttccgacatgatggatggaagaattaaaataattagagatgcactggagcaaaatgattttatcaacactttattactagcttattcagcaaaatttagttcaaagttttatgggccgttcaaagacgcggtagagtcagcaaagttctttggaaataaaacaaaggatacctatcaaatgcccattcaaaatattaatgaagccctgcatgaagttgctttagatattcaagaaggagcagacattgttatggttaaacctggaatgccataccttgatgtcattaaagctgttaaggatgaattcaagatgccaacatttgcttatcaagtaagcggtgaatactctatgattaaaacttctatcgagactggtttgctaagtaatgatgttatcaaggaatctcttttatcatttaaaagagctggagcagattgtatcttaacttattttgcctcagaaatagctagagatttatcttaa

SEQ ID NO: 282167 - DNA, 786 bp, Unknown
  Bacterial polypeptide expressing nucleotide sequence isolated from the Sargasso Sea
tgtgtggttcttttcccaaaattaacgatagtttaaagactgaagatggagcagaatgttttaatgaagagggtttaattcctaaagctattcaaatactaaaaaaagagattccagaaatggcaataatgacagatgttgccttggacccatactcttgtgatggtcatgatggattagttgatgaaactggaaaaatattgaacgacgaaacaatcgaaattttaaaaaaacaagctttaacacaagcaagagctggagcagattttatcggccctagtgacatgatggatgggagagttggagcgatcagagctgctcttgatagtcaaggatttagtgatgtaggtattattagttacactgcaaaatattcatctgcttattatggtccatttagaactgctttagattcggctcctagagaaaatagtaagaaaataattccagacaataagtcaacatatcaaatggaccctgccaattcaaaagaggctttaactgaatctgcattggatcagtatgaaggagctgatattttgatggtaaaaccaggaatttcatacttggatattgtttatagattaagcactttttcaaataaacctatagcagcatacaacgttagtggggaatattcaatggtaaagtctgctgctatgaagaactggattaacgaaaaagatattgttttagaaacattgcttagttttaaaagagcaggagcaaaattaatacttacttatcatgcttgtgatgcatctcaatggttgcaggataattaaa

SEQ ID NO: 282168 - DNA, 997 bp, Unknown
  Bacterial polypeptide expressing nucleotide sequence isolated from the Sargasso Sea
aatgattatcacaggtaaatacccaaatttaagacttagacgatcaagaaaatttagttggtctagaagactagttcaagaaaataatctttctgttaatgaccttatattaccaatatttttaacagaaggaaaaaataaaaagattccaattaggtctatgcctggtgtttttagatacagcataaataacttaggttttattgtggataaagctattaaaagaaaaataccaatgattgctctgtttccatatacgaatcaaaaattaaaagattcttttggttcagaatctttaaatgaaaataacttagtttgccaggcaattaagtatgtaaaaaagaagtataaaaataaaattggaattatgtgtgatgttgcattggatccttatactacgcatggtcatgacggattactaaaaaaaaatgaaattgtaaatgatgaaactgtagaaatattggtaaaacaagctttgttacaagcaaaaatgggatgtgatgtaatagctccttctgacatgatggatggaagaataaaaaaaattaggcaaaaactagataaagaaaatttacaagatgttcaaattctttcatatgcagtaaaatttgcatcaaatttttatggtccttttagagatgcagttggttctaaaggtgcacttaaaggtgataaaaaaacttatcaaatggattttagaaactttcatgaatctttaagagaagtttcaacagatattaaagaaggtgcagatatgataattgtcaaacctgggatgccttatctagatataataagaagtataaaagataaatttaaaataccagtaattgcataccaagtatccggtgaatacagtttgattaaaaatggaataaataaaaatataattgacgaaaaatctataatagaatcattgtattcatttaaaagagctggtgccaacgctataataacttattttgcagactcaataaatttagatttgcttgattaa

SEQ ID NO: 282169 - DNA, 991 bp, Unknown
  Bacterial polypeptide expressing nucleotide sequence isolated from the Sargasso Sea
aatgattatcactggaaaatatccaaatttaagacttagaagaaaccgtaaagctgattggtgtagaagattagtccaagaaaatactctttcagtaaatgatcttattcttcctatatttattattgatggaaaaaataaaagagaatctattaaaacaatgcctggagtctacagatacagtatagacaaaattcccatgattctcgatggagctgttaaaaataaaataccaatggttgcactgttcccttttactaattctaaatttaaaaataattcaggtacggaagctcttaatgaaaacaatttagtttgcaaagctataagattaattaaaaaaaaatatgaaaataaaattggtattatgtgtgatgttgctcttgatccttatacttcacatggacacgacggtatactaaaaaaaggaaaaattttaaatgataaaactgtagatattttagttaaacaatcaatacttcaagcaataatgggctgtgatgttatagctccttcggatatgatggatggaagagttggaaaaattagaaatgcattagatgaaaataatttacaaaatgttcaaatattatcttatgctgcaaagtatgcatctagtttttacggtccttttagagatgcagtaggatcaaaaaaaaatttaaagggaaacaaaaaaacctatcaaatggacttcaaaaatagtgatgaagcaataagagaaatttctttagatattaaagaaggtgctgatatggtcatggtaaaaccaggaatgccatatttagacataataaaacttattaaacaaaattttaaaattccagtaattgcatatcaagtttctggtgagtatagtttaatttctaatggaataaaaaaaggaatgatagacgaaaaatctattgtcgagtcgctttattcatttaagagagcgggatcaaatgcaattgttacttattttgctgacagaatagcaaaaattttataa

SEQ ID NO: 282170 - DNA, 994 bp, Unknown
  Bacterial polypeptide expressing nucleotide sequence isolated from the Sargasso Sea
aatgaagatattaggtagttatcccagtgttagattgagaaggaatcgcaaatacaattggagcagaagattggttagtgaaaataacttgtcagttagtgatttaattcttccaatttttgtaacggatgggaaaaaaaagatcgaagctattaaaaccatgccgggtgtatttcgatattctatagatagattgagtggtattcttaaccaagctagtaaattaaaaattcctttagttgcaatttttccacatacaccaaatagtaaaaaagattcttctgggaatgaagctttaaatgaaaataatcttgtttgtagagcaattaagaaaattaaaaataattttaaagacattggggtaatggctgatgttgctttagatccctacacagatcatggtcatgatggaattttaaaaaataaggaaatacttaatgatgaaactatagaaattttaactaaacaagctctactgcaagctagaatgggatgtgatgttatagcaccttccgatatgatggatggtagagtcggggttattagaaaatctttagataagaataatttcaaaaatgttcagattttatcttatgcagctaaatattcgtctaatttttatggaccttttagggatgctattggatctaaaaaaaaattaagaggtaataaaaaaagttatcaaatggattataaaaattcaaatgaggcactaagggaaataggattagatataaaagaaggtgctgattttgtcatggttaaacctgggcttccttacttagacatcattaaatctgtaaaagagaattttaagattccagtatttgcatatcaagtctcaggggagtactcgatgataattaactcgataaaaaaaggaattatccatcaagattctgtatttgaaagtctaatgtgtttaaaaagagcaggtgcatcagcaattgtaacttattttgctttatcgattgctcaaaaattaaaaaattaa

SEQ ID NO: 282171 - DNA, 991 bp, Unknown
  Bacterial polypeptide expressing nucleotide sequence isolated from the Sargasso Sea
atgtttatagatagaaaatttccaaatacaagattgagaagactaagaaaaaattcaaaacttattgatttggtatcagaaactaatataagttctaatgatttaatacaaccaatatttataaaagaaaactttaaaggcattgagccaatcgagagcatgccaggaataaatagatttggtatcgaaagctcattaaaagaaatagaagagttaattcaattaggtataaatagtattgcagtttttcctgtaatcgaatcagcaaaaaaaaatagtgaaggcagtgaagcaattaataaggataatttcatatcatcagctattaaaactataaaaaagaattttccagaaattattttgatcgctgatgtggcattagatccttacaccgatcatgggcacgatggaattttaattaataacgaaatagaaaatgacttaacacttaaggttttaattgaacagtctctagttctagctgatgcaggtgctgatattattgctccttcagatatgatggatggtaggataggatacattagaaagtctttagaaaattcagaatttaaagatactatcatattgtcatatgctgcaaagtataactctaaattttatggaccttttcgagatgctgttgattcagcttccagtcttggtaaatcagataaatcttcttaccaaatgtctattaataataaagatgaagccttgcatgaagttgctatggatataaatgaaggagctgatattgttatggttaaaccagctatgccatatcttgacattatttatcttattaaaaaaacatttaaaataccaacttttgcatatcaagtaagcggagaatacagtatgttaaaatctgcaataaaagaaggatggcttgatgaaatggttatgctagaatcattggttagtattaagagagctggagcagatgcaattcttacatatgctgcaaaagaaatcgtaagggagatttaaa

SEQ ID NO: 282172 - DNA, 997 bp, Unknown
  Bacterial polypeptide expressing nucleotide sequence isolated from the Sargasso Sea
atgaaatattctagagaattcccttcaacgcgtttgaggagaaccagattaaatcagcctattagggatctggtggcggaaaataaactttcttccgatgacttaattcaacctatctttgttaaagaaggtctaagtggcacagaacctataaactcactgcctgggatttcaagattcggtctagattctctgactaaagaaattaaaacaattagctccttaggtataaatggggtagcagtttttccagttattgatccagcgaagaaagatgaaaacggaacggattctctaaatgagaacaatatagtttctcaagctataagacaaataaagtctgattctgatattgccataattgcagatgttgcccttgatccttatacgtcacatggccacgacggagtactcaatgacgatgggtatgtagataatgataagagcctacccattctggctgagcaagccttagttctagctaaggctggagcagatataatagcgccttcggatatgatggatggaagggttcgctttattcgagagacactagagaataattctttttttaacaccttaatactctcttatgctgccaaatatagctcaaaattttatgggcctttcagagatgcagtaggctcttcagccaacttaggagcaggaagtaaagatacttatcaaatgtctgtagcaaatatagaagaagctttgcatgaagttggactggatattcaggaaggtgctgatatggttatggttaagcccggaatgccatatttagacgtagttaaagctgttaaagatgaatttaaggttccaacttttgtttaccaagttagcggagaatatgcgatgcttaaagcagcaatacgaaatgaatggctttcagaagatgtcatgctggaagctttattgtgctttaaaagagcaggtgccgactgtgtattaacttatgcagctaaagatattgcaactaaaataaacagctaac

SEQ ID NO: 282173 - DNA, 964 bp, Unknown
  Bacterial polypeptide expressing nucleotide sequence isolated from the Sargasso Sea
atgaggcgcttgaggatgaaaccttttattcggaatctagtttctgagacatcgatatcatgcaatgatttaatatggccagtatttttggttgaagggacaaatgaatatcaagagattaagtcaatgccaaatgtataccgtttttcaattgataggctggtacaagaattagacgcgttggtaagtttgggcctgcaggcaatagccatattcccccaaatagaaaaagatttaaaagacgaaaatggaatcaattcttataatccaaataatttaatttgcagggcgattaaaacagtgaaagcttccttccctcaattaggtataattgctgatattgcattggatccctataccattcatggacatgatggtttaataagaggaaataaagtagcaaatgacgaatcaatagcagtattaaaaaaacaagccatagtgtatgcagaagctggatgtgacattttagctccttcagatatgatggatggaagagtgggtgctcttcgacgagagttagaggaaaataatatgcatgatatagtaatcatgtcctatgctgcaaagtacgcctcttcattctacggcccctttcgagatgcgattaaggctcaaaaattgagcggaatcaaagataaaaaaacataccaaatggattctgccaattctgatgaggcgatgcatgagattgctttggatatcaatgaaggaactgatatggtaattataaaaccaggaatgccgtatcttgatgtaatttacagatgcaaaaaagaattccaaattccaacatttgcttatcaagtttctggtgagtattcaatgattttatcagcagtaagtggagaaagtaaatacgatataattaaagaaagtatgtttagttttaaaagggcgggcgctgatggtattctatcatactttactccatttttcttagagtctttgaataaaagataat

SEQ ID NO: 282174 - DNA, 1003 bp, Unknown
  Bacterial polypeptide expressing nucleotide sequence isolated from the Sargasso Sea
atgaattcgattattcgtccaagaagattaagaaggactgaggcaattagagagatggtaagggaaaaccatttaatgccttcggactttatatatccattatttattcatgaaaaagattttaaagaagaaatttcggcaatgccaggaacttttagatgggatatgaatggcttaataaaggaggtcactagggcatgggaattgggaataagatgtattgttcttttcccaaaaataaacgatagcttaaagactgaagatggagcagagtgttttaacgaagacggtttaattcctaaagctattcgaatattaaaaaaagagattccagaaatggcaataatgacagatgttgccttagacccatactcgtgcgatggacatgatggattagttgatgaaactggaaaaatattgaatgatgaaacaattgaaattttaaaaaaacaagctttaacacaagctagagccggagcagattttattggccctagtgacatgatggatgggagagttggagcaattaggactgctcttgatagtcaaggatttagtgatgtaggtattattagttatacagcaaaatattcatctgcttattatggtccgtttagaactgctttagattcagctccaagagaaaatagtaagaaaataattccagataataagtctacatatcaaatggaccctgccaattcaaaagaggctttaattgaatctgcattagatcagtatgaaggagctgatattttgatggtaaaaccaggaatttcatatttggatattgtttatagactaagcactttttcaaataagcctatagctgcatacaacgttagtggggagtattcaatggtaaagtctgcagctatgaagaactggattaatgaaaaagatattgttttagaaacgttgcttagttttaaaagagcaggagcaaaattgatactcacttaccatgcttgtgatgcatctcaatggttgaaggatacttaaa

SEQ ID NO: 282175 - DNA, 505 bp, Unknown
  Bacterial polypeptide expressing nucleotide sequence isolated from the Sargasso Sea
gatgggttgtgatgtaatttcaccatcagatatgatggatggaagaataggagaaataagaaaaaatctagacaaaaataactttaaagatgttcaaattttatcttatgcagttaaatatgcatcaagtttctacggtccttttagaaatgcagttgggtcaaaaagcttacttaaaggtgataaaaaaacatatcaaatggattatagtaacaatttagaagcaataagagaagttgccttagacataaaagaaggcgcggacatggttatggtaaaacctggaatgccttatcttgatattatcagaacaattaaagaaaattttaaaattccagttttggcttatcaggtttctggcgaatatagtttaatttataatggaataaaaaaaagaataattgataaaaattcaattatagaaatattaactgggtttaagagagccggcgctaatgcagtagttacctattttgcaaatgaaatagcaaaagatctaaaataa

SEQ ID NO: 282176 - DNA, 892 bp, Unknown
  Bacterial polypeptide expressing nucleotide sequence isolated from the Sargasso Sea
tgcctatatttataattccgatggaaaaaataaaaaagaatcaataaaaactatgccaggcatttttagatatagtgttgataaaatcccattaatacttgataaggcagtaaaatataaaataccaatggttgcattgtttccatataccagaaagaaatttaaagataaatttggctcagaagcattaaatgaggataatttagtttgcaaagctataagattaattaaaaaaaaatacaaagataaaattggtatcatgtgtgatgtggctcttgatccttacactaatcacggtcatgatgggcttgttaaaaataaagaaatattgaacgatcagacaattgaaattttaattaagcaatctttactacaggcagagatgggatgtgatgttattgctccatcagatatgatggatggaagaatattaaaaataagaaaatcattagataaaaataattttaagaatattcaaataatatcttatgcagctaagtatgcctcaagtttctatggtccttttagagatgcagttggatctaaaaaatcacttaaaggagataaaaaaacttatcaaatggattttaacaacagtttagaagctatgagagaaattgctttagatattaaagaaggagctgatatggtaatggtaaaaccgggtatgccttatcttgatattataaagcaagttaaagataattttaaaattccagttattgcttaccaagtgtctggtgagtatagtttaattgtaaatggaataaataagggtttaattaacaaaaattcaataatagagaccttgacttcatttaaaagagctggcgctaatgcaatagttacatactttgctgaaactgttgcatcaaaattaagttcaaattaa

SEQ ID NO: 282177 - DNA, 1003 bp, Unknown
  Bacterial polypeptide expressing nucleotide sequence isolated from the Sargasso Sea
atgaattcgattattcgtccaagaagattaagaagaactgaggcaattagagaaatggttagagaaaaccatttggcggcatcggactttatctatccattatttattcatgaaaaagattttaaagaggaaatttccgcaatgcccggaacttacagatgggatattaatggcttattaaaggaggttactagggcatgggaattgggcattagatgtgtggttcttttcccaaaaattaacgatagcttaaagactgaagatggagcagaatgttttaatgaggacggtttaatacctaaagctattcgaatattaaaaaaagagattccagaaatggcaataatgacagatgttgccttggatccatactcttgtgatggtcatgatggcttagttgatgaaactggaaacatattgaatgatgaaacaattgcaattttaaaaaaacaagctttaactcaagctagagctggagcagattttattggccctagtgacatgatggatgggagagttggagcaattagaactgctcttgatagtgaaggatttagtgatgtaggtattattagttatacagctaaatattcatctgcttattatggtccgtttagaactgctttagattcggctcctagagaaaatagtaagaaagtaattccagacaataagtctacatatcaaatggaccctgccaattcaaaagaggctttaattgaatctgcattggatcagtatgaaggagctgatattttgatggtaaaaccaggaatttcatatttggatattgtttatagactaagcacattttcaaataagcccatagctgcatacaacgttagtggggagtattccatggtaaagtctgctgctatgaagaactggattaacgaaaaagatattgttttagagacattgcttagttttaaaagagcaggagcaaaattaatactcacttatcatgcttgtgatgcatctcaatggttgcaggatacttaaa

SEQ ID NO: 282178 - DNA, 1003 bp, Unknown
  Bacterial polypeptide expressing nucleotide sequence isolated from the Sargasso Sea
atgaattcgattattcgtccaagaagattaagaagaactgaggcaattagagaaatggttagagaaagccatttggcggcatcggactttatctatccattatttattcatgaaaaagattttaaagaggaaatttcagcaatgcctggaacttatagatgggatattaatggtttaataaatgaggttactagggcatgggaattgggaattagatgtgtggttcttttcccaaaaattaacgatagcttaaagactgaagatggaaccgaatgtttaaatgaggacggtttaatacctagagctattcgaatattaaaaaaagagattccagaaatggcaataatgacagatgttgccttggacccttattcgtgtgatggacatgatggcttagttgatgaaactggaaaaatattgaatgatgaaacgattgaaattttaaaaaaacaagctttaactcaagctaaagctggagcagattttattggccctagtgacatgatggatgggagagttggagcaattaggactgctcttgatagtgaaggatttcatgatgtaggtattattagctatacagctaaatattcatctgcttattatggtccgtttagaactgctttagattcagctcctagagaaaatagtaagaaaataattccagacaataagtcttcatatcaaatggaccctgccaattcaaaagaggctttaattgaatctgcattggatcagtatgaaggagctgatattttgatggtaaaaccaggaatttcatatttggatattgtttatagactaagcacattttcaaataagcccgtcgctgcatacaacgttagtggtgagtactccatggtaaagtctgctgctatgaaaaactggattaatgaaaaagatattgtgttagaaacgttgcttagtttcaaaagagcaggagcaaaactgatactcacttatcatgcttgcgatgcatctcaatggttgcaggataattaaa

SEQ ID NO: 282179 - DNA, 802 bp, Unknown
  Bacterial polypeptide expressing nucleotide sequence isolated from the Sargasso Sea
attgggaataatattagatcgagctattaaaaatgagataccgatggttgctttatttccttatacatcatctaaattgaaagataattttggaagtgaagctctaaatgaagataatttagtatgtaaagctatagaatacattaaaaaaagatacaaaaacagaattggaataatgtgtgatgtagccctagatccttacacaaaacatggtcatgatggaattctcaaatcaaacaatataataaatgacgaaactattgagatcttaattcagcaatctttattacaagctcaaatgggatgtgatgtgttagcaccatcagatatgatggatggacgaattggtaagattagaaaagctctagacaaagaaaatttcaaaaatactcaaattctttcttacgcagttaaatatgcctctaacttttatggcccttttagagatgctgtaggatctaaggttgtcttaaaaggagataaaaaaacttatcaaatggattttaggaattatgatgaagcaataagagaggtggctttagatataaaagaaggtgcagatatggtcatggtaaaacctggtttaccctatcttgatattataagatcaataaaagataaatttaagataccagttttcgcctatcaagtttctggtgaatatagcatgttatccaatgctgtagaaaaaaaaataataaataaagatgcgatatttgaaaatttaatgagttttaaaagagccggtgcgaacgcaatagttagttattacgcagatagattaaatgaaattttaccttaa

SEQ ID NO: 282180 - DNA, 1006 bp, Unknown
  Bacterial polypeptide expressing nucleotide sequence isolated from the Sargasso Sea
tatgtcaaatattaaattaggaaaatttccatcaacgcgactaagaagacttcgcatgaaagattttagtagaagaatgattagtgaaaataatttatcagtaaatgatctaatatggcccatctttgtttgtgagggcaacaatattgcagatgaaataaaatcgatgcctggtgttttgagatattcaattgataacatcttaaaagaattagaaactgttattaacctaaaaataccagcagttgcgttatttccccaaattgaaaattcattaaaagatgaaaatggatcccaagcagtcgatgaaaataatttaatttgcagaacaataaaagctattaaacaaaattttcctgatcttggtgttatttgtgatgttgcacttgatccatatacaaatcatggacatgatggcattattgttgataacattattcataatgatgcaacactagacatcttggagaagcaggcacttgttcaagccattgcaggctgtgatattattgctccttcagatatgatggatggaagaattggaagaataagaaacattttggatcaaaacaaatatgaaaatactttgatcctttcgtatgctgcaaaatatgcgtcaaaattttatggtccttttagagatgctattagttcttctgggaatttgaaaggggggagtaaatcttcctaccagatggatgttgcaaatagtaacgaagcccttagagaggttgcgctagatattaaagaaggcgctgatatggtaatgattaaaccaggcatgccttatcttgatattattcaacgcgttaaatcagagtttcaagttccaacatttgcctatcaagtatcaggagaatattcgatgattaaaggagctgttaataatggatggttggaatcaaaagttattagagagtctcttttatcatttaaaagagctggtgcagatggtattttaacatattttgccagagagattgctgaggaattaaaaaatgaatga

SEQ ID NO: 282181 - DNA, 487 bp, Unknown
  Bacterial polypeptide expressing nucleotide sequence isolated from the Sargasso Sea
gatgttattgcacccttcagatatgatggatggcagaattggtaaaattcgatcagcattagataaaaataatttaaatgatgtacaaatattatcatatgcagttaaattttcgtctagcttttatggaccatttagagacgctgttggatcaaaaaaattattaaaaggtgataaaaaaacataccaaatggattttagaaattcagatgagtctttgagagaagtttcattagatataaaagaaggtgctgatatggttatggttaaacctggtatgccatatcttgatataataaaaaaagtaaaagataatttcaagataccagtatttgcctatcaagtttctggtgaatacagtttaataatgaatggaattaataaaaaattaatagacaaagcctcaataaaagagactcttatttcatttaaaagagctggagcgaacagtattgtaacttattttgctgaccagattgatctttaa

SEQ ID NO: 282182 - DNA, 661 bp, Unknown
  Bacterial polypeptide expressing nucleotide sequence isolated from the Sargasso Sea
cattaaaaaagaaattccagagcttattatcatgtcagatgtggccttagatccatataatattaacggacacgatggcttcgtcgaaaatggaaaaattgtgaacgataaaacagtagaggctctggttaaacaagccctctcccaagctgaggcgggcgttgatgtgataggtccatctgatatgatggatggccgaattggggcaattaggtcagctctggaaaaaaatgggtattctgaagtgagtataatgtcatacgcggcaaagtattctagcagtttttacggaccttttcgagatgctgttggggcctctggcgctcttaccggtgataaaaaaacatatcaaatggatatagcaaattctaatgaagcgcttcgattggtggcgagagaccttaaagaaggcgcggacatggtaatgataaaaccaggaatgccttatcttgatatctgtagaagagtaaaggatacatttggcgctcccacttttgcataccaagttagtggcgagtattctatgttatctgcagcttttgaacagggctggcttgatcgaagtaaaatcatcatcgaaaccttaatggcattcaagcgttctggatgtgatggaatattaacttactttgctcctgaagcagcaaaattattaaaataa

SEQ ID NO: 282183 - DNA, 994 bp, Unknown
  Bacterial polypeptide expressing nucleotide sequence isolated from the Sargasso Sea
tatgatttcaaggaaatatccatcaactagattacgaagattaaggcagtcagaatccataattgatttgaccagcgaatgtgcggtgactaaaaatgatctaatccaacctgtatttgtaaaagaaggtttaagtgataaagagcctatagaatcaatgcctggtatctttagatttggcgaagactctgttttaaaagagattgaagaaattaaccaactgggaataagagcaatagctatatttcctgttatagatccttcaaaaaaagactctaaaggcaccgaagctacaaaaagagataattttatttcaagagtattaggttctataaaatctaaatttcctgagatgttagtcattgctgatgttgccttagatccttacacagatcatggtcatgatggaattttggagaatgatgagatcttaaatgatcaaacactagaggttctcgcagagcaatctcttgttctagcagaagctggtgcagatattattgctccttcagacatgatggatggtcgcatcggagttattagaaaaaaattagatgaaaataactttgaagacaaaataattttgtcatatgcagcaaaatataattcaaaattctatggacccttcagagatgctgttaattctaaaaataatctaggtacttctgataaatcttcttatcagatgaatcctgcaaattcacttgaagcccttaacgaggttgctatggatattgaagagggtgctgatatcgtaatggtaaaaccaggtatgccttatttagatattatttctaaaattaaagaagaatttaaggttccaacttttgcatatcaagtaagcggagagtatgcaatgataatggaatcagttaataaaggatggcttgataaaggtgttataatagaatctttaacaagcttcaaaagagctggtgcagatgcagttcttacatatttcgctaaagatttaataaaggaatttaatttatga

SEQ ID NO: 282184 - DNA, 955 bp, Unknown
  Bacterial polypeptide expressing nucleotide sequence isolated from the Sargasso Sea
ttgagaagatcaagaaaattcagttggtctagaagattagtccaagataatgatctatcttacaatgattttattttacctatctttcttactgagggaaaagcaaaaaaagttccaattaattcaatgccaaatgtttttaggtactctattgataaattaaaaagtgtagttgataaagcactaaaattgggaataccaatggtagctttattcccttatacaaatccaaaaaaaagagatgaatatggaaatgaagcattaaatgaaaataatttagtttgccaagcaataaaattcatcaaaaaaaattataagaacgaaattggaataatgtgtgatgttgcattagatccatatacatcacatggtcatgatggaataattaaaaaaaatgaaattttaaatgatgaaacattagaaatattgattaaacaatcaatattgcaggcaaaaatgggttgcgatgtgattgccccctcagatatgatggatggtagagttttaaaaattcgtaaagctttagataaaaataatcttaaagatgttcaaattttatcatatgctgttaagtatgcatcaagtttttatggaccattcagaaatgctgttggatcaagaagtctcttaaaaggagacaaaaaaacttatcaaatggattttaaaaacaattatgagtcattaagagaagttgcattagatataaaagaaggagcagacatgattatagtaaaaccagggatgccttatcttgatataattagggaagttaagaataattttaaaattccagttattgcataccaagtatcaggagaatatagtctcatacaaaatgcaatttcaaagaatatattagataaaaaatcgatatatgaaagtctagtttcctttaaaagagctggagcaagtgcaattataacctattttgctgatcaaataaaactagattaat

SEQ ID NO: 282185 - DNA, 997 bp, Unknown
  Bacterial polypeptide expressing nucleotide sequence isolated from the Sargasso Sea
atgcaaaaaacattatttccaagagttaggcctagaagattaaggctaaatgaaacaattagagatttggtctcagaaactaacattaataagtcaaaacttattcaacctctttttgtatctgacactcttaaacaaaaggaagaaatagtgacaatgcctggccaatatctttattctaaggatgatgttctgtctgagatagatgaattagcagatttaggtatcaatacaattgcattattccctaatatagaaagcgatttaaaagatatttccggttctgaagcattaaaagaagataattttatttgcagcattgtaagacaaataaaagaacgttttcctaaattagtcattattactgatgtagctttagatccttatacctcttcaggtcatgatggaataatttcagatggcaagattgataatgatcttactttagaagcattatcaaagatgtctattaacttagcttcatctggcgcagacattcttgctccttctgacatgatggatggaagaataggaaagataagagattcattagaaaagaataatcataaggacactattttattaagttatgcagccaaatatgcatcaaacttctatggtccttttagagatgctgttggctctaaacaaactgaaggcatttcaaagaaaacatatcaaatggactcaaagaatcttaaagaggcctataaagaaattttgttagatataaacgaaggagcagatattgtaatggttaagccagctatgccttatttagatgtaatcaatgatctaagccaaaagactaatgttccaatttttgcatatcaagtaagcggagagtactcaatgttaaaaatgggtattgacaaaaaaatatttgaccataatgtaatccctgagactttaataagtcttttcagagcaggttcatcttcagtaattacatattttgcaagatggacagcagaaaattatgacaatatcagttgat

SEQ ID NO: 282186 - DNA, 991 bp, Unknown
  Bacterial polypeptide expressing nucleotide sequence isolated from the Sargasso Sea
catgattacaggaaaattcccagcattgagacttagacgcaatagaaaaactgattggtcaagaaggttaattgaagaaaataatcttacacctaatgattttattttacccatttttctaattgatggaaaaaataaaaaacaatctattaaatcaatgcctggtgtttacaggtacacaatcgataaattaaataatatagtagatagagctattaaaaaaggcatacctatgattgccttatttccatacactgaaaaaagaaaaaaaaacgacttaggtacagaggctcttaacgaaaataatctggtttgtagggcactacaaagaataaagaataaatataaaaatgagattggaataatgtgtgatgttgcattagatccatatacctcacatggtcatgatggacttttacaaaacaaatatgtgttaaatgacgaaaccataaaaattttattagatcaatctttgttgcaagcacaaatgggttgtgatgttttagcgccatctgacatgatggatggtcgaattggtgaaattagaaattatctagataaacataattttaaaatgacacaaatactttcttatgctgttaaatatgcttcaagtttttatggcccttttagagatgcagttggttcaaaaaacttattaaaaggaaataaaaagaattatcaaatggattatcgaaatagtgatgaagctttaagagaggttgctttggatattaaagaaggagctgatatggttatggttaaacctggactaccatatcttgatattattaaaaaagttaaagaaaactttaagattccagttatggcatatcaagtatcaggtgaatattctttattagaacatggaattaaaaatgatttaactgatcgaaacattattttagaaagtcttatttcttttaaaagagcaggagcaaatgctattgttagttattacgctgatagattagaccaaattattaaataa

SEQ ID NO: 282187 - DNA, 1006 bp, Unknown
  Bacterial polypeptide expressing nucleotide sequence isolated from the Sargasso Sea
atgtcaaatattaaagtaggacagtttccatcaacgcgattaagaagacttcgaatgaaagatttttcacgaagaatgattagtgaaaataatttatcagcaaatgatcttatatggcctatctttgtgtgtgagggaaacaatattgctgatgaaataaaatcaatgccgggtgtttttagatattcaattgataacatcttaaaggaattagaaaatgttatgaacttaaaaatacctgctgttgcgttatttcctcaaattgataactccctaaaagatgagaatggatcccaagcagttgatgaaaataatttaatttgcagaaccataaaagctattaaacaaaactttcctgaccttggtgttatttgtgatgttgcgcttgatccatatacgaaccatgggcatgatggcattattgttgataatattattcataatgatgcaacgctagacatcctggagcagcaggcacttgttcaagctattgcaggttgtgatattattgctccatctgatatgatggatggaagggtcggcagaattagaaatgctttggataaaaataaatatgaaaatactttgatcctctcatatgcagcaaaatatgcatcgaaattttatggaccttttcgagatgctattaattcatcaagtaatttaaaaggaggaagcaaatcttcttatcagatggatgtttcaaatactaatgaagctttaagagaggttgcgatggacatcaacgagggcgctgatatggttatggttaaaccaggaatgccttatctcgatattattcagcgtattaaatcagaatttcaaattccaacatttgcctatcaggtgtcaggggaatattcgatgattaaaggtgctgttaataatggttggctggattcaaaagttatcaaagaatctcttttgtcatttaaaagagctggcgcagatggtattttaacttattttgctagagagattgcaaaggaattacaaaatgactgaa

SEQ ID NO: 282188 - DNA, 994 bp, Unknown
  Bacterial polypeptide expressing nucleotide sequence isolated from the Sargasso Sea
tatgatagacagaaaatttccaaaaagcagactgcgaagacttagaagaagttctaatctaataaatctagtatcggaaaatactttaagtgctaatgatcttattcaaccattatttattaaagaagatttagatggctctgaaccgatagattcaatgcctaatataaataggtatggcttaaaagatattttgaaagaaattgaagatgttttacataatggaataaatactattgcattattcccagtcattaatccagataaaaaagatgaaaatggtggcgaagctgttaatgaaaataatcttatttcaacagccattaaaaatataaaaaaagaattccctgagattattttaattgctgatgttgctttggatccttatacatctcatggtcatgatggagttcttttagacggtattgttgataatgattctactctagatgttctagttgagcagtcattggttctagctaatgctggtgcagatataattgcgccatcagatatgatggatgggcgaattaagtttatcagagaagttttagagaattctaatctaaaagacactatattactctcatatgcagctaaatataattcaaaattttatggaccctttagagatgctgttgactcagcttcaaatttaggtgagtcctctaagtcaagttaccaaatgaatccaagtaatataaatgaggctttgcaagaagtagcaatggatataaatgaaggcgcagatatagtaatggttaagcctgcaatgccttatttagatgttattcatgccataaaacaagaatttaaaattccaacttttgcatatcaagttagcggagaatatagcatgcttaagcttgccatcgagaaaggatggcttcatgaggatgttatgctagaatcacttctcagcataaaaaggtcaggcgcagatgcaatacttacatatgctgcaaaagatattgcaaaggagatttctaaataa

SEQ ID NO: 282189 - DNA, 853 bp, Unknown
  Bacterial polypeptide expressing nucleotide sequence isolated from the Sargasso Sea
aaaaaataaaaaagaatcaataaaatctatgccaaatgtatttagatatagtgtagataaactaaatacagttgtaggtaaagcaattaaaaaaggaatacctatggttgctttatttccatatacaaatccaaaaaagaaagatgaaaaaggatctgaagctttaaatccagacaatttagtttgcagaggaataaagttcattaaaaaaaaatttaagaataaaattggtattatgtgcgatgtggccctagatccatacacttctcatggccatgatggattattaaataaaaacaatattctaaatgataaaactgtagaaatactcaccgaacaagctgtactgcaagcaaaaataggatgtgatgttatcgcaccttcagatatgatggatggcagaattggtaaaattcgatcagctctggataaaaataatttaaatgatgtgcagatattgtcatatgcagtaaaattttcatctagcttttatgggccatttagagacgcagttggatcaaaaaaattattaaaaggtgataaaaaaacataccaaatggattttagaaattcagatgagtctttgagagaggtttcattagatataaaagaaggtgctgatatggtcatggttaaacctggtatgccctatcttgatataataaaaaaagtaaaagataatttcaaaataccagtatttgcatatcaagtttctggtgaatacagcttactaatgagtggaattaataaaaaattaatagataaatcttcaataaaagagtctcttatttcatttaaaagggctggagcaaatagtattgtaacttattttgctgatcaggtagatctttaa

SEQ ID NO: 282190 - DNA, 1006 bp, Unknown
  Bacterial polypeptide expressing nucleotide sequence isolated from the Sargasso Sea
gatgagtcagtttaacgagtatttccctgccagccgcttacgccgtatgcgtcagtctgatttcagtcgtcgcttaatggccgaaaatcgtctgacggtcgatgacttaatttatcccatgtttattgtcgaaggtgaaaaccagcgccaatccattccctctatgccgggtattgagcgtctgtcgttggatttgctactggaagaagcaaaagaattggccactttgagcattccagctattgcgatattccctgtgaccgctgcagagaaaaaatctctgttagctgaggaagcttacaaccctgacgccttagcgcaacgtgcggtacggatgttaaaacaacatgtgcctgaattaggcgtgatcactgatgttgcactcgaccctttcactactcacggtcaggacggcattattgatgacgacggttatgtgctgaacgacattaccacagacattttagtgaagcaggccttgtctcatgcagaagcgggcgctgacatagtagccccttctgacatgatggatggccgtatcggtgctatccgctctgctttggaagcagagggttatgtaaataccaaaattatggcgtattcagctaagtatgcttctgcttattacgggcctttccgcgatgcagtaggctcagctggcaatttaaaaggcggcaataaaaagtcctatcagatggacccagccaacagcaacgaggctttacgtgaagtagctttggatttggaggaaggcgcggacatggtaatggtcaaacccggtatgccttatctggatatagtgcgccgggtcaaagacgaattcggagtgcctacttttgcttatcaggtcagcggtgaatacgccatgcatatggctgccatccaaaacggctggctggcggaagaagctatagtaatggaatctttgctggcctttaaacgcgctggagccgatggcatcctgacttactttgcgaaaaaagccgcgatctggctacaaagataa

SEQ ID NO: 282191 - DNA, 994 bp, Unknown
  Bacterial polypeptide expressing nucleotide sequence isolated from the Sargasso Sea
atgaaaaaaagatttccaaatactcgattacgacgtttaagatcatccgcagaaataagaaacttggttcgcgaaaacaggttatcagcacatgacttaatacaaccaatatttattgtagaagggaaaaatatcactcagaaaatagcgtccatgcccgacatctgtagattttctatagataaggcagtatctgaagttaagaaaatcaagaatctaggaattcaagccatagctcttttcccaagcattagcaataaactgaaatcatctgatggaggcgagtcatttaatcccgaaggtttagtccaaagagcaataagagaaataaaaaaaagagttgaaggagttttaattataagtgatgttgctctagatccgtatacttcacatggtcaagacggagtaatctctaaatcagggaaaatacttaatgatgagacagtagaaattttagtccaacaagcacttagtcatgcagaagctggagcagatataattgctccttctgatatgatggacggaagagtcaaaaaaattagagaaacgttggagaagaaatcactaaaagacactatgatacttgcatataccgcaaaatattcctcgaacttctacggtccatttcgtgatgcagtcggttcatccaaaaatcttggctctaacaataaagatacataccagatggattacgcgaacaccagagatgctttgaatgaggttcaattagatattagtgaaggagctgatattgttatggtcaaacctgcaatgccttacttagatataatatctaaaatcaatgataaatttaatattccagtattcgcttatcaagttagtggcgagtattcgatgatcaaatcagtaagtagtaaaaaatggcttgatgaaaaaaaagtagtgatagaatcactatcctgtattaagagatcaggcgcatctgctatattgacatactttgctaaagatgcagcgaaatggttgaaatgaa

SEQ ID NO: 282192 - DNA, 491 bp, Unknown
  Bacterial polypeptide expressing nucleotide sequence isolated from the Sargasso Sea
tccttcagacatgatggatggccgcgtcggaattattagaacaaaactaaacgaaaataactttgaagataaaataattttgtcatatgcagcaaaatataattcaaaattctatggtcccttcagagatgctattaattctaaaaacaatctaggtacttctgataaatcttcttatcagatgaatcctgcaaattcacttgaagcccttaacgaggttgctatggatattgaagagggcgctgatatcgtaatggtaaaaccaggcatgccttatttagatattatttctaaaattaaagaagaatttaaagtcccaacttttgcataccaagtaagtggagagtatgcaatgataatggaatcagttaataaaggatggctagataaaggtgttataatagaatctttaacaagcttcaaaagagctggtgcagatgcagttcttacatatttcgctaaagatttaataaaggattttaatttatgag

SEQ ID NO: 282193 - DNA, 997 bp, Unknown
  Bacterial polypeptide expressing nucleotide sequence isolated from the Sargasso Sea
tatgaacgtatcaagaaaattccctcaatcaagattaagacgaaataggtttacttcgtccataaggagtttagtggcagagaatagcctgtcagtaaatgacttaatacaacctatatttgtaaaggaagatttagatggagtagaaaatatagattctttgccgggaattagcagatacggacttaatgctttagatgaagaaatagaaaagatacaaaacaataaaataaaggcagttgctatatttcccgtcatcaatcctgataaaaaagacgagacaggaagcgactcattaaatgaagacaatttagtatgcactgccatcaagcaaatcaagaaaaactctggactggctgtaatagcagatgttgctttagatccttacacttcacatgggcatgatggtgtactggataagaatggatatgttgaaaacgataagagtctttctctgctcatagaacaagccctcactcttgccaaagctggagcagatatggttgctccttcagatatgatggatggaaggatatccggtatcagagattctttagaatctaataacttttctaacacaatcattctctcttatgcggcaaaatacagttcgaaattttatggtccatttagagacgccgtaggatcctccgcaaatcttggtgtgggcagtaaagatacctatcagatgtcagttgcaaatatcgatgaagcattgcacgaagtaaaaatggatatagaagaaggtgcagatatagtgatggttaaaccaggaatgccttatcttgatgtcatcaaggcagtcaaagatgcttttaaagttccaacgtttgcttatcaggtaagtggtgaatacgccatgctcaaagccgcgatagaaaatgattggttatccgatgaagtaatacttgaatccttattaagctttaaaagagccggggcagattgtgttctaacctatgctgccaatgaaatagcaataaagttaaatcaatag

SEQ ID NO: 282194 - DNA, 1000 bp, Unknown
  Bacterial polypeptide expressing nucleotide sequence isolated from the Sargasso Sea
atgagcttccatccgcttcatcgtccgcgccggatgcgccgcgacgacttctcccggcgcctgatgcgcgaaaaccgcctgaccaccgacgacctgatctatccggtgttcgtcgtcgaaggcaccaacgaacggcagccggtgccgtcgatgcccggcgtcgaacgcgtgtcggtcgatctgttgatgcacgtcgccgagcagtgtgtcgaactgggcgtgcccgtgctgtcgctgttcccggccatcgagccgtcggtgaaaacgcctgacggccgcgaggcggccaatccggaaggcctgatcccgcgcgcggtgcgcgagctgaagaagcgcttccccgaactcggcgtgctgaccgacgtcgcactcgatccgtacacgagtcacggccaggacggcgtgctcgacgaaaacggctacgtgatcaacgacgacacgatcgagatcctgatcgatcaggcgcgcgcgcaggcggaagccggcgtcgacatcgtcgccccgtcggacatgatggacggccgcatcggcgcgatccgcgaaatgctggaaagcgacggccatatccacacgcggatcatggcctattcggccaagttcgcatcggcgttctacggcccgttccgcgacgcggtcggctcggcatcgaatctgggcaagggcaacaagatgacctaccagatggatcccgcgaacagcgacgaagcgctgcgcgaagtgcgcctggacatcgacgaaggcgccgacatggtgatggtcaagccgggcatgccgtacctcgacatcgtgcgccgcgtgaaggacgagttccgcttcccgacctacgtgtaccaggtgagcggtgaatacgcgatgctgaaggccgccgcgatgaacggctggctcgaccacgacaaggtcgtgctcgaatcgctgctcgcgttcaagcgcgcgggcgccgacggcgtgctcacgtacttcgcactcgacgccgcgcgtctgctgaaagcgcaacgctaag

SEQ ID NO: 282195 - DNA, 456 bp, Unknown
  Bacterial polypeptide expressing nucleotide sequence isolated from the Sargasso Sea
agggtttcgatcaggtgggcatcatcagctacaccgccaaatactcgtccgcgtattacgggccattccgggaggcgctggactctgccccaagggttgcgggcagcaaaccgatcccgaagaacaaagacacttatcagatggatcccgccaatgctcgggaagcgatcacggaagcccagctcgacgagcaggagggcgccgacatcatgatggtgaagccgggtctggcctacctcgacatcattcatcggctgcggcaggagtcggagctgccaattgccgcctacaacgtcagcggcgaatactcgatggtcaaggctgctgccgaacgtggctggatcgatgaacgggctgtggtgctggaaacgctgctgagcttcaagcgggccggagcggatctgatcctcacttatcacgcctgcgatgcggccggctggctgaagggcggctgac

SEQ ID NO: 282196 - DNA, 784 bp, Unknown
  Bacterial polypeptide expressing nucleotide sequence isolated from the Sargasso Sea
gtggtccttttcccaaaaatcaacgatagcttaaagactgaagatggagcagaatgttttaatgaagacggtttaatacctaaagctattcgaatattaaaaaaagagattccagaaatggcaataatgacagatgttgccttggacccatattcttgtgatggtcatgacggattagttgatgaaactggaaagatattgaacgacgaaacaatcgaaattttaaaaaaacaagctttaacacaagcaagagctggagctgattttattggccctagtgacatgatggatgggagagttggagcaattaggactgctcttgatagtgaaggatttaatgatgtaggaattattagttatacagctaaatattcatctgcttattatggtccatttagaactgctttagattcggctcctagagaaaatagtaaaaaaataattccagacaataagtctacatatcaaatggaccctgccaattcaaaagaggctttaattgaatctgcattggatcagtatgaaggagctgatattttgatggtaaaaccaggaatttcatatttggatattgtttatagactaagcacattttcaaataagcccgttgctgcatacaacgttagtggggagtattccatggtaaagtctgctgctatgaaaaactggattaatgaaaaagatattgtgttagaaacgttgctcagtttcaaaagagcaggcgcaaaactgatactcacttatcatgcttgcgatgcatctcaatggttgcaggataattaaa

SEQ ID NO: 282197 - DNA, 762 bp, Unknown
  Bacterial polypeptide expressing nucleotide sequence isolated from the Sargasso Sea
cagtagccgtttttcctgttatcgaccctgcaaagaaagatgaaggtggaacagattctttaaatgaaaacaacatagtttcacaggctataaggcaaataaaatcaaattctgatattgctataattgctgatgtagcgctcgatccttatacgtctcacggtcatgacggaatccttgatgaagatgggtatgttgataatgataaaagcctaccattattaactgagcaggctatcgttttagctaaggctggtgcagacatgatagctccttcggatatgatggatgggagggtacgctctatacgaaaagcattagaagataatgctttttataacactctaattctctcttatgctgctaaatacagttcgaaattttatgggcctttcagggacgcagtaggctcttcagccaacttaggagcaggaagtaaagatacttatcaaatgtctgtatcaaatatagaagaagctttgcatgaagttggattagacattcaggaaggcgctgacatggtgatggttaaacctggcatgccttatttagacgtagtaaaagctgttaaagatgaatttaaagtgcctacttttgtttaccaagttagcggagaatatgcgatgcttaaagcagcaatacaaaatgaatggctttcagaagatgtcatgttagaagctttattgtgctttaaaagagcaggtgccgattgtgtattaacttatgcagctaaagagattgcaactaaaataaacagctaac

SEQ ID NO: 282198 - DNA, 589 bp, Unknown
  Bacterial polypeptide expressing nucleotide sequence isolated from the Sargasso Sea
tggtcttttaagcgatagtgggtatatattgaatgacgaaaccgtaaaagtgctctgcgagcaggcattagtatgcgccgaagccggggcagacatcatagcgccctcggatatgatggatggcagagtaggagagatcaggaataggcttgatctaaaccacctcaatttaacccttataatggcctattccgcaaaatatgcatcgaaatattatgggccttttcgagatgcagttggcgccaacaacacattaaaaggtgacaaaaagacttatcaaatggatccagcgaattccgatgaggctcttcacgagatcgccttagacctttctgaaggagcagatatggttatggtaaaaccaggattaccatacttagatgttattaaaagggtaaaagataaattcgatgttccagtctttgcttaccaggttagcggagagtattcgatgcataaagcggcaatcgacaaaggctgggtagacaaagaagtgatttttgagtctttaatgtgtttcaaacgagctggagcaactggaatattaacttactttgctaaggaatttgcccaactgcaaaataactga

SEQ ID NO: 282199 - DNA, 693 bp, Unknown
  Bacterial polypeptide expressing nucleotide sequence isolated from the Sargasso Sea
ataattttatttgccaggccatatcttcaatcaaaaaaaactcccctgatttagttataatagcagatgttgctttagacccttacactgaccatggtcatgatggattattggatactactggagatgtagataatgatctaactcttccagctttaagagatcaagcgctcgtattagcaaaagctggaacagatattattgccccttccgacatgatggatggtagaattaagataatcagagacgcacttgaacaaaatgattttgttaacaccttaatactagcttattcagcaaaattcagttcaaaattttatggaccgtttaaagacgcagtcgagtcagcaaagttctttgggaataaaacaaaggatacctatcaaatgcccattcaaaatattaatgaagccctgcacgaagttgctttagatattcaagaaggagcagacattgttatggttaagcctggaatgccataccttgatgtcatcaaagctgttaaggatgaattcaagatgccaacattcgcttatcaagtaagtggtgagtactcaatgattaaaacttctatcgagactggtttgctaagtaatgatgttatcaaagaatctcttttatcatttaaaagggctggagcagattgtatcttaacttattttgcttcagagatagctagagatttatcttaaa

SEQ ID NO: 282200 - DNA, 1105 bp, Unknown
  Bacterial polypeptide expressing nucleotide sequence isolated from the Sargasso Sea
atgaatcgtggcggtgtttccctgagaccaggagacggtattattcactcttggatgaacagaatgcttttaccagatactgttggaactggtggcgatagtcatacaagatttcctataggtatcagctttcctgctggatctggactagtagcatttgctgcaactttaggagtgatgccattagatatgcctgaatctgtattagtaaggttcaaaggtgaaatgcaaccaggaataacactgagagatttggttaacgcaattccatatgcagcgctacaaaaaggattgttaacgattgataaggatggaaagaaaaatgttttctctggaagatgtctggagattgaaggccttccaaatatgaaagttgaacaagcttttgaactatcagatgcttctgctgaaagatctgcttctggttgtactgtaaagcttaatgaagaacccatattagaatatcttaaatcaaacattgtaatgttgagatggatgatagcaagtggctatggtgatgcgaaaactttagaaagaagagctcaatcaatggaggaatggattttaaatcctcaacttcttgaagcagatgataatgctgaatatgctgaaataatcgaaattgatttaaatgaaattaaagaaccgcttctagcttgtccaaatgatcctgacgatataaagcccttatctgaagttgctaatacaaaaattcaagaagtttttattggctcatgcatgaccaatattggccatttcagagctgcgggaactttattacaaaaatataaaaatattaaagcaagactttgggttgttccaccaacaaaaatggatgaaaagcaactgatagaagaaggcatatataatatattcggagtatctggagcaagaactgaagttccaggctgctcactttgtatgggtaatcaagctcgggtcttagctaattcaacagttgtatctacttcaactaggaattttccaaataggcttggagatggagcaaatgtatttttagcctctgctgaattatccgcaatatcggcagttcttggaaaactcccaagtgtagatgagtatcataagtatatggggagatata

SEQ ID NO: 282201 - DNA, 823 bp, Unknown
  Bacterial polypeptide expressing nucleotide sequence isolated from the Sargasso Sea
ctggccgcaggcctcttggccaagaaggcggtggaggcggggctcaaggtgcagccgcacatcaagacctcgctggcccccggctcgcgcatcgtcaccgaatacctcacgcagaccgggctgctgccgtacctggaaaagctgggctttgcgctggcgggctatggctgcaccacctgcatcggcaacgcgggcgacctcacgcccgagctgaacgaggtcattaccagcaacgacctggtgtgcgcagccgtgctctcgggcaaccgcaacttcgaggcgcgcatccaccccaacctcaaggccaacttcttggccagcccgccgctggtggtggcctacgccattgccgggaccgtgctcaaggacctgatgaccgagccggtgggccaaggcaaagggggcaaggacatttacctgggcgatatctggcccagcagcgacgaggtccatgcactgctcaagtacgccatgaacggcaaggccttccgcgagaactattccaaggtggcctccgaccccggcaagctgtgggagaagatcaagggcgtgagcggcacggcctacacctggcccgccagcacctacattgccgagccgccgttttttgcgcagtttgcgctcgaccagggcgcggcggccgcgtctgcggtgcacggagcgcgcatcatggcgctgtttggcgactccatcaccaccgaccacatctcgcccgcgggttccatcaaggagagttcgcccgccggccaatggctgctgcagcacggtgtgcaaaaggcagacttcaacagctacggcgcccgccgtggtaccatgacgtgat

SEQ ID NO: 282202 - DNA, 936 bp, Unknown
  Bacterial polypeptide expressing nucleotide sequence isolated from the Sargasso Sea
gggaattaccttgagagatctggtgaatgcaattccatacgctgcaattcaaaatggacttttgactgttgaaaaaaaaggaaagaaaaatattttttcaggaagatgtcttgagattgaaggtttaccaaatatgaaggttgagcaagcatttgagctttcagatgcttctgcagaaagatcagcctcaggttgcacagttagattaaataaagaaccgatagttgaatatcttaactctaatatagtaatgttgagatggatgatagcctctggttatggtgatgcaaaaacgcttgaacgaagagctcaagcaatggaagaatggattcttaaccctgaattattagaaccagataaggatgctgaatatacagaggtgattgaaatagatttaaatgaaataaaagagccattattggcatgtccaaatgacccagatgatattaaaccattatcagaggttgcaaatactgaaattcaggaagtatttattggctcttgtatgacaaatataggtcactttagagctgctggaactcttttagaaaaatataatggtattaaagcaagattatgggttgtccccccaacaaaaatggatgaaaaacagcttattgaagaagggatatacaatatttttggagtttcaggagcaagaactgaggtaccaggatgctctttatgtatgggtaatcaggcaagagttcttgcaaattcaacagtagtatcaacatcaacaagaaactttcctaatagacttggtgacggtgctgatgtttttctagcatcagctgaacttgcagctatttcatctgtacttggtaaattaccaacagttgatgaataccataaatatatggcagatataaatcctttatcagatgaaatttatagatacttaaattttaacgaaatagatagttatgttgaaag

SEQ ID NO: 282203 - DNA, 616 bp, Unknown
  Bacterial polypeptide expressing nucleotide sequence isolated from the Sargasso Sea
atgaaacctggaaaaaaaaattcttataattgtttaaaaaccttagaaatagaaggaaagagttataagtatttttctttagttgaagctgagaaaaatggattaaatgggatatctaaacttccaaaatctttattagttttattagaaaatttattaagatttgaggacgatgtatctgtcactagaaaccaaattgatgctattaaaaattggttaaaaacaaaaaaatctaatactgaaattgcttatagacccacaagaattttattgcaggattatacaggcatacctgctgttgcagatcttgcagctatgagagaggcagtaaaggaaaaaaataaagatccaaaaaaaataaatcctctatcaccagtagatttagtcattgaccactctgtccaagtagatgattttgcaaacatatcttctctaaaaaaaaatgttgatattgaatttagtagaaatggagagagatattcatttttaaaatggggacaaaaagcatttgataattttagaatcgtaccaccagggactggaatttgtcaccaagtgaacttagagtatttatcaaaagttgttctggtgctcggaaacagaagggaaaaatatt

SEQ ID NO: 282204 - DNA, 909 bp, Unknown
  Bacterial polypeptide expressing nucleotide sequence isolated from the Sargasso Sea
agaaaaatatcttctctggacgaatactagagatagagggcttacctaacctgaaagtagagcaagcttttgaaatttctgatgcttcggctgaaaggtccgcaggcggttgcacaataaggttggataaagagcctataattgaatatttccattccaacataactatgcttcgttggatgattgacaatggctatcaagaccctagaacgcttgagcgcagggcgcaagcgatggaagagtggttggctaacccggtgcttttggaacctgactcagaggctgaatattttaaagttattgagattgatctgaatgaaattaaagaacctttattggcttgccctaacgacccagatgatattaaaaccctttccgaggtagccggcacaaagatagatgaagttttcataggatcatgcatgactaatattggccacttccgtgctgcagcagaagtcttaaaacaagtcgatggtggcttaccgaccagactctgggtagcacctccaacaaagatggatgagcatcagcttacggaagaaggcatttacaatatcttcggaacttcaggcgctcgaaccgaaatgccgggatgttcattgtgtatgggcaatcaagcacgagtagccgctaattcgactgttgtatctacatctactcgcaatttcccaaatagattgggacaaggggctgatgtcttcttggcctcgtcagaattagcagccgtgagtgctgcactaggaaaaattccaaccatgtcagagtatttggagtatatgtcttcgataaatacgatgtctgaaaatatttatcgatatctaaattttaatgaaattgaagaattcatagaggcttcggatcgcgcaaagaatattccattaactaacgtacaagatgtcgcataaa

SEQ ID NO: 282205 - DNA, 523 bp, Unknown
  Bacterial polypeptide expressing nucleotide sequence isolated from the Sargasso Sea
gctgtccagcgtcgctggcgagaagatcgacgaagtgttcatcggttcgtgcatgaccaacatcggtcacttccgcgctgccggcaagctgctggagcaggtcaagggccagctgcctacccgtctgtggctgtcgccgccgaccaagatggacgctcaccaactgaccgaagaaggctactacggcatctacggcaaggctggcgcacgcatggaaatgccaggctgctcgctgtgcatgggtaaccaggcacgcgttgagccgaactccaccgtcgtgtctacctcgacccgtaacttcccgaaccgcctgggtgatggtgcaaacgtctacctggcatcggctgagctggcggccgtcgcctccactctgggtcgcctgccgacagtcgaagagtacatgggctacgcagcgaaactggacaccatggccagtgacgtctaccgctacctgaacttcgaccagatcgccgagttccgcaagatcgcagcaagcgccaacatcccggtgattcaagcttaa

SEQ ID NO: 282206 - DNA, 458 bp, Unknown
  Bacterial polypeptide expressing nucleotide sequence isolated from the Sargasso Sea
tggaaaagccaaaaacagtctcactgaaaatattgaaaattgttcaaacatcgcaagaaactacaaagaaaaaaatatgcgttggataatagtaggtgataataattatggtgaaggaagcagtcgtgaacatgctgctatgactcctagattcctgggatgtgctgctgtaattgcaaaatcttttgcaagaatccatgaaacaaatctcaaaaaacaaggaattcttgcattaacatttgaaaactctgatgactatgaaaagatcaaagaagatgataaaattagtatatcaggcctaactgattttgctcctgacaaatcttttgaatgtgtactaaaacattctgatggaaacactgaaaaaatcatgttaaaacattcttacaattcttcacaaattgagtggttcaaagctggttctgctctaaatgtcttaaaaaataaaacaaaataag

SEQ ID NO: 282207 - DNA, 859 bp, Unknown
  Bacterial polypeptide expressing nucleotide sequence isolated from the Sargasso Sea
cgtttaaaagacatctggccaagcgatgctgaaattgatgctgtagtggctagcagcgttaaacctgaacagttccgtaaagtctatgagcctatgtttgctgtttctgtggattacggcgaaaaaatcagcccgctgtacgactggcgtccacaaactacttatatccgccgccctccgtattgggaaggcgcgctggctggtgagcgcagcatgaaaggtatgcgggcgctggcggtactgggtgacaacatcaccacagaccatttatcgccgtccaacgccattatgatggacagcgcagccggtgaatacctgcataaaatggggctgccggaagaagattttaactcttatgccacccaccgcggtgaccacttaacagcgcagcgcgctacttttgccaaccctaagctgattaatgaaatggccgtagtggatggcaaaatcaaacaaggttctttaacccgtatcgagcctgaaggtgtggtcacccggatgtgggaagccattgaaacttatatggaacgtaagcagcctttaattattattgccggtgctgattatggtcagggctcatcccgtgactgggcggccaaaggtgtgcgtttagcgggtgttgaagccatagtagccgaaggttttgagcgtattcaccgtactaacttagtgggtatgggcgtcttaccgcttgagtttaaaactggggtcaaccgtaaaaccttagctttggatggtacagaaagttacgacgttttaggtgagcggacacctcgcactacgttgactttagtgatcacccgcagaaacggtgaagtgctgcaagttcctgtgacctgtcgtttggatacagccgaag

SEQ ID NO: 282208 - DNA, 453 bp, Unknown
  Bacterial polypeptide expressing nucleotide sequence isolated from the Sargasso Sea
gatgaaaaatataaattcttttaattccgaacaaaatttacatattaataatcaaaaatataagtattttgatctgaatacagtatcaaaacagtttaatttagatcttttaaatataccaatttccataaaaattattttagaaaatttgttaagaaatgaagatggagaaacggttaataaggagatgatctcatctgtatttgaatccttaaataaaaaaaataataataaggctttagaaatagcatttttccccacaagagttcttatgcaagattttaccggtgtcccagctgttgcagatttagcagctatgagaaacgctttaaaaaaaagaggctttgagccaagtatcataaaccctatatcacgagttgacttagtaatagatcactcagttatggtagacatatacaagggtcaaaatgcacttaaagaaaatgttaaaaa

SEQ ID NO: 282209 - DNA, 511 bp, Unknown
  Bacterial polypeptide expressing nucleotide sequence isolated from the Sargasso Sea
tatgaaccagacagatttaataaaaaaaatttatgacaattacctatcaaaaattgaagaggccaattctttttttaatagaccattaacttttacagaaaagattcttttttctcatttatccgaagatatggattctattccagcaagaacaaaaacattctgcactttaagcccagatagagtagcaatgcaagatgctactgcgcagatggctttattacaatttattaatgcgggaatggaaactacagctgttccaactacagttcattgtgatcatttaattactgcaatcaaaggggccgatgatgacttaagtaatgctctattaacaaataaagaagtgtatgatttcttaaaatcagtttgtgcaaaatacggtataggattttggaagccaggagctgggataattcatcagactattttagagaattatgctgttccgggcacaatgatgattggtactgattcacatactcctaatgcaggtggcctaggaatgatg

SEQ ID NO: 282210 - DNA, 776 bp, Unknown
  Bacterial polypeptide expressing nucleotide sequence isolated from the Sargasso Sea
tatgatttttgatttagagataataaaaaaggtttacagttctatcaaacaaaaagttgatagtgcaaggaaagtctgtaatcatcctcttacactttcagaaaaaattctttattcacatctatgggatggaaatccaaaaaaaccttttttaagaggaaaagattatgttgattttgcaccagataggattgcatgtcaagatgctacagctcaaatggctttgttacaatttatgcaggctggtaagaaaaaggttgcagttccaactactgttcattgtgatcatttaattcaagctagaattggagcagatgaagatttacaaaatgctataaatactagtaatgaagtttttaattttttagagtctgtttcaaataaatatgggattggattttggaaacccggtgctggaattatacatcaagtggttttagaaaactatgctttccctggtggtatgatgattgggacggattctcataccgttaatgccggaggtttaggtatggtagccattggagttggaggagctgatgctgttgatgtaatggcaggtatggcatgggaacttaaatttcctaaacttataggagttaaacttactggtaaactttcgggatggactgcaccaaaagatgtaatattaaaagttgctggaatcctaactgtaaagggaggaacgggagctatcattgaatattttggaccaggtgccgaagagctttcatgtactggtaaaggaacaatttgtaatatgggtgctgaggttg

SEQ ID NO: 282211 - DNA, 910 bp, Unknown
  Bacterial polypeptide expressing nucleotide sequence isolated from the Sargasso Sea
ggagttctacggcgaaggcgcatcgaagctcacgctgggcgaccgcgccaccatctccaacatggcccccgagtacggcgccaccgccgccatgttctcgattgacgaaaacacgctcgactacctgcgcctgaccggccgcagcgacgagcaagtcaagctggtcgagacgtacgccaagaccgcgggcctgtggtccgacaccctcaagcaggctgaatacgaacgcgtgctgcgcttcgacctgtcgagcgtggtgcgcaacatggccggcccgtcgaacccgcacgcccgcgtggccacgacggacctcgccgccaagggcatcgccggcaagtgggaagaaacccctggccagatgccggatggcgcggtcatcattgccgccatcacgagctgcaccaacaccagcaacccccgcaacgtgattgccgccgcgctactggcacgcaacgcaaaccgcctgggcctgacgcgcaagccgtgggtgaagagctcgctggcgcccgggtccaaggcagtggagctgtatctggaagaggctggcctgaaagccgaactggagaatctcggcttcggcatcgtcgcgtttgcctgcaccacctgcaacggcatgagcggcgcgctggacccgaagatccagcaagagatcatcgaccgcgatctgtatgccacggccgtgctgtccggcaaccgcaacttcgatggccgcatccacccgtatgccaagcaggcgttcctcgcctcgccgccgctggtggtggcctatgcgattgccggcacggtgcgcttcgacatcgagcgcgacagcttcggcaccgatgccaacggcaagcccatcctgctgaaagacctgtggccgaccgacgaagagatcgacgccatcgtgcgtgcctcggtcaagccggag

SEQ ID NO: 282212 - DNA, 817 bp, Unknown
  Bacterial polypeptide expressing nucleotide sequence isolated from the Sargasso Sea
gcgtctgctgagcgttccgcatcaggatgcacaataaagctaggtgaggaaccaattttagaatatctcaattcaaatattattatgcttcgctggatgattgccaatggttatggagatgctaagacacttgagcgaagagcaagagctatggaggaatggataaaaaatccagtcttgcttgaggcagacaaaaatgctaactacaaagaaattatagagattgacttaaatcagattaaagagccactacttgcatgccctaacgatcctgatgacattaaaccactttcagaggtacaggatacaaaaattgatgaagtttttataggctcttgcatgacaaatattggtcactttagagctgcgggacaacttttagaaaaatataaaaaattgccagctagactatggattgttcctccaacaaaaatggatcagcaacaattaattgatgaaggattttataaaatttttgatagtgcaggtgcacgaactgaggtaccaggatgttctttatgtatgggtaaccaagctcgagtcgaaccaaattcaacagttatctcaacttcaacacgaaattttccaaatcgtttaggggatggagcagatgttttcctagcttctgccgaactatcagctgtttcagctattcttggaagactaccatctaatgaagagtatttagaaataatgaaagatatagatactcttcataaagacatctataagtatcttaattttaatgaaattaaagcgtatgttgatcaagctaaatcagctaacatacctaacataaatattgctgaggtttaag

SEQ ID NO: 282213 - DNA, 541 bp, Unknown
  Bacterial polypeptide expressing nucleotide sequence isolated from the Sargasso Sea
agagccaatcgttgcatgtcctaatgaccctgatgacgttaaagttctttctgatgttcaaggtgataaaattgatgatgtgttcatcggttcttgtatgacaaacatcggccacttcagagctgctggtgaagttcttgaaggaaaaggccaagctaatgttaagctttggatttgcccaccaactaaaatggacaaagaccaactaacaagagaaggctactatgctaagtttgctgctgctggtgctagattagaaatgccaggctgttcactatgtatgggtaaccaagctagagttaaagatggtgttactgtattctcaacatcaactagaaactttaacaatagaatgggtaaagacgctcgtgtttatctaggatcatctgaattagctgctgcttgtgcaactcttggaaaaatcccaaccccagctgaatacaactcaatcgtaattccagctgttgaaggcaaagaagaagctatctataagtaccttaactttgaccaaatgactggtttctcaattgacgagaaatag

SEQ ID NO: 282214 - DNA, 154 bp, Unknown
  Bacterial polypeptide expressing nucleotide sequence isolated from the Sargasso Sea
agggtctattcaaaaagaaagtcaaatgggtcaatattttatggaacatcaaattttactaaaagaatataattcttacggattaagaaggggaaatcacgaggttatgatgagaggtacatttgctaatataagaattagaaatgagatagcg

SEQ ID NO: 282215 - DNA, 906 bp, Unknown
  Bacterial polypeptide expressing nucleotide sequence isolated from the Sargasso Sea
ggatctggacttgtagcatttggggcagctttaggcgtgattcctttagatatgcctgaatctgtcttggtaaggttttctggagaaatgcagcctggaataaccctaagagaccttgttaacgctattccttatgcagctattcaagagggtcttctcactgttgagaaagaaggaaagaaaaatattttctctggaagatgtcttgaaattgaaggattaccaaatttaaaaattgaacaagcttttgagttgtccgatgcttctgcagaaagatctgcatctggatgtactgttcttttagatgaagaaccaattttagagtatctaaaatcaaatatagttcttttgaggtggctgatctctgagggatatggagatgcaaggaccttggaaagaagagctcaaaaaatggaacaatggattcaaaatcctgtcttacttaaaccggataaaaatgccaaatatgcagccacaattgaaattgatctaaatgaaataaaagaacctcttttagcttgtccaaatgatccagacgacataaaaacactttctgaaattggagaagataaaattgatgaggtattcatcggttcctgcatgacaaatattggccattttagagctgctggaaaacttttaaaggatacctcttcacttccaacaaaattatggatttctcctcccaccagaatggataagtttcaacttgaacaggaaggcttctatgatattttcaaaaaagctggagtaagaactgaagttcctggatgttctttatgtatgggcaatcaagcaagagttgaacctaattcaaccgttgtatcaacctcaacaaggaactttccaaacagactaggtgatggcgctgatgtatatctcgcttcggcggaacttgcagcaatt

SEQ ID NO: 282216 - DNA, 770 bp, Unknown
  Bacterial polypeptide expressing nucleotide sequence isolated from the Sargasso Sea
gtaggtgttgagctaacgggcaaaccacagccaggcattactgcaaccgacatcgtattagcgttaacagagttcttgcgtaaagagcgtgtggtatctgcatatttggaattctatggtgaaggtgcatcgcacctgacgctgggcgaccgcgcaaccatttcgaacatgacaccggaatacggcgccactgcagccatgttctacattgaccagcaaaccattgattacttgcgcctaacagggcgtgaagaaaagcaaattgcattggtagagcaatacgctaagcataccggtttatgggctgatgatttagaaactgccgagtatgagcgggtgcttacgttcgacctttctgctgttggacgtaacatggctggcccttctaaccctcacgctcgcttacctactagcgatttagaaagtcgcggtatagcagcgaagtggactgaggaggaaggcaaaatgcctgatggcgcggttattatcgcggctatcacaagctgtaccaatacatctaacccgcgcaatgttattgcggcaggcctgcttgcacgcaacgccaaccagcgcggtttaacccgtaagccatgggttaagagctcactagcacctggatctaaagccgttaagctttaccttgaagaagctaacctaatgagcgagttggaagatttgggctttggcgtggtagcatttgcctgtactacctgtaacggcatgagcggcgcgctagacccgaaaatccagcaagagatcatcgaccgcga

SEQ ID NO: 282217 - DNA, 614 bp, Unknown
  Bacterial polypeptide expressing nucleotide sequence isolated from the Sargasso Sea
tatgaaaccaggaaatagaaattcttataaatctttatctgacctagaggttagtggtaaaaattttaaatattattctttaaaaaaagcagagttaaatggactgcaaggtatttctaaattacccaaatctttaaaagttttattagaaaatctacttagatatgaggatggtgtatcggttaataaaaaccaaattgaagccataaaaaactggctcgatacaaaaaaatcaaaaactgaaatagcttatagaccggccagagttttacttcaagattatacaggaataccagcggtagctgatttggctgctatgcgagaagctgtaaaagaaaaaaataaagatccgaatacaattaacccgctttctgcagttgatttagtcattgatcattctgtccaagttgatcaatctgctaaaaaagattcttttgaaaaaaatgtagatattgaatttaaaagaaatggtgaaagatattcttttttaaaatggggccaaagtgcctttaacaattttaggattgttcctccaggaactggtatttgtcatcaggtaaatttagagtatttatcaaaagtggtttggacagaagaatataagggagaaaaat

SEQ ID NO: 282218 - DNA, 750 bp, Unknown
  Bacterial polypeptide expressing nucleotide sequence isolated from the Sargasso Sea
ttcaacggccgcatcatggagatcgaaggcttgcccgatctcaagctggagcaggccttcgagctcaccgacgccactgcagaacgctcatgcgccggcagcacgatcaagctcagcgtcgacaccgtcagcgaatacctgcgcagcaatgtggcgctgctcaaaaacatgattgcccgcggctacagcgatgcccgcaccctggcgcgccgcatcaaagccatggagaactggctggccaacccgcaattgctggaagccgatgccgatgccgactacgccgcagtgatcgacatcgacctcaacacgatcaccgagccgatcgtggcctgccctaacgaccccgacaacgtcaaaaccctctccgacgtcgcgggcgacaaagtcgatgaggtgttcatcggctcctgcatgaccaacatcggccattacagggccgcggccaccgtgctggaaggtcaggggcaaaacacggcgcgcctgtgggtctgcccccccacccgcatggatgaggagacgttgaaagccgagggctactacgccaccttcgaagccgccggctcacgcatggagatgccgggttgctcgctctgcatgggcaaccaagcgcgcgtggaagacaacaccaccgtgttctccactagcacccgcaacttcaacaaccgactcggcaatggcgcccaggtttatctcggcagcgccgagttagcagcggtgtgcgcccaactgggacggatccccagccgtgag

SEQ ID NO: 282219 - DNA, 922 bp, Unknown
  Bacterial polypeptide expressing nucleotide sequence isolated from the Sargasso Sea
tggcgatcttactttagagaaaaaaggtaagaagaatatattctcagggcgcatttttgaaatagaagggctacccgacctcaaggtcgaacaagcttttgaaatctcggatgcttctgcagaaagatccgctgggggctgcacaatacgccttaataaagaacctattattgaatattttaactcgaacataactcttcttcgatggatgatcgacaatggctaccaagacccaagaactttagagcgcagagcacaagcaatggaagaatggcttgctgacccagtacttcttgagcctgattcaaatgctaaatattttaaaactatcgaaattaatctcaacgaaatcaaagagccactcctagcctgccctaatgaccctgatgacataaaacccctatccgaagtgaatggtacagagatagatgaagtttttatcggctcttgtatgacgaacattggccacttccgtgctgccgcagaggtcttgaagcaagtagaaggttcgctccccacaagactatgggtggcacctccgacaaaaatggacgagcatcaattaaccgaagaaggcatttacaatatatttggaacatcaggtgcacgaaccgagatgccggggtgctcattatgcatggggaaccaggctagggttgcggctaactctacagtcgtgtcgacatcaactagaaattttccgaatagattaggccaaggcgccgatgttttcctagcctcctcagagttagcagcagtaagtgcggccataggaaaaattccaactatgtcagaatacatgaagtatatgaccgggatagacacaatgtcagagagtatttataggtatcttaattttgatgaaataaaggaattcattgaggcttcggatcgagcaaaaaatattcctttgactaacatt

SEQ ID NO: 282220 - DNA, 374 bp, Unknown
  Bacterial polypeptide expressing nucleotide sequence isolated from the Sargasso Sea
agaagggccaaaagaagggcaaaaaattaatactcctacaggagacctgtataattggaattcttcatcaacttacgtacaaaaacctccgttttttgataatcaatcaaatgaagataaagagattaagccaatagagaatgcaagacctttactacttctaggcaatagggttactacagatcacatttcacctgcaggggctattaaagttgatagtcctgctggcaactacttcatggaaaggcaaatacgtcaaaatgattttaattcatatggtgctagaaggggcaatcatgaagtaatggtcaggggtacttttgctaatataaaaattaaaaaccaactgctatcaaacgttgagggcggatact

SEQ ID NO: 282221 - DNA, 394 bp, Unknown
  Bacterial polypeptide expressing nucleotide sequence isolated from the Sargasso Sea
accgatttaatagtcattggtggtaaagagtatggaacaggctcatcaagagactgggcagctaagggcacaaaacttttaggagtaaaatctgtgtttgctgaaagtttcgagagaattcatagatcgaatttaattgggatgggaatattgccattgcaatttatagacggcatggatagaaaaaaattaaaacttttaggctcagaaataattacagttaaagggatagaaaagggattaaatcctggagacaaactgtctgtagaatttaaataccaaaatggagaaataaaaaagattaaaatgctgtgtagaattgatactaacaatgagttagaatattataaacacggcggaattcttcaatacgttttaagaaatacaatttaac

SEQ ID NO: 282222 - DNA, 874 bp, Unknown
  Bacterial polypeptide expressing nucleotide sequence isolated from the Sargasso Sea
ggtgctacatgcggatttttttcaacagataaagaaacaataaagtatttggagttatctgggaaagatgatcatcaaattaatattgtaaaaaaatatacatcaattcaaaagttatggattgatggtacttacgatccaaactttgatgaaacagtaaatttagatttgaacctaattgaaccttcagttgcaggtccaaaaaggccacaagataagatacttgttaaagatattcctgaagtatttaaaacaatagacgctgttaattatgataaagttatttctaataagaatcttaaatctggagatgttgttattgcagcaataacaagttgtacaaatacttctaaccctaacgtcatgattgctgcaggtttagttgctaaaaaagctgtagaatttggactagatgtaaaaccatgggttaaaacaagcttagcgcctggaagtaaagtagtcagtgattatttagataaagcaaatttatctcaatatcttgaccaaattggttttaatttagttggctacggctgcactacgtgtataggtaactctggaccacttgaagaatgggtctctaatgaaataaaaaataacaacttaacagtatgttcaattttatcaggtaatagaaattttgaaggaagagttcatcaagaagtaaaagcaaattttttagcctcaccccctttggttgtagcatttgcaattgcaggtaatatgaatattgatatttttaaacaacctattggaattagtaaattgggaaaagatgtatttcttagggatttatggccatcctcatctgaaataattgaaatagtcgataattcaatatctactgaaatgtttaaaaaaagatacaaagaaa

SEQ ID NO: 282223 - DNA, 736 bp, Unknown
  Bacterial polypeptide expressing nucleotide sequence isolated from the Sargasso Sea
tgaatctgtttcaaaaaaatatggtatcggtttctgggaacctggtgctggtatcattcatcaagttgttttggaaaattatgcatttcctggcggaatgatgattgggacggatagtcatactgtaaacgctggtgggctcggtatggttgccataggagttggaggtgcagatgctgttgatgtaatggctggaatgccatgggagttaaaatttccaaagctcataggagtttgtcttaaaggtgaacttggcggatggtcctcagcaaaagatgttattttaaaggtagcaggtatattaacagttaaaggcggtactggctctgtggtggaatattttggctcaggagcagaaaaattatcttgcactggaaagggtactatatgcaacatgggcgcagaggtaggtgctacaacatcaattttttcttatgatcaaaatatgtcaaattaccttcgtgctactagtaggcatgagcttgctgatcttgcagatcaaaatgctgaatttttatgtggagatccagaagtctacaaagatcctgaaaaatattttgatgaggtcataactgtagatttagatactttagaacctcacattaatggtccattcaccccagacctggctacgccaatctcggaatttgcagagtcggctaaagaaaatggttggccattaaaactggatgttggattaataggttcatgtacgaattcttcttatgaggatatt

SEQ ID NO: 282224 - DNA, 505 bp, Unknown
  Bacterial polypeptide expressing nucleotide sequence isolated from the Sargasso Sea
tatttcaaataattgtttaatcggtgctattaatgcttttggtggtgaggcaaaccttgtggttaatcaattaactggagacaagggagaggttcctgcaactgcaagagcatacaaagctgctggaataccaaccattgtggttggagatcataattatggagaaggatcttcaagagaacatgctgcaatggaaccaagacacttaggggttaaagcagttattgttaaatcatttgctagaattcacgagactaaccttaaaaaacaagggatgttaggtttaatctttgaaaatgaaaatgattataatttaattaaagaagatgatacttttaactttttaaatttagataaatttgctccaaaaaagagattgtcgttagaaattattcataaagatggaactaaaaatgttattcaattaaatcacacttataattctcaacaaatagaatggtttaaacatggatctgcacttaatttaataaagtcaaataattaa

SEQ ID NO: 282225 - DNA, 385 bp, Unknown
  Bacterial polypeptide expressing nucleotide sequence isolated from the Sargasso Sea
tatgtcgtcgaccctacgagaagccagtaaggacacattgcaggttaaagataaaacctaccgctactacagtttacgtctggctgctaaatcactgggtgatatcacccgactacccaaatcgctaaaagtgttgctggaaaacctgcttcgttggcaggatggtaattccgttaccgaagatgatattcatgctctcgcgcattggctgaagaccgcccatgccgatcgtgaaattgcctatcgacccgctcgtgttctgatgcaggattttaccggcgtgccggcggtggtcgatcttgccgccatgcgcgaagcggtgaaacgactggggggagatacggcaaaagtgaatccgctttcgccagtggaccttgtcatttga

SEQ ID NO: 282226 - DNA, 313 bp, Unknown
  Bacterial polypeptide expressing nucleotide sequence isolated from the Sargasso Sea
ggtataaaggcagttattgcagagagttttgagagaattcacagatctaatttaattggaatgggaatattgccattgcaatttatcaatgatgtaaatagaaaaaatctaaaattaatcggatctgaattaattagtattatggatatagagaagggcttcaatccatcagatgaagtaaatgttgaaattaaatatgcgtctggtgaaatgaaaaaaattaaaactttatgcagaattgatacaaaaaatgaattagagtattataaaaatggaggtattcttcaatatgttttgaggaatatgatttagt

SEQ ID NO: 282227 - DNA, 538 bp, Unknown
  Bacterial polypeptide expressing nucleotide sequence isolated from the Sargasso Sea
atggcctttgatattaatgtaatcaaaagagtatactctgaaatgtcagaaaaaatcaaaaaggcaagatcgcttttaggaaggccaatgacattatctgaaaaaattctttattcacatttatggaatgataataatgtagagacttttaaaagaggaacagattacgttgattttggtcctgacagagtaacatgccaagatgcaacggctcaaatggctcttcttcagtttatgcaagctggaaaagataaagttgcagttccaacaactgttcattgtgaccatttaattcttgcccaatctggtgcattaaaagatttaaagaacgcaaataaagttagttctgaagtatttaattttttagagtctgtatcaaaaaaatatggtattggattttggaaacctggtgctggaattattcatcaagtaattcttgagaattatgcttttcctggaggaatgatgattggtacggattcacatactgtaaatgctggaggtcttggtatggtagccattggagtgggtggtgctg

SEQ ID NO: 282228 - DNA, 324 bp, Unknown
  Bacterial polypeptide expressing nucleotide sequence isolated from the Sargasso Sea
agagccaaatatttatgatgttgaaaaagaagattttaaaataaccgatggcgatgtgttaattgctgcaatcacttcttgtactaatacttccaatccaagtgtactaattggagcaggtttacttgcaaaaaatgcaattgaaaaaggtttaatgactaagccctgggtgaaaacatctttagcacctggatctcaagtagttacagattatttagaaaaagctgggctgaatatttatttagataagttaggatttaatttagttggttatggatgcactacttgtattggtaattcaggtccattagctgataacatatc

SEQ ID NO: 282229 - DNA, 301 bp, Unknown
  Bacterial polypeptide expressing nucleotide sequence isolated from the Sargasso Sea
tgtaatcgcagaaagttttgaaagaatacatagatcaaatttaattggcatgggaatacttccgcttcaatttaaagatggacttaatagaaataaattaaatctcaagggttctgagcttattactatcattaatatagaaaaaggtttaaccccaggtcaagatgttgaatgcgaaattaagtttgtagatggagttgctaaaaaaattagtttgctttctagaattgatacagcaaatgagattgaatattataaaaatgatggaatattaaaatacgttttaagaaacatgctataa

SEQ ID NO: 282230 - DNA, 1015 bp, Unknown
  Bacterial polypeptide expressing nucleotide sequence isolated from the Sargasso Sea
cgaatcagttttagttaagttcaaaggtgaaatgcaaccaggtatcacgctaagggatttagtgaatgctattccttatgcagcgatccaaagtggcgatcttactttagagaaaaaaggtaagaaaaatatattttcaggacggatacttgaaatagaggggcttccgaacctcaaggtcgaacaagctttcgaaatctctgatgcttcggctgaaaggtccgctggcggctgtacaatacgtctaaataaagaacctattattgagtattttaagtctaatataacacttcttcgatggatgattgacaatggttaccaagacccacgaactttggaacgaagagcacaggctatggaagaatggcttgctaatcctgtacttcttgagccggatgcaaatgcccaatattttaagactatcgaaattaatctcaacgaaatcaaagagccgctattagcttgtcctaatgatcctgacgacattaaaaccctatcacaagtgaacggcacagaaatagatgaagtatttatcggctcttgtatgactaatattggtcactttcgtgctgctgccgaagtattgaagcaagtcgaaggatccctcccaacacggctatgggtagcacctccgaccaaaatggatgaacatcaattaacagaggaaggaatctacagtatatttgggacatcaggtgcccgaaccgagatgcctggatgctcattatgcatgggcaaccaagcgagggttgccgctgattccacagttgtgtcgacatcgacaagaaattttccgaatagattaggtcaaggagctaatgttttcttagcttcatcagaattggctgcagtcagcgcagccatcggaaaaattccaacgatgtcggaatacatgcagtatatgtctgggatagacaccatgtcagagagtatttaccgatacctaaattttgacgaaatagaagaattcgtagaggcatcggatcgagctaagaatattcctctgactaacatt

SEQ ID NO: 282231 - DNA, 319 bp, Unknown
  Bacterial polypeptide expressing nucleotide sequence isolated from the Sargasso Sea
atgcaggatagttataaaacaaaaaaaaccctaaaaattgggaaaaaacagtacacattcaatagtctcagacttgctgaaaagcacggtttaaaaaatatttcatctctccctttctcaatcaaaattcttttagaaaatcttataagaaatgaagatggaataacagttacatcgaaagatataaaagagttcagtaaatggaaaaaaaataaaaaaattaatcttgaaattaattttcgtcccgcaagagttcttatgcaggattttacaggtgtacctgctgttgtagaccttgctgcaatgagagcggcaatga

SEQ ID NO: 282232 - DNA, 610 bp, Unknown
  Bacterial polypeptide expressing nucleotide sequence isolated from the Sargasso Sea
tatgaaaccaggaaaaaaaaattcatttaaatctttaaaatcaataaagataaataataaagattataaatatttttctttattagaggctgaaaaaaatggtttaaaaggaatttcaaatttaccaaaatcattaaaagttttattagaaaatctacttagatttgaaaatgatttgtcagttaccaaagatcaaatagaagcagttcaaaaatggttaaaagaaaaaaaatcaaatactgaaatagcttacagacctgcaagagttttattgcaagattacactggaatacctgcagtagcagatttggcagcaatgcgagaagctgttaaaaagaaaaataaagacccaaatactatcaatccactttctacagttgatttagtcatagatcattcagtacaggttgatcagtcctcaaagcctgattcatttgaaaaaaatgttgatatagaatttaaaagaaatggtgaaagatattcctttttaaagtggggacaacaagcttttaataactttagaattgttccaccaggcactggtatatgtcatcaagtaaatttagagtatttatcaaaagttgtttggtgcgaaaaatataaagaagat

SEQ ID NO: 282233 - DNA, 871 bp, Unknown
  Bacterial polypeptide expressing nucleotide sequence isolated from the Sargasso Sea
caaaagaaaaatttaaatttaattcaccctgatacttgcatcggtactgatagccatacgccaatggttaatgctataggagttttaggttggggtgtaggcggagtagaagcagaaatttcaatgttaggaaaaacaataccaatgtctgtaccagaggtcgtaggtgtgaatttaacgaaacaacttaaagagggaattacatcaacagatttagtcttgtacataacaaagttattaagagacagcaaagtagtgggtagttttattgaattttgtggtgaaggagttgaaaatttaactgttggtgatagagcaactatttcaaatatggcaccagaatacggtgcaacagcagttttgtttcctgtagataaagcaactttaaattatttgagtatgacaggaagaacagaagaggaaataaaaattgttgaagaatattcgaagtgccaaaatttatggagaaaatctaatacaactccagagtataatcgggttctagatttagacttgtccacgatagagccatgtgtatcaggaccaaaaaatcctgaagataaaattgatttagataaattctcaaaagagattaatacacattctaaaatgctttataacaaagatctcagggatgatgaattcgaagtgcccactcaaggatataaaattaaagatgcagatattatgatagctgctatcacaagctgtacaaatactgcaaatccaaaaaatgttatagcagcgggtttaattgcaaaaaaattaattaaccttggttttaaaaagaaaaataaaataaaaacatcttttgcacccggtagtaaagttacagctgaaatcttaaaaaaatctggttacaaaaatattt

SEQ ID NO: 282234 - DNA, 619 bp, Unknown
  Bacterial polypeptide expressing nucleotide sequence isolated from the Sargasso Sea
tatgaaaccaggaaataaaaattcttacaaatcattatctgacctagaggttaacggtaaaaattataaatattattcattaaaaaaagctgaattaaacggtttagaaggtgtttcaaaattaccaaagtcattaaaagttttattagaaaatttacttaggtatgaggacgaaatatcagtcaatcaaaaacaaatagaagcagtaaaaaactggcttgatacaaaaaaatcaaaaactgaaatagcttacagaccagctagggttttactccaagattatacagggataccagcagtggctgatttagctgctatgagagaagctgtaaaagaaaaaaataaagatccaaatacaattaacccattatctgcagtcgatttagttattgatcactctgttcaagttgatcaatcagcgaaaaaagattcatttgaaaagaatgtagatatcgaatttaaaagaaatggcgaaagatattcctttttaaaatggggtcaaagcgcttttaacaattttagaattgttcctccaggaactggtatctgtcatcaggttaatttagagtatttatcaaaaggtagtttggttagaagaatacaaaggagaaaaatatta

SEQ ID NO: 282235 - DNA, 781 bp, Unknown
  Bacterial polypeptide expressing nucleotide sequence isolated from the Sargasso Sea
ccatgtattggacaatgggcaagagaaggtgctgataagcaagaaaaaaactcgataattcactcttttaatagaaactttgctaaaagagctgatggcaaccctaatactcacgcttttgtagcatctcctgaaattgtagcagcaatagctatttctggcgatttaggttttaatcctaaaacagattcattagttaatgatcttggtgagaaagttagattagaagaacccactggttgggagttacctccaaaaggttttgaagttgatgataggggttatattgaaccagacaaagatggatctaatgttgaagttataattaatccagaatccaaaagattggaaaaattagaaccttttgctccatgggatggaaaaaatataactgaagcaaaacttttaattaaagcatttggcaaatgcactaccgatcatatatctatggcaggtccttggcttagatacagaggtcatttagataatatttcaaacaactgtttgattggtgctgttaacgcatacaacaagaaaacaaactttataaaaagtcaactaaatggtgagtatggtggagttcctgaaactcagcgtgagtataagaaaaataatatccctacagttgtagtaggcgaccataattatggtgaaggatcatcaagagagcatgctgctatggaacctagacatcttggtgttcgagtagttattgttaaatcctttgcaagaattcatgaaacaaatttaaaaaagccaaggtatgctagcattaactttt

SEQ ID NO: 282236 - DNA, 439 bp, Unknown
  Bacterial polypeptide expressing nucleotide sequence isolated from the Sargasso Sea
gatgataggcacggatagtcacactgtaaatgctggtggcttaggaatgattgcgattggtgttgggggtgcagatgcagttgatgtaatggctggcatgccatgggaactaaaatttcccaaattaattggagtaaaacttactggagagctatcaggatggacatctgcgaaggatgtgatattaaaattagctggaattttaaccgtcaagggtggaactggatctattattgaatattttggggaaggaacaaaaaccttatcctgcactggaaaaggaacaatttgtaacatgggggcggaaattggggcaaccacatcaatttttggttatgatgaaaaaatggaagaatatcttaaagccactggaagagaagagatagttgggtatacaaataatatagcggagcatctagtttctgataaagcggttaca

SEQ ID NO: 282237 - DNA, 890 bp, Unknown
  Bacterial polypeptide expressing nucleotide sequence isolated from the Sargasso Sea
aaatatattttccggccgctgtcttgaaatagaaggtttgccagacttgaaagtagagcaagcatttgaattgtctgatgcatccgctgaaagatctgcatcaggatgtacagttcgattaaataaagagccaattatagagtacttaaaatcaaatattgtgatgcttaggtggatgattggcagtggttatggcgatgctaaaactttggagagaagagctcaagcaatggaagagtggattgcaaaccccgaactactagaaccagatgagaatgctgaatatgcggagataattgaaatcgaccttaataaaattacagagccccttctagcatgtccaaatgatcctgatgacattaaacccttatcagaagttgcagagacaagcattgatgaagtctttattggttcatgcatgacaaatattggtcactttagagctgcgggtcatctacttaaaaaatacaatggaacaaaggcaagattatgggtagttccacctaccaaaatggatgagaaacagttaatggaagaaggtatttacaatgtcttcgggacatctggtgcgcgaacagaattacccggttgctctctttgtatgggcaatcaagctagagtgctcgcaaattctacagtagtctcaacttctacaagaaattttcctaatagactgggtgatggagctgatgtatttctagcttcagcagaacttgctgcgattgcctctgtattaggcaagcttccttcactaaaggaatatttaaaatacatggaagaaattaacccgctggccgatgatatatatagatatttaaattttaatgaaatagatcaatatgttgaaagcgcaaatacagctgacattcctgctgtaaatatcgtaagcg

SEQ ID NO: 282238 - DNA, 818 bp, Unknown
  Bacterial polypeptide expressing nucleotide sequence isolated from the Sargasso Sea
cgttgattcatttaggatagtcaatcaaaagtttcaatatatcagtttaagaaaagcaagagatttttttaaatttgacttaaactgtcttccattttcatacagaattcttttggaaaacattttaagaaagttcgataataaaaatattaaaatagaggatattgaaaatttaatttctttaaaatttggtaaagagatttttttttcccctagtagagttttgatgcaagattacactggagttccggcgattgcagatttagccgcaatgagggataaaattaaaagtgatggtttagatcccaaattaattaacccaattgttcctgtgagtttggtaattgatcactcaatatctgttgatagttttgcaactataaactcattgaatgaaaatgttaaaatggaatattttagaaactctgaaagatataaacttttgaaatgggcacagagttcaattaagaatttcacactctttcctccaggttcaggtatttgccatcaaattaatttggaatttctctcggagatagtttcaaacaaaaataattttcttttttttgattctgttgttggaacagatagccacacaacaatggttaacgctttgtcagttttgggatggggagttggtggaattgaagctgaagcagtaatgcttggtcaacctatttcaatgcaattaccagaggttgttggtattaaaattattggtaatctgctagatggggtcactgcaacagatgcagttttgcatttaactgaaaaattaaggaagcttaatgtagttggaaaatttgtagagttttttg

SEQ ID NO: 282239 - DNA, 332 bp, Unknown
  Bacterial polypeptide expressing nucleotide sequence isolated from the Sargasso Sea
aaaggcagttattgcagaaagtttcgagagaattcatagatccaatttggtaggaatgggagtaatacctttagaatttgaaactggtttaactaggcatgattttaggctaacaggaaaagaatgtattacaatactaggtttagataacgatctaaaacccttacaggaggttcatggttttataaagtacgctgatggacaggaaaaagagataaaacttagatgcagaatcgatactgatatggaattagaatatattgaaaatggtggtgtcttacattacgttcttcgaaatctggcaaaagacaaagtatcccaggaaatttaag

SEQ ID NO: 282240 - DNA, 799 bp, Unknown
  Bacterial polypeptide expressing nucleotide sequence isolated from the Sargasso Sea
cgacccagcgatttagcggtcaaaggtattagtggtgtggtggaaaacgagccgggtttaatgccggacggtgctgtcattattgccgctataaccagctgcaccaacaccagtaacccacgtaacgtgatagctgcgggcttattagcccgtaacgctaaagccaaaggcttaagccgtaagccatgggtgaagagctcattggcgcctggttctaaaactgttgagctgtatttaaaagaagccaacttactgacagatttagaaagtttaggttttggtattgtggcttttgcctgtactacctgtaacggtatgagcggcgctttagatcctgtgattcaaaaagagctgatagagcgtgacttatacgccactgctgtgttgtctggtaatcgcaactttgatggccgtattcacccttatgccaaacaggcatttttagcctctccagctttggttgtggcttatgccatagccggtactatccgctttgatatcgaaaaagacgtgctggggctggacaaagacggcaatgaaattcgtttaaaagacatttggccaagcgatgctgaaattgatgcagtagtggaaagcagcgtcaaacctgaacagttccgtaaagtctatgagcctatgtttgcagtttcagtggattacggcgaaaaaatcagcccgctgtacgactggcgtccacaaaccacttatatccgccgccctccgtattgggaaggtgctttggccggtgagcgcagcatgaaaggtatgagggcgctggcagtgctgggtgataacatca

SEQ ID NO: 282241 - DNA, 860 bp, Unknown
  Bacterial polypeptide expressing nucleotide sequence isolated from the Sargasso Sea
tcctgaaacagtaataggacttgcccttggaggtacactagatttcaattttcttgacgatacattaacaagtaaagatggtgaagagataaccctcagcccaccaattgcagatgaattacctgataaaggatttgaagagactttagagggatttattcaacctacacctggtgatgatgtagaagtggtaattgaccctgaatcaaatagattacaaagactaactccttttgaagcacctaatgaggctgaatacaaatcaatgagtgtattaatgaaagcagaaggaaaatgtacaactgatcacatatcaccagcaggtaagtggttgcaatttagaggtcacctagaaaatatatctcaaaacttatttaatggagtgaataatgcttttgcagacaatgctggtgatggtgttaatgttttaacaaaagaagttgatacattacctaacattgcaaaaaattatcatgctgagaatgttagctgggttgcagtcggcgatgaaaactatggagagggatcttcaagagagcatgcagcaatggaaccaagatttagaggttgcaaagtagttctggttaaaagctttgcaaggattcatgaagcaaacttgaagaaacaaggtatcttgcctttagtttttgatgataaaaatgattatgaaaaaattgaacaattcgacaaaatgacaataaagagtcttagcgatataaaagtagatactccaatcgagattgtcttagagaaggaaaacggagagcaagaaaccattaaagccaatcactctttatcttcagatcagatatcctggttttttgctggttctgcattaaattacatcaaatcaaaataaa

SEQ ID NO: 282242 - DNA, 771 bp, Unknown
  Bacterial polypeptide expressing nucleotide sequence isolated from the Sargasso Sea
gatggacttatcaagaacaccaatagagctagttgaatcagtttataaaacgttaactgaaaatatattaactataagagagcgaaaagatgctcctttaactcttgctgaaaaaattttatttggtcacgccacggacccttcatcaatttcattagataagggagaagattatggagattttgcacctgatagagtagctatgcaagatgcaacagctcaaatggcccttttgcaatttatgcaggcagggatggaaaaaacagcagtaccttctactgttcactgcgatcatcttattcaagcatatgaaggagcaagtagtgacttagcagttgcaaatcagacacataaagaagtttttgattttttacgttcagcatcacagaaattcggaatagggttttggggtccaggagctggaataattcatcaagttgttttagagcaatatgcatttccaggtggaatgatgattggtactgatagccatactcctaatgctggaggacttggaatggtagcgattggtgtaggaggagcagacgcagtagacgttatggctggaatgccttttaatactaaaattccaaagttaatcggagttaaattaactggttctttaagtggatggagttcacctaaagacataattctcaaagttgctgagattctaactgttaagggtggaacgaatgcaatagttgagtattttggtgaaggaacttcttcaatatcaactactggtaaatcaactattacaaatatggg

SEQ ID NO: 282243 - DNA, 865 bp, Unknown
  Bacterial polypeptide expressing nucleotide sequence isolated from the Sargasso Sea
tccgtttcaaataaatatggtataggattttggaagccaggtgctggtatcatacatcaagttatcctggaaaattatgcatttcctggaggaatgatgattggtacagatagccatactgtgaatgctggtgggctaggaatgattgctatcggtgtaggtggtgcggacgctgttgatgctatgactggtatgccatgggagttgatgttcccaaaattaattggtataaagttaaatgggaaaatttcagggtggacctcagcaaaggatgtgatactaaaggtggccggaatgttgactgttaagggcggcactggtgctattgtagaatattttggcgatggtgctgcatcgttatcatgtacaggaaaaggaacaatatgtaacatgggggcagagattggtgcgacaacatcaatttttccatatgataacaatatgggtgaatatcttagggcaactggccgtggtaaagttgctgatttatcagagagcatgagcgaaaatttaaaatctgatgatgatgtatatgaaaaacctgaagagtattatgacgaagtgattgaaattgacctagataaattagagccttatataaacggcccattcacgcctgacaaagcaacccctatctcagaaatgaaaatggaggcaaaaaaaaatggttggcctaatgatgtatcagttggtttaattggatcatgcacgaactcgtcatacgaagatatttctcgttcggcatcaattgcggcgcaagcagttgagagaggattggatacaaaagccacattcactataacacctgggtctgagcaggtaaggagcactattgagcgagatggttacattgatattttgaaaa

SEQ ID NO: 282244 - DNA, 583 bp, Unknown
  Bacterial polypeptide expressing nucleotide sequence isolated from the Sargasso Sea
atgtacgacagctttaagacaaaaaaaatactaaaaataggaaaaaaaacctacacctatttcagcttcaaagctgctgaaaaaaatggtcttaaaaacatctcttcattgccattttcaataaaagttctcttggagaatctcataagaaacgaggatggcactactgtcagtgtggatgacatcaaagattttggtaactggaaaactaataaaaaaatcaatagagaaatcaattttagacctgcgagagttttaatgcaggattttacaggtgtgccagcggttgttgaccttgcatcaatgaggtctgcaattatgagtgagaagggagacgctaaaaaagtaaaccctttatcaccggttgatttagtaatagatcactctgtgatggttgataagtacgggtcggctacttcttacaaggcaaatgtagatttagaatataaaagaaacattgaaagatatgaattcttgagatggggacaaaaatcctttaacaactttcgtgttgtaccacctggtacaggtatttgtcacccaggtaaatctagaataccttgccaagactgtttggtctgag

SEQ ID NO: 282245 - DNA, 904 bp, Unknown
  Bacterial polypeptide expressing nucleotide sequence isolated from the Sargasso Sea
gggattacttacgatagataaggatggaaaaaagaatgtcttttctggcaggtgtcttgaaattgaaggcctgcctaatatgaaagttgaacaagcttttgaactttctgatgcttctgctgaaagatctgcatcaggttgcacagttaagcttaataaagaaccaataatagaatatcttcagtcaaacattgttatgttgagatggatgattgcaagtggctacggagatgcaaagacgcttgaaagaagagctcagtcaatggaagagtggattcttaatccacaactactagaagcagataaagacgctgaatatgctgagataattgaaattgatctaaacgaaatcaaagaacctctccttgcatgtcctaatgatccagatgatataaaacccctatcagatgttgcgaacacaaaaatccaagaagtttttattgggtcgtgcatgacaaatattggtcattttagagcagctggtacgcttcttgagaaatataaaaatcttaaggcaagactgtgggtggtgccaccaacaaagatggacgagaaacaacttatcgaggaaggtatatacaatatcttcggagtatctggtgcaagaaccgaggtaccgggttgttcattatgcatgggaaatcaggcaagagttttagcaaactcaactgttgtttcaacctctacaaggaattttcctaacagacttggtgatggagctaatgttttcttagcatcagcagaattgtctgctatatgttcagttcttggcaagattccaactattgagcagtatcatcagtatatgaatgatataaatccattgtcagatcaaatttataggtatttaaactttaatgaaattgatacttatgttgaaagtgcaaacaatgctgaaataccc

SEQ ID NO: 282246 - DNA, 602 bp, Unknown
  Bacterial polypeptide expressing nucleotide sequence isolated from the Sargasso Sea
tcgtacatcgagcgtcgtattactgcaatgcaagattggttggctaacccagaacttatggaagctgacgcggatgcagaatacaagcacgtacttgaaatcgacctagctgatattaaagagccggtactttgtgctccgaatgacccagatgatgcgcgtttactatctgacgttacaggcgagaaaatcgatgaagtatttatcggttcttgtatgactaatattggtcatttccgtgccgcaggtaaattattagatggctttactggtcgtattccaacacaactttgggttgctccaccaacgaagatggataaagaccaacttacagacgaaggttactacggtatctttggtcgtgtaggtgcacgtattgaaactccagggtgttcactgtgtatgggtaaccaagcacgcgttgcagataaagcaacggttgtttctacctcaacacgtaacttccctaaccgtttaggtacaggcgcaaacgtattcttagcatcagcagaacttgctgcagtggcggcaattttaggtaaattacctactccggctgagtaccaggaatatgcagcgaaaatcaatgcaacggcagcaga

SEQ ID NO: 282247 - DNA, 886 bp, Unknown
  Bacterial polypeptide expressing nucleotide sequence isolated from the Sargasso Sea
tatgcccgaatctgtattagtaagattcaagggtgaaatgcaaccaggaataacactgagagatttggttaacgcaattccatatgcggcgcttcaaaaaggattgttaacgattgataaagatggaaagaagaatgttttctctggaagatgtctggagattgaaggccttccaaatatgaaagttgaacaagcttttgaactatcagatgcttctgctgaaagatctgcttctggttgtactgtaaagcttaatgaagaacctatattggaatatcttaaatcaaacatcgtgatgttgagatggatgatagcaagtggctacggtgatgcgaaaactttggaaagaagagctcaatcaatggaggaatggattctaaatcctcaacttctagaagcagatgataatgccgaatatgctgaaataatcgaaattgatttaaatgaaattaaagaaccgcttttagcttgtccaaatgatcctgatgatataaagcctttatctgaagttgctaatacaaaaattcaagaagtttttattggttcttgcatgacaaatattggtcatttcagagctgccggaactttattacaaaaatataaaaatattaaagcaagactttgggttgttccaccaacaaaaatggatgaaaagcaacttatagaagaaggcatttataatatattcggagtatctggagcaagaactgaagttccaggctgttcactttgtatgggtaatcaagctcgggtcttagctaattcaactgttgtatctacttcaactaggaattttccaaataggcttggagatggggcaaatgtatttttagcttctgctgaattatccgccatatcggcagttcttggaaactccccagtgtag

SEQ ID NO: 282248 - DNA, 818 bp, Unknown
  Bacterial polypeptide expressing nucleotide sequence isolated from the Sargasso Sea
tgacattgatcccggtgccagcggcgctttcgcgtgggaagaagggagtacatatattctaaagccgccttttctggagactgcggtggcgcaatcgccaccaaagatagagggcgcggccatcctcgctatgtttggcgacaacgttacgacggaccatatatcgccgggtgcccgtattcttgaaggaacactggctggtgattacttggcggcccgcggcacgccgccggatgatttcagcggatttcttcagcgtcgcaccaatcatgagatcatgatgcggggtaccttcaacaacgcacatattcaaaatgaaatgacgccggagcgtcggggcggttggacactttatcaaccgactggtgatcttatgaccattttcgaagcccatgagcgctaccgtgctgacgggcgggcgctggttgtggttgccggacgtgagtacggcacaggatcgtcgcgcgactgggcggcgcgggggccacatctccttggtgtgcgtgcgattttggccgaaggctttgagcgcattcaccgcagcaaccttgtcggtatgggcatcctgcccctagaattcaaagacggtgtcagccgcgagacgctgggcctcgatgggtcggaatccgtttacataagtggttttgcaatggctatggacgtcgggcagacagtttctgtgtgtttcgcaaaaccagatggtacgaccagcgaggcgaatgtgctttgccgtctcgatacggcacgtgagattgcctggtttgaggcgggtggcgtgatgccttttgtcttgaagggcatatctgaaacggcttgag

SEQ ID NO: 282249 - DNA, 834 bp, Unknown
  Bacterial polypeptide expressing nucleotide sequence isolated from the Sargasso Sea
atataagcaataaaaatattagtgatggatcagtcgtacttgcagcaataacatcgtgcacaaacacctcaaaccctcacgttatgattggagcaggtctcattgcaaaaaaggcaatagaattaggaattaaaattaaaccttgggttaaaacatctttagctcctggatcaaaagtagtaaccgaataccttcaaaaatctaacctattaaaatatcttgaaaaattaggatttaatattgttgggtatggttgcactacatgtattggaaattcaggtgatttcattaaagaggttcaagaagaagtaattaaaaataatttagctgtagcatctgttctttcaggaaatagaaattttgaagctagaattcatccgaatattaaaatgaattttcttatgtctccaatgtttgttgtaatttattcacttattggaaaaataaatattaatattttaaaagataaaatagcggttgataaaaatggaaaacatatttttttaaaagatttatggccaaaaaatattgaaatagagaaaataatgaatagtgttgtaaataaaaatcaatttaaaaaaacttatagtaaaatatttaagggagattcaaattggcataggttaaaagtaaaaaaatcatcattatttaattgggataaaaattcaacttatataaaggaagtttctttttttagaaataataaaactaataatacaaaaaatataaatgctaaaattttagttcatttgggtgattcagtaacaactgaccatatatccctcggcaggcaagtttctagatactcatccagctggggtatacttaactaac

SEQ ID NO: 282250 - DNA, 553 bp, Unknown
  Bacterial polypeptide expressing nucleotide sequence isolated from the Sargasso Sea
tctcctgccaggaccttggcttagattacgtggtcatcttgataaactaagtgataatttacttttaggagctgttaatgcattcaatgatcaagttggaaaagccaaaaacagtctcactgaaaatattgaaaattgttcaaacatcgcaagaaactacaaagaaaaaaatatgcgttggataatagtaggtgataataattatggtgaaggaagcagtcgtgaacatgctgctatgactcctagatttttgggatgtactgctgtaattgcaaaatcttttgcaagaattcatgaaacaaacctcaaaaaacaaggaattcttgcattaacatttgaaaactctgatgactatgaaaagatcaaagaagatgataaaattagtatatctggcctaactcattttgcacctgacaaatcttttgaatgtatgttaaaacactctgatggaagtagtgaaaaaatcatgttaaaacattcttacaattcttcacaaattgagtggttcaaagcaggttctgctctaaacgtcttaaaaaataaaacaaaataa

SEQ ID NO: 282251 - DNA, 790 bp, Unknown
  Bacterial polypeptide expressing nucleotide sequence isolated from the Sargasso Sea
cactgttaaattaaataaagagcctataatcgaataccttaattctaatattgtaatgttaaggtggatgatagcctctggttatggcgatgcaaaaacgcttgaaagaagagctcaaggaatggaagaatggattcttaatcctgaattattagaagctgacaaagatgctgaatatgcagaaattattgaaatagatctaaatgaaataaaagaaccattattagcatgtccaaatgatccagatgatattaaaccattatcagaggttgcaaatactcaaatccaagaagtatttattggctcttgtatgacaaatataggtcactttagggctgctggaactctattagaaaaatataatggcattaaagcaagattatgggttgtccccccaacaaaaatggatgaaaaacagcttattgaagaagggatatacaatatttttggagtttcaggagctagaactgaggtaccaggatgctctttatgtatgggtaatcaagcaagagttcttgcaaattcaacggtagtatcaacatcaacaagaaactttcctaatagacttggtgatggtgctaatgtttttctagcatcagctgaacttgcagctatttcatctgtacttggtaaattaccaacagttgatgaatatcataaatatatggcagatataaatcctttatcagatgaaatttatagatacttaaattttaatgaaatagatagttatattgaaagtgcaaactctgcagtgatacctgctgtaaatattgttaacccaaattaa

SEQ ID NO: 282252 - DNA, 319 bp, Unknown
  Bacterial polypeptide expressing nucleotide sequence isolated from the Sargasso Sea
ttgttaggaatcaaaactgttattgctgaaagctttgaaagaatccacagatctaacttaattggaatgggggttttgcctttacagtttattaacggagtcaatagacaaaatcttaatttagatggatctgaattatttacagtaaaaaaattagaaaatgggattaaacctttggaacaggtagatttagagattaaatataatagcggagatattaaaataatcaaagtactgtccagaatagacacaaagaatgagttggagtattataaaaatggcggaattttacaatatgtacttaggaatatgatttaaa

SEQ ID NO: 282253 - DNA, 817 bp, Unknown
  Bacterial polypeptide expressing nucleotide sequence isolated from the Sargasso Sea
aaaatttctgttgctctaattggaagttgtacaaactcatcttatgaggacatgtctagatcatctagtgttgcaaaacaggctgaaacatatggaattaaggctaaaatcccactattagtaactcctggttctgagcaaattcgttctacaattgaaagagacggacaaattgatactttgaaatcaattggtgcaactgttcttgctaatgcatgtggtccttgcattggtcaatgggatagaccagaactaaaagatggagaaaaaaattccattgtaacatcgtttaatcgaaatttccctggacgtaatgatggaaaacgtgatacaatgaacttcatagcaagtcccgaaattgtaactgcacttgcactaggaggaagtttatcattcaatcctcttgaagattcacttgagggaaaagatggtaaaaaaattaaactatctcctcctgaaattgctcctgaagttcctgcaaatggatttgtaactaccgaaggaatctatcttactccttctgaaaaccctgaaaatgttgaagttttgatagatcctaatagtgaaagattacaaaaacttgaaccattttcatcttggaatgggaatgatttcactggattaaatttaattttcaaagcaaaagggaaatgtactactgatcatatttctcccgcaggcccatggcttagacttcgtggccatttggataatcttagtgacaatttactcttaggtgcagtaaatgcatttaatgatgaagtgggtagggcaaaaaatattctcacaaatagtattgaaaattgttcacagattg

SEQ ID NO: 282254 - DNA, 796 bp, Unknown
  Bacterial polypeptide expressing nucleotide sequence isolated from the Sargasso Sea
taaaaattttaatgtagttcctccaggaatgggaatatgtcatcaaattaatttagaatatttagcagagtgtgtcaaagaaaaagatgggtacctatttcctgacactttagtaggtacagattctcatacacctatggtaaatggaattggagtattaggttggggtgttggtggtattgaagcagaagcagcaatgcttggtcaacctatttttatgatattaccagaggttatagggttaaaattaaaaggaaaactaaatgaaggaattacgacaactgatttagtattatctattactgaaaaattaagatcatatggggtggttggaaaaatagttgaagtgtttggtgatggagtaaaaaatctttcggtagctgatagagcaacaatatcaaatatgtcgcctgagtttggctgtactgatacacattggccaattgatgaacaaacaataaaatatttaaaaaattctaacagatctaataaattgatagatagagttatatcatattctaaaaaaaaccttttatggaatgaaaattataatctaattaaatacactgatgttgttaatttcaatattaacgaagtagttcctactatttcaggacctaaaaaacctcaagaaaaaattaaacttaacaatgtaaaagaaaaaacagaatatattattaaaaatgattttaatggaaaattaactaatgataaagtttctgatgggtcagtagtaattgctgctattacttcttgcactaatacatcaaacccaaatgttatgattggggcaggt

SEQ ID NO: 282255 - DNA, 991 bp, Unknown
  Bacterial polypeptide expressing nucleotide sequence isolated from the Sargasso Sea
cgcagctttaggtgttatgccattagatatgcttgaatcagttttagttaaatttagaggtgaactacaaccaggaattacactcagggatttagtcaatgctattccttatgcagcccttcaaaccggtcaactgactttacctaaagaaggtaaagtaaatgtattttctggaaaatgtctagaaatagaaggattacctaatttgaaggttgaacaagcgtttgaattatcagatgcttctgcagaaagatcagcttcgggatgtactataaaattaaatgaagaacctattagagagtatctagaatctaatattatccttcttagatggctaatctcagaaggttatgaagatgaaaaaactttagagagaagagcgcaagccatggaagcttggctagagaatccgatattaatggaagctgacgaagatgcagaatatgcagcagttattgagatagacttaaatgaaataacagaacctttgcttgcctgtccaaatgatcctgatgatatcaagaccttgtctgaagttgctaaaacaaatattgatgaggtgtttattggttcttgcatgacaaatattgggcactttagagctgcaggtaaactactagacaaagtaacagagctcccctctaggttatggatatctcctcccactaaaatggataaacatcaattaaccgaggaaggatattacaatatctttgaaaatgcaggtgtgcgacttgaaatgccaggttgttcactatgcatgggaaatcaagctcgtgtagaggcagagtcgacggttgtatcaacttcaactaggaacttcccaaatagactaggagatggagcgaacgttttccttgcttcagctgagctagctgctatatctgcaacacttggatatattcctacaatagaagaatataatgagttcatgtcagagatcaacacaatgggtgcagacgtttatagatatttaaattttcatgaaatc

SEQ ID NO: 282256 - DNA, 581 bp, Unknown
  Bacterial polypeptide expressing nucleotide sequence isolated from the Sargasso Sea
tctggcggatatcaaagagcctatcctgtgtgctccgaacgatccggacgatgcgcgtctgctgtccgatgtgcagggtgagaagattgacgaagtcttcatcggttcctgcatgaccaacatcggtcacttccgtgcggcgggtaaactgctggacagccacaaaggccagctgccgactcgtctgtgggtggctccgccaacccgtatggatgcggcgcagctgactgaagaaggctactacagcgtgtttggtaagagcggcgcgcgcattgaaatccctggctgttccctgtgtatgggtaaccaggcgcgcgtggcggacggtgcgacggtggtgtccacttcaacccgtaacttcccgaaccgtttaggtaccggcgctaacgtctatctggcctctgcggagctggctgcggtcgcttccctgctcggcaaactgccgacgccggaagagtaccagaccttcgtcgctcaggtggataagactgcggcggatacctatcgctacctgaacttcaaccagctggaacagtacactgataaagctgacggtgtgattttccagaccgcggtataag

SEQ ID NO: 282257 - DNA, 766 bp, Unknown
  Bacterial polypeptide expressing nucleotide sequence isolated from the Sargasso Sea
tcttgcgctggtagcacaatacttttatcccaagaaactgttcaagaatatttaaaaagcaatatttgcctgctagaaaaaatgatcgagagtaattatgaagattcaaaatcaatttcaagaagaataaatgatatgaaaaattggttaaaaaaaccatcattaattcaaccagattcaaacgctcagtatgaagaaatcattgaaattgatttagcaaaagtaacacaacctatagttgcttgtcctaatgatccagataatgtaaaagaaatcactgatgttgcaaatacaaatattgacgaggtttttataggttcttgcatgacaaatattggtcattacagagcagctgcaaaagttcttgaaggagtacaaaatttaaaagctaaattatggatttgtccaccaacaaagatggatgaagaaactctaaaagctgaaggttactataaaatttttgaagattgtggtgcaaggttagagttaccgggctgttctttatgtatgggaaatcaagccagagtagatgaaggttccgtagtattttctactagtacaagaaattttgacaatagacttggcaagaatgcacaagtctttttaggcagcgctgaattagcagcagtttgcgcactgcttggcaaaatacctgaagttgaggaatatcaggatattactaaaaataaaattaatccatattcagatgaactttatcgctatcttcaatttgatgaaataaacgatttcagcttgacaaagtaat

SEQ ID NO: 282258 - DNA, 379 bp, Unknown
  Bacterial polypeptide expressing nucleotide sequence isolated from the Sargasso Sea
aatgtcaaaacacattcaatcattaactgttggctctaaggaatatcaatacctagatctcaaatcattagacacaaataacctagatcaaatacccttttcccataaaattcttctagaaaatgctcttcggcacagtctagaggatgaaactagagaaaaagacgttgattccatactcaactgggatgcaaaatcaggtaaagctatagaaatctcattcacgccaagccgcgtgatcttgcaagattttactggggtaccggctgttgttgatctagcagcaatgagagatgccgtggcctctatgaagggagatgcgactcaaattaaccccttatcgcctgctgaacttgtcattgaccattctgtgcaagtt

SEQ ID NO: 282259 - DNA, 521 bp, Unknown
  Bacterial polypeptide expressing nucleotide sequence isolated from the Sargasso Sea
ccctaacgatccagataacgtaaaagaaattgctgatgttgcaaatacaaatattgacgaagtttttataggttcttgcatgacaaatattggtcattacagagcagctgcgaaagttcttgaaggtatacaaaatttaaaagctaaattatggatttgtccacctacaaaaatggatgaagaaactctaaaagctgaaggatactataagatatttgagaattgtggtgcaagattagagttgcctggctgttcattatgtatgggcaatcaagctagagttgatgaaggatctgtagtattctctactagtacaagaaattttgacaatagacttgggaaaaatgcacaagtatttttagggagtgctgaattagcagcagtttgcgcacttcttggaaaaatccctgaagtagaagaatatcaggatattactaaaaataaaattaatccatattcagacgaactttatcgttatcttcaatttgatgaaatacacaatttcagtttgtcaaaatgat

SEQ ID NO: 282260 - DNA, 533 bp, Unknown
  Bacterial polypeptide expressing nucleotide sequence isolated from the Sargasso Sea
tattactagttgtacaaatacatccaatcctaacgttatgattgcagcaggactagttgcaaaaaaagcaattgattttggtctagaagttaagccttgggtcaagacaagtttagcaccaggaagtaaagttgttagtgactatcttgataaagctggattaacagaatatcttgatcttttaggtttcaataccgttggttatggatgcacaacctgtattggtaattctggccccttagataaatgggtgtctaatgaagttaaaaaaaataatttaactgtttgttcagttttatctggaaatagaaactttgagggcagagttcatcaagaagtgaaagcgaattttcttgcatcaccccctcttgttgtcgcgtatgctattgctggaaacattaatattaatcttatgactgacttcataggtaaatctaaatctggaaaaaaaatatttttaaaagacttatggccatcaaatagagaaattaatcaaacacttggtttgtgtttaactcctagatatgtttaaa

SEQ ID NO: 282261 - DNA, 579 bp, Unknown
  Bacterial polypeptide expressing nucleotide sequence isolated from the Sargasso Sea
catgaaaccaggatcaaaaaactcttataactctttatctgatatagaaattagcagaaaaaaatataaatattattcaattaaagctgcagaaaataatggtcttgatggagtaagtaaacttccaaaatctctaaaagtattattagaaaatttattaagatatgaggatgatttaagtgtcactaaaaatcaaattgaagctattaaagaatggcttaaaacaaaaaaatctaaaactgaaatagcttacagacctgcaagagttttacttcaagattacactggtattccagcagttgcagatcttgctgcaatgagagaagctgttaaagaaaaaaacaaagatccaaataccataaatcctttatcttcagttgatcttgtaatagatcactcagttcaagttgataaatttgcaagtgcaaattctttaaaagaaaatgtagatattgaatttaacagaaattctgagagatattcttttttaaagtggggacagcaagcgtttaataattttagaatagttcctcctggaacaggaatttgtcaccaggtaaacttagaatatttatcaaa

SEQ ID NO: 282262 - DNA, 866 bp, Unknown
  Bacterial polypeptide expressing nucleotide sequence isolated from the Sargasso Sea
ggcacggatagtcacactgtaaatgctggtggcttaggaatgattgcgattggtgttggtggtgcagatgcagtagatgtaatggctggcatgccatgggagctaaaatttcccaaattaattggagtaaagctttctggggagctatcgggatggacatctgcgaaggatgtgatattaaaattagctggaattttaaccgtcaagggtggaactggatctattattgaatattttggggaaggaacaaaaaccttatcctgcactggaaaaggaacaatttgtaatatgggggcggaaataggggcaaccacatcaatatttggttatgatgaaaaaatggaagaatatcttaaagccactggaagagaggagatagttggatatgcaaataatatagctaaacatctagtgtctgataaagcggttacagataatccaaaagatttttatgatcaagtaattgaaattaacctttctgatctagaaccacacttaaacggaccttttacacccgatagggcaacgcccatttcaaaaatgcgcgatgaagctaaaaaaaatgattggcctattgatgtacaagtaggtctcattgggtcttgtacaaattcctcctatgaagacatatctcgctctgtatcaattgcaaaacaagctaacaaattaggcctatcaactaacgctgaatttaccattacacctggatcagaacaggtaaggcaaactattgagagggatggtttcattgaagaatttaatgcattgggagcgaaagtattcgcaaatgcttgcggtccttgcatcgggcaatggtccagagacggagcagaaaaagaagacaagaatacaattgtccattcatt

SEQ ID NO: 282263 - DNA, 531 bp, Unknown
  Bacterial polypeptide expressing nucleotide sequence isolated from the Sargasso Sea
gaaagtttaggggacatttagataatatctcaaataatatgcttactggcgctgtgaattatttcaatgataagacgaattctgtgaaaaatcaaattaatgggcagtatggtgaagtacctgatgtgcaaagagcttataaatcagcaggaatttcctctattgtggttggggatgaaaattatggtgaaggatcatcaagagaacatgctgctatggagcctaggcatcttggagttcgaattatattagtaaaatcatttgcccgtattcacgaaacaaatctaaaaaagcaaggaatgttagctataacatttaaaaataaatcagattacgataaaattttggaagatgataccattgattgtttagatctggaaacattttcagaaaacaaaaccctttgtctaaagttcgcacatacagatggttcctcagatttaatttattgtaaccatacatacaacaaatctcaaattgagtggtttattgctggttctgcattaaatttaattaacacaaaaaaataac

SEQ ID NO: 282264 - DNA, 604 bp, Unknown
  Bacterial polypeptide expressing nucleotide sequence isolated from the Sargasso Sea
atgatttttgatttagagatgataaaaaaggtttacagttctatcaaacgaaaagttgatagtgcaaagaaagtctgtaatcatcctcttacactttcagaaaaaattctttattcacatttatgggatggacatccaaaaaaaccttttttaagaggaaaagattatgttgattttgcaccagataggattgcatgtcaagatgctacagctcaaatggctttgttacaatttatgcaggctggtaagaaaaaggttgcggttccaactactgttcattgtgatcatttaattcaagctagaattggagcagatgaagatttacaaaatgctataaataatagtaatgaagtttttaattttttagagtctgtttcaaataaatatggtattggattttggaaacccggtgctggaattatacatcaagtagttttagaaaactatgctttccccggtggtatgatgattgggacggattctcataccgttaatgctggaggtttaggtatggttgccattggagttggaggagctgatgctgttgatgaaatggcaggtatggcatgggaacttaaatttccaaaacttataggagttaaac

SEQ ID NO: 282265 - DNA, 414 bp, Unknown
  Bacterial polypeptide expressing nucleotide sequence isolated from the Sargasso Sea
aggagtataaaaaaagaggaactgatctagtagtatttggaggaaaagaatatggcacaggttcgtcaagagactgggcagccaaaggaacaaaattgcttggtataaaagcaattatagctgaaagctttgagagaattcataggtctaatttaataggtatgggaattttaccattacagtttaacgatggaacagatagattaaatttaaaacttaaaggatctgaattgattagcattaacaatatagagaaaggcttccttcctcaagatcaggtagagttggaaattaaatacttatctggagaaattaaaaaaataaagacactatgcagaatagatactaataatgaactggaatattataaaaatggcggaatattgcagtatgttttaagaaaaatgatttaaa

SEQ ID NO: 282266 - DNA, 398 bp, Unknown
  Bacterial polypeptide expressing nucleotide sequence isolated from the Sargasso Sea
agatatccctttaatcgtgatagcaggaagtcaatatggtacaggaagtagtagagattgggccgcaaaaggtacgttattactcggagtaaaggctgtaatttccacgtcatttgagagaatccatcgttctaatttggttggaatgggagtattgcctttatgttttaaatctggtgaagatgcagaatctttagggttagacggaactgaatatttttcaataccaattaatgaagatgttaaaccattacagatgattgatattgttgcaacaaaggaagatgggaaaaatataatctttcaagcacaagttaggttagatactccagtagaagttgaatattatatgaatggtggaattttacatacagttttaagaaatttagcaaaataat

SEQ ID NO: 282267 - DNA, 146 bp, Unknown
  Bacterial polypeptide expressing nucleotide sequence isolated from the Sargasso Sea
ggtcactactgaccatatatctccagctggcagtattcaaaaaaacagcccaacgggcaaatatttcagggaacatcaaattttgcctaaagaatataactcgtatggttcaagaagaggaaatcatgaagttatgatgagaggaa

SEQ ID NO: 282268 - DNA, 530 bp, Unknown
  Bacterial polypeptide expressing nucleotide sequence isolated from the Sargasso Sea
aatgtcgcaaaacaattttggatgctgtatagattttgaaagtggtgaaggaactgcttcaatttatagtctggaagagcttcaaaaaagaggtataggaaccattaacaaccttccattttctatacgtattttattagaacaggctcttcgaaatgttgaagagtcaaattctaatcctgcagatgttaatttacttgctaattggaatccttcagaaaattcatctcaagaaattccatacagacctgctcgtgttattttgcaagattttaccggtgtgcctgcagttgttgatcttgctgctcttagatccgctgtggttgaattgggaggagacccttctctaattaacccccgagtgccagttgatttagtaattgatcattcaatacaagttgatgtttttggaagttctaatgcactcaaaaataatatggatattgagtttaaacgtaatcgtgaacgctatgaatttctaaaatggggtaagcaggcgttcgacaattttaatgtctatcttccgggta

SEQ ID NO: 282269 - DNA, 892 bp, Unknown
  Bacterial polypeptide expressing nucleotide sequence isolated from the Sargasso Sea
gaaaagagatgacataaaagaaggggagagtaattcaattgtttcatcctttaatagaaactttcctgcaagaaatgatggaaacgcagaaacattatcatttatcggatctcccgaaacagttattggactagctcttggtggaacgctagatttcaactttcttgatgatacgttaacaagtaaaaatggtgaagagataaccctcaacccaccaattgcagatgaattacctgataaaggatttgaagaaactttagagggatttattcaacctacaccaggtgatgatgtagaggtagtaattgaccctgaatcaaatagattacaaagactaactccttttgaagcacctaatgagagtgaatacgaatctatgagtgtattaatgaaagcagaaggaaaatgtacaactgatcatatatcaccagccggtaagtggcttcaatttcgtggtcatctagagaacatttctcaaaacttatttaatggagtgaataattcgttcgcagaaaatgctggcgatggagtaaatgttttaacaaaagaagttgatacgttaccaaatattgcaaagaattatcatgctgagaatgttagctgggttgcagtcggcgatgaaaactatggagagggatcttcaagagagcatgctgctatggaacctagatttagaggttgcaaagtagttctggttaaaagctttgcaaggattcatgaagcaaacttaaagaaacaaggtatcttgcctttagtttttgatgataaaaatgattatgaaaaaattgaacaattcgacaaaatgacaataaagagtcttagcgatataaaagtagatactccaatcgagattgtcttagagaaggaaaacggagagcaagaaaccataaag

SEQ ID NO: 282270 - DNA, 958 bp, Unknown
  Bacterial polypeptide expressing nucleotide sequence isolated from the Sargasso Sea
ctcttaccagatactgttggtactggtggggatagtcatactagatttccgataggtattagttttccagctggatctggtttagtagcgtttgctgccactcttggagttatgcctttggatatgcccgaatcagttttagttagatttaaaggtgatatgcaaccgggtattaccttgagagatctagtgaatgcaattccatatgctgcaattcaaaatggacttctgactgttgaaaaaaaaggaaagaaaaatattttttcaggcagatgtcttgagattgaaggtttaccaaatatgaaggttgagcaagcatttgagctttcagatgcttctgcagaaagatcagcctcaggttgcacagttagattaaataaagaaccaatagttgaatatcttaactctaatatagtaatgttgagatggatgatagcttctggttatggtgatgcaaaaacgcttgaacgaagagctcaagcaatggaagaatggattcttaaccctgaattattagaaccagataaggatgctgaatatgcagaggtaattgaaatagatttaaatgaaataaaagagccattattagcatgtccaaatgacccagatgatattaaaccattatcagaggttgcgaatactgaaattcaggaagtatttattggctcttgtatgacaaacataggtcactttagagctgctggaactcttttagaaaaatataatggtattaaagcaagattatgggttgttcccccgacaaaaatggatgaaaaacagcttattgaagaagggatatacaatatttttggagtttcaggggctagaactgaggtaccaggatgctctttatgtatgggtaatcaggcaagagttcttgcaaattcaacagtagtatcaacatcaacaagaaactttcctaatagacttggtgacggtgctgatgtttttctagcat

SEQ ID NO: 282271 - DNA, 782 bp, Unknown
  Bacterial polypeptide expressing nucleotide sequence isolated from the Sargasso Sea
gcaagattatggtgactttgcacctgatagagttgctatgcaagatgcaacagcacaaatggctcttttacaattcatgcaagcagacctaccagaaacagcagttccaacaactgtgcactgtgatcatcttattcaagcttatgaaggagcagctagcgatcttcaagtagcaaacaaaacacacaaagaggtttttgacttccttagaactgcttccgaaaaatatgagataggtttctggggaccaggggctggaattatccatcaagtagttttagaacaatatgcatttccaggaggaatgatgatcggtacggatagtcatactccaaacgctggagggctttccatgattgcaatcggtgttggtggtgcagatgcagtagatgtaatggctggtatgcctttcaatacaaaaatacctagcttgattggagtgaagctaactggttcactgagcggctggtcatctcctaaagacattattttaaaagttgcagaaatcttgacagttaaaggtgcaacgaatgcaatagttgaatactttggagagggtacgaaaactatttcaaccactggaaaagcaactataacaaatatgggtgctgagattggtgcaacttgctcaatatttccatatgatgaaaagggaagcgcttacctaaaggctactggtagagatgaaatagctgaattagcagactcgagaatggatttactcactgctgatgatgaagtattagaaaacccagaagaatttttcaaacaagttatagaga

SEQ ID NO: 282272 - DNA, 874 bp, Unknown
  Bacterial polypeptide expressing nucleotide sequence isolated from the Sargasso Sea
cgaaggtctccccgacctcaagctcgagcaggcgttcgaactcaccgacgccagtgccgagcgctcctgcgccggctgcacgatcaagctctccgagcagacggtcagcgaatacctacgcagcaacgtggcgttgctcaagaacatgatcgcccgcggttacagcgatgcccgcaccctggcccgccggatcaaggagatggaagcctggctggccaacccccagctgctgagtgccgattccgatgcggagtacgccgaagtgctggacatcaacctggatgaactgaccgaaccggtgctggcctgtcccaacgatccggacaacgtgaagctgctgagtgaggtggccggtgatccggtgcaggaggttttcatcggctcctgcatgaccaacatcggccactaccgtgctgcggccaaagtgctggaaggcgccggcagcaacaaggcccgtctctgggtctgccccccgacccgcatggatgaggagaccctcaaggctgagggctattacgccaccttcgaggcagcgggctcacgcatggagatgccaggatgctcgttgtgcatgggtaatcaggcacgggtggaggacaacaccaccgtcttctccaccagcacccgcaacttcaacaaccgtctcggcaagggtgcccaggtgtatctgggaagcgctgagctggcggcggtatgcgccctgctgggacgccttcccacaggtgaggaataccgcacgatcgcggccgaaaagatcgaccccctctccggtgagctctaccgctacctgaatttcgaccagattgacggattcgcagatcagggacgggtggtcagctcggatgcggaagcagcagtgcttgcaaacgcctga

SEQ ID NO: 282273 - DNA, 381 bp, Unknown
  Bacterial polypeptide expressing nucleotide sequence isolated from the Sargasso Sea
aatgtcagaaaaaacagagatttctataaacaatagtaactttcgtatattcaatataaaaaaatataagatagatcatctgccatattcccttagagtacttatggaaaattatttgagaaatgaatcagataattcaaaatttcaatctattattgacaagtttataaattgggatggaagcgctgataaaaacactgagctaaccttttatccaagtagagtgataatgcaagactttacaggtgttcctgctgtggtcgatcttgcgtcaatgcgtgatgctatgaaatctctggatgcttcaaaatcagatgtagtaaaccctcaatgtcaaacagaccttgttatagaccactctgttatggtcgatcattttgg

SEQ ID NO: 282274 - DNA, 621 bp, Unknown
  Bacterial polypeptide expressing nucleotide sequence isolated from the Sargasso Sea
tatgaatcagacagatttaataaagaaaatttatgataattacctatcaaaaattactgaagctaattctttttttaataggccattaacttacacggaaaaaattcttttttcacatttatccgaaaatatggacactgttccagaaagaacaaaaacattctgcacttttagtccagatagagtagcaatgcaagatgctactgctcagatggctttattacaatttatcaacgcaggaatgcaaactacagctgttccgactacggttcattgcgatcatttgattactgcaattaaaggagccgatgatgacttgaacaatgctctattaacaaataaagaagtgtatgatttcttaaaatcagtttgtgcaaaatatggcataggcttttggaagccaggcgcaggaataattcatcaaacaattttggaaaactatgctgttccaggtacaatgatgattggtactgattcacatactcctaatgcaggtggcttaggaatgattgctattggagttggaggagcagatgctgtagatgttatgacaaattcaccatgggaagtaaattggccaggcataattggagtaaaattaactggaaaattgagtgattg

SEQ ID NO: 282275 - DNA, 319 bp, Unknown
  Bacterial polypeptide expressing nucleotide sequence isolated from the Sargasso Sea
gttgaatttcaaagaaatcaggagagatatagatttctgagatggggacaggatgcattttccaattttgaagtatttcctccaaatactggaattgttcaccaagtcaatcttgaatatctgggtcgtgttgtattctcgaaagatgattcattggcttaccccgataccctggttggaaccgattctcacacgacgatgatcaatggaattggatgcctaggatggggggtaggtggaattgaggcagatgcagcgatgctgggtcagcccatcacaatgcttctaccagaagtcattggagtctctgtgaagggcg

SEQ ID NO: 282276 - DNA, 292 bp, Unknown
  Bacterial polypeptide expressing nucleotide sequence isolated from the Sargasso Sea
tagtcatactactttggttaatggtttatctgttttagggtggggagttggaggaatagaagctgaagcaggcatgttgggtcagcctatttcaatgttaataccagaagttattggatttgaaataaaaggtaagctttctgaaggaacaacggcaacagatttagttttaacaattgttaaaatgttaagagacaaaggagttgttgggaaatttgtagaattttatggagaaggtttaaaaaatttaactttggctgatagagcaactatagctaatatggctctctga

SEQ ID NO: 282277 - DNA, 829 bp, Unknown
  Bacterial polypeptide expressing nucleotide sequence isolated from the Sargasso Sea
attcacgggaaaattatggaaattgaaggattaccaaacctaaaacttgaacaggcttttgaacttactgatgctactgcagaacgctcatgcgctggtagcacaatacttttatcccaagaaactgttcaagaatatttaaaaagcaatatttgcctgctagaaaaaatgatcgagggtaattatgaagattcaaaatcgatttcaagaagaataaatgatatgaaaaattggttaaaaaaaccatcattaattcaaccagattcaaacgctcagtatgaagaaatcattgaaattgatttagcaaaagtaacacaacctatagttgcttgccctaatgatccagataatgtcaaagaaattactgatgttgcaaatacaaatatagacgaggtttttataggttcttgcatgacaaatattggtcattacagagcagctgcaaaagttcttgaaggagtacaaaatttaaaagctaaattatggatttgtccaccaacaaagatggatgaagaaactctaaaagctgaaggttactataaaatttttgaagattgtggtgcaaggttagagttaccgggctgttctttatgtatgggaaatcaagccagagtagatgaaggttccgtagtattttctactagtacaagaaattttgacaatagacttggcaagaatgcacaagtctttttaggcagcgctgaattagcagcagtttgcgcactgcttggcaaaatacctgaagttgaggaatatcaggatattactaaaaataaaattaatccatattcagatgaactttatcgctatcttcaatttgatgaaatac

SEQ ID NO: 282278 - DNA, 301 bp, Unknown
  Bacterial polypeptide expressing nucleotide sequence isolated from the Sargasso Sea
aatatgactgatgatccggaaggctttatagaaattaaaaatgccaggccgttattaatattaggggacactgttacaactgatcatatatctccagcaggctcaattcaaaaagagggaccaacgggcgagtattttatgaaacatcaaatacaacaaaaagactttaattcttatggagcaagaagaggcaaccacgaagtaatgatgagaggagctttttcaaacataagaattagaaatgaagtagcgccaggaaaagaaggcgggtatacaaaactttatccagaaggcaaattga

SEQ ID NO: 282279 - DNA, 337 bp, Unknown
  Bacterial polypeptide expressing nucleotide sequence isolated from the Sargasso Sea
gggcaccaacctgctgggcgtcaaggccgtgatcgccgagagcttcgagcggattcaccgctcgaacctggggggtatgggcgtgattcccttcgagttcaccggcggcgacacccgtggcagcctgaacctgaccggcgaagagagcttcgatatcaccgggctggaaggcgacatgaaaccgcaggccgaagtgccctgcaccatcacctatgccgatggcacgaccaaggacatcaccctgaagtcgcgcatcgatacggcggtggagaaggaatacgtcgaaaacggcggtgtgctgcattacgtgctgcgcaaccttgccaaatcggcctga

SEQ ID NO: 282280 - DNA, 286 bp, Unknown
  Bacterial polypeptide expressing nucleotide sequence isolated from the Sargasso Sea
tactggaatacgtgctgttgctgatttagctgcaatgagagaggccattaaagaaaaaaataaagatccaaaatcaattaatcctctctcacaagttgatttagtcattgatcactcagttcaagttgatgaatttgcaaaaaaaaattcattagaaaaaaatgtagaaattgaatttaaaagaaatggagaaaggtactcatttttaaaatggatacaacgagcattcaacaattttagaatcgtaccaccaggaacgggaatctgtcaccaagttaatttagag

SEQ ID NO: 282281 - DNA, 595 bp, Unknown
  Bacterial polypeptide expressing nucleotide sequence isolated from the Sargasso Sea
atgacaccaggcaaaaaaaactcttataattcaattaaatcaatagatatcgatggaaaaaaatataaatatttttcaatcaaagaagcggagaaaaatggcttagatggaatatccaagttaccaaaatctttgctagttctattagagaatcttttaagatttgaagatgatataactgttacaaaaaatcaaattgaagcaataaaaaattggttaaaaaataaaaaatctaatacagaaattgcatatagacctgcgagaatattattacaagactatacaggtatcccagctgttgcagatcttgctgctatgagagaagctgtaaaagaaagaaacaaagatccaaacaaaatcaaccctttatctccagtagatctagtaattgatcattcagttcaagttgatgactttgcaaataaatcgtcattaaaaaaaaatgtcgataaagaatttaatagaaatggagagagatattcatttttaaaatggggacaacaagcatttgataactttaggatagttcctcctggcaccggtatttgtcaccaagtgaacctagaatatttatcaaaggtagttggaaagacaa

SEQ ID NO: 282282 - DNA, 505 bp, Unknown
  Bacterial polypeptide expressing nucleotide sequence isolated from the Sargasso Sea
tatgagttatgatagaccatcacggggagccggcggatatggcagaaataaccgtggcggtggccgatttggaagagacagaccaccaagagagatgcacaaggctacatgtgcagaatgtggaaaagaatgtgaagttccattcaaaccaactggagaaaaaccagtttattgtgatgaatgtttccaaaaccataaaccagaaagaagcgaccgtggcggtggccgatttggcggacgtggcggtggcggatatggtggaaaccgtggcggtggccgatttggaagagacagagatggcggacgtggcggtggccgatttggcggacgtggcggtggccgatttggaagagacagaccatcaagagagatgcacaaggctacatgtgcagaatgtggaaaagaatgtgaagttccattcaaaccaaatggacaaaaaccagtttattgtgatgaatgtttccaaaaccataaaccagaaagaagcgaccgtggaagatattag

SEQ ID NO: 282283 - DNA, 598 bp, Unknown
  Bacterial polypeptide expressing nucleotide sequence isolated from the Sargasso Sea
aatgtttgacattgatttaatcaaaactctttatagtagattgcctgagcagaccttattagctaaaaacaaactagggcgcccactaacactttccgaaaaaattttatttagtcatttatctctaaatgattttaaagataattttaaaaggggggagtcttacgttgattttttacctgatagagttgcaatgcaagatgccactgctcagatggcactgcttcaattcatgatggctggcaaagaaaaggttgcggttccctcaacagtgcattgcgatcatcttattcaggcaaaaatagatgcttctgttgatttagatagcgcccttgatgttaacgatgaggtttatagatttcttgaatccgtttctaataaatatggcattggtttttggaaacctggcgcaggaataatccatcaagttatcctagaaaactatgctttccctggtggcatgatggttggtacggatagtcatactgtgaatgcgggtggtttaggcatggtggctataggagttggaggagcagatgctgttgatgttatggcaggaatgccttgggaattaaaacttccaaagctcataggcgta

SEQ ID NO: 282284 - DNA, 454 bp, Unknown
  Bacterial polypeptide expressing nucleotide sequence isolated from the Sargasso Sea
gaccaataaagtcgtgaaccagcttaacggagagcatagcgaggttcctgcagcggccagagcctacaaagctgagggagtgccaacaattgtagtgggcgatcacaattacggcgaaggttcttcacgtgagcatgctgccatggagccaagacatctgggtgtgagagcagtcattgtgaaatcttttgcgaggattcatgaaacgaatcttaaaaagcaaggcatgcttgggttaacttttgccaaggagaatgattatgatttaatcagagaggatgataccttcaattttgttgatcttgtggatttcgcaccagagaaacaattgcatttagaggcagttcatgcagacggcaccaaagacatgatcgcattgaatcatacctacaatgctcaacaaatagaatggtttaaagcaggttcggctttaaacatgatacgtaaacaataa

SEQ ID NO: 282285 - DNA, 517 bp, Unknown
  Bacterial polypeptide expressing nucleotide sequence isolated from the Sargasso Sea
tttgcaaatataagaattagaaatgaaatggctcctggcacggaaggcggttttacaaagttatatcctgaagagaaagttcttcctatctatgatgcagtagttgaatataaaaaaagaggaacagatttagttgtagttggtggaaaggagtatggaactggatcgtctagagattgggcagccaaaggaacaaaattattagggataaaggcagtacttgctgaaagttttgaaagaattcaccgatctaatttaattggaatgggaatactgccattacaatttatcaacgatgtaaatagaaaaaatcttcaattaattggttctgaattaattagcattctaaatatagaaaagggtgtaaatccctctgatgaagtgatagtcgaaattaaatatacctctggtgaaataaaaaaaattaaaactttatgcagaattgatacaaaaaatgaattagagtattataaaaacggaggtattctgcagtacgttttaaggaatatgatttaat

SEQ ID NO: 282286 - DNA, 598 bp, Unknown
  Bacterial polypeptide expressing nucleotide sequence isolated from the Sargasso Sea
atgaaaccaggacaaaaaaattcttatcaatcattaaaatcaattaaaattgaaggtaaaaaatataaatatttttctcttttagaggcagaaaaaaatggcttaaaaggaatttcaaaattgccaaaatctttaaaagtaattttagaaaatcttttaagatatgaggatgaaaaaacagttacaaaagatcaaattcaagaactaagaaattggcttcaaaataagaaatctaatactgaaatagcttataggccagcaagagttttgttacaagattatactggaatacctgctgttgcagatcttgctgcaatgcgagaagcagttaaaaaaaaaaacaaagatccaaacaaaattaatccactttcaaatgttgatttagtaatagaccattctgtccaagtagatcagtttgcaaataaaaattcattagagaaaaacgtagatatagaatttaaaagaaatggagaaagatattcctttctaaaatggggacagcaagcgtttaataattttagaatcgttcctcctggaacaggtatttgtcatcaagttaatttagaatatttatcaaaagtagtttggatagcctgaa

SEQ ID NO: 282287 - DNA, 498 bp, Unknown
  Bacterial polypeptide expressing nucleotide sequence isolated from the Sargasso Sea
tcagccaatcgtctgcgcccctaacgatcccgatgacgcgcgtctgctctcagaagtacagggggatcagatcgatgaggtgtttatcggcagctgcatgaccaatattggccacttccgggcggctggggagctgctggaggcacatggcgcaccggtcagcacgcggatgtggatttgcccgcccacacgcatggatgagcaccaactcatggaggaaggctactacgcgatcttcgggcgagcaggcgcgcggaccgagatgccaggttgttcgctgtgtatgggcaatcaggccagagtcgcaccgaaatcgacagtgttgtcgacgtctacccgcaacttcccgaatcgccttggcgaaggagctaatgtgtacctcacctccgctgaacttgccgcgatcggtgcgctactcgggaaattgccgacccctgcggagtatttggagtacgccggcaagattgactccatggcagatgagatctatcgctacat

SEQ ID NO: 282288 - DNA, 518 bp, Unknown
  Bacterial polypeptide expressing nucleotide sequence isolated from the Sargasso Sea
taatgatccagataacgtaaaggagatttctgatgttgcaaatacaaacattgacgaagtttttataggttcttgcatgacaaatattggtcattacagagcagctgccaaagttcttgaaggtgtacatgatttaaaagctaaattatggatttgtccacctacaaaaatggatgaagaaaccctaaaagctgaaggttactataaaatattcgaaaactgtggagcaagattagagttaccaggttgttctttatgtatgggaaatcaagccagagtagatgaagggtcagtagtattttctactagtacaagaaattttgacaatagacttgggaaaaatgcacaagtttatttaggaagcgccgaattagcagcagtttgcgcacttcttggaaaaatcccagaagtagaagaatatcaggatattactaagaataaaattaatccatattcagatgaactttatcgttatcttcagtttgatgaaatacacaatttcagtttgtcaaagtgat

SEQ ID NO: 282289 - DNA, 811 bp, Unknown
  Bacterial polypeptide expressing nucleotide sequence isolated from the Sargasso Sea
aatagaaaagacagtccactcactcttgctgaaaaagtattgtacggacatgcaaaagatgtcaaaaatatttcacttaatagaggaaaagatttcggtgattttctacctgacagagttgcgatgcaagacgcaaccgctcaaatggcattgctccaattcatgcaagctgaactgtccgagacagcagttcctacttcagttcactgtgatcatctgattcaagcatatgaaggtgcaaatagtgatttaaaagttgctaataaaactcataaagaagtatttgattttttacgaactgcatctgaaaaatataatattggtttttggggtccaggagctggaattattcatcaagttgttcttgagcaatatgcatttcctggtggaatgatgattggaaccgatagccatacaccaaatgcagggggattaggtatggttgcaattggagttggtggagcggatgcagttgatgtaatggctggcatgcctttcaacacaaaaataccaaaattaattggggtaagacttacaggaaaattaagtggttggacagctccaaaagatataattttgaaagttgcagaaattttgactgtaaaaggtggcacgaatgcgattgttgaatactttggtgaaggaacagagtctatttctactacaggaaaagcaaccataacaaacatgggtgctgaaataggtgcaacttgttctatatttccatttgacttaaaaggcgaggaataccttaaggcaacagggagaggaaatatagcgtctcttgctggggaaaatatgcatttactaa

SEQ ID NO: 282290 - DNA, 585 bp, Unknown
  Bacterial polypeptide expressing nucleotide sequence isolated from the Sargasso Sea
tatgatttttgatttagagatgataaaaaaggtttacagttctatcaaacaaaaagttgatagtgcaaggaaagtatgtaatcaccctcttacactttcagaaaaaattctttattcacatctatgggatgaaaatccaaataaaccttttttaagaggaaaagattatgttgattttgcaccagataggattgcatgtcaagatgctacagctcaaatggctttgttacaatttatgcaggctggtaagaaaaaggttgcagtaccaactactgttcattgtgatcatttaattcaagctagaattggagcagatgaagatttacaaaatgctataaatactagtaatgaagtttttaattttttagagtctgtatcaaataaatatggaattggattttggaaacccggtgctggaattatacatcaagtagttttagaaaactatgctttccccggtggtatgatgattgggacggattctcataccgttaatgctggaggtttaggtatggtagccattggagttggaggagctgatgctgttgatgtgatggcaggtatggcatgggaacttaaatttcc

SEQ ID NO: 282291 - DNA, 657 bp, Unknown
  Bacterial polypeptide expressing nucleotide sequence isolated from the Sargasso Sea
aaaatcctgtacttatggaagctgatgatgatgctgaatacgctgctgttattgaaatagatcttaatgaaataaaagaaccacttttagcatgtccgaatgacccagatgatataaaaactttatctgaagttgctaatactaatattgatgaagtctttattggttcttgtatgaccaatattggtcacttcagagctgcaggtaaattgttggaaaatgcatcagaattgccctcaaaactgtgggtctcacctcctacaaaaatggataaacatcaactcactcaagaaggatattatgaaatatttgaaaacgccggtgtgcaattagaaatgccgggttgttctttatgtatggggaatcaagctagagtcgaagcagaagcgacagtggtatctacatcaactcgtaactttcctaataggttaggagatggtgcaaatgtattcctggcttcagcagaggttgccgctatagctgctacactgggacatatacctactgcggatgaatactcaaattatatgtcagaaattaatgcgatgagcgccgatgtttatagataccttaattttcatgagatagcatcctataaagaggcggctaattcagctattttgccatctgttactatagaggaagtaaagagttagt

SEQ ID NO: 282292 - DNA, 316 bp, Unknown
  Bacterial polypeptide expressing nucleotide sequence isolated from the Sargasso Sea
ttctccacatataaaagcaaattatctagcttcacctccacttgttgttgcatatgcaatagctggacatatggaagttgatttatataaagactcgttaggaaaagataaagaaggaaaagatgtatttttaaaagatatttggccttcaaataaagaaatagaagaaactttaaaagattcacttaatgctgaaatgtttatacaaagatactcaaatgtttctgagggcccaactcaatggcaaaaaattaaaactgatacaagtagtatatataaatgggacgaaggttctacttatgtaaaaaaaccaccc

SEQ ID NO: 282293 - DNA, 323 bp, Unknown
  Bacterial polypeptide expressing nucleotide sequence isolated from the Sargasso Sea
aaaaatacttggagttaaaacagtaatagcagaaagttttgagagaattcataggtcaaacttgataggaatgggaattttgccattacaatttaaagacggtatgaatagaattaatttaaacttaaaaggttcagaattaatcagtgtgctagatattgaaaaaggtattaatccttcagatattgtaaaattagagataaagtatttatctggggatattaaaactattgatactctatgtagaatagatactaaaaatgaactcgaatattataaaaatggtggaatacttcaatatgttctgcgaaacatgatttagt

SEQ ID NO: 282294 - DNA, 797 bp, Unknown
  Bacterial polypeptide expressing nucleotide sequence isolated from the Sargasso Sea
agagagaggaaaaatactcctctaactcttgctgaaaaacttctctttggacatgcaacagatatcaactctgtttctctaaataaaggggaagactacggagattttgcacccgatagagttgcaatgcaagatgcaacagcacaaatggctcttttacaatttatgcaagcagacctcccagaaacagcagttccaacaactgtacattgtgatcatttaattcaagcttatgaaggagcagctagtgatcttcaagtagctaacaagacacataaagaggtttttgacttccttagaactgcttccgaaaaatatgatataggcttctggggaccaggggctggaatcatccatcaagtagttttagaacaatatgcatttccaggaggaatgatgatcggtacggatagtcatactccaaacgctggaggtttatccatgattgcaattggtgttggaggtgcagatgcagttgatgtcatggctggtatgcctttcaatacaaaaatacctagcttgattggagtaaagctaactggttctttgagtggctggtcatctcctaaagacattattttaaaagttgcagaaattttgacggttaaaggtgcaacgaatgcgatagttgaatactttggagagggtacgaaaactatttcaacaactggaaaagcgactataacaaatatgggtgcagagattggtgcaacttgttcaatatttccatatgacgaaaagggaagtgcttacctaaaggctaccggcagagatgaaatagctgaattggcagactc

SEQ ID NO: 282295 - DNA, 626 bp, Unknown
  Bacterial polypeptide expressing nucleotide sequence isolated from the Sargasso Sea
ttggaatggagaaaatattgttggagcaaaattattgattaaagctaaaggtaagtgcactacagatcatatttctatggcaggtccatggttaaaatatagaggtcatttaaataatatttctaataatatgctaactggagctactaacttttttaatgataaaacaaatttggtaaagaatcaacttaatggaaagtatggtacagttccagatgtccaaagagattatctttttaatctaatacaaacaattgttgttggagatgaaaattatggagagggctcatctagagagcatgctgccatggaaccacgttttttgggtgttcgtatcgttttggttcgatcatttgcaagaattcatgaaacgaatttaaaaaaacaaggaatgttagctttaacatttaaagataaaagtgattatgatctaatattagaagatgacacttttgatttaatagatttacaagatttttctgtggacaaccctttaactattgttgccaaacataaagatggctctcaaaataaaatcctttgcaaccatacatataatgatattcagatcgaatggtttaaggctgggtcggcactaaatcttattcgaaaaaaacaaagttaga

SEQ ID NO: 282296 - DNA, 417 bp, Unknown
  Bacterial polypeptide expressing nucleotide sequence isolated from the Sargasso Sea
catgacatgcttaaattctttcaatactcaaaaaaatatcatcattgataaagtagaatataggtattttgatttaaatattctctcaaaaatttataatttccaattacatagaattcccaattctataaaaatcataattgaaaatcttcttagaaatgaagatggcgaagctgtaacaagagaaatgatagataagttatgtaaaaaaattactgaaccattagaaaattttgaaatatcatttactccaacccgtgttcttatgcaggactttactggagttccagctgtggctgatttagctgctatgagagatgcattaaggaataagggcataaaccccaataacatcaatcctttatcaagagttgatttagttattgatcactctgttatggtagatcatttcggaaa

SEQ ID NO: 282297 - DNA, 298 bp, Unknown
  Bacterial polypeptide expressing nucleotide sequence isolated from the Sargasso Sea
catcggaaacagcggacctctccccgagccggttgttgaggctatcaacgacggtgatctcgtcgctgcatccgtgctttcaggtaaccgtaatttcgagggccgtgtgaatccgcacgtcaaggcaaactatctggcgtcgcccccgcttgtggtcgcctactcgatcgcaggccgtgtggacgtggatttgatgaaggagccgatcggtgaggattcggacggaaacgaggtctacctgataggagatctaggccgggtcagcaggacatcgccgatacagtggctgagtccctga

SEQ ID NO: 282298 - DNA, 898 bp, Unknown
  Bacterial polypeptide expressing nucleotide sequence isolated from the Sargasso Sea
aaaatcttttttaaacgataacagtactttgacaagtggcaaagtttgtttggcagccatcactagttgcacaaatacttcaaatcctattgttttgttaatgtctggtttgattgcaaaaaaagctgttgaattaggtttaaaagttccttggtgggttaaaacatcctttgctccaggaagtaaggttgttagagagtatttagacaaggctggtcttcaggtttttttaaataaacttggtttcaatatagttggatatggttgtacaacttgtattggaaactctggacccttggatgacaaagtttccaaagacattgaaaagaacaaactaaatgtatgcagtatcatttcaggtaatagaaattttgaaggtagaatacaccctcttataaaatctaactttttagcatcaccccctttggtaattatttatgctttatcaggaagaattaacattgatcttaataatgaagaaataggaatttctaagggaaaaaagattttcctaaaagatttatggccttcatcaaaagaagtaaaattacttagcgagaaagttttaaaagaagaattatttaaaaaaaattataaagatattttcaaaggtgatccaatttgggagggaattaaagttaaaagttcatctacatttaattggtctcttaattcaacatacgtaaaaaaaccaccatttttagaaaatgaatcaaataaacaaactgatatttttaacgctagacctttgcttatactaggtgactctattacaactgatcacatatcaccggctggtgtaattaaagaaagcagtgaagcgggtaaatatttatctgaaagacaaatcaagaattatgattttaattcttttggttcgcgaagaggaaatcatgaa

SEQ ID NO: 282299 - DNA, 505 bp, Unknown
  Bacterial polypeptide expressing nucleotide sequence isolated from the Sargasso Sea
agaattaaaaatgaaattgctcctgataccgaaggaggtttcacaaaactatatccagaggagaaaattatgtctgtatatgatgctgtagttgaatacaaaaaaagaggaactgacttggtagttattggaggaaaagaatatggaactggatcttcgagagattgggctgctaaaggaactaagttattaggaataaaagctgtgttagctgaaagttttgaaagaatacatagatcaaatttaattggaatgggagttttaccactacaatttatagatgatgcaaataggaataatttgaatttaaggggaccagagttaattagtgttattaatattgaaaaaagattaaatccaagtgataaagttgaagttcatgttaaatatcaatcaggagaattaaaaaaaattaaaatgttatgtcgaatagacactaagaacgaattagaatattataaaaatggcgggatattacaatatgtattaaggaaaatgatataat

SEQ ID NO: 282300 - DNA, 508 bp, Unknown
  Bacterial polypeptide expressing nucleotide sequence isolated from the Sargasso Sea
tatgagttatgatagaccatcacggggagccggcggatatggcagaaacaaccgtggcggtggaagatttggaagagacagaccaccaagagagatgcacaaggctacatgttcagaatgtggaaaagaatgtgaagttccattcaaaccaactggacaaaaaccagtttattgtgatgaatgtttccaaaaccataaaccagaaagaagcgaccgtggcggtggccgatttggcggacgtggcggtggcggatatggtggaaaccgtggcgggggaagatttggaagagacagagatggcggacgtggcggtggccgatttggtggaaaccgtggcggtggaagatttggaagagacagaccaccaagagagatgcacaaggctacatgtgcagaatgtggaaaagaatgtgaagttccattcaaaccaaatggacaaaaaccagtttattgtgatgaatgtttccaaaaccataaaccagaaagaagcgaccgtggaagatattag

SEQ ID NO: 282301 - DNA, 313 bp, Unknown
  Bacterial polypeptide expressing nucleotide sequence isolated from the Sargasso Sea
taaagctgtaatagctgaaagttttgaaagaattcatagatcaaatcttataggaatgggtgttttaccattacaatttccagaaaaaatgagcaggcaaaatttaaatttaaaaggatctgaactaatttcaattattaatattgaaaaaggtattaatccaagagatcaattggatgttgaaatcaaatatgtaactggctatatcaaaaaaataaaaatgttatgcagaattgatactaaaaatgaattagaatattataagaatggtggtattttgcaatatgttttaaggaatatgattaatggatga

SEQ ID NO: 282302 - DNA, 645 bp, Unknown
  Bacterial polypeptide expressing nucleotide sequence isolated from the Sargasso Sea
gatggacttatcaagaacaccaatagagctagttgaatcagtttataaaactttaactgaaaatatttcaactataagggagcgaaaaaatgctcctttaactcttgctgaaaaaattttatttggtcacgctacggacccttcatcaatttcattagataagggagaagattatggagattttgcacctgatagagtagctatgcaagatgcaacagctcaaatggcacttttacaatttatgcaggctgggatggagaaaacagctgttccatctactgttcactgcgatcacctcatccaggcatatgaaggagcaagtagtgacttagcggttgcaaaccagacacataaagaagtttttgattttttacgttctgcatcacagaaattcggaatagggttttggggtccaggagctggaataattcatcaagttgttttagaacaatatgcatttccaggtggaatgatgattggtactgatagtcatactcctaatgctggaggacttggaatggttgccattggtgtaggaggagcagacgcagtagacgttatggccggaatgccttttaatacaaaaattccaaagttaattggagttaaattaactggttctttaagtggatggagtttcactaa

SEQ ID NO: 282303 - DNA, 591 bp, Unknown
  Bacterial polypeptide expressing nucleotide sequence isolated from the Sargasso Sea
tatgaaaccaggaaataaaaattcttacaaatcattatctgacctagagattaacggtaaaaattataaatattattcattaaaaaaagctgaattaaatggtttagaaggtgtttcaaaattaccaaagtcgttaaaagttttattggaaaacttacttaggtacgaggacgatatatcagttaataaaaaacaaatagaagcagtaaaaaactggcttgatacaaaaaaatcaaaaactgaaatagcttatagaccagccagggttttactccaagattatacggggataccagcagtggctgatttagctgctatgagagaagctgtaaaagaaaaaaataaagatccaaatacaattaacccactatctgcagtcgatttagttattgatcactctgttcaagttgatcaatcagccaaaaaagattcatttgaaaagaatgtagatatcgaatttaaaagaaatggcgaaagatattcctttttaaaatggggtcaaagcgcttttaacaattttagaattgttcctccaggaactggtatctgtcatcaggttaatttagagtatttatcaaaagtagtttggtc

SEQ ID NO: 282304 - DNA, 160 bp, Unknown
  Bacterial polypeptide expressing nucleotide sequence isolated from the Sargasso Sea
ttggaggaaatagagtatggaactggatcctcaagagattgggctgccaaggggactaaacttttaggaattaaagctgttttggctgaaagttttgaacgtattcatagatctaatttgattggaatgggcgttttaccattgcaatttatagataata

SEQ ID NO: 282305 - DNA, 409 bp, Unknown
  Bacterial polypeptide expressing nucleotide sequence isolated from the Sargasso Sea
tctggaaattaatggaaccgaacacaaattctacaatctgcaggaattaggagaaaagtacaaagagcttccattctcaataaaagttctcctggagtcggcggtgagaaactgtgatgaattccaaatcctctcctcggatgttgagaagattctcaactggaccgactcccaagccaagggggaaagcgtggaggttcccttcttgcccagccgggtggttctgcaggacttcactggcgttcctgctgtcgtcgactttgctgcaatgagggacgccgttaaggctctggggggaaacccagaggacatcaaccccaggtgtccctccgacctcgtgatagaccactccgtccaggtggacgtgtccagagtctccgacagcaaggccaagaatgaggcgctggag

SEQ ID NO: 282306 - DNA, 265 bp, Unknown
  Bacterial polypeptide expressing nucleotide sequence isolated from the Sargasso Sea
ttaccgacctgcccgcgttttaatgcaagatttcacaggtgtaccagcggtggtagatttggccgcaatgagggaggcaatggtagagttaggtggagatgctcaaaaaataaatccacttagtcctgttgatttgataatagatcattccgtaatgattgaccattttggtaacgagaaagcctttcgcgccaacgtagacaaagagtttgagagaaatacagaaagatatgaatttctagcgtgcgggttccaaggcatttaa

SEQ ID NO: 282307 - DNA, 461 bp, Unknown
  Bacterial polypeptide expressing nucleotide sequence isolated from the Sargasso Sea
aatgccagtcgctgccaacacccctatagacctaatcgaaaacgtttatgccaatcttgcggcgaacatggctatgggaagagagaaacttgggcggtcgctcacgctcgcagaaaaggttttgatcaaccacctagcttcccacgaccaagaactagagcgaggcgttagctacgtcgacttgcgccctgatcgcgtagccatgcaggatgcaactgcccaaatggcctggcttcagtttatgactgctggactctccgaggtagcagtgccaaccactacacattgtgatcatctcattcaggcgcgcgatgacggcaaaacagaccttttagccgcttcagaaaataatgaagaggtttacgacttcctcgaaagtgtctgcgctaagtatggtgccggattctggatgcccggcagcgggataattcatcaggtcgtactcgagcagtacgcattcc

SEQ ID NO: 282308 - DNA, 667 bp, Unknown
  Bacterial polypeptide expressing nucleotide sequence isolated from the Sargasso Sea
aagtatgaatgagcgcataaatgcagctcgtgccatattaggaagtcccctaacattgacagagaaaatattgtattctcatctttcaaccggtaatccttccgagcaatttaaaagaggaatatcttatgtggattttcttccagatcgagtgggcatgcaggatgcgactgcacagatggcattgctacaatttatgatggctggtagagaaaaagttgctgtaccatcaacggtacactgtgatcatctaatccaggcgaaggaaaatgcatcaagtgatttagcccaagcaatggatgctaatggagaagtatatgattttctcgagtctgtatctaataaatatggaattggcttttggaaacctggcgcaggaataatccatcaggttatattagagaattacgctttcccaggtggtatgatgattggcactgatagccatactgtgaatgctggtggtttaggaatgatagcaataggtgttggtggtgcagatgctgtagatgttatggcaggtatgccctgggagttgaaatttccaaaattaattggtgtaagattaaccggtgagatgaataaatggacttctgctaaagatgttatcttaaaagttgcaggaatattaacagttaaaggtggtacagatgcaattgttgaatat

SEQ ID NO: 282309 - DNA, 699 bp, Unknown
  Bacterial polypeptide expressing nucleotide sequence isolated from the Sargasso Sea
gttatggtgaccgccgtactctggaacgccgtattcagggtatggaaaaatggctggccgacccgcagttgctggaaggtgatgccgatgcggaatatgccgctgtgatcgacattaatctggatgagatcaaagagccgattctgtgcgcaccgaatgacccggatgatgcccgcctgttgtccgatgtggctggcagcaaaattgatgaagtctttattggttcctgcatgaccaatatcggccacttccgtgcagccggtaagttgctcgacagccataaaggccagttgccaacgcgtttgtgggttgctccgccaacacgaatggatgccgcacagctgacagaagaagggtactacagcgtattcggtaagagtggcgcccgtattgaaattccaggctgttcactgtgcatgggtaaccaggcgcgagttgcggatggggcgacggttgtatcgacttctactcgtaacttcccgaaccgtttaggtactggggcgaatgtgtacctggcatctgcagagctggctgcggttgcatcgctgcttggcaaattgccgacacctcaggaataccaggcctttatggagcaagtcgataagaccgcgacagatacctaccgttacctgaactttgaccgtctcagtcagtatacggaaaaagcagatggcgtgattttccagactgcagtctgac

SEQ ID NO: 282310 - DNA, 697 bp, Unknown
  Bacterial polypeptide expressing nucleotide sequence isolated from the Sargasso Sea
gtcttctctggaagatgcctagaaattgaaggtctgccaaatatgaaggtcgagcaagcttttgaattatcagatgcctctgctgaaagatctgcatcgggttgtactgttaagctcaataaagaacctatattagaatatctccaatcaaacatcgtgatgcttagatggatgattgcgagtggttatggtgatccaaaaactcttgaaagaagagctcaatcaatggaggaatggattcttaatccaaagcttcttgaggcggatgataatgctgaatatgcagaagtaattgaaattgatctaaacgagattaaagagccccttcttgcatgtcctaatgatcctgatgatattaaacctctttcagaagttgccaacactaaaatacaagaagtttttattggatcttgtatgacaaacataggtcattttagggctgcaggaactttacttgaaaaatacaaaaatattaaagcaagactttgggttgttccaccaacaaaaatggatgaaaagcagcttattgaagaaggtatatataatatctttggtgtctcaggtgcaagaactgaagtaccaggttgctcattatgcatgggaaatcaggcaagagttttagcaaactccacggttgtatcaacctcaactagaaactttccaaatcgcttaggtgatggagcaaatgtctttttag

SEQ ID NO: 282311 - DNA, 388 bp, Unknown
  Bacterial polypeptide expressing nucleotide sequence isolated from the Sargasso Sea
actcccctggtagtgattggaggcaaggaatacggtacgggctcgtcgcgggactgggcggccaaaggcgttgcgctattgggcgtcagggccgttctggtcgaaagctttgaacgtattcatcgctcaaacctcgttgggatgggggtattgccgctgcagtttctggagggccagagtgccgctgaactcggcattgacggaaccgagaccttcagtatctcccagccccaggttggtgcgagcgaggtcaagatcgacatgatccgggccgatggcagcgcggaggagtttagtgtccaggtccggattgatacccccaaggaatgggattactactgccatggcggcatcctgccctatatggtccgtcaactgttgacgtagg

SEQ ID NO: 282312 - DNA, 412 bp, Unknown
  Bacterial polypeptide expressing nucleotide sequence isolated from the Sargasso Sea
tgaagaaggcgtgccgctcgtggtcgttggcggcaaggaatacggcaccggttcgtcccgagactgggcggcgaaggggacgacccttctgggggctcgtgccgtgattgtggagagcttcgagcgtattcaccggtcaaacctgatagggatgggcgtattgcccctgcagttcacagggggggatacacgcggttcactgggtctcgatggcaccgaaacgttcgacattaagggtgtcgcagacgggctgcagccgcgcagcgatctggactgcaccattcatcgtgccgatggtaacagcgtcgatgtcaaactgctgtgcaggatcgatacgctggacgagctagactactacaagcatggtggaatactgcaatatgtcatccgcaacatgcttgaagccgcgtaa

SEQ ID NO: 282313 - DNA, 577 bp, Unknown
  Bacterial polypeptide expressing nucleotide sequence isolated from the Sargasso Sea
tatgaaaccagggacgaaaaactcatacaattctttatctgaaataaaaataaattcaaaaaactacaaatattattctttaagtaaagctgagagcaatggattaaaaggtatctctaaattacctaaatcactaaaggttcttttagaaaatttattgagatatgaggatgatttatcagttactaaaaaccaaattgatgcactaagagattggctaaaaagtaaaaaatcaacaactgaaattgcttatagacctgcaagagtattattacaggattatactggtattccggcagtcgcagatttagcagccatgagagaggctgtgaaagaaaaaaatattgatcctaactcaataaatccactttcaactgttgacttagttatcgatcactctgtacaagttgatcaatcatctaaagcagactcttttgaaaataatgtaaacattgaatttaaaagaaacgcagaaagatattcatttttaaaatggggacaggatgcgtttaacaattttagaattgtacctccaggaactggaatatgtcatcaagttaatttagagtatttatct

SEQ ID NO: 282314 - DNA, 652 bp, Unknown
  Bacterial polypeptide expressing nucleotide sequence isolated from the Sargasso Sea
aatagaaattttgcgaaaagagctgacggaaatcccaatactcacgcatttgtaggatcccctgaattagttaccgctttagcaatagctggaaacttgtcttttgatccccaagtagacactttgctcaacgacagtggttttgaagtaaaattagatcctcccaagggcaacgaattgccaaaaaatggttttagcgttgacaattcaggatatcaagctcctacaaaaaatggtgcaaaagtagaagtaattattgacaaaaattctgaaagactccaattgcttgaacctttttctccgtggggcaaaagaaatataaatggagctagattgcttatcaaagcaaaaggtaaatgcacaaccgatcacatttctatggctgggccatggctaaggtatagagggcaccttgacaatatttctgaaaatatgctcattggagcaactaattttttcaacaacaaagtaaatgtagtcaaaaatcatttaaacaatacctatgatacagtacctagcgttcaaagagattataaatttaataatgtcccgtcaattgttgttggagatgagaactatggggaaggatcctcacgtgaacatgccgctatggaacccaggtttcttggagttttagcggttattgtaaaat

SEQ ID NO: 282315 - DNA, 652 bp, Unknown
  Bacterial polypeptide expressing nucleotide sequence isolated from the Sargasso Sea
tatggattttgaatcaaataaatttttagatgaacttacagttggtaaaaagtttagtttctttagtttagataaagctcaagatctagtaaaatttgaattatcaagtcttccctttagttatagattacttctggaaaatttaattagaaagagcaatccttcatgtgacaacaagctagaaataattaatctaattaaaatgaacagcggtagtgaaatttttttttctccaagtagagtcctaatgcaagattatactggtgttcctgcaatagctgatcttgcatcaatgagagataaaatggttaaaaagaaacgtaacccccaattaattaatccattggtacctgtaagccttgttgttgatcactcaatatcagttgatagtgcatctagcaaagattctttagaaattaatgttaaaaaagagtttttgagaaactctgaaagatattcgttacttaaatgggcacagaaatctttaaaaaacttctctctttttccaccaggctctggtatttgtcatcagattaatattgagtatttaacagagatagtttccgagaaaaaaaattttttatatttagattccgttgttggtacagatagtcacacaacaatggttaattctttatcagtactaggatgg

SEQ ID NO: 282316 - DNA, 615 bp, Unknown
  Bacterial polypeptide expressing nucleotide sequence isolated from the Sargasso Sea
tatgaaaccaggaataaaaaattcttataactcactatcagacctcaaagtccaaggaaaaaattataaattctattctctcaataaagcagaagaaaatggattagatggtattaaaaaacttcctaaatctctcaaagtacttttggaaaatttacttagatatgaagacgattcatcagttacaaaaaatcaaattaatgcgataaaaaattggctaaaggaaaaaaaatcaaaaactgaaatagcataccgaccagcaagagtcttattacaagattatacaggaatacctgctgttgcagacttggctgcaatgagggaagcagtaaaagaaaaaaaaagagatccaaatactattaacccattatcggcagttgatcttgttattgatcattcagtacaagtagatcagtctgcaaaatcagattcatttgataaaaatgtcgaaattgaattcaaaagaaatggtgagagatattcttttttaaaatggggtcaacaagcattcaataactttaggattgttccaccaggcacaggtatatgtcatcaagtaaatttagagtacttatcaaaagtagtttggacagaagagtttaaaggtgagagtta

SEQ ID NO: 282317 - DNA, 754 bp, Unknown
  Bacterial polypeptide expressing nucleotide sequence isolated from the Sargasso Sea
ctgcgcagcaacgtggcgctgctgaagaacatgattgcccgcggctacagcgacgcccgcaccctggcccgccggatcaaggagatggaggcctggctggcaaatccccagctgatgagtgctgacacagacgcggagtacgcggaagtgctggagatcaacctcgacgagctcaccgaaccggtggtggcctgccccaacgatcccgacaacgtgaagctgctcagcgaggtggctggtgaccctgtgcaggaggtgttcatcggctcctgcatgaccaacatcggccactaccgcgccgcggccaaggtgctggaaggcgccggccagaacacggcgcgcctgtgggtctgtcccccaacccggatggacgaagagaccctcaaagaggagggctactacgccaccttcgaggccgccgggtcccgcatggagatgccgggttgctccctctgcatgggcaaccaagcccgcgtggaggacaacaccaccgtgttctccaccagcacccgcaacttcaacaaccgcctgggcaagggtgctcaggtgtacctgggcagtgccgaactggccgccgtctgcgcccagctgggacgcattcccaccccggaggaataccgccgcattgcggccgagaagatcgatcccctctccgacgagctctaccgctacctgaacttcgatcagatcagcggctttgaagaccaggggcgcgtggtcagtgctgacgacgaagcaaccgttctggctcagg

SEQ ID NO: 282318 - DNA, 616 bp, Unknown
  Bacterial polypeptide expressing nucleotide sequence isolated from the Sargasso Sea
tatgaaaccaggtataaaaaactcttacaaatctttatcagacctcacggttgatggaaaaaattataaaatttattcactctcaaaggctgaaagtaatggtcttgatgggatctcaaaattacccaaatccttaaaagttctattagaaaatcttttaagatatgaagacgacttaactgttacaaaaaatcaaatagaggctataaaagattggatcaaaaataaaaagtcaaaaactgaaatagcatacagacctgcaagagttttactgcaagactatacaggaatacctgcggtagcagacttagctgcaatgcgagaagcagtgaaagataagaataaagatcctaattcaatcaaccctttatctgctgtagatttagtgattgatcactcagtacaagtagatcaatcagcaaaatcagactcctttgaaaagaatgttgaaattgaatttgaaagaaatggagaaagatactcttttttaaagtggggacaacaagcatttgataattttagaattgttccaccaggaacaggaatatgtcatcaggtaaacttagaatatctatcaaaaaaagtttggagtgaggaatttgaaggtgttaaatat

SEQ ID NO: 282319 - DNA, 631 bp, Unknown
  Bacterial polypeptide expressing nucleotide sequence isolated from the Sargasso Sea
atgactccaggaaacaaaaattcttataattcacttaaaaaaataataattaacaataaagagtattattattattcattaaatgaagctgaaaataatggacttgaaggaataaataaacttccaaaatctcttaaagttttattagaaaatttattaagatatgaagatgatttaagtgtaacaaaatctcaaatagaagcgattaaaaattggctaaagacaaaaaaatctaaaactgaaattgcatacagaccagcaagagtattacttcaagattacacaggaatacccgcagttgcagatttggctgctatgagagaagctgttaaagaaaaaaataaagatccaaaaacaattaatccattatctaccgtcgatctagtgattgatcactcggtgcaggttgatcaatttgcaaatccagattcttttgaaaaaaatgttgatatagaattcgagagaaatagtgaaagatattcctttttaaaatggggacagcaagcatttaataattttagaatagttccaccaggaacaggtatttgtcatcaagtaaatttagaatatttgtcaaaagttgtttggttagaagaatttaaaggagataaatatctttttccagaatact

SEQ ID NO: 282320 - DNA, 802 bp, Unknown
  Bacterial polypeptide expressing nucleotide sequence isolated from the Sargasso Sea
aacagcatttgaacttactgatgctactgcagaacgctcttgcgcgggtagcacaatacttctatcccaagaaactgttcaagaatatttaagaagcaatatttgcctgctagaaaaaatgattgaaagcaattatgaagactcaaaatcgatttcaagaagaataaatgatatgaaaaattggttaaaaaaagctgaattaattcagccagattcaaacgcgcagtataatgaaaccattgaaattgatttagcaaaagtaacgcaacctatagttgcctgccctaacgatccagataacgttaaggagatcacagatgttgccaatacaaatattgacgaagtttttataggttcttgcatgacaaatattggtcattacagagcagctgcgaaagttcttgaaggtgtacaaaatttaaaatctaaattatggatttgtcctccaacaaaaatggatgaagaaactctaaaagctgaaggttattataaaatttttgaaaattgtggtgcaagattagagttaccaggctgctctttatgtatgggaaatcaagcaagagtagatgaaggatctgtagtattttctactagtacaagaaattttgacaatagacttgggaaaaatgcacaagtatttttagggagtgctgaattagcagcagtttgcgcacttcttggaaaaatccctgatgtagaagaatatcaggatattactaaaaataaaattaatccatattcagatgaactttatcgttatcttcaatttgatgaaatacccgatttcagtttgtcaaaatga

SEQ ID NO: 282321 - DNA, 1003 bp, Unknown
  Bacterial polypeptide expressing nucleotide sequence isolated from the Sargasso Sea
aatgccattgaatatgccggaatctgtactcgtcagatttaatggaaaattattaccgggaattactttaagagatttagtaaatgcaatccctttcttcgcaattaaaaaaggactcttaactgttgagaaagcaaataagaaaaatatttttaacggaaaaattatggaaattgagggattgcctaacctaaaacttgaacaagcgtttgaactcacggacgctactgcagaacgctcatgcgctggtagcacaatacttttatcccaagaaactgttcaagaatacttaagaagcaatatttgcttactagaaaaaatgatcgagagcaattatgaagactcaaaatcgatttcaagaagaattaatgatatgaaaaattggttagaaaaaccctcattaattcagccagataaaaacgctcagtatgaagaaattattgagattgatttagcaaaagtaacacaacccattgttgcttgccctaacgatccagataacgtaaaggagatatcagatgtagccaatacaaatattgacgaggtttttataggttcttgcatgacaaatattggtcattacagagcagctgccaaagttcttgaaggtgtacaaaatttaaaagctaaattatggatttgtccacctacaaaaatggatgaagaaactctaaaagctgaaggttattataaaatatttgaaaattgtggtgcaagattagagttgccaggctgttctttatgtatgggaaatcaagccagagtagatgaaggatctgtagtattttctactagtacaagaaattttgacaatagacttggaaaaaatgcacaagtatttttaggcagtgccgaattagcagcagtttgcgcacttcttggtaaaatccctgaattagaagaatatcaggatattactaaaaataaaattaatccatattcggatgaactttatcgttatcttcaatttgatgaaatacacgatttcagtttgtcaaagtga

SEQ ID NO: 282322 - DNA, 649 bp, Unknown
  Bacterial polypeptide expressing nucleotide sequence isolated from the Sargasso Sea
aatgaaatcactagattcttttaaattaaaagcaaatttgtcaatagatagtaaaaattataaatattttgatctcaaaaaactatctgaacaatttgattttaaattaaataaaattccaaattctataaaaataattcttgaaaatttagtacgtaatgaagatagcacgtctataaacaaagaaatgattaagaatttatgttctaaaattaatcaaagcaaagaaggaaaaaaaaatatagagatagcctttttccccactcgagtgttaatgcaggattttacaggcgttcctgctgtagctgatttagccgcaatgcgaaatgcattgaaaagtaaaggaattgatccaaaaaaaattaatcctctttccagggttgatttaattattgatcattcagtaatggttgataattttggtaattcaaactcatataaaaaaaatgttcagcgagaatttgaaagaaataaagaaagatatcaatttttaaagtggggacaagagtcatttgaaaatttttaccttgttcccccaggtgctggtatttgccatcaggtaaacctggaaaatattgctaaaacaatttggttaaaaaaaataaatggcaataattatcttttcccgagattctgttgtaggaactga

SEQ ID NO: 282323 - DNA, 2145 bp, Unknown
  Bacterial polypeptide expressing nucleotide sequence isolated from the Sargasso Sea
ttactgatgtttgattctttccacgatgtgaaagaaaaagccgacaaaggcaatgctaacgccaaagcggtattacaaagctgggctgatgccgagtggtttaccagcaagccagctatccctgaaaaaatcactgtgactgtatttaaagtcacaggtgaaaccaataccgacgatttatcgccggctccggatgcctggtcacgccctgatatccctctgcatgctttagctatgctgaaaaacgtgcgtgacggcattgagccggatgtgcctggttcaaaaggccctgtgaagcaaatcgaagctttaatcgccaaaggtttcccactggcttatgtcggtgatgtggtaggtacaggttcaagccgtaaatcagccacgaactcagtgctgtggtttatgggtgaagatatgccatttgtgccaaataagcgcactggtggtgtttgtttaggtggcaaaattgcacctattttcttcaacactatggaagactcaggttcattacctatcgaattagacgtctctaagatgaacatgggtgatgtgatcgacattttcccacatcagggtgtggtaaaacgccatggcactgaggaagtcatctctacctttgaactgcgttcaaatgtgttattggacgaagttcgtgccggtggccgtattcctctgatcattggtcgtggtttaacagacaaagcccgtgaagctttaggtttagctcactccactgtgtttgagcgtcctgctgtaactgaggttactaataaaggtttcaccttagctcagaagctggtgggtaaagcttgtggtgtcaaaggtattcgcccaggccaatactgtgagccaaaaatgaccacagtaggttcgcaagacactacaggtcctatgacccgtgatgagttaaaagacttagcttgtttaggtttctctgctgatttagtgatgcagtccttctgtcacaccgcggcttatccgaagccggttgacgtgaacacgcaccacacactgccagatttcattatgaaccgtggtggtatctctttacgtcctggtgacggtgtgatccacagctggttaaaccgtatgctgttacctgatactgtaggtactggtggtgattctcacacccgtttccctatcggtatttctttcccggcaggttctggcttagtagcttttgctgctgccactggtgtaatgccactggatatgcctgagtctgtgttggtgcgttttaaaggcgaaatgcagcctggtatcacgttacgtgatttagtgcacgcaatcccttactacgctatccagcaaggcttactgactgttgagaagaaaggcaaggtcaacattttctctggccgtgtgttagagattgaaggtctggagcatttaacggctgaacaggcgtttgaattatctgacgcttcagctgagcgttcagctgcaggttgtactatcaccttgtctgaagcttcagtggctgaatacttagaatccaacatcgtgatgctgaaatggatgctgagcgaaggttacggcgatgtacgcactatcgagcgtcgtattcaggcgatgcaagcctggttagccgatccaaaactggaacgtgctgacgctgatgctgaatatgctgcggtgatcgaaatcgatctggctgacatcaaagagccaattctgtgtgcaccaaacgacccggatgacgctcgtttattgtcttcagtcgaaggcgataagattgatgaagtctttatcggttcttgtatgaccaacatcggccacttccgtgccgctggtaaactgttagacaagttcaaaggccagatcccaacccgtctgtggatagctccaccaaccaagatggataaagatcagctgactgaggaaggttattacggtatttacggtcgtgtgggtgcccgtatcgaaatcccgggttgttcattatgtatgggtaaccaggctcgtgtaggcgacaataccactgtggtatcgacttctacccgtaacttcccgaaccgtttaagtcagggtgctaacgtttatctggcttctgctgaattagctgctgttgcatctattatcggccgtttgccaacagtacctgagtacctggatacgcgaagcagattgaaacgacggctg

SEQ ID NO: 282324 - DNA, 2581 bp, Unknown
  Bacterial polypeptide expressing nucleotide sequence isolated from the Sargasso Sea
gatgttagataactataaaaaacacgttgaagaaagggctaaagagaacatcccaccccttccattggatgttgaacaaacttcagaactaattaatttacttaaatctgagcatgatgaatctgagcttttattattccttttaaaagaaagggttccagcaggtgttgatcaatccgcatatgttaaagctgcatttttatccgacattacttcgggtaaaacatccagtccatatatagataaaaagaaagctgttcaaattttaggaactatgctgggtggttataatattgaacccttaattaattgtttaaaaatagataaattaggtgaagaagctgcaaatgctctaagtgaaactttattaatttttgattcatttaatgaaatttttgagctttcaaaaaccaataagtatgcaaaaaaagtcattgattcttgggcagccggtgaatggtttacaaaaaaattagaaattcctgaacaaatcaaattgacagtatttaaagtgcctggagaaataaatactgatgatttatctccagctacagatgcgtggtcaagaccagatattccacttcatgcattagcaatgtttaagatgcctagagaaggtcttgaaaaacctttggagacaatagaaaaattaaaagaaaagggaaatcctctggtttttgtaggtgatgtcgtaggaacaggttcatcgagaaaatctgctactaactcagtactatggcatatgggtgacgaaattccttgtattcccaataaaaaagaaggcggtttttgttttggaggaaaaattgctcctattttctttaatactttagaagattcgggtgcatttccaattgaaatggatgtaactaaaatggaaatgggtcaagaggttattttagagccttttaatggtcaggttttagatgcaaaaaataatgaaattattacaaaatttaatcttaaaaccgatgttattctagatgaagttagggctaacggtagaattcctcttattattggtcgacaattaacagacaaaacaagagaggctttgagtttaggtccaacagatatttttagaagaccagattcaaaagataactccacaaaaggatttacccttgcacaaaaaatggttggtaaagcatgtggtgttgatggagttagacctggtacctattgcgaaccaagaatgacaacggttggatcacaagataccacaggcccaatgactagagatgaacttaaagaacttgcatgtctgggtttttcagcagatttggttatgcaatctttctgtcatactgcagcatatccaaaacctgttgatgtagaaacccaacatagcttacccgatttcattatgaatcgtggtggagtctctttaagacccggagatggaataattcattcatggatgaacaggatgcttttaccagacactgtaggaactggtggagatagtcatacaaggtttccaattggaataagtttcccagcaggttctggtctagttgcctttgctgctacgctaggtgtaatgcctctagatatgcccgaatcagtattagtaagatttaaaggagacatgcaacctggaataaccttaagagaccttgttaatgccattccatatgccgctattcagaaaggtcttcttacagttgaaaaaaaaggtaagaaaaatatattttcaggaaaatgtcttgaaattgaaggtctgccaaatatgaaagttgaacaagctttcgaactttcagatgcctctgccgaaagatcagcgtctggatgcactgttctattaaatgaagaacctattttggaatatctaaattcaaatatcattatgttgagatggatgattgcatcaggatatggagatgcaaaaactcttgaaagaagagctcaggcaatggaggaatgggttctaaatccacaacttttaaaacctgatcaagatgcagaatatgctgaggttattgaaattgatctaaatgaaattaaagagcctttattagcatgtccaaatgacccagatgatattaaaccactttctgatgtagaaaatactcctattcaagaagtgtttattggttcttgtatgacaaatattggacattttagagcagcaagtatgcttcttaaaaaatataatcaaacaaatgcaagattatgggttgtgccaccaacaaaaatggatgagcaacaattaattgaagaaggagaataccaaatcttcaaagatcttggagcaagaacagagcttccaggctgctctttatgtatgggaaatcaagcaagagttattgccaattctactgttatttcaacatctactagaaattttcctaacaggatgggagacggtgctgatgtatttttagcctcagctgaattatcagcgatagcttctatattaggaaaaataccaacagttgatgaatatcaccaatatatgaatgatataaatcctttctctgaaaatatttatagatacttaaattttaatgaaatagatacttatgtagcaagtgcaaattcagctgaaattccaactataaatatagttaatccctaa

SEQ ID NO: 282325 - DNA, 2308 bp, Unknown
  Bacterial polypeptide expressing nucleotide sequence isolated from the Sargasso Sea
atgttaggcggatacaacattcaacctttaatagaatgtttaaaaaatgacgaacttgcagatgatgcagtagatgccctaagtaagactttattaatttttgatgcatttaatgaagtgtttgagttatctaaaacaaataaatatgctgagcaagttataaaaaattgggctgatgcgaaatggttcactgataaagaagacttagaagaaaaaataacacttacagtgtttaaagtttcaggagaaataaatactgatgacctttctccagctccagatgcttggtctcgtccagatatacctctgcacgccttagcaatgtttaaaatgccaagatctggactttctgatccacttgaaactattgaaaaacttaaagagaaaggtaacccattagtcttcgttggagatgttgttggtacaggatcttcaagaaaatcagcgaccaattccgtactatggcacatgggagatgaaataccttttattcctaacaaaaaagaaggtggattttgttttggaggaaaaattgctcctatattttttaacaccttagaagattcaggagcatttccaattgaaatggatgtatcaaaaatgattactgggcaagaagtcatattagagccattcaaaggaactgtaactgatgcaaacactaatgaagttatatcagaatttaaattaaaaactgatgttattcttgatgaggttagagcaaatggaagaataccactaataattggtagacagctaactgataaaagcagagaagctttgggtctagaaacctcagatgtatttagaaggcctaatgcaaaagataaatcaactaaaggttttaccttagctcaaaagatggttggcaaagcttgtggagttgatggcattagaccaggaacatattgtgagccaagaatgtctactgttggatctcaagatactacaggacccatgacaagagatgaattaaaagagcttgcgtgtcttggattttcagcagatttagttatgcaatcattttgtcataccgcggcatacccaaaacctgttgatattgaaacacaacataatcttcccgattttattatgaatcgcggcggtgtatcacttagaccaggagatggaataatccattcatggatgaatagaatgctgttaccagactcagtaggaactggtggagatagtcatacaagatttcctattggcatttcttttcctgctggatcaggattagttgcattcgctgctacacttggtgtgatgcctttggatatgcccgaatcggtattggtaagatttaaaggcgaaatgcaacctggaatcactttgcgtgatcttgttaatgctattccttatgctgctttacaaacaggactcctgacaattgataaggatggtaaaaagaatattttttcagggcgatgtttagaaattgaaggcctgccagatatgaaagtcgaacaagcatttgaattatcagacgcttctgcagaaagatcggcatctgggtgtactgtaagactaaataaagaaccgattatagaatatcttaattcaaacattgttatgttgagatggatgattgcatctggttatggtgatgtaaaaactttagaaagaagagcgcaagctatggaagaatggattctcaatcctgaattacttgagcctgataaagatgcagaatatgcagagattattgaaatagatcttaatgaaattaaagagcctttgctagcttgccccaatgatccagatgatattaaacccttatcagaagttgctaatacaaaagttcaagaagtatttattgggtcatgtatgacaaatattggtcattttagagcagctggaactttgctagaaaaatataaaggtattaaagctaggctatgggttgtgcctccaacaaaaatggatgagaaacaacttatagaagaaggtatttataatatatttggggtttctggtgcaagaaccgagcttccaggatgctcattatgtatgggtaatcaggcaagagtattagcaaattcaactgttatatcaacctcaactagaaattttccaaataggcttggagatggagcaaatgttttcttggcttcagcagaattatcagcaatttctgctgttttgggcaaacttccaacagtcgaggaatatcatcaatatatgagtgacattaaccccctctcggatcaaatttatagatatctaaattttaatgaaatcgatacttatgttcaaagtgcaaattctgcagaaataccttcgattaatattgtgaatccttagc

SEQ ID NO: 282326 - DNA, 674 bp, Unknown
  Bacterial polypeptide expressing nucleotide sequence isolated from the Sargasso Sea
tatgtttgatttagcgatgattaagagtgtctatgaacatatgaatgagcgcataaatgcagctcgtgtcatattaggacgccccctaacattgacagagaaaatattgtattctcatcttgcaacgggaaatccttctgagcaatttaaaagaggaagatcttatgtggattttcttccagatcgcgtgggcatgcaggatgcaaccgcgcagatggcattgctacagtttatgatggctggtagagagaaagtcgctgtaccatcaacggtacactgtgatcatcttatccaagcgaaggaaagcgcatcaagtgatctagctcaagcaatggatgttaatggagaagtatatgattttctcgagtctgtatctaataaatacggaattggcttttggaaacctggcgcaggaataatccatcaggttatattggagaattatgctttcccaggtggtatgatgattggcactgatagccatactgtgaatgctggtggtttaggaatgatagcaataggtgttggtggtgcagatgctgtagatgtgatggcaggtatgccctgggagttgaaatttccaaaattaattggtgtaaggttaaccggtgagatgaataaatggacttctgctaaagatgttatcctaaaagttgcaggaatattaacagtta

SEQ ID NO: 282327 - DNA, 625 bp, Unknown
  Bacterial polypeptide expressing nucleotide sequence isolated from the Sargasso Sea
agacgctgaatatgctgagataattgaaattgattttaacgaaatcaaagaacctctccttgcatgtcctaatgatccagatgatataaaacctctatcagatgttgcaaatacaaaaatccaagaagtttttattggatcatgcatgacaaatattggtcattttagagcagctggtacgcttcttgagaaatataaaaatcttaaggcaagactgtgggtggtgccaccaacaaagatggacgagaaacaacttatcgaggaaggtatatacaatatcttcggagtatctggtgcaaggaccgaggtaccgggatgttcattgtgcatggggaatcaggcaagagttttagcaaactcaactgttgtttcaacctcaacaaggaattttccgaacagacttggcgatggagctaatgttttcttagcatcagcggaactatctgctatatgttcagttcttggaaaaattccaactattgagcagtatcatcagtatatgagtgatatcaatccattgtcagatcaaatttataggtatttaaactttaatgaaattgatacttatgttgaaagtgcaaacaatgctgagatacctgcaattaatatagtaaatcctggttag

SEQ ID NO: 282328 - DNA, 838 bp, Unknown
  Bacterial polypeptide expressing nucleotide sequence isolated from the Sargasso Sea
tatggaaattgagggattaccaaacctaaaacttgaacaagcttttgaacttactgatgctactgcagaacgctcatgcgctggtagcacaatacttttatcccaagaaactgttcaagaatatttaaaaagcaatatttgcctgctagaaaaaatgatcgagagcaattatgaagattcaaaatcgatttcaagaagaataaatgatatgaaaaattggttaaaaaaaccatcattaattcaaccagattcaaacgctcagtatgaagaaatcattgaaattgatttagcaaaagtaacacaacctatagttgcttgccctaatgatccagataatgtaaaagaaatcactgatgttgcaaatacaaatattgacgaggtttttataggttcttgcatgacaaatattggtcattacagggcagctgcaaaagttcttgaaggagtacaaaatttaaaagctaaattatggatttgtccaccaacaaaaatggatgaagaaactctaaaagctgaaggctactataaaatatttgaagattgtggtgcaagattagagttgccaggctgttctttatgtatgggaaatcaagctagagttgatgaaggttctgtagtattttctaccagtacaagaaattttgacaatagacttggcaaaaatgcgcaagtatttttagggagtgcagagctggcagcagtttgtgcactgcttggaaaaatacctgaaatagaagaatatcaggatattactaaaaataaaattaatccatattcagatgaactttatcgctatcttcaatttgatgaaatacacgatttcagcttgacaaagtaa

SEQ ID NO: 282329 - DNA, 649 bp, Unknown
  Bacterial polypeptide expressing nucleotide sequence isolated from the Sargasso Sea
tatgaccccaggaaacaaaaattcttataaatcactaaaaaaaatcacagttaatgacaaagagtataattattactcattaaatgaagcagaaaaaaatggacttgaaggaatagataaacttccaaaatctctcaaagttttactagaaaatttattaagatacgaagacgacttaagtgtaacaaaatctcaaatagaggcgattaaaaactggctaaagacaaaaaaatctaaaactgaaattgcatatagaccagcaagagttttgcttcaagattatacaggaatacctgcggttgcagatttagctgcaatgagagaagcagttaaagaaaaaaataaagatccaaatacaataaatccactgtctgcagttgatcttgtaattgatcactctgtgcaagtcgaccaatctgcaaaagctgattcttttgaaaaaaatgtcgacatagaatttgaaagaaatggtgagagatattcttttttaaaatggggacagcaagcatttgataattttagaatagttccaccaggaacaggaatttgtcaccaagtaaatcttgaatatttgtcaaaagttgtttggtcagaagaatttaaaggtgaaaaatatctttttccaagatactttagttggaacggatag

SEQ ID NO: 282330 - DNA, 1156 bp, Unknown
  Bacterial polypeptide expressing nucleotide sequence isolated from the Sargasso Sea
aatgctgcttccagatacagttggtacaggtggtgatagtcatacaagatttcctataggaataagctttccagcaggatctggtttagttgcatttgctgcaacgcttggtgtaatgcctttagatatgccagagtcagtgttggtaagatttaaaggtgatatgcaaccaggaataactcttagagatctagttaacgctattccatatgcagcacttcaaagaggattacttacgatagataaggatggaaaaaagaatgtcttttctggcaggtgtcttgaaattgaaggcctgcctaatatgaaggttgaacaagcttttgaactttctgatgcttctgctgaaagatctgcatcaggttgcacagttaagcttaataaagaaccaataatagaatatcttcagtcaaacattgttatgttgagatggatgattgcaagtggctacggagacgcaaagactcttgaaagaagagctcaatcaatggaagagtggattcttaatccacaactactagaagcagacaaagacgctgaatatgctgagataattgaaattgatcttaacgaaatcaaagaacctctccttgcatgtcctaatgatccagatgatataaaacccctatcagatgttgcaaatacaaaaatccaagaagtttttattggatcgtgcatgacaaacattggtcattttagagcagctggtacgcttcttgagaaatataaaaatcttaaggcaagactgtgggtggtgccaccaacaaaaatggacgagaagcaactaatcgaagaaggtatatataatatctttggagtatctggtgcaagaactgaagtaccaggttgttcattatgcatgggaaatcaggcaagagttttagcaaactcaactgtagtttcaacctctacaaggaattttcctaacagacttggtgatggagctaatgttttcttagcatcagcagaactatctgctatatgttcagttcttggtaaaattccaactattgagcagtatcatcagtatatgaatgatataaatccattgtctgatcaaatttataggtatttaaacttcaatgaaattgatacttatgttgaaagtgcaaacaatgctgaaatacctgcaattaatatagtgaatccaagttaa

SEQ ID NO: 282331 - DNA, 2581 bp, Unknown
  Bacterial polypeptide expressing nucleotide sequence isolated from the Sargasso Sea
aatgcttcaggattacaaaatacattgtgaagaaaggaaagaacaaggaataccgccactacccctttcagctcaacagacttcagaattagttgaattacttaaatctgagcatgaagaatcagagctattattagagctgttaaaagaaagaacgccggcaggcgttgatcaatcagcatatgtaaaagcaggatttttagcagatatcacaactggcaagacaaccagcccatatatcacaaagaaagaggctgtaattattttgggaacaatgctaggtggttacaatattcagccattagttaagtgtttagaagacgatgaactaggagaagaagcagcaaatgctttaagtaagactttgctaatttttgatgcatttaatgagatcttggaattatcagaaactaataaaaatgcaaaggctgttataaatgcttgggctgagggcacttggtttcaagaaaaggaagaaattcctgaacagattaaattgactgtctataaagtaccaggagaaattaataccgatgatttgtctcctgcaacagatgcttggtctagaccagatattccacttcatgcattagcaatgtttaaaatgcctagagagggtttagagaagccccttgaaacaattgaagagttaaagaaaaaaggaaatccactggtttttgttggtgatgtagtgggaactggttcgtcaagaaaatcagctacaaattctgtcttatggcatatgggagatgagattccatatattcctaataaaaaggaaggtggattttgttttggaggaaagatagcgccaattttttttaatacactagaagattctggagccttcccagttgaatgcgatgtatcaaaattgaaaatggggcaagaaattatttttgagccatatggtggcaaaatatcagatgctaatagcggtgaaatcttatcaacatttgaactaaagactcccgtgcttctagatgaagtaagagcaaatggccgaattccattaatcattggaagacaattaacagataaaactagggaagcactcggcttagaggtgactgatatattttcaagaccagatgctgaagattcatcaaaaaaagggtttacattagcccaaaaaatggttggcaaggcatgtggagtgaagggtataagaccaggtacatattgcgaaccaagaatgacgactgttggttcgcaagatacaactggacctatgaccagagatgaattaaaagaacttgcatgcctaggcttttcagcagatctagttatgcaatctttttgtcatactgctgcgtacccaaagccagttgatattgatacgcagcatacattgccagattttataatgaatcgaggaggagtatcgctgaaacctggtgatggaataatccattcgtggcttaatagaatgctacttccagacggagtaggaactggtggagatagtcatactcgctttccattaggcataagttttcctgccggatcagggttagttgcatttgcagcagcattaggcgttatgccattagatatgcctgaatcagttcttgtgcgatttaaaggcaaaatgcagcctggaataaccctcagagatttagtaaatgctattccgtatgcggcaattcaaaaaggtcttttgactgtagaaaaagaaggcaagaaaaatgtcttctctggtcgatgtcttgagatagagggtttgccaaacctgaaagtcgaacaagcatttgaattatcagatgcttctgcagaaagatctgcttcaggatgtacagttcgattaaacaaagaaccaattattgaatatcttaaatcaaacattgtgatgttgagatggatgattggctgcgattatggtgatgctaaaactttagaacgaagagctcaagcaatggaagaatggatcaaaaatccagaattgcttgaaccagataaggatgctgaatacgcagaaataattgaaattgacctgaataaaatcacagaacctcttcttgcatgtcctaatgatcctgatgatattaagcctttatcagcagttgcggaaactaaaattgacgaagtgtttattggatcatgcatgacaaatattggtcactttagagcagcaggccatttactaaaaaaatataatgggactaaagcaagattgtgggttgtgcctcccacaaagatggatgagaaacaactaatggaagaaggaatatataatgtatttggcacatctggggcaagaacagaacttcctggttgctctctttgcatgggtaatcaagcaagagtattggccaactcaacagttgtatcaacctcaactagaaactttcctaacagattaggagatggtgctgatgtatttttagcctcagccgagcttgctgccatatcctctgttcttggaaaactaccctctcctcaagaatacttaaaatacatggaagatattaatccattagccgaagatatttatcgttatttaaattttaatgagctagatagctatgtcgaaagtgctaatgctgcaaatattcctgcaatcaatattgtgaatgcttag

SEQ ID NO: 282332 - DNA, 847 bp, Unknown
  Bacterial polypeptide expressing nucleotide sequence isolated from the Sargasso Sea
tagagaaaaatacgatcaggtgtatcaaggtggaagtctatgggaaaatttaaatgtatcaaattctgaagattataattggccagatagtacttatataaaaaaaccaccatatttaaatcatgcagaaaataatcaaataaaagacatcgaattagccagaccaattgtattactaggcgactctgtcactacagatcatatttctccctctagcgtaataacaaaaggaacagcagcttgggattacttaacaaaccttggattagattcaaaagactttaataattacttaactcgaagagctaatcatgaaattgtagaaaggtctacctttgctagtttaagattaagaaatttaatggttcctaatcaagaagggagttttaccgttaagtatcctgaaaataaagtaatgagaatttatgaagctgctattcaatataaaaaagacaaaaaagaaattatagttatagctggagaaaattatgggtgtggatcttcaagagatgtggctgcaaaaggacctttattaattggtgtaagagcaatagttgcaaagggatttgaaagaattcatagatcaaatttaattggcatgggattgctccctttagaatttgaaaatggacaaggtatcaatgaacttaagattgaaagttcagatcagtttagcttattagggttaaatgacattacaaatgaaaataaaaaagtacttatgaaaatacataaacaaacaggtgatatcattgaagttacacttaatgctagattagatgttccagaggaagtaaatttttggaaaaatggtgggattttacctacagcttataaagaggcttaa

SEQ ID NO: 282333 - DNA, 901 bp, Unknown
  Bacterial polypeptide expressing nucleotide sequence isolated from the Sargasso Sea
tcaaatatagaggtagataaaatagttaatgagttttacaaagcagaaacgtttagagaaaaatacgatcaggtgtatcaaggtggaagtctttgggaaaatttaaatgtatcaaattctgaagattataattggccagatagtacttatataaaaaaaccaccatatttaaatcatgcagaaaataatcaaataaaagacatcgaattagccagaccaattgtattactaggcgactctgtcactacagatcatatttctccctctagcgtaataacaaaaggaacagcagcttgggattacttaacagacctagggttagactcaaaagactttaataattacttaactcgaagagctaatcatgaaattgtagaaaggtctacctttgctagtttaagattaagaaatttaatggttcctaatcaagaaggaagttttaccgttaagtatcctgaaaataaagtaatgagaatttatgaagctgctattcaatataaaaaagacaaaaaagaaattatagttatagctggagaaaattatgggtgtggatcttcaagggatgttgctgctaaaggacctctgctaattggagtaagagcaatagttgcaaagggatttgaaagaattcatagatcaaatttaattggcatgggattactaccattagaatttgaaaaagggcagggtattaatgaactaaacattgaaagtactgaccagtttagtctattagggttaaatcatattacaaatgagaataaaaaagtgcttatgaaaatacacaagcaaacaggtgatatcattgaagtttcacttaatgctagattagatgttccagaagaagtaaatttttggaaaaatggtgggattttacccaccgcttataaggaggcttaag

SEQ ID NO: 282334 - DNA, 796 bp, Unknown
  Bacterial polypeptide expressing nucleotide sequence isolated from the Sargasso Sea
cttgagtgacacaataactgatgaagaaggtaatgaaatctcattaagtccaccagttgcggaggaattaccagaatctggttttgaaacaacacttgaaggctttattcaaccagatgatggggaagtagagataattattgatcctgaatcaaacagattacaagcactagttccatttagtcctttcgaagataaaaattaccactcaatgacagtattaatgaaagcaagtggtaaatgtacaacggaccatatttccccagctggaaaatggttacaattcagaggtcacttagaaaatatctcacagaacttatttataggagtcaataatgcatttactaaaaatgcaggtgaaggtataaatcagttagataattcggttatgtctttaccggatatcgcaaaatcatatcatgaagaaggcataaactggatagcagttggtgatgaaaattatggtgaaggttcatcaagggaacatgcagcaatggaaccaaggtttagaggatgtaaggtggttttagtaaaaagtttcgcaagaatccatgaagcaaatcttaaaaagcaaggtattcttcctctgacttttgaaaataaagatgattacgaccttattgaacaggaagataaaataacaatagaaaatttagaagcaattgctcctgatacttcaataaatataacaatcgaaaaaactgacggagaaacaaaagacattaaagcaaatcattctctttctgatgaacaaattgaatggtttaaagctggatctgctctaaattcaatataa

SEQ ID NO: 282335 - DNA, 364 bp, Unknown
  Bacterial polypeptide expressing nucleotide sequence isolated from the Sargasso Sea
cggcaccggctccagccgcgactgggctgccaagggcacccagctgctcggcatcagggccgtggtggcgcgcagcttcgagcgcatccaccgctccaacctggtgggcatgggggtgctgccgctgcagttcaaggcgggcgattcgtgggaaacgctgggcctgacgggcaacgaggtgatcgacgtggtgcccgacgctgcactcacgccgcaaagcgatgcgcgcctggtcatccaccgggccgatggcacgcgccaggaggtgacggtgaccctgcgcattgacacctccatcgaggtggactactaccaggccgggggcatcctgccctttgtgctgcgccagctgctggaggggtga

SEQ ID NO: 282336 - DNA, 320 bp, Unknown
  Bacterial polypeptide expressing nucleotide sequence isolated from the Sargasso Sea
acttttaggagtaaagactgtaattgctgaaagttttgagagaattcatagatctaacttaattggaatgggtattttgccgttacaatttattgataatattgataggaaaaatttaaaattaattggttcagaattgattagtataatcaatcttgagaatggaattaatccttctgataaagttaaagtagaaattaagtatgcctcaggtgagattaaaacaatccaagcactttgtagaatagatactaaaaatgagctagagtattataaaaatggaggcatattacaattcgttcttcgaaatatgatttaat

SEQ ID NO: 282337 - DNA, 853 bp, Unknown
  Bacterial polypeptide expressing nucleotide sequence isolated from the Sargasso Sea
tatgaaagtgaaacaagcctttgaattatccgatgcatcagctgaaagatcttcctctggttgtacagttcggttaaataaagaacccataattgaatatctcaattcaaatattgttatgttgagatggatgatagcttcaggttatggggatgctaaaacacttgaaagaagagcacaagcaatggaggaatggatattaaacccagaactcttagaaccagatgcgaatgcggaatatgcagaaatcattgaaattgatttaaacgaaatcaaagaacctctactggcttgtccaaatgacccagacgatattaaacctctttctgctgtagaaaatactgaaatacaagaagtctttattggttcatgcatgacaaatattggtcattttagagcagcaggcacattacttgaaaaatataatggaactaaagctaggttatgggttgttcctccaacaaaaatggatgagaagcaattaatcgaagaaggtatctataatatatttggagtttcgggcgcacggacagaagttccaggttgttctttatgtatgggaaatcaagcaagagtgttagcaaattcaacagttgtttctacgtctacaaggaacttcccaaacagacttggagatggagcagatgttttcttagcctctgctgaactggctgcaatttcatctgttctgggcagattgccaacggtcgatgaatatcataaatatatgtctgatattaatcctcttgcagatgaaatctacagatatcttaattttaatgagattgatagctatgtggagagtgcgaattctgctgagataccagcaataaatattgtaaatcctctataa

SEQ ID NO: 282338 - DNA, 436 bp, Unknown
  Bacterial polypeptide expressing nucleotide sequence isolated from the Sargasso Sea
tatgccagtatatgacgcggttatagattataaaagaagaggaactgatttggtagttattggaggaaaagaatatggaactggatcatcaagagattgggcagcaaaaggaacaaagcttttaggaattaaagcaatattagctgaaagttttgaaagaatacatagatcaaatttaattggaatgggagttttgccattacaatttattgatggaatgaatagagaaaatttagatctaaaaggccctgaattaattagcattcttaacattgaaaaaagattaaatcaaagtgatcatgtagatgttgaaataaaacatcaatcaggagagttaaaaaaaattaaaatgttatgtcgaatagatactaaaaatgaattagaatattataaaaatggcggtatcttgcaatatgttttaaggaaaatgttataa

SEQ ID NO: 282339 - DNA, 541 bp, Unknown
  Bacterial polypeptide expressing nucleotide sequence isolated from the Sargasso Sea
gaggtatgatgaggggtacttttgcaatatcagaataaaaaatgaaatgttagataacattgaaggtggatataccattcattatccatctaaaaaacaaatgtcaatttatgacgcctcaataaaatacaataaatcaaaaacaccattagttgtcattgcgggaaaagattatggaatgggctcatcaagagactgggcagcaaaaggaactaatttgcttggtgttaaagcggtaattgctgagtcttatgaaagaatacatagatctaacttaatcggaatgggtgtacttccttttgtattcaaagacggtgaaaatagaaaatctttaaaattagaaggcccagaaaaaataacaataagtgggatcaaagataatttaaaacctcaatctttttataatgcaatgatagtttataaaaatggtaaaaatataaccactgagataaaactattagtaaatacatctacagaagtagaatacctcaacagcggaggcattctacaatatgttttaaaagaattagtaaattcttaa

SEQ ID NO: 282340 - DNA, 1600 bp, Unknown
  Bacterial polypeptide expressing nucleotide sequence isolated from the Sargasso Sea
tttacaaaatgctttaatactagtaatgaagtttttaattttttagagtctgtttcaaataaatatgggattgggttttggaaacccggtgctggaattatacatcaagtagttttagaaaactatgctttccccggtggtatgatgattgggacggattctcataccgttaatgctggaggtttaggtatggtagccataggagttggaggagctgatgctgttgatgtaatggcaggtatggcatgggaacttaaatttccaaaacttataggggttaaacttacaggtaaactttctggatggactgcaccaaaagatgtgatattaaaagttgctggaatcctaaccgtgaagggaggaacgggagctatcattgaatattttggaccaggtgctgaagagctttcatgtactggtaaaggaacaatttgtaatatgggtgctgaagttggggcgactacatctacatttgggtatgatgaatcaatggaaaaatatcttagagttactggtagagatttggttgcagatgaagcaaataaaattaaagaatatctaactggagacccagaagtttatgaaaatcctgaaaaatattttgatgaattaatcgaaataaatctatcagaacttgaacctcatataaatggtccattttcgccagatattgctactcctgtgagtaaaatggcagatacccttttagaaaatgattggccgagaaaaattgaatggggtttaattggatcttgtacaaactcttcatatgaagatttatctagagcatcatctatagcaaaccaagcacttgaaaaaaacttgtctacaaaagcagatttcggaataaatccaggctcagaacaagtaaggtatacagcagaaagagatggtctattaaatatttttgaaaagctggatgctaaaatatttacaaatgcatgtggaccatgtattggacaatgggctagaaaaggtgcagataaagaagaaaaaaattcaataattcactcattcaatagaaattttgccaaaagagccgatggtaatcctaatacccatgcttttgttgcatcacctgagatggttgctgcaattgcgatatctggtgacttagctttcaatccaatgaaagataaacttgtaaataatgaaggagttgaagttagtcttgaagagcctaaaggttgggaattgcctccaaatggatttgatgttgaagataatggttatatagatcctgtagaagatggctctaatattgaagttataatagacccaaagtcaaaaaggcttgaaaaactagaaccattcaagccatgggatggtaaaaatataatggatgcaaaactattgattaaagcatttggaaaatgtactactgatcatatatctatggctggaccatggttgagattcagaggtcatttagataacatttccaataattgtttgattggggcaataaatgctttcaataaaaaaacaaattttgtaaaaaatcaattgacgggaaaatatgacggagtacctgatgttcaaagaaattacaaagaaaataacatctctactgttgttattggagatcacaactatggga

SEQ ID NO: 282341 - DNA, 586 bp, Unknown
  Bacterial polypeptide expressing nucleotide sequence isolated from the Sargasso Sea
tatgaaaccaggaaataaaaactcttttaactcaaaaagcataattaaaattaataataatgaatatacttattattcaatacctaacgctgaaaaaaatggtttaagtggagtttctaagcttccaaagtcacttaaggttttgttagaaaacctacttaggtatgaggatgatttaacagttaataaaagtcaaattttagcaattaaagattggttgcaaacaaaaaaatcaaatacagaaattgcttatagacctgcacgggttttgcttcaagattatacaggtataccagcagtggctgacttggctgctatgagagaggctgtaaaagagaaagataaagatccaaataagattaatccattatcatcggtagatttagtaattgatcactctgttcaagtagatcaatcagcaaaagaagactctttcgataaaaatgttgagatagaatttaaaagaaatggagaaagatattcttttttaaaatggggtcaaaacgcttttaataattttagaattgtaccaccaggcactggaatttgtcatcaggtaaacttggaatatttatcaaaagttgtt

SEQ ID NO: 282342 - DNA, 1414 bp, Unknown
  Bacterial polypeptide expressing nucleotide sequence isolated from the Sargasso Sea
tgaattagcaaatgaaattaaagatcatcttaaagctgatgatgaagttcacagtaatccagaaaaatactatgatgaagttattgaaatcaatttatctaaattagaaccacatattgttggaccatacagtcctgacttatcaagagaaatttctgaaatgcctgatgcagtaaataaaaataattatgatgataatctaaaagttggcttaattggaagttgtacaaattcttcatatgaagatattgaaagagcagctcatgttgcaaaacaagctttaggtgcaggattaaaagctaaatcagagttttatataactcctggatcaaatcaaattaaagctacaatggaaagagatgggtacacaaaaatttttgaagatcttggtggaaaggttctggcaaatgcttgtggaccttgcattggacaatggaagaggtctgatatagctgaaggtgaaaaaaatacaattattacttcatttaatagaaactttgcaaaaagaaatgatgggaatgctgctactgagtcttttgtagcaagccctgaaatcgttacagctcttgctatatctggaaaattaagctttaatccatcaaaagataaaataacccttagtgatggaagtagctttagttttgaatctccatctggttccgaacttcctgaaatgggatttgaaaaaattggaagtgatgattttcttaaagccgaattaagaccaaatacagaagttgctattaatccaaatagtgatagattgcaagtattggagccttttgtaaaatgggataaagaagaaatgaatgacttaaaaattctcttaaaagcagaaggtaaatgtacaactgatcatgtctctcctgctggtccttggttgaaatatagaggtcatttagaaaatatttcccaaaatatgtactcaggagccttaaatgcattcacaaaaacaaatggtgaagcaatagatttaataaatgataaaactgaaaatatttatgaagttgctaaaacttataaagataataatattgattgggttgctgtagctgatgaaaactatggagaaggttcaagcagagagcatgcagcaatggaacctaggttcatgggttgtaaaattattatagcaaaaagctttgcaagaattgctcaaaccaacttaaagaaacaaggtattataccattaatcttcaaagataaaagtgattatgataaaatcgaagcccatgatacaatatctacaatgaatcttaaagattttgacaataaaactaacttaaaattaagcttgaataaaccagatggctcatctgaaattattgaaaccttacataccttttcaaagaatcaaatagaatggttcaaagcgggttcagctcttaacttaattgcaaaaaaatcaaattga

SEQ ID NO: 282343 - DNA, 989 bp, Unknown
  Bacterial polypeptide expressing nucleotide sequence isolated from the Sargasso Sea
accaggaattacattgagagatttggttaatgctataccatatgcagcaattcaaaaaggtcttctaactgttgaaaaaaaaggcaaaaaaaatgtcttctctggaagatgtcttgaaattgaagggctccctaatatgaaagttgaacaagcttttgaattatctgacgcatcagctgaaagatcttcatctggttgtacagttcgattaaataaagagcccataattgaatatctaaattcaaatattgttatgttgaggtggatgatagcttcaggctacggtgatgctaaaactcttgaaagaagagcacaagcaatggaagaatggatattaaaaccagaattattagaaccagatgaaaatgcagaatatgcagaaatcattgaaattaatttaaacgaaataaaagaacctctgttagcatgtccaaatgacccagatgatattaaacctctgtctgcagtagaaaatactgaaatacaagaagtctttattggttcatgcatgacaaatattggtcattttagagcagcaggcgcattgcttgaaaaatataacggaactaaagctagattatgggtagttccccctacaaaaatggatgagaaacaattaatcgaagaaggcatttataatatatttggagtttctggagcacgaacagaagttccaggctgttctttatgtatggggaatcaagcaagagtgcttgcaaattcaacagtcgtttctacttcgacaaggaacttcccaaacagacttggggatggagcagatgttttcttagcttctgctgagctggctgcaatatcatctgttctcggaagattgccaacagtcgatgaatatcacaagtatatgtctgacattaatccacttgcagatgagatttacagatatctaaattttaatgaaattgatagttatgttcaaagcgcaaattctgcagagattcctgcaataaatattgttaaccccttataaa

SEQ ID NO: 282344 - DNA, 1285 bp, Unknown
  Bacterial polypeptide expressing nucleotide sequence isolated from the Sargasso Sea
tcgctcgcgccggggtcgaaggcggtgacgctgtatctggaagaggcgggtctgtgccgggaactggagcaactgggcttcggcgtggtcgcgtatgcctgcacgtcgtgcaacggcatgtcgggtgcgctggacccggcgatccagaaggaaatcgtcgatcgcgatctgtatgcgacggcggtgctgtccggcaaccgtaacttcgacggccgcattcatccgtatgcgaagcaggctttcctggcttcgccgccgctggtggtggcctacgcgatcgccggtacgatccgtttcgacatcgagaaggacgtgctgggcgtcgatgcccagggcaatgaaatccggctgaaggacatctggccgtcggatgcggagatcgacgcgatcgttgcttcgagcgtgaagccggagcagttccgcaaggtgtatgagccgatgttcgccgtttccgtggataccggtgagaaggccgatccgctgtatgactggcgtccgatgagcacgtacattcgccgtccgccgtattgggaaggcgcgcttgccggtgaacgcacgctcaagggcatgcgtccgctggcggtgctcggcgacaacatcacgaccgaccacctgtcgccttcgaatgcgattctggcggacagcgcgtccggtgagtacctcgccaaaatgggcttgccggaagaggatttcaattcatatgccacccaccgtggcgatcacctgaccgcgcaacgtgccaccttcgcgaacccgacgctgaagaacgagatggtgctggaggacggcaaggtgaaggccggttcgctggcgcgcatcgagcccgagggcaaggtcacgcgcatgtgggaagcgatcgaaacctacatggagcgcaagcagccgctgatcgtgattgccggggccgactacggtcagggttcgtcgcgcgactgggccgcgaagggcgtgcgcctcgccggggcggaagcgattgtcgccgaagggttcgagcggattcaccgcacgaatctggtgggcatgggcgtgttgccgctggagttcaagcccggcgtgaatcgtcttacgctcgggatcgacggcaccgaaaccttcgacgtgatcggcgaacgcaaaccgcgcaccgacctcatgctggtgattcatcgcaagaacggtgagcgtgtggaagttccggtgacgtgccgactggataccgcggaagaggtgtcgatctacgaagccggcggcgtgctgcaacgtttcgcgcaggactttcttgaatcgacgaaggcagcggcataaa

SEQ ID NO: 282345 - DNA, 2189 bp, Unknown
  Bacterial polypeptide expressing nucleotide sequence isolated from the Sargasso Sea
agctgcaaatgttctaagcagaactttattaatttttgacgcatttaatgaaatatttgaactatcaaaaacaaatgaacatgcaaagaaagttgttgaagaatgggctaacgcaacttggttcactgaaaaaacagatatagaagagcaaataaaacttacagtttataaagttactggagagataaatactgatgatttgtctcctgcaccagatgcttggtctagaccagacatccctcttcatgcattggctatgtttaaaatgccaagaacaggtcttgatgacccgcttggcacaattgaaaaattgaaagagaaagggaatcctttagtttttgttggagacgtggttggtacaggatcttctagaaaatctgccacaaattctgttttatggcatatgggagatgagataccttgtattcccaataaaaaagaaggtggttattgttttggtgggaaaattgctccaatattttttaatacactcgaagattcaggcgcatttccaattgagatggatgtttcaaaaatgttaatgggtcaggaaattattttagagccacttaatggaagagttttagatgctaataccaaagaagtaatttctgaatttgagcttaagactgatgtgcttttggatgaggttagagcgaacggaagaattccattaattattggtagacagcttacagataaaagtagggaagctttaggtttagatatatcaaaagtcttcagaagacctgatgctaaagataagagtaaagcaggttttactcttgcgcaaaagatggttggaaaagcttgtggggttgatggagtgagaccaggaacatactgtgaacctagaatgacaactgttgggtcacaagatacaactggcccaatgacaagagatgagcttaaagaattggcatgtcttggtttttcagcagaccttgttatgcaatcattttgtcatactgcagcatatccaaagccagttgatatcgaaactcaacataacttacctgactttattatgaatcgtggcggtgtatctctaaggccgggggatggaattatacattcttggatgaatagaatgctgcttccagatacagttggtacaggtggtgatagtcatacaagatttcctataggaataagctttccagcaggatctggtttagttgcatttgctgcaacgctaggtgtaatgcctttagatatgccagagtcagtgttggtaagatttaaaggagatatgcaaccaggaataactctaagagatttagttaacgctattccttatgcagcacttcaaagaggattacttacgatagataaggatggaaaaaagaatgtcttttctggcagatgtcttgaaattgaaggcctgcctaatatgaaggttgaacaagcttttgaactttcagatgcttctgctgaaagatcagcatcaggttgtacagttaagcttaataaagaaccgattatagaatatcttcaatcaaacattgttatgttgagatggatgattgcaagtggctacggagatgcaaagacgcttgaaagaagagctcaatcaatggaagagtggattcttaatccacaactactagaagcagataaagacgctgaatatgctgagataattgaaattgatctaaacgaaatcaaagaacctcttcttgcatgtcctaatgatccagatgatataaaacctctatcagatgttgcaaatacaaaaatccaagaagtttttattggatcatgcatgacaaatattggtcattttagagcagctggtacgcttcttgagaaatataaaaatcttaaggcaagactgtgggtggtgccaccaacaaagatggacgagaaacaacttatcgaggaaggtatatacaatatcttcggagtatctggtgcaaggaccgaggtaccgggatgttcattgtgcatgggtaatcaggcaagagttttggcaaactcaactgttgtttcaacctcaacaaggaattttccgaacagacttggcgatggagctaatgttttcttagcatcagcagaactctctgctatatgttcagttcttggaaaaattccaactattgagcagtatcatcagtatatgagcgacatcaatccattgtcagatcaaatttataggtatttaaactttaatgaaattgatacttatg

SEQ ID NO: 282346 - DNA, 493 bp, Unknown
  Bacterial polypeptide expressing nucleotide sequence isolated from the Sargasso Sea
tatgagttatgatagaccatcacggggagccggcggatatggcagaaataaccgtggcggtggccgatttggaagagacagaccaccaagagagatgcacaaggctacatgttcagaatgtggaaaagaatgtgaagttccattcaaaccaactggacaaaaaccagtttattgtgatgaatgtttccaaaaccataaaccagaaagaagcgaccgtggcggtggccgatttggcggacgtggcggtggtggatatggtggaaaccgtggcggtggccgatttggcggacgtggcggtggtggatatggtggaaaccgtggcggtggccgatttggaagagacagaccaccaagagagatgcacaaggctacatgtgcagaatgtggaaaagaatgtgaagttccattcaaaccaaatggacaaaaaccagtttattgtgatgaatgtttccaaaaccataaaccagaaagaagcgaccgtggaagatattag

SEQ ID NO: 282347 - DNA, 1010 bp, Unknown
  Bacterial polypeptide expressing nucleotide sequence isolated from the Sargasso Sea
cgaaaccgagccgttggggaagggtttgcaaggcgaggacgtctatttgcgcgatatctggccgagcgcagatgacatggccgaggtcacgccatttgcgcaagacgcagaaaatgtgctcaatctctacgcgacaaccgcagagcaaaacctgtgggaatcgctgccggcgcctaaaggcgacctcttcacgtggagcgaagattccacctatatgcaacgtccgccatttttcgacggcgtaacatgcgaaatcccgcagcccggggaaatccgcggtgcgcgcgcgcttgcgatcctgggcgattcggtcacgactgatcacatcaatccaggcggtgcgatcccgcccgaatcggaatcggggaaattcctgatctcgctaggtgttgagccgcgcgacttcaatagctacatttcccggcgcgcccacgaccgtgtgatggtacgaagcagctttgcgaacgtccgccttcgcaacctgatggttccgggtgaggaaggaagcgtgacgttacaccagccggacggggagcgcatgagcatcttcgcggccgctacgaaatacgcggctgaaaacgtcccgatgatcgtgttcgcgggaaacgaatacggcaatggttcaagtcgcgattgggcggcgaagggtccacgtctgttaggcgttcgcgccgtgattgcacgcagtttcgagcgtatccatcgaagcaacctggttgggatggggattttgccgctggaattcgaagaaggtgacagcgcgcaaagcctccacctctctggagacgaactgttcgatctgcccggcgatctgggcgcaatccgggcaggacagatgctcgatctcgtggttcatcgcggcaacggcgaaacggcaacagttcgcctgcgagcgcgcatcgattcggagatcgaagaaacctacttcaggcatggtggaattctgccgtacgtgctgcgtgaccggctcgcccggcaggcccaaagcgctgaactacacctttcctgac

SEQ ID NO: 282348 - DNA, 1619 bp, Unknown
  Bacterial polypeptide expressing nucleotide sequence isolated from the Sargasso Sea
tttaaaacttgcaggcattttaactgttaaaggaggaactggaaaaataattgaatactttggtgaaggcactgaaactattagctgtacaggtaaggcaacaataactaatatgggagctgaagttggagctactacatctatttttccttatgatcaaaaaatgtatgaatatttatcagcaactggtagaaaagatattgctgagttagcaaacacaattaaagagcatcttaaagctgataataaagttcatagtaatccagagaaatactatgatgaagttattgaaatcaatctatctgaactagaaccacatattgttggaccatacagtcctgatttatctagagaaatttctgaaatgccggatgctgttaataaaaataattatgatgataatctaaaagttggcttaattggaagttgtacaaattcttcatatgaagatattgaaagagctgctcatgttgcaaaacaagcattaggtgcaggattaaaagctaaatcagagttttatataacacctggatcaaatcaaattaaagctactatggaaagagacggatacacaaaaatttttgaagacctaggtggaaaggttttagcaaatgcttgtggaccttgtattggacaatggaaaaggtctgatatagctgaaggtgaaaaaaatacaattattacttcatttaatagaaactttgcaaaaagaaatgatggaaatgctgctactgagtcttttgtggcaagccctgaaatcgttacagctcttgctatatctggaaaattaagctttaatccatcaaaagataaaataacccttagtgatggaagtagctttagttttgaatctccatctggttccgaacttcctgagatgggatttgaaaaaattggaagtgatgattttttaaaagctgaattaagaccaaatactgaagttgctattaatccagatagtgatagattgcaagtattaaaaccttttgtaaaatggaatgaagatgaaatgaatgacttgaaaattcttttaaaagcagaaggtaaatgtacaactgaccatgtctctcctgctggaccttggttaaaatatagaggtcatttagaaaatatttcccaaaatatgtattcaggggccttgaatgcattcacaaaaacaaatggtgaagcaatagatttaataaatgataaaactgaaaatatttatgaagttgctaaaacttataaagaaaataatattgattggattgctgtagctgatgaaaattatggagaaggttcaagcagagagcatgctgcaatggaacctaggttcatgggttgtaaaattattatagcaaaaagttttgcaagaattgcccaaactaacttaaaaaagcaaggtattttaccattaatttttaaagataaaagtgattatgataaaattgaagctcatgactccatatctacaataaatcttaaagattttgacaatgaaactaacttgaaattaagcttgaataaaccagatggctcatcagaaattattgaaaccttgcatactttttcaaagaatcaaatagaatggtttaaagcgggctcagctcttaacttaattgcaaaaaaatcaaattgaa

SEQ ID NO: 282349 - DNA, 346 bp, Unknown
  Bacterial polypeptide expressing nucleotide sequence isolated from the Sargasso Sea
agagattgggcagcaaaaggaacaaaacttttaggagtaaaggtagttattgctgaaagctttgaaagaattcatagatcgaatttaattggcatggggattctaccattacaattccttgacaatattgacagaattaaactagaactaaaaggttctgaacttataactatcattgatatagagaaaggaataaatacatcaggcagtgtttatgttgaaattaaatatgcatcaggagatattaaaaaaattaagactttatgcagaattgatactaaaaacgaattggaatattataaaaatggtggcattctgcaatttgttttaagaaatatgatttaat

SEQ ID NO: 282350 - DNA, 1132 bp, Unknown
  Bacterial polypeptide expressing nucleotide sequence isolated from the Sargasso Sea
gggttttggggtccaggagctggaataattcatcaagttgttttagagcaatatgcatttccaggtggaatgatgattggtactgatagccatactcctaatgctggagggcttggaatggtagctattggtgtaggaggagcggacgcagttgatgttatggccggaatgccttttaatacaaaaattccaaagttaatcggagttaaattaactggttctttaagtggatggagctcacctaaagatataattctcaaagttgccgagattctaactgttaagggtggaacgaatgcaatagttgagtatttcggtgaaggaacttcttcaatatcaactacaggcaagtcaactattacaaatatgggtgcagaaatcggtgcaacgtgctcaattttcccatatgacagtaaaggaagtgactatttagtttctactggaagggcagatattgcagagcttgcagcaacaagaatggatttattaacagctgatcaagaagttttagatgagccagaaaagtatttcgatcaagtgattgagatagacttggatactttggaaccacatattgttggtcctcacacaccagatttagctagaccaataactgatcttaaagaagacgttgaagaaaacgagtatccaataaaaatatcaagtgcattaattggttcttgtaccaactcatcgtatgaagacattgggagagcagcttttattgcacgagaagcagcaaagcatggtttgaaagccaaagttcccttaatggttactcctggctccgaacaaacaagagcaactattgaaagagatggttatttgaaagatttagaggatattggagcagtagtattagcaaatgcttgtggcccatgtattgggcaatggaaaagagatgatattaaagaaggagagagtaattcaattgtctcatcatttaatagaaactttccagctcgtaacgatggtaatgctgagactctatcttttattggttcaccagaaacagttataggactcgcactaggtggaagattagatttcaatttcttgagcgatactttaactgacgaagaaggtaatgaaattacattaaatcctccagttgctgatgagttacctgaat

SEQ ID NO: 282351 - DNA, 1207 bp, Unknown
  Bacterial polypeptide expressing nucleotide sequence isolated from the Sargasso Sea
actgcagatttagttatgcaaagtttttgtcacacagctgcatatcctaaaccagtagatttacttacacacaaagaattacctgactttatatctcaaagaggtggagtagctctaaaacccggggatggcataattcacagctggcttaacagaatgctacttcctgatactgttggtacaggtggagatagtcatacaagattccctcttggaatttcatttcctggaggctcgggcattgttgcctttgctgctgcaataggatcaatgccattaaatatgccagaatcagtactcgtaaaatttaagggcgatttattaccaggcataacattacgagatttagttaatgcaatcccactctttgcgattaaaaagggacttttgaccgttgagaaagcaaataaaaaaaatatatttaacggaaaaattatggaaattgaaggattgcctaacttaaaacttgaacaagctttcgaactaactgatgctactgctgaacgctcatgcgcaggaagcacaatacttttatcacaggaaactgttcaagaatacataagaagcaatatttgccttttagaaaaaatgattgagagcaattatgaagattcaaagtcaatatcaagaagaattaatgatatgaaaaattggttaaagaaacctgaattaattcagccagatctgaatgccagttacgaagaaataattgaaattgacttatctcaagttaaacaacctatagttgcttgccccaatgatccagataatgtgaaggaaattgttgatgttgcaaatacaaatattgatgaagtttttataggttcttgtatgacaaacattggtcactacagggctgccgcaaaagttcttgaaggtgtgaaaaatttaaaggcaaaactatggatttgtccacccacaaaaatggatgaggaaactctgaaacaagaaggttactatgaaatatttgaaaattgtggtgcgagattagaattgcctggctgttctttatgcatgggaaatcaagccagagtagatgaaggatcagttgtattttctactagtacaagaaattttgacaataggcttgggaaaaatgctcaagtatttttagggagtgcagaattagcagcagtttgtgcacttcttggaaaaattcctgaaatagaagaatatcaggatattactaaaaataaaattaatccat

SEQ ID NO: 282352 - DNA, 1532 bp, Unknown
  Bacterial polypeptide expressing nucleotide sequence isolated from the Sargasso Sea
agagttcttcggcgaaggcgctgaggccttaactcttggcgatcgcgcaaccatctctaacatgaccccagaatttggcgccaccgccgccatgttctatatcgaccaacaaacactggactacttaaccctcacgggccgtagcgacgagcaagttaagctggttgagacctatgctaagaccacaggtttgtggagcgacgatcttaaacatgccgagtatccacgtaccctgcactttgatctgtcatcggtagtgcgcactattgcgggcccatctaacccacatgcccgtgttccaacctctgagcttgccgcgcgtggcatcagcggcgtagttgaaaacgaacccggcctaatgccagatggcgcagtgattattgccgccatcaccagctgcaccaacaccagtaatccacgcaacgtgattgcggcgggcctactagcacgtaacgctaatgccaagggcttaagccgtaaaccttgggtaaagagctctttagctcccggctctaaggctgtgcaactgtatttagaagaagccaaccttttacccgagcttgaatctttaggctttggtattgtcggttttgcctgtactacttgtaacggcatgagcggcgcattagatcctgttatccaacaggaagtgatcgaccgcgacctgtacgccaccgccgtgttatccggtaaccgtaacttcgatggccgtattcacccttatgctaagcaagccttcctcgcatcaccgccattagtagtggcctatgcgattgcgggcaccatccgcttcgatatcgagaaggatgtgttaggccacgataaagacggcaacccagttcgccttatcgacatttggccaagcgatgccgaaattgatgccgtgattgcgaaaagcgttaagcccgagcagttccgtagagtctacgagcctatgtttgatttaagcgtcgactatggtgataaggtcacgccgctttacgactggcgccctcaatcgacctatatccgccgcccaccttactgggaaggcgcattagcgggcgagcgtaccctcaagggcatgcgtcctctggcggtattaggcgacaacatcaccaccgaccatttatcgccatcgaacgcgatcatgatggacagcgctgcgggcgaatacctgcacaaaatgggtctgccagaggaagattttaactcctatgccacccacaggggcgaccacttaaccgcccagcgcgcgaccttcgccaaccctaaactcaaaaacgagatggcgattgtcgatggcaaggtgaaacagggctcactggcgcgtatcgagcccgaaggccaagtgacccgcatgtgggaagccattgaaacctatatggatcgcaagcagccgctgatcattatcgccggtgccgactatggtcagggttcatcccgtgactgggccgccaagggcgtacgtttagcgggtgttgaggcgattgttgccgaaggcttcgagcgtattcaccgcactaacttagtgggtatgggtgtattaccgc

SEQ ID NO: 282353 - DNA, 535 bp, Unknown
  Bacterial polypeptide expressing nucleotide sequence isolated from the Sargasso Sea
atctgaagtcgctaaaaccaatatagacgaagtgtttattggttcatgtatgacaaatattggtcactttagagcagctggaaaattacttgataaagtaactgaactgccatctagattgtggatctcccctcctaccaaaatggataagcatcaattaacagaagagggttattacgatatctttgaaaaagcgggagtaagacttgaaatgcctgggtgctctttatgtatgggaaatcaggctcgggtcgaagctgaatcaacagttgtatccacttctactagaaatttccctaatagattaggagatggagcaaatgtatttctagcttcagcggaactggctgctatatcggcaaccttgggctatattcctacaatagaagaatataatgaaattatggctgaaataaacactatgggatcagatgtctacaggtacttaaattttcatgaaattgcatcttataaagaagctgcaaataatgcagttctccccactcttactatcgaagaggtaaaactgaattag

SEQ ID NO: 282354 - DNA, 516 bp, Unknown
  Bacterial polypeptide expressing nucleotide sequence isolated from the Sargasso Sea
gaatcaaaaatgaaatggttcctggaatagagggaggtattacaagtcaccaaccgtcagaggaaattatgtcgatctatgatgcagcaattaaatatactgatgagggaattccattggttgtgattggcggcaaggagtatggtacgggctcgtctcgcgactgggccgctaagggaacgcgtttgctaggtgttaaggcggttattgtagagagttttgagagaattcatcgttctaacttgataggaatgggcgttttacctctacaatttttggatggtatgcatagagagagccttgggctaactggcaaggaactgatttcacttacgggtttaaaggaaggagttaaagcaaagatggaagtcagctgtaaaattgtttgggagaaaggagaggaaaaaaacatcaaacttttgtgcagaatagatacagccgatgaggttgaatattataggcacggaggaattctacagtatgtgcttagaagccttatgaaaagtaaagtataaa

SEQ ID NO: 282355 - DNA, 1162 bp, Unknown
  Bacterial polypeptide expressing nucleotide sequence isolated from the Sargasso Sea
cgcgatgaacttaaagagcttgcctgtttaggatttaactcggacttagtgatgcaatccttttgtcacacagctgcttatccacttcctaaagatatagaaactcaacatactttacctgaatttattcagactagaggtggtgtagctctaaagcccggcgatgggataatacattcatggttaaacagaatgcttcttccagatatggtcggtacaggaggtgattcgcacactaggtttcctttgggcataagttttcctgcaggatcaggattggtagcctttggcgcagccctaggtgtaatgccattagatatgcctgaatcagttttggtgagatttaaaggcgaactacaacctggtattacgcttcgagatttagttaatgccattccctatgcagctcttcaaacaggccaactaactttgcccaaagaagggaaagtgaatgttttctccggaaaatgtcttgaaattgaaggactgcctgatcttaaagttgaacaggcctttgagctatctgatgcttctgcagaaaggtcagcatcaggttgcactattaaattgaatgaagagcctattagagaatacttagaatctaatatcatccttcttagatggctaatttcagaaggatatgaagatgaaaaaactctagaaagaagagcacaggctatggagtcctggttggagaacccggtgttaatggaagcagatgacgatgcagaatatgccgctgtgctggaaatagaccttaatgaaattactgaacccttacttgcttgcccaaatgaccctgatgacataaaacctttatctgaagttgccgagactaatatagacgaagtatttattggttcttgcatgactaatatcgggcactttagagcagctggaaaattacttgataaagtaacaaaacttccttctaggttgtggatctctccacctaccaaaatggataagcatcaattaacggaagaaggttattacgatatatttgaaaaggctggagtgagacttgaaatgccaggatgctctttatgcatgggaaatcaagcccgtgtagaggctgaatcaactgttgtgtccacttcaactagaaactttcctaacaggcttggtgatggtgcaaagcgtatttctagcatctgctgag

SEQ ID NO: 282356 - DNA, 1789 bp, Unknown
  Bacterial polypeptide expressing nucleotide sequence isolated from the Sargasso Sea
ggaaaaattgctccaatctttttcaacacacttgaagattcaggtgcattagcatttgaatgcgatgttagcaaaatgaaactcggtgatgtaattgaaatctatccatatgaaaagaaagttcttaattccgaaacacaagaattactttgtagttatgaatataaatctaatactttattggacggcgttagagcaggaggaagaatacctttaattattgggagaagtctgactgatgagactagagagattctaaatttagatagctcatctgttttcactcgtcccgaagaagcagagaaaagcgagaaaggatttacactagctcaaaaaatggttggaagagcctgcggagtggaaggaataaggcctggaatatattgtgagccaagaatgtctactgttggcagtcaagacaccacaggtccaatgacaagagatgaactgaaagagttagcctgtctaggttttaactctgatttagttatgcaatctttttgccatactgcagcttatcctttacctaaagacatagaaacacaacatacactccccgaattcatccaaaccagaggtggtgttgctcttagacccggagatggcatcatccattcctggttaaataggatgctattgccagatatggtaggaaccggaggggactcacacactcgattcccattaggaattagtttccctgcaggttctgggttagttgcttttggagcagcccttggagtaatgcctttagatatgcccgaatctgtattggtgaaattcactggagaaattcagcctggtataacattaagagacttagtaaacgccataccttatgctgcccttcaatctggacagttgacgctacctaaagaaggaaaaattaatattttttcaggcagatgtttagaaatagaaggtctaccagatttaaaagttgaacaagcatttgaattatcagatgcctcagccgaaagatctgcttctggttgcaccattaaacttaatgaagaaccaataagagagtatctggaatcaaatgttactttactaagatggcttatctcagagggttatgaagacaagaagactttggaaagaagagctcaagcaatggaagcttggctgaaaaatcctgttctaatgcaagctgatgatgatgccgaatatgctgccgttatagaaatagatcttaatcaaataacagagcctcttctggcttgtccaaatgatcctgatgatataaagccattatcagaagtagctaatactcacattgatgaagtatttataggttcatgtatgacaaacattggacacttcagggcagcaggaaaacttttaaagaatgaatctaagctgccatctaagctttgggtctctccccctacaaaaatggataagcaccaacttactgaagaaggatattatgagatttttgaaaaagctggtgttcaactcgaaatgcctggatgttccctatgtatgggtaatcaagcaagagttgaagcagaatcaactgttgtgtctacatcaacacgtaatttcccgaacagattaggagatggtgcaaatgttttcttagcttctgcagaagttgctgcaatatccgctacacttggtcatatcccgacaaaagaagaatactctgagtatatgtcagaaataaattcaatgggtactgatgtgtatagatatcttaatttccatgaaatagcttcttataaagaggctgcagataatgctattttaccttctgtgacgatcgaagaaattaaaatttaat

SEQ ID NO: 282357 - DNA, 1771 bp, Unknown
  Bacterial polypeptide expressing nucleotide sequence isolated from the Sargasso Sea
ctcccatattttcaatacacttgaagattcaggtgcatttccaattgagatggatgtttcaaaaatgttgatgggtcaggaaatcattttagaaccactgaatggaagagttttagatgctaatactaatgaagtgatttctgaatttgagctaaagactgatgtacttttggatgaggtcagagcgaacggaagaatcccattaattattggtagacaacttacagataaaagtagagaagctctaggtttagatacatcaaaagttttcagaagaccagatgctaaagataaaagtaaatcaggatttacgcttgcacaaaaaatggttggaaaagcttgtggggttgatggagtaagaccaggaacatactgtgagcctagaatgacaactgttggatcacaagatacaactggtcctatgacgagagatgaacttaaagaattggcatgtcttggtttttcagcagatcttgttatgcaatcattttgccatactgcagcatatccaaagccggttgacattgaaactcaacacagtttacctgactttattatgaatcgtggcggtgtatcactaaggccgggagatggaattatccattcttggatgaatagaatgttgcttccagatacagttggtactggtggtgatagtcatacaagatttcctataggaataagctttcctgcaggatctggtttagttgcatttgctgcaacgctaggtgtaatgcctttagatatgccagagtcagtgttggtaagatttaaaggtgatatgcaaccaggaatcactcttagagatttagttaacgctattccttacgcagcacttcaaagaggattacttacgatagataaggatggaaaaaagaatgtcttttctggcaggtgtcttgaaattgaaggcctgcctgctatgaaagttgaacaagcttttgaactttctgatgcttctgctgaaagatcagcatcaggttgcacagttaagctcaataaagaaccgataatagaatatcttcaatcaaacattgttatgttgagatggatgattgcaagtggctacggagatgcaaagacccttgagagaagagctcaatcaatggaagagtggattcttaatccacaactgctagaagcagataaaaatgctgaatatgctgagataattgaaattgatcttaacgaaatcaaagaacctcttcttgcttgtccaaatgacccagatgatataaagcctctatcagatgttgcaaataccaaaatccaagaagtttttattggatcatgcatgacaaatattggtcattttagagcagctggaactcttcttgagaaatataaaaatctcaaagctagactttgggttgtgccaccaacaaaaatggatgaaaaacagcttattgaagaaggtatatataatatttttggtgtttctggtgcaagaactgaggtacctggttgctctttatgcatggggaatcaagcaagagttttagcaaactcaactgtgatatcaacctctacaagaaattttccgaacagattaggtgatggagcaaatgttttcttggcatcggcggaattgtcagcaatttcttcagttcttggaaagctgccaactgtagaagaatatcatcaatatatgaatgatattaatcctttagctgatcaaatctataggtatcttaactttaatgaaattgatacttatgtccagagtgcaaattctgcagaaatacctgcaataaatattgtaaatccttag

SEQ ID NO: 282358 - DNA, 2584 bp, Unknown
  Bacterial polypeptide expressing nucleotide sequence isolated from the Sargasso Sea
atgctaaaagagtacaaagcgcatgttaaagagagggctgaacaaggtattcctcctctaccattaaatgctgaacaagtagcttcgcttgtggaattgataaaaggacctccttcaggagaagaagactttgttttgaatttacttacaaatagagtcccagctggagttgatccagcagcttatgtaaaagcagcttttctaacggacattgcaaaagaaaaagcaaattcacctcttatagataaaaaactcgctaccgaattattaggaacaatgctaggtggttacaatgtagagtcattaattgaattactcgaagatgaagaagttggtgctatagcagcagatggacttagcaataccctattaatgtttaatgcaaaacatgacgtcatagagttatcaaaaaagaatgagcacgctaaaagggtggtagattcttggtcaaatgcagaatggtttacgagcaagccgaaattacctgaagtaataaaagccatagtatttaaagttgatggagaaattaatactgatgatttatcaccagctcaagatgcaccttcaagaccggatatacctcttcatgccctagcaatgctaaagaaaacttttaaagatcctatagataccattaataagttagaagagtcaggcttgccagtagttttcgtaggagatgtagtaggaacaggatcatctcgaaaatctgcaactaattctcttttatggcatataggagaagacataccttacattccaaataaaagacaggcaggaatatgcataggaggaaaaattgctccaatcttttttaataccttagaggattcaggtgcgttagcgtttgaatgtgatgtaagcaaaatgaatttgggagatgtcatagaaatttacccttacgagaagaaggtagtttcagccgattctggcgaagtactttgtgagtatgaatataaatcaaataccctattggacggtgtgagggctgggggaagaatacctcttattattggcagaagcttaactgatgaaacaagagaaatactcaatttagattcttctaatgcttttgttagaccggaagaagctaagaaaaacaataaaggcttcactcttgctcaaaaaatggttggtagagcttgtggtgtagaaggaattagacctggaatctattgcgaaccaagaatgtctactgttggtagtcaggacacaactggcccaatgacacgagatgaacttaaggaattggcctgtctaggtttcaactctgacctggtgatgcaatcgttttgtcatacagcagcatatccactgccaaaagatattgaaactcaacataccttacctgaatttatacagactagaggtggtgtggctttaaaaccaggagatggaataatacattcatggttaaaccgtatgcttcttcctgatatggttggtactggtggagattcacacactagattccctataggaataagctttcctgctggttcaggattggtagcttttggtgcagctttaggtgttatgccgttagatatgcctgaatcagttttagttaggtttaaaggagaattgcaaccaggaattacacttagggacttagtgaatgccattccttacgcagctcttcaaactggtcaactaaccctacccaaagaaggaaaaataaacgtattttctggaaaatgcttagaaatagaaggattacctaatttaaaagttgaacaagcatttgaattatcagatgcctctgcagaaagatctgcttctggctgtactatcaagctaaatgaggagcctattagagaatatctcgaatctaatattatccttcttagatggcttatttctgaaggctatgaagatgaaaggactttagagagaagggctcaagctatggaagcttggttagataacccagtgctaatggaggctgataaagatgctgaatatgcagcagtaatcgaaatagatctcgatgagataaccgaacctttactagcctgccccaacgatccagatgatatcaagcctttatctgaagttgccaaaaccaatatagatgaggtatttattgggtcttgtatgacaaatataggtcactttagggctgcaggaaaattattagataaagtaacagaacttccttctaggttgtggatatctcctccaactaaaatggacaaacaccaattaaccgaggaggggtattacgatatctttgaaaatgcaggtgtgagacttgaaatgcctggttgttcactatgcatgggcaatcaagcccgcgtagaggctgagtctacagttgtttctacctcaactaggaacttccctaataggttaggagatggcgcaaatgtgtttcttgcttccgcagaactggcggcaatttcagctacgctaggttatattccttcaatagaagaatataatgaatttatgtcggaaataaatacgatgggcgcagatgtctatagatatttaaattttcatgagattgcatcctataaggaagctgcaaagaacgcgattctaccttctatcactatagaggaagttaaagtaaattaat

SEQ ID NO: 282359 - DNA, 358 bp, Unknown
  Bacterial polypeptide expressing nucleotide sequence isolated from the Sargasso Sea
actggatcatctagagattgggcagcaaaaggaacaaaattatttgggaataaaaacagttatagctgaaagttttgaaagaattcataggtctaatcttattggaatgggaatattgcccttacaattcatagatggaatgaatagatcaaatttaaatctaaaaggatctgagttaataagtgtacttaatatcgaaaaagggctgtcaccttcagataaagtagaattagaaataaaatatatgtcgggagatattaaaaaaattaaaacattgtgcagaatagatacaaaaaatgagttagaatattataaaaatggtgggattctacaatatgttttaaggaatatgatgtaa

SEQ ID NO: 282360 - DNA, 2575 bp, Unknown
  Bacterial polypeptide expressing nucleotide sequence isolated from the Sargasso Sea
atgaagaatttggaaacattgctaaaagattatgcagatcatgtagctgaaagagctgccaaaggtataccacctttacctttaaatgctgaacaaacaaattgtattacaaaattattagaacaagatagtacttacgattcatcttatttacttgatttactaataaatagagtacccccaggagttgatgaggctgcttacgtaaaagcaagctggcttacggctattgttaattccgaaaaatattgcaaatcaattaatcccgaaaaagcaattgaaatactaggaacaatgataggcggatacaatgtaaattctttggttgaaatccttaaaggagaaaatagtttactcgcaaaaaaagcggcagaagttttaaaaaatattattcttgtttacgactcggctaatgaaatttatgaattatctcacagtaatatttatgcaaaagaagttgtaaatagttgggcaaatgcagaatggttcataaataaaaaagttctggagaaagagattacttgtttagtatttaaagttgacggtgagacaaacacagacgacttatctccagctgtacatgcaacaacacgcccggatattccaatgcatgcattagctatgttggaatttaaaaaacctgatggactaaagattcttgataatttaaaaaaacaaaatttaccaatagcttatgttggagatgttgttggaacagggagttctagaaaatctgctattaattcactcatttggcatataggagaagatatcgcttttgttcccaacaaaaaaacaggtggaataataattggcagcaaaatagccccaattttcttcaatactgcacaagattcaggagctttacctatagaagctgatgtatctcaaatgaaaacaggagatgttattaaaatatatccttataaaggcattattaaaaaaattgaaaaagattcaaatactgaagaattaataagcaaattcgagttgtatccatcaactcttactgatgaaattcaagctggaggaagaataaatcttatgattggaagatctcttacggacaaaattagaaacaaattagattatcaaccaagtgaaatatttactagaccacaaaatccaaccgaaagtaatgccggctttactcaagctcaaaaaatagtgggcaaggcatgcggtttagagggagtaaggccaggaatgacctgtgagccaattatgaccacagttggtagtcaagatactactgggccaatgactagagatgaactaaaagaactagcttgtttaggatttactgcagatttagtgatgcaaagtttttgtcatacagctgcgtatcctaaaccagtagatctagttacccataaagaattacctgattttatatctcaaagaggtggagtagctcttaagcctggagacggcataattcatagctggcttaatagaatgcttctcccagataccgttggcactggcggagatagtcatactagatttcctcttggcatttcatttcctggaggctcgggcattgttgcctttgccgctgcaataggatcaatgccattaaatatgccagaatctgtgctgattaaatttaagggagaattattaccaggaatcactcttagagatttagtaaatgcaatccctctcttcgcaattaaaaaaggactcttaactgttgagaaagcaaataagaaaaatatattcaacgggaaaattatggaaattgaaggattaccaaacctaaaacttgaacaggcttttgaacttactgatgctactgcagaacgctcatgcgctggtagcacaatacttttatcccaagaaactgttcaagaatatttaaaaagcaatatttgcttgctagaaaaaatgatcgagagcaattatgaagattcaaaatcgatttcaagaagaataaatgatatgaaaaattggttaaaaaaaccatcattaattcaaccagattcaaacgctgagtatgaagaaatcattgaaattgatttagcaaaagtaacacaacctatagttgcttgccctaatgatccagataatgtaaaagaaatcactgaggttgcaaatactaatattgacgaggtttttataggttcttgtatgacaaatattggtcattacagggcagctgcaaaagttcttgaaggtgtacaaaatttaaaagctaaattatggatttgtccacccacaaaaatggatgaagaaactctaaaagctgaaggctactataaaattttcgaagattgtggtgcaagattagagttgccaggctgttctttatgtatgggaaatcaagctagagtagatgaaggttctatagtattttctactagtacaagaaattttgataatagacttggcaagaatgcgcaggtatttttagggagtgcagaattagcagcagtttgcgcactgcttggaaaaatacctgaaatagaagaatatcaggatattactaaaaataaaattaatccatattcagaagaactttatcgttatcttcaatttgatgaaataattgatttcagcttgtcaaagtaat

SEQ ID NO: 282361 - DNA, 736 bp, Unknown
  Bacterial polypeptide expressing nucleotide sequence isolated from the Sargasso Sea
gatggacttatcaagaacaccaatagagctagttgaatcagtttataaaactttaactgaaaatatttcaactattagggagagaaaaaatgctcctttaactcttgctgaaaaaattttatttggtcactctacggacccttcatcaatttcattagataagggagaagaatatggagattttgcacctgatagagtagctatgcaagatgcaacagctcaaatggcacttttacaatttatgcaggctgggatggagaaaacagctgttccatctactgttcactgcgatcacctcattcaagcatatgaaggagcaagtagtgacttagcggttgcaaaccagacacataaagaagtttttgattttttacgttctgcatctcagaaattcggaatagggttctggggtccaggagctggaataattcatcaagttgttttagaacaatatgcatttccaggcggaatgatgattggtacagatagtcatactcctaatgctggaggacttggaatggttgccattggtgtaggaggagcagacgcagtagacgttatggccggaatgccttttaatacaaaaattccaaagttaattggagttaaattaactggttctttaagtggatggagttcacctaaagatgtaatccttaaagttgctgagattctaactgttaagggtggaacgaatgcaatagttgagtattttggtgaaggaacttcttcaaaa

SEQ ID NO: 282362 - DNA, 346 bp, Unknown
  Bacterial polypeptide expressing nucleotide sequence isolated from the Sargasso Sea
attgggctgcaaaggaacaaaattattaggtgtaaaagctgtgattgcagaaagctttgaaagaatacacagatctaatcttataggtatgggagttttacctttgcagtttatagaaaaaatgaatagacaaaatttaaacttaaaagggtcagaattaatttcagtattgggtcttgagaaaggaattaatcctggtgatcatttagaagttgaaattaaatatgcaacaggtgatattaaaaaaattaaaatgttatgcagaatagatactaaaaatgaattagaatactacaagaacggtggtattcttcaatatgttctaaggaatatgatcaatggatga

SEQ ID NO: 282363 - DNA, 976 bp, Unknown
  Bacterial polypeptide expressing nucleotide sequence isolated from the Sargasso Sea
gatgtggtgaatgccatcccctatgtggccatcgagaaagggctgctgacggtggagaaagccggcaagaagaacgtcttcaatggccgaatcatggaaatcgaaggcctgcctgatctcaagctggaacaggcgtttgaactcaccgatgccactgctgaacgctcctgcgccggcagcaccatcaagctcagcgttgacaccgtgagcgagtacctgcgcagcaatgtggctctgctcaaaaacatgatcgctcggggttacagcgatgcacgcaccctggcccgccgcatcaaagcgatggaggactggctcgccaacccgcaattgctggaagctgatgccgatgccgagtacgccgctgtgatcgacatcgacctcaacgcaatcaccgagccaatcgtggcttgccccaacgaccccgataacgtcaaaaccctctccaacgtctctggcaacaaagtcgatgaagtgttcatcggctcctgcatgaccaacattggtcattaccgcgctgccgccactgtgctggaaggccagggccaaaacacagcccgcctttgggtttgcccccccacccggatggatgaggagacattgaaggctgagggctactacgccacctttgaagccgctggctcacgcatggagatgccgggttgttcgctgtgcatgggtaatcaggcgcgggtggaagacaacaccaccgtcttctcaaccagcacccgcaacttcaacaaccggcttggcaatggtgcccaggtttatctgggcagcgccgagttggccgccgtttgcgcccaactaggacgcatccccagccgtgaggagtacctggcagtggctgctgagcgaattgatcccaacagcgccgagctctatcgctacctcaacttcgatcaggtgcagggcttcgcagatgaaggccgcgtgttgagtcaggccgaggaagagaagctgctggccgaggcctaaa

SEQ ID NO: 282364 - DNA, 871 bp, Unknown
  Bacterial polypeptide expressing nucleotide sequence isolated from the Sargasso Sea
tttattggctcaccggaaactgtaattggacttgctttaggtggaactctagaattcgattttcttaatgatactttaataaacgaagacggagaagaggtaaagctttcacctccaactgcagaggagttacctttagaagggtttgaaagcactttggaaggtttcgtccagccaaaagaaaatagtgaagttgaagttgttataagtccagattctgagagattacaagccttaacaccttttgactcattcgatgcaagtaattatatagacatgactgtaattatgaaagctgtaggaaagtgtacaactgatcatatatcacctgcaggtaaatggttaaggtttagaggtcacctagaaaatatttctcaaaatttatttataggtgttaataatgctttttcagaagaatcagggacaggtgttaatacccttaacaatgaaattatgacattgccggatcttgcaaaaacataccatgaaaataatataaactggattgcaattggtgatgaaaattacggtgagggatcatcaagggaacatgctgccatggagccaaggttcagaggttgtagggtagttttggtcaaaagctttgcaagaatccacgaagctaatttgaaaaagcaagggatactaccgctaacttttgaagataaagctgactatgaaaagatagagcagaatgataaattaactattaaaaatctcgaaaacttaagtccaggaagtaaagttacagtctctatacagaaagaagatggttctacagtggatatagataccagccattctctatctgaagagcaaataagttggtttgaaagtggatcagctttaaattatattaaatcaaattaat

SEQ ID NO: 282365 - DNA, 1657 bp, Unknown
  Bacterial polypeptide expressing nucleotide sequence isolated from the Sargasso Sea
tacccttatgaaggcattattaaaaaaattgaacaagattcaaatactgaagaattaataagcaaattcgacctgtatccatcaactcttactgatgagattcaagctggcggaagaattaatcttatgattggaagatctcttacagacaaaattagaaataaattagattatctacctagtgaaatatttaccagaccacaaaatccaaccgaaagtaatgccggctttactcaagctcaaaaaattgtaggcaaagcatgcggtttagatggagtaaggccaggaatgacctgtgagccaattatgacaacagttggtagtcaagatactactgggccaatgactagagacgaactaaaagaactagcttgtttagggtttactgcagatttagtgatgcaaagtttttgtcatacagctgcgtatcctaaaccagtagatctagttacccataaagaattacctgattttatatctcaaagaggtggagtagctcttaagcctggagacggcataattcatagctggcttaatagaatgcttcttccagatactgttggcacaggcggagatagtcatactagatttcctcttggcatttcatttcctggaggctcaggcattgttgcctttgccgctgcaataggatcaatgccattaaatatgccagaatctgtgctggttaaatttaagggagaattattaccaggaatcactcttagagatttagtaaatgcaatccctctcttcgcaattaaaaaaggactcttaactgttgagaaagcaaataagaaaaatatattcaacgggaaaattatggaaattgagggattaccaaacctaaaacttgaacaagcttttgaacttactgatgctactgcagaacgctcatgcgctggtagtaccatacttttatcccaagaaactgtacaagaatacttaagaagcaatatttgcctgctagaaaaaatgattgagagcaattatgaagattcaaaatcaatttcaagaagaataaatgatatgaaaaattggttaaaaaaaccatcattaattcaaccagattcaaacgctcagtatgaagaaatcattgaaattgatttagcaaaagtaaaacaacctatagttgcttgcccaaacgatccagataatgtaaaagaaatcactgatgttgcaaatacaaatattgacgaggtttttataggttcttgcatgactaatattggccattacagggcagctgcaaaagttcttgaaggtgtacaaaatttaaaagctaaattatggatttgtccaccaacaaaaatggatgaagaaactctaaaagctgaaggttactataaaattttcgaagattgtggtgcaaggttagagttaccaggttgttctttatgtatgggaaatcaagccagagtagatgagggttcggtagtattttctacaagtacaagaaattttgacaatagacttggcaagaatgcacaagtctttttaggcagcgctgaattagctgcagtttgcgcactgcttggcaaaatacctgaagttgaagaatatcaggatattactaaaaataaaattaatccatattcagatgaactttatcgctatcttcaatttgatgaaataaaagatttcagcttgacaaagtaat

SEQ ID NO: 282366 - DNA, 511 bp, Unknown
  Bacterial polypeptide expressing nucleotide sequence isolated from the Sargasso Sea
aatattagaattagaaacgaaatggcccctggaactgagggtggatttacaaaattatatccagaggaaaaagtaatgcctgtttatgatgctgtagttgaatataagaaaagaggaattgatttagttgttattggtggaaaagaatatggcactggatcttcaagagattgggcagctaagggcacaaaacttttaggtgttaaagcagttcttgctgaaagctttgaaagaattcatagatctaatttgattggaatgggggttttacctttacagtttgtcggtgatatgaatagagagaatttaaatttaaagggatctgaacttatttcaataattgacattgaaaaaggtattaatccaagagacgaggttgaagttgaatttaaatatcaatctggagatatcaaaaagatcaaaatgttatgtagaatagacactaaaaatgaattggaatattataaaaatggtggcattttacagtacgttttaaggaacatgatttaat

SEQ ID NO: 282367 - DNA, 1081 bp, Unknown
  Bacterial polypeptide expressing nucleotide sequence isolated from the Sargasso Sea
gctggttctggtctagtagcatttgcagcaactctgggtgtaatgccacttgatatgccggagtctgttctagttaaatttcatggagaaatgcagccaggtataacgcttagagatcttgtaaatgcaataccatatgcagctattcaaaaaggtcttttaactgttgaaaagaaaggcaagaaaaatgttttttcaggtagatgtcttgagattgagggtcttccaaacatgaaagtagaacaagcatttgaattatcagatgcatccgctgaaagatctgcttctggttgtacagttcttttaaataaagagccaattattgagtatcttaattctaatattgttatgttgaggtggatgattgcttcaggttacggagaagctaaaacgcttgagagaagagcgcaagcaatggaagaatggattttaaatccagagctattagagcctgacaaaaatgctgaatatgcagaaatcattgaaattgatttaaatgaaattaaagagccattattggcgtgtccaaatgatcctgatgatattaaacctttgtcagccgtagaaaatactgaaattcaagaagttttcataggctcgtgtatgacaaatattggtcactttagagcagcaggaactttgttagagaaatacaatgggaccaaagcaaggttatgggttgtacctccaacaaagatggacgaaaaacaattaattgaggaaggtatctataatatttttggtgtttcaggtgcacgtactgaagtgcctggctgttctttgtgtatgggaaatcaagcaagagttcttgcaaattcaactgttatttctacttcaacaagaaatttcccaaatagacttggagatggagcagatgtatttttagcttctgctgaattatcagcaatatctgcagtactgggtagattgccaacagttgacgagtatcataaatacatggctgatattaatccattagcagatgaaatctataggtatttaaattttaatgaaattgatagttatgttgaaagtgcaaattctgcagaaattccagcaatcaatattgttaacccataat

SEQ ID NO: 282368 - DNA, 1501 bp, Unknown
  Bacterial polypeptide expressing nucleotide sequence isolated from the Sargasso Sea
cgttaatgctggaggtttaggtatggtagccattggagttggaggagctgatgctgttgatgtaatggcaggtatggcatgggaacttaaatttcctaaacttataggagttagacttactggtaaactttcgggatggactgcaccaaaagatgtaatattaaaagttgctggaatcctaactgtaaagggaggaacgggagctatcattgaatattttggaccaggtgccgaagagctttcatgtactggtaaaggaacaatttgtaatatgggtgctgaggttggggcaactacatccacatttggttatgatgaatcaatggaaaaataccttagggttacaggtagagatttagttgcagatgaagctaacaagattaaagaatatcttactggagatccagaagtgtatgaaaatcctgagaaatattttgacgaattaattgaaataaatctttctgaactcgaacctcatattaatggtccattttcaccagacattgcaacacctgttagtaaaatggctgatacgcttgttgaaaatgactggccaagaaaaattgaatggggtttaattggctcctgcacaaattcatcatatgaggatttatctagagcatcatctattgctaatcaggcactcgaaaaaaatctatctacaaaagcagattttggtataaatcctggttctgaacaagttaggtttacagcagaaagagatgggcttttaaatatttttgaaaaactggatgcaaaaatatttactaatgcttgtggtccgtgtattggacaatggtctagaaaagatgcagataaagaagaaaaaaactcaataattcactcattcaatagaaattttgccaaaagagctgatggtaatcctaatactcatgcttttgttgcgtcacctgaaatggttgctgcaattgcaatatctggggacttagcttttaatccaatgaaagataaacttcttaacaatgaaggtgttgaagtaagtcttgaggaaccaaaaggctgggaattacctccaaatgggttcgatgttgaagataatggatatatagatcccgttgaagatggttcaaatattgaggttattattgatcctgaatctaagagacttgaaaggcttgaaccctttaaaccatgggacggaaaaaatattatgggtgctaaactattgataaaagcatttggaaaatgtactacggatcatatttctatggcaggaccatggttgaggttcagaggtcatttagataatatttccaataactgtttgattggggctgtaaatgcattcaacaaaaaaacaaattttgtaaaaaaccaattgacaggtaaatatggtggagtacccgatgttcaaagaaattataaagagaataatatttctactgttgttgttggagatcacaactatggtgaaggttcatcaagagagcatgctgcgatggaaccgcggcacttaggtgttaaagtagttttagttaaa

SEQ ID NO: 282369 - DNA, 1033 bp, Unknown
  Bacterial polypeptide expressing nucleotide sequence isolated from the Sargasso Sea
ggacccgatcgtgttacatgtcaagatgctactgcccaaatggcactattacaatttatgcaggcagggaaacaaaaggttgctgttcctacaactgttcattgtgatcatttgattttagctcaatctggagcaaaaaaagatctgcagcaagctaataaagttagttctgaagtatttgactttctcgagtctacatcaaaaaaatatggtataggtttttggaagcctggggcagggataattcaccaagttgtccttgagaattatgcttttccaggaggaatgatgattgggactgattcacatacagtgaatgcaggaggtctcggtatggtagctattggtgttggtggagcggatgctgttgatgttatggctggaatgccgtgggaattaaaatttccaaaattaataggagttcatttaaaaggaaatctaaatggttggtcttctgcaaaagatgttatattaaaagttgcaggaatacttactgtaaaaggtggaacaggggcaataattgaatattttggagaaggtgcaaaatcactatcctgtactggtaaaggaaccatatgtaatatgggtgctgaagttggtgctacaacttcaatttttggatatgacgagtctatggaacgatatcttaattcaactggaagaactgatattgttaaagctgcagaagaagtaaaacatcaccttaccgctgatccagaagtatatgctaatccagaggaatactttgatcaagttattgagataaatcttgatgaattatcacctcatcttaacggaccatttacaccggatctagcaactcctgtttctgagatgaaggagaaagctgcaaaagaaaaatggccattagatgtagattggggtttaataggctcttgtactaattcctcttatgaggatttgtctcgtgctgcatctattgcttctcaagcaaaaaaaagcaaattaaaaataaaatctaaactaggaataaaccctggttctgaacaagttagatatacagccgaaagag

SEQ ID NO: 282370 - DNA, 1023 bp, Unknown
  Bacterial polypeptide expressing nucleotide sequence isolated from the Sargasso Sea
aatttttttttctcctagcagagtgttaatgcaagattatactggcgttccagcaatagccgatcttgcctcaatgagagataaaatggcaaaaaagaagcgggaccctgaattaattaatccattagtacccgtaagtcttattgttgaccattcaatatcagttgatagctcatcaagtgatgattctttaaaaatcaatgttcaaaaggagtttttaagaaattctgagagatattcattacttaaatgggcacagaaatctctaaagaacttttctctttttccaccaggttctggtatttgtcatcaaattaatattgagtatttaacagaaattgtttgtgagaaaaaaaaaatcttgtttttggattcagttgttgggaccgatagtcatacaactatggttaatgctttatctgtacttgggtggggtgttggaggtattgaggctgaagcagtaatgcttggtcaacctatttccatgaagattcctgaagtacttggcgtaatgctagaaggaaaattgaaggagggtgttacagcgactgacgttgttttaactataactgaaaaattaagaaaaattaatgttgtaggaaaatttgttgaattttttggtgatggtttatcttcactttcactatcagagagatcaactatttctaatatggcgcctgaatatggagcaacatgtggattatttcctatagataatgaaactttaaagtatctaagattgacagggagagacgagaggaaaattggaattattgagcattattgtaaatctcaacatttatggcatgatgaaaattcaaaaaaaataaagtacgcagacaatttaaaattagatttatcaaaaatagaagcttgtgtttcaggtcctaagagaccacaagatagaattgttttacgagatattccaaaaacatatatgaattctctagataagaacgaaaaaaaattacttaaaaataacaatgattctttaacaaacggtaaaatttgtttagcggctat

SEQ ID NO: 282371 - DNA, 436 bp, Unknown
  Bacterial polypeptide expressing nucleotide sequence isolated from the Sargasso Sea
catgcctatatatgatgcagtcgtagagtataaaaaaagaggtacagatttaatagtagttggtggtaaagaatatggtacaggctcatcaagagattgggcggcaaaaggaacaaaacttttaggcatcaaagcggtgattgctgaaagttttgaaagaatccacagatcaaacttaataggcatgggtatacttcctttacaatttattaacggaattgatagaaaaaaaattggtttaattggatccgagttaatctctgtattaggaatagaggatggggtgaacccttcagataatgttgaagttgagataaaatatcaatctggagaaattaagaaaatacaaacattatgtagaatagatactaaaaatgaacttgagtattataaaaatggtggaattttacaatttgttttaagaaatatgatgtag

SEQ ID NO: 282372 - DNA, 476 bp, Unknown
  Bacterial polypeptide expressing nucleotide sequence isolated from the Sargasso Sea
tgaaggaggatatacaaaattatatccagaaggaaaggttatgccagtttatgatgcggtagtagagtacaaaaaaagaggaacagatttaatagtaataggtggtaaagaatatggaactggctcatctagagattgggcagcaaaaggaacaaaacttctaggagtaaaggtagttattgctgaaagttttgaaagaattcatagatctaatttaattggcatgggtattcttcctttgcaattcgttggcaatatagacaggattaaactaggattaaagggctctgaacttataactatcattgatatagataaaggaataaatccatctggcagcgttgatgttgaaataaaatatgcctcaggagatattaaaaaaattaagactttatgcagaattgataccaaaaatgaattggaatattataaaaatggtggcattctgcaatttgttctaagaaatatgatttaat

SEQ ID NO: 282373 - DNA, 613 bp, Unknown
  Bacterial polypeptide expressing nucleotide sequence isolated from the Sargasso Sea
ggatagtcataccacaatggtaaacggattatcagttcttggttggggtgttggtggaatagaagctgaagcgggaatgcttggacagccaatttcaatgctaattccagaagtagttggttttgagcttaaaaacaaaatgcccgaaggtacgactgctactgatttagttttaactgtagtaaaaattttaagagataaaggtgtagttggaaaatttgttgaattttatggaaatggactaaaaaacttatctcttgctgatagagccactatcgcaaatatggcacctgaatatggagcaacttgtgggttttttccaatagatgatgagaccttaaagtatttaaggttttcgggaagaggtgaacataccgtagttaccgtagaaaaatatgccaaagaacaaggtttatgggcaagtgataatattgaatttacagataccgtatcattagacatgtcttcaattgttccaacaatttctgggcctaaaagaccacaagacaaagttttattaactgaagcagctcctggatttaaaaaagtatttgaaaaaactacaggcagaaaagaaagaaatatttcaaaagttactgagacaaattttgaa

SEQ ID NO: 282374 - DNA, 904 bp, Unknown
  Bacterial polypeptide expressing nucleotide sequence isolated from the Sargasso Sea
atgcaagcagaccttccagaaacagcagttccaacaactgtccactgtgatcatttaattcaagcttatgaaggagcagctagtgatcttcaagtagcaaacaagactcataaagaggtttttgacttccttagaactgcgtcggaaaaatatgaaataggcttttggggaccaggggctggaatcatccatcaagtagttttagaacaatatgcttttccaggtggaatgatgataggtacggatagccatactccaaacgctggaggtctatctatgattgcaattggtgttggaggtgcagatgcagttgatgtaatggccggtatgcctttcaacacaaaaatacctagcttgattggagtgaagctaactggctcactgagcggctggacgtctcctaaagacattattttaaaagttgcagaaatcttgacggttaaaggtgcaacgaatgcaatagttgaatactttggagagggtacgaaaactatttcaaccactggaaaagcaactataacaaatatgggtgcagagattggtgcaacttgctcaatatttccatatgatgaaaagggaagtgcttatctaaaggctactggcagggatgaaatagctgaattagcagactctagaatggatttactcactgctgataatgaagtattagaaaacccagaagaattttttaatcaagttatagagattaatttagatgaattagagcctcatattgttggaccacacacaccggatttagctagaccaatttctggattaaaaaaggatgcaaacgacaatgagtaccctgtaaaaatctcaagtgcattgattggatcttgtacgaattcatcatatgaggatattggtagagctgctttcattgccagagaagctgcaaagc

SEQ ID NO: 282375 - DNA, 523 bp, Unknown
  Bacterial polypeptide expressing nucleotide sequence isolated from the Sargasso Sea
tttgctaatatcagaattaaaaatgaaatggctcctggaacagaagggggctttacaacgttatatcctgagaaaaaagttatgcctatttatgatgcagttgttgaatataaaaaaagaggtgttgacttagttgttattggaggtaaagagtatggaactggttcatctagagactgggcagctaaaggaactaaattgttgggtgtaaaggctgttatagctgaaagttttgagagaattcatagatcaaatcttataggaatgggtgttttaccattacaatttccagataaaatgagcaggcaaaatttaaatttaaaaggatctgaattaatttcagttattaatattgaaaaaggtattaatccaggagatcaattggatattgaaatcaaatatgtaactggtgatatcaaaaaaattaaaatgttatgcagaattgatactaaaaatgaattagaatattataagaacggtggtattttacaatatgttttaaggaatatgattaatggatgag

SEQ ID NO: 282376 - DNA, 796 bp, Unknown
  Bacterial polypeptide expressing nucleotide sequence isolated from the Sargasso Sea
atgtcgcaaaaaaattttggttgctgtatagattttgaaagtggcgaaggaactgcttcaatttatagtctggaagagctacaaaaaaaaggggttggaacaatcgacaaactcccattttctatccggattctactggaacaagcacttagaaatgttgaagagtctaaatctaatgctgaggaagtgaatttactagccaactgggatgcttcagagaaatcatctgaagaaattccattcaggcccacgcgtgttattttgcaggattttaccggagtgcctgcaattgttgatcttgctgctctaagatcagctgtggttgaaatggaaggtaatcccgaagttataaacccacgagtaccagttgatttggtaattgaccattcaatacaagttgatgtttttggaagttctgatgcactcaaaaaaaatatggatattgagtttaaacgtaatcgtgaacgttatgaattcctcaaatggggtaagcaagcattcgataattttagcgtatatcctccaggtgtaggaatagtacaccaggtgaatctggaaactgtggcaagtgttgttcaatttagaaatggagtttttttcccagatacacttgttggcacagactctcacacaacaatgataaacggacttggtgttatgggatggggagtaggaggaatagaggcagaatccgtaatgctagggcagccaatctatatgctgattcctgaagtaatcggtttccgattacatggtcagcttagtgaaggtactactgctactgatctagttctac

SEQ ID NO: 282377 - DNA, 744 bp, Unknown
  Bacterial polypeptide expressing nucleotide sequence isolated from the Sargasso Sea
tatgaaacctggaaataaaaattcatttaaatctctaaaattaataaagataaataataaagattataaatatttttctttagtagaggctgaaaaaaatggtttaaaaggaatttcaaatttaccaaaatcattaaaagttttattagaaaatctacttagatatgaagatgatttgtcagttaccaaagatcaaatagaagcagttcaaaaatggttaaaagaaaaaaaatcaaatactgaaatagcttacagacccgcaagagttttattgcaagactatactggaataccagcagttgcagacttggcagcaatgcgggaagctgttaaaaagaaaaataaagatccaaatactataaatccactttctgccgttgatttagttatagaccattcagtgcaggttgatcagtctgcaaaacctgattcatttgaaaaaaatgttgatatagaatttaaaagaaatggtgaaagatattcctttttaaagtgggggcaacaagcttttaataattttagaattgttccaccaggcactggcatctgtcatcaagtaaatttagagtatctatcaaaagttgtttggtctgaaaaatatcaagaagaagaatatttatttcctgatactttagttggaacagatagccatacgacaatggtaaatggattatccgtgcttggctggggagttggaggaatagaggctgaagcaggaatgcttggacagccaatttcaatgtt

SEQ ID NO: 282378 - DNA, 922 bp, Unknown
  Bacterial polypeptide expressing nucleotide sequence isolated from the Sargasso Sea
ggagcattacctgctaaaattgagcaggctcgtcggttattaaatcggccgttaacattaactgaaaaaattctttatgcccattcagatcaacttcctgataccccgtatcaacgtggcaagtcatacgttatgtttcgtcctgatcgtgttgctatgcaagatgcgactgctcaaatggcattactgcaatttatgcaagcaggtagatcaaaagttgctgttccttctactgtgcattgtgatcatttaattttagctcaattgggtgctgaaaaagatttgagtcattccatgcaagttaatcaagaagtttttgattttttagcgtctgtttcaaataagtatggtatcggcttttggaaaccaggggctggtattattcatcaagttgttttggaaaattatgcttttcctggtggtttgatgattggaacagactctcatactgtaaatgctgggggattaggaatggtggctatcggagtaggtggggctgatgctgttgatgtaatggcgggtatgccttgggaactaaaatttcctaaaactgttggtgttgttttaaaagggaagttaggtggctggacttctgctaaagatgtgattttaaaagtggctggtattttaactgttaaaggcggtactggaaagattgttgaatatattgggcctggagctgagtcattatcttgtactggcaaaggaactatttgtaacatgggcgctgaaattggggcgactacatcactatttggttatgatcattctatgcaccgatatttagaggctactggtagaaaagatgtagctgatttagctgatgcagtagctgaacacttaattccagatcctgcagttgttcaagatccttatacttattatgatgaagttattgaaattgatttgtctactttagagc

SEQ ID NO: 282379 - DNA, 531 bp, Unknown
  Bacterial polypeptide expressing nucleotide sequence isolated from the Sargasso Sea
gcggtacttttgcaaacatcagaataagaaatgaaatgttaaatggtattgagggaggtttcacaaaggatctagaaggaaacacgaattccatttttgatgctgccatgtcctttaagaaagagaaaaccccacttgtcataattgcaggtaaagaatatggggcaggttcctcaagagattgggctgccaaaggcacttctctgttaggagtgaaagctgtgattgcagaaagttttgagagaattcatcgatctaatcttattggtatgggggtgataccttttgagtttgaaaaaggtatcaataggaaagagcttaacctaaatggttctgagacaatctcaatctttggattagctggtgaactagagccttctatgatattgaacgcacaggttctctatggtggcagtaatgcattaaattttaagataaaatgcaggatagataccaaggttgaacttgaatacgttaggcatggtggtgttttacattatgttcttcgcgatttagcaaaagcaaaatagc

SEQ ID NO: 282380 - DNA, 826 bp, Unknown
  Bacterial polypeptide expressing nucleotide sequence isolated from the Sargasso Sea
atgaaaccaggtaataagaattcttacaaaacattaaaatctataaatataaacgataagatatataagtattattctcttaaggaagcagaaaaaaatggtttaacaaatatttcaaaattacccaaatctttaaaagttcttttagaaaatttacttagatatgaagatggtttgtctgtaacaaaagatcaaatagaagcaatcaaaaattggttaaaagaaaaaaaatcaaacacagaaattgcatatagacctgcaagagttttattacaagattatactggaataccagctgttgcagatcttgcggcgatgagagaggcagttaaagaaaaaaataaagatccaaacaccattaaccctctttcaaaagttgatttggtaatagatcactcagttcaagttgataagtttgcaaaatcagattcttttgaaaaaaatgtcgatattgaatttgaaagaaatggagaaagatattcttttttaaaatggggccagcaagcttttaataattttagaattgttccaccaggaaccggtatctgtcaccaagttaatttagaatatttatccaaagttgtttggtcagaaaaatataaagaagataactatttgtttccagatactttggtaggtacagacagtcatactacaatggttaatgggttgtcagttcttggatggggagtgggtggcatagaagctgaagcaggaatgcttggacaaccaatttcaatgttaattccagaagtaatcggatttgaatttacaaataaattgcccgaaggtactactgctactgatttagttttaacagtagtaa

SEQ ID NO: 282381 - DNA, 473 bp, Unknown
  Bacterial polypeptide expressing nucleotide sequence isolated from the Sargasso Sea
tatgtccgtgaaagacagcctgaagtcccgcgcgcaactagccgtcggtgatagcacctacctgtaccactcgttggcccaggccgcagagacgctgccggagcttaagcgcttgcccaagtcgctcaaggtgctgctggaaaacctgctgcgcaacgaagacggcgaaaccgtgacgcaggacgacatcaaggcgatggcggactggctgaaggagcggcgctctgaccgtgagattcaataccgcccggcgcgggtactgatgcaggactttaccggcgtgcccgccgtggtcgacctggctgccatgcgcgatgcggtggcccgtgccaatggcgatccggaacagatcaatccgctgtcgccggttgatctggtcatcgaccactcggtgatggtggaccgctttgccagcgaccaggcctttgcgcaaaacgtggagattgaaatgcagcgcaacggcgaacgctatg

SEQ ID NO: 282382 - DNA, 887 bp, Unknown
  Bacterial polypeptide expressing nucleotide sequence isolated from the Sargasso Sea
aaaagacctcttacatttactgaaaaggtactttttaatcatattgattttggtgagaatcaagttttttctgaacttaagcgtgggtcttcatatgctaattttaatccagatcgagttgcaatgcaggatgcaacagctcagatggcactattgcaatttatcatggctggtagagcaaaagtttctgttcccacaacagtgcactgtgatcatctaattcaagccaaagtaggtgctgaccaagatctaattaatgctaaagaatctaattcagaagtatatgcttttcttgaatctgtatcaaaaaaatatggtattggtttctggaagcctggtgcaggtattattcatcaagttgtgttagagaactatgcatttccaggtggaatgatgattggtacagatagtcacaccgtaaatgctggcgggcttggaatggttgccattggagtcggaggtgcagatgctgttgatgtaatggttggaatgccatgggagttaaaattcccaaagctaattggtgtttgccttaaaggagaacttagcggatgggcatctgcaaaggatgttattttaaaggtagcaggtatattaacagttaaaggtggtaccggttccatagtagaatattttggttcaggtgcagaaaaattatcatgtactggaaagggaaccatatgcaatatgggcgcagagataggtgcgacaacatcaattttttcttatgataaaaatatgtcaaattatcttcgttccactggtcgaaatgagcttgctgatattgccgatcaaaatgctaattatttatctggtgatagagatgtttacagtgatcctgaaaaatattttgatgaggttataactattgacctagatattttaga

SEQ ID NO: 282383 - DNA, 736 bp, Unknown
  Bacterial polypeptide expressing nucleotide sequence isolated from the Sargasso Sea
gtacattgtgatcatttaattttagctaaacatggtgctgaaaaagacttaaagagagcaaattctgtaagtagtgaagtcttcgaatttttaaaaacagtctctaataagtatggtataggtttttggaaacctggtgcaggaattattcatcaagttgtattagaaaactatgcatttcctggcggaatgatgattggaaccgattctcacacagtaaatgctggaggattaggtatggtagcaattggagtaggaggcgcagatgctgtagatgtaatggcaggaatgccttgggagttaaaatttccaaaaattattggtgtcaagttaacaggtgaactttcaggttggactgccccaaaagatgttattttaaaagttgcaggaattttatcagttaagggaggtacaggatatattattgaatattttggtcctggtgcaaaatcaatgtcgtgcactggtaagggtacaatatgtaatatgggtgctgaagttggagctactacatccacttttggttatgatgaatctatggaaaggtatttaagagcaactggaagaagtaaaatagctgattctgcaaataaaatcaaagaatatctaacaggtgatgaggaagtttatagaaatcctgaaaaatattttgatcaattaatagaaattgatttaagtgagttaaaaccacatttaaatggtccatttacacctgatttagctacaccaatttcag

SEQ ID NO: 282384 - DNA, 1002 bp, Unknown
  Bacterial polypeptide expressing nucleotide sequence isolated from the Sargasso Sea
agctacgatttcaaatatggcacccgaatacggtgctacctgtggtttttttccaacagataaagaaactttaaactatttaaaattaacaggaaaagatgatcaacatttaaatatagttgaaaaatattcaaaaattcaatcattgtgggcagaagaaaattataatcctgaattcaacaaaaaaataattttggatttaaatataatagagccctctgttgctggcccaaagagacctcaagataaaatattgttgaaaaatgtacctaatgaattccaaaatattgaacctaactcaaaaaaatatgataaatcaaatttaaaaccgggagatatagtaattgctgcaattacaagttgtactaatacttctaatccaagtgttatgcttgcagcaggcctagttgcaaaaaaagctattgagcttggtttgaaaataaaaccctctgtaaaaactagcttagctccaggcagcaaagtcgtaagtgattatttagataaagcaggactaactttctatttagataaaattggctttaatactgtgggctatggttgtacaacatgtataggtaattctgggcctttagataattgggttgaagaagaaattacttctaataatttaacagtctgctctgttttgtctggtaatagaaacttcgaaggaagagttcatcaacttgtaaaagcaaattttcttgcttccccaccattggttgttgcttatgctattgcaggtaatataaataaaaatttaattactgaaccaataactaaatcatctagcggtaaacaaatttttctaagagatttgtggccaacaaatgatgaaataaaaactttattagattcttgtctaacaacagatatgtttaagaaaagatatcaagaaatttatgaaggtgacgaaaattggaaatccataaaaagtgaaaagaacatgacttacaattggaatgataccagcacatatattaaacaccctcctttttttga

SEQ ID NO: 282385 - DNA, 681 bp, Unknown
  Bacterial polypeptide expressing nucleotide sequence isolated from the Sargasso Sea
gtattctggacctttagatgaatgggtttctgatgaaattaaaaaaaataatttaactgtatgctcagttttatctggaaatagaaattttgaaggaagagttcatcaagaagtgaaagcaaattttcttgcctccccacctcttgttgtcgcatatgctattgcaggcaacattaatattaatttaactactgactacattggtaaatcaaaatttggaaaaaaaatatttttaaaagatttatggccatcaaacacagaaatcagtcaaacacttagtaagtgtttaactccaaacatgtttaaagaaagatataaagaaatttacaaaggtgacgataattggaagtcgattaataattctaaaaacacaacatatgattggaacgatactagcacttatataaagcatccacctttttttgacacacaaaaaaaatttgaattaaaagatataaaagatgctagaatactagcactattaggtgatagtgtaacaacagatcatatttcgcctgcaggaagtatcaaagaagatagccctgctggcctctatttaactgatagacaaatcaatcttaaaaactttaattcatatggttcaagacgaggtaatcatgaaattatgatgcgaggtacttttgcaaatattagaattaagaatcagattttagataatgt

SEQ ID NO: 282386 - DNA, 751 bp, Unknown
  Bacterial polypeptide expressing nucleotide sequence isolated from the Sargasso Sea
tatgaaaccaggaaataaaaattcttacaaatctttatctgacctagaggttaatggtaaaaattataaatattattcattaagaaaagctgaattaaatggtttagaaggtatttcaaaattaccaaagtcgttaaaagttttattggaaaatctgctcagatatgaggatgatatatcagttaataaaaagcaaatagaagcagtaaaaaactggcttgatacaaaaaaatcaaaaaccgaaatagcttacagaccagccagggttttacttcaagattatacagggataccagcagtggctgatttagctgctatgagagaagctgtaaaagaaaaaaataaagatccaaatacgattaacccactatctgcagtcgatttagttattgatcactctgttcaagtagatcaatcagccaaaaaagattcatttgaaaagaatgtagatatcgaatttaaaagaaatggtgaaagatattcctttttaaaatggggtcaaagcgcttttgacaattttagaattgttcctccaggaactggtatctgtcaccaagttaatttagagtatttatcaaaagtagtttggtcagaagaattcaaaggagataaatatttattccctgatactcttgttggaactgacagtcatacaactatggtcaatggtttatcagttttaggatggggtgttggcggaattgaagctgaggcaggcatgttgggacaacctatttcaatgttaatccct

SEQ ID NO: 282387 - DNA, 766 bp, Unknown
  Bacterial polypeptide expressing nucleotide sequence isolated from the Sargasso Sea
tcctcctaaaggatatgaattacctccaaaaggttttgatgttgaagaacaaggattccaagcaccagattcaaccaaaaaagatataaaagttattgttaattctgattctaatcgattacaattattaaaaccatttgataaatgggataataaagatttaaatgatctgaaattattaattaaagcaaaagataaatgtacaacagatcatatatctatggctggaccatggcttaaatttagaggtcatcttgataatatatcaaataacctgctacttggagcgacaaatgcatttaataatactgtcaacttagtaaagaatcaaatcacaaatgaatatgatgaaacacctaaagtagcaagatattataaaaataataatatatctagtattgtaatcggagatgaaaattatggtgaaggttcatcaagagaacatgctgctatggaacctagatatatgaatgtcaaagtagtagttgtaaaatcatttgctagaattcatgaaactaatcttaaaaagcaaggtatactagctttgacttttaatgataaatctgattatgataagattttagaagatgatacatttaatataaaaggattgcaaaaatttgctcctaaccaaaatttaatttgtgagatttgtcattccaatcagacaaaagatatcatagaattaaaacatacttataataaaaatcaaattgaatggtttaaagcaggaagtgctttaaatttaatttcgaaacaatcatga

SEQ ID NO: 282388 - DNA, 719 bp, Unknown
  Bacterial polypeptide expressing nucleotide sequence isolated from the Sargasso Sea
tatggcgcccgaatacggggctacttgtggtttcttcccgatagacgatgaaacacttcgatatcttcgaaatactggacgagatgaagatcgcgtcgccttggtggaagcttatgcgaaggagaacggattctggaggtcgaaagactattcgcccgtctacacagatacccttcacctcaatatggattctattgttccggcgatctccgggcctaaaagacctcaagattatgtcgcgttgaatgaggctcaaggtgccttcagagctgaaatgaaagataccttcgatcgaccgttgggaaagaaggtccccgtagaaaatgaagattacgaaatggagtcaggcaaggtagtcatagcgtcaattacctcttgcactaacacgtcgaatccttacgtgatgatttcggctggcatagtcgccagaaaggcagcagcgctaggtcttcaaagacagccatgggttaagacttctcttgctccgggatctcaggtggttagtgcgtatctcgaagcatctggtctccaggaagatctggataaagttgggtttaatttagtcggatatgggtgtactacctgtatcgggaactcgggaccgatacaaagcgaaatcagtcaagcgatcacagacggtgatcttgtggcaaccgcggttttgtctggtaatagaaattttgagggaagaatatctcccgatgttcgggcgaactacc

SEQ ID NO: 282389 - DNA, 658 bp, Unknown
  Bacterial polypeptide expressing nucleotide sequence isolated from the Sargasso Sea
gcaaacattcttggtatttttggagactcagtaactactgatcacattagtcctgctggagcgataaaagatgacggcccagcaggtgactatctaaaagataaaaaagttagtaagaatgattttaattcctttggtgcccgaagaggaaatcatcaagttatgatgagaggtacatttgctaatattagaattaaaaatgaaatgctaaataatgttgaaggaggttatacaattcattacccttcaaaaaaacaaatgtcgatttacgatgcatcaattaaatatcagaaagccaaaacacctttaatcattattgcaggaaaagattacggaatgggatcatcaagagattgggctgcaaaaggaaccaaattattgggtattagggcagttattgcagagtcttatgagagaatacatagatcaaatttagttggaatgggagttttgcctttcaaatttgaagggaaggataatagaaagtcactaaaattattaggatctgaaagtgtaaacatattggatatttacgagaatttgaagcctcaaggtttatatgaagcatcaatcgaatacagtaacggaataactaaaaaaattaagattaggttattagttaataacgttactgaaatagaataccttgaaaccggag

SEQ ID NO: 282390 - DNA, 778 bp, Unknown
  Bacterial polypeptide expressing nucleotide sequence isolated from the Sargasso Sea
atggtaaattcactttctgtattaggatggggagtgggaggaattgaagctgaagcagctatgttaggccaagcaatttcaatgaatatacctgaagtaattggatttcaactaaagggtgcacttaaagaaggcattacagccactgacttagttttgtcgataactaaaactctaagagataaaggagtagttggaaagtttgtagaattctatggatcaggcctgaagaatttatcattagctgatagagcaacgatttctaatatggcaccagaatatggtgcaacttgtggattttttcctaccgatgaagaaacaattaattaccttaaactaaccggtaaagataatgatcatctaaatattgttgaagaatattcaaaaaaacaaaccctctgggcagatgaaaactattcaccggaatattctgataaaatattattagatttagatacaattgagccatctttggctggtcccaaaagacctcaagataaaattcttttaaaagatattccaactgaatttagtaagatagtcaaaaatttaaatacgagtaaaaataagttgaatacaggtgatattgttatagctgcaattaccagttgcacaaatacatctaatcccagtgtaatgatagcggctggtttgattgctaaaaaagcaagtgaattaggtttagaagtcaagtcctgggtaaagacaagtctagctccaggtagtaaagttgtaagtgattatcttaataaatctggtttaacacaaatatcttgat

SEQ ID NO: 282391 - DNA, 757 bp, Unknown
  Bacterial polypeptide expressing nucleotide sequence isolated from the Sargasso Sea
accttgggtaaaaactagcttagcgccaggcagcaaagttgtgagtgattatttagaaaaggctgaattatcggagtttttaaataaaattggttttaatttagtaggttacggatgtacaacatgtattggcaattcaggacccttaaatgaatgggtatcaaaagaaattacagataatgatttaacagtttgttcagttttatctggaaacagaaactttgaaggtcgtgtgcaccaagaagtaaaagctaactttcttgcttcaccaccgctggtagttgcttttgcccttgccggcaatattaatgttaatctattcactgacccaataggtattagtaagtctggagataaagtttttttaaaagatttatggccatcttcaaatgaaattaacgatattgttaataaatctttatctaccgatatgtttttaaaaagatacgaagagatttatgctggtgataataactggaaatcaattaatagtgtttcagaaactacttatacatggaatgcatccagcacatatatcaagcgcccccccttttttgaaagtgatggaaatgaagttaaagatattattaatgcaagaatccttgctcttctaggcgatagtgtaactactgaccatatttctcctgcaggagctataaaatcagacagtccagctggtagatatttaaatgaaagacaaatacttaggaaagatttcaattcatatggttccagaagaggtaatcatgaaataata

SEQ ID NO: 282392 - DNA, 583 bp, Unknown
  Bacterial polypeptide expressing nucleotide sequence isolated from the Sargasso Sea
atggacaacaaagattttttgacggaaattgagcttccaaataaaaaactcacttactattctttacctaaattgtcccatgatttttcttttgacttagagtctatgccgtactcattaagaatcttgttggaaaatctaataagaaattttgacaataaaattgttgatgaggatttgattaagaaatttatctcggataaaaaagaaaagtttgaaatcccttttagacctgcaagggtaatattacaggattttacaggggtcccctgtatagctgatttagcagcaatgagagatgtagtggctcaactcgggggggatacgaactcaattaaccccaatgtccctgttgacttagtcattgaccattctgtccaagttgattacttcaaagaaagagattccttgattctgaatacaaaattggagtttgagcgaaatcaagaaagatattcttttctccgatgggctcaaaaagcatttgcaaacttcagagctgtcccccctggtaatgggattgttcaccaagtaaaccttgaatatttagcaaagctggtacaaaaaggaaaaaagaagacga

SEQ ID NO: 282393 - DNA, 505 bp, Unknown
  Bacterial polypeptide expressing nucleotide sequence isolated from the Sargasso Sea
ttctacagccaatctttaggtaaagataaaaacggtaaagaaatttatttaaaagatatttggccttcaaacaaagaaatagaagaaactttgagaaattcattaaatgcagaaatgtttataaaaagatattccaatatttcagagggtccaatccagtggcaaaaaattaaaactgaaaaaagcagtatttataattgggatgaaggatcaacttatgttaagaaaccaccattctttgaaaatcttccagatcagcccgaaggatttaaagagataaaaaatgcaagacctttactaattttaggagatatgattacaacagatcatatttctccggcaggatctattaataaagaaagtccaacaggtgaatactttatggagcatcagattttacctaaagattataattcttacggatcaagaagaggaaaccatgaagttatgatgagaggaacttttgcaaatatcaggataaaaaatgagattgtacccggaatcg

SEQ ID NO: 282394 - DNA, 576 bp, Unknown
  Bacterial polypeptide expressing nucleotide sequence isolated from the Sargasso Sea
tatgaagataaacagcaaagattcatttaaatctttaaaaaaattaaaagtagacaataaaatttataatatatttagtctcaaagaagctgaaaaaaacggattaaaagatatttcaaaattacccaaatcaataaaaattttattagaaaatttactaagatttgaagatgaaaaatcagttaaaaaggaacaaattttatctattcaatcttggttggataaaaaaaattctaaaactgaaattgcttttagaccagccagagttcttatgcaagattacactggtataccagcagttgctgatcttgcagctatgcgtgatgctgtcaaattaaaaaaaaaagatccaaaaaaaataaatcctttatcaacagtcgacttagttattgaccattctgtaatggttgatgcttatgcttcaaaagattcttttaaaaaaaatgttgaaaaagaattttcaagaaatggagaacgttattcttttttaaaatggggacagcaagcttttaataactttagagttgttcctcccggaactggtatctgtcatcaagttaatttagaatatttatc

SEQ ID NO: 282395 - DNA, 834 bp, Unknown
  Bacterial polypeptide expressing nucleotide sequence isolated from the Sargasso Sea
aacaatgccaaaaaatctaactccgaggtatataattttcttgaatctgtatcaaaaaaatatggcattggtttttgggagccaggcgcgggtattattcatcaagttgtattagaaaactatgcgttcccaggaggaatgatggttggtacggatagtcatactgtaaatgctggtgggttaggaatggttgctattggcgttggtggtgcagacgctgtcgatgtaatggttggaatgccatgggagttaaaatttccgaagctcattggagtttgtcttgaaggggaactgaatggatgggcatctgcaaaggatattattctaaaggttgcaggtatgttaacggttaaaggtggtactggttcaatagtggaatattttggtccaggtgcagaaaaattatcatgcactggaaagggcacaatttgtaacatgggtgcagaaataggtgcaacaacatcaatcttttcttatgataaaaatatgtcaaactatcttcgttctactggtcgaaatgaactcgctgatattgcagatcaaaatgctgatttattatgtggtgatagagatgtttatagtgaccctgaaaaatattttgataaggttatcactattgacttaaataatttagaacctcacattaatggtccatttactccagacttagctactccaatttcagaatttgcaaaatctgctgaagaaaatgcctggccactgaagttagatgtcggattgataggctcgtgcacgaactcctcctatgaggatattacacgagcagcatcaatagctaagcaggccaaggaaaaaaaaataaaagtaaagtct

SEQ ID NO: 282396 - DNA, 916 bp, Unknown
  Bacterial polypeptide expressing nucleotide sequence isolated from the Sargasso Sea
tttgcagcaggaaagaataaagtggctgttcctagtactgttcattgtgatcatttgattttagctgaatctggtgcggatcaagatttgaatcaggcgttgaaggataataaagaagtgtataattttttatcgtctgtttcaaaaaaatatggtattggattttggaaacctggagcaggaattattcatcaagttcttttggaaaattatgcttttcctggggctatgatgattggcacggattcacatacggtgaatgcgggagggttaggtatggttgcagtaggtgttggaggtgcggatgccgtcgatgttatggctggtatgccgtgggaattgaaatttccaaaattagtgggagttgtgttgaaggggaagctttctggatgggcgtcttcgaaggatgttattttaaaagtggcgggtattttaactgttaagggaggaactggaaaaattgtcgagtatatcggagaaggggcagagtcattatcgtgtacagggaaagggacgatttgtaatatgggggcagaaataggtgccactacgtctctttttggatatgatgattcgatggctcgatatttggatgcgacggggaggtctattgtgacagagtttgcgtctgcatgtagagatgatttgaatcccgatccagaagtacttcaaaacccagaagcgtattatgacgaagtcattgaaattgatttgtctactttagagccttatattaatgggccttttactccggataaagcatggcctatttctgaatttgctcaagctgtaaaagataatgggtatcctcaagaattagaagtagggcttattgggtcttgtacgaattcttcttatgaggatttaactcgtgcggcatcgttagctaaacaagctaaagataagcacttgaaag

SEQ ID NO: 282397 - DNA, 530 bp, Unknown
  Bacterial polypeptide expressing nucleotide sequence isolated from the Sargasso Sea
catgacagttcaatcccagactccaatagaactcgtaaaaagcgtttactcaaattttgaagatcgcctaccttacggcaggaaagctttaggcaggtctttaacgctggcggaaaaaatactaattaaccacttgaaggatccaagttctacagaaatgaaccgcggggtctcatatgttgatcttcatcctgaccgagttgcaatgcaagatgctactgctcaaatggcttggttacagtttatgactgcaggtcttccggaagtacaagttcccacgactacgcattgtgaccatttaattcaagcccgtatagacggtgacaccgatcttagtgtcgcagttgacaacaattccgaggtatacgacttccttgaatctgtttgtgcaaaatatggcgcgggtttctggaaaccgggctctgggatcatccatcaggtgattctcgaacaatatgccttccctggcggaatgatgatcggcactgatagtcatactccaaatgcgggaggtttaggaatgattgcta

SEQ ID NO: 282398 - DNA, 688 bp, Unknown
  Bacterial polypeptide expressing nucleotide sequence isolated from the Sargasso Sea
tatgactccaggaaacaaaaattcttacaattcattaaaaaaaattaaagttaatggcaaagagtataattattattctttaaatgaatcagaaaaaaatggacttgaaggaataaataaacttccaaaatctctaaaagttttactagaaaatttattaagatacgaagacgacttaagtgtaacgaaatctcaaatagaggcgattaaaaattggctaaaaactaaaaaatctaaaactgaaattgcatatagaccagcaagagttttgcttcaagattatacaggaatacctgcggttgcagatttagctgcaatgagagaagcagtcaaagaaaaaaataaagatccaaaaacaatcaatccattatctgcagttgatcttgtaattgatcactctgtacaagtcgaccaatctgcaaaagcagattcttttgaaaaaaatgtagatatagaatttgaaagaaatggtgagagatattcttttttaaaatggggacaacaggcatttgataattttagaatagttccaccaggaacaggaatttgtcaccaagtaaatctagaatatttatcaaaagttgtttggtcagaagaatttaaaggggaaaaatatctttttccagatactttagttggaacagacagtcatacaacaatggtaaatggcttatctgttttaggatgg

SEQ ID NO: 282399 - DNA, 918 bp, Unknown
  Bacterial polypeptide expressing nucleotide sequence isolated from the Sargasso Sea
ccatctggctgtacggatcgggcaaccatatcaaatatgtcgccggagtttggatgtacggacacccactggcccattgacgctcaaacgctcgactatatgcgaaagaccagtcggcctgaagcccatatagatatggtagaggcctatgcgaaagccaatctactttggagagatgacaatgctgaaatcgagtacacagatgtgattgaactcgatttaggtacggtagagcctaccatctcaggtccaaaaagaccacaggataaaattttattaagagaagcgaaaggtcaaattgataaacttttgaatgattttggttcgaaaagacaaagcattgaggtaaagaccaaaggctatggagacttcacattggacgaagcatcggttgtaattgctgcgattacctcctgtaccaacacttccaatcctagcgtaatgattggtgcaggattagttgccaagaaagccaatgaaaaagggctaactaccaaaccatgggtcaaaagctctctggctccgggatctcgcgtggtaaccgaataccttgataaatcggatctttctaaagaattggacaaattgaaattcaataccgttggttacgggtgcaccacctgtattggaaactcgggtgatatgattgatgaggtgcaaaaagctgtcattgacaataacctgattgtttgctctgcactttccggaaaccgaaatttcgaagcaaggatccaccccaatatcaaaatgaacttccttgcttctccaatgctcgttgtggcctatgctctggcaggaacgatggactttgatatgagtaaagatcccttgggtgaggatcaggacggcaatccggtttatcttaaagacatctggccttcttctgctgagattcaggaagttatgacccgggtactg

SEQ ID NO: 282400 - DNA, 871 bp, Unknown
  Bacterial polypeptide expressing nucleotide sequence isolated from the Sargasso Sea
taaaattcttttaaaagaagtgccaaaggaatttaataaaatagataataatcccaatgttagtaaaaataaattaaacacaggtgatattgtaatagcagcaattactagctgtactaatacttcaaatcctaatgtgatgatagcagcggggctggtggctaaaaaagcaattgaattggggctaagtgttaaaccttgggttaagactagtttagcaccaggtagtaaggttgtaagtgattatctcgataaagcaggattatcagaataccttgatatgctcggcttcaatactgtaggttatggatgtacaacatgtattggtaattctgggcctttagatgagtgggtatcagatgaaattaaattaaataatataactgtttgttcagttttatccggaaatagaaattttgaaggcagagtccatcaagaagtaaaagctaattttcttgcttcaccacctcttgtagtagcatatgctattgctgggaatatcaatattaatcttacaatcgatagtttaggtaaatctaaaacaggagaagatatttttctaaaagatttatggccttcaaatattgaaattaataaaactcttaacttatgtttaacgcctaagatgtttatagatagatatgaagaaatatacaaaggtgatgataattggaaatcaataaacagttctaaaaatactacatacaattggaatgataatagtacttatataaaacacccacctttttttaatgaacaaaatgattttgaattaaaagatatacaaaacgcaagaatacttgctttgttaggtgacagtgtaaccacagatcatatttcacctgctggtagcattaaagaagatagtcct

SEQ ID NO: 282401 - DNA, 948 bp, Unknown
  Bacterial polypeptide expressing nucleotide sequence isolated from the Sargasso Sea
aatggcattattacagtttatgatggcgggtagggaaaaagttgctgttccatctacagttcattgcgatcatcttattcaagcaaagataaatgcaggacaagatctgttaacctcgaaaaaaaataacgatgaggtttttagctttttgcaatctgtatctaataagtacggaattggattttggaaacctggagccggcattatccatcaagttcttttagaaaattatgcttttccaggtggaatgatgattggaacagatagtcatactgttaatgctggtggacttggcatgatagctattggggtggggggcgctgatgctgttgacgctatgactggaatgccatgggagctcaaatttcctaagatagtaggggtagaattaaaaggcacgttaaatggttggacatcgcctaaagatgtaattctaaaattagcaggtattgtttcagccaaaggggggacagggtgcattatagaatattttggaagcggtgctgatgttatatcttgcactggaaaagggacaatttgcaatatgggagctgaaattggagctacaacttctatctttggatacgataataaaatggaagaatacttgattgcgacaggaagagatgaagttgcagctttagctaataactacaaagaatacttgaaagctgatagtgaagttttagataaccctgaaaaatattatgataaattgattactattgatctgtcattattagagccacatataaatggcccattctctcctgatattgcaaccccaatctcaaaaatgaaagaggttgctaaaaagaataattggcctacaaaaattgatgttggtttaattggttcatgcacaaactcttcttatgaggatatttctagagcatcgtcaatagccaggcaagcaacacaaaaagggctaaaaactaagtctgaatt

SEQ ID NO: 282402 - DNA, 586 bp, Unknown
  Bacterial polypeptide expressing nucleotide sequence isolated from the Sargasso Sea
aaaattggttttaatttggttggttatggttgtacaacttgtataggtaattcaggcccactagaaggatggatctctactataataaaagataaaaatttaacagtgtgttcagttctttctggtaatagaaactttgagggtagagttcatcaagaagtaaaagcaaattttttagcttcaccgcccttagttgttgccttcgctctcgcaggtaatatgaatgttgatatttttaatgaacctattggaattggtaagttaggtaaagaaatttttctaaaagatatatggccatcttcttatgaaataaataatatagttgataattctttatccactgacatgtttaagaagagatataaagaaatctataatggtgacagtaattggcaatcaattaaaagtaactctaataagacttattcatggagtcccgccagtacatatataaagcatccacctttttttgctgatcaagaagaagagatcaaagatattatcaatgcaagaattcttgctatgttgggtgatagtgtcaccactgatcatatttcatccagctggtgcaataaagtcagatagt

SEQ ID NO: 282403 - DNA, 745 bp, Unknown
  Bacterial polypeptide expressing nucleotide sequence isolated from the Sargasso Sea
taatgagaatggtgaaaaagttttacttgatcctcctaaaggatttgaacttcctcctaatggctttggtgttgatgacttaggtttccagaatccttcagatgatggaacaaacttaaaagttctaattaataataattcagatagattacaaaaactagaaccttttgaaaaatgggatggttctgatacaatgacattaagtcttttagttaaagtatcaggtaaatgtacgactgatcatatatcaatggcaggtccatggcttagatttagaggccacttagataatatttcaaataatttattaataggagctactaattcatttaataatacagttaatttagttaaaaataaattaaccaatcaatatgaggaaatcccaaaggttgctagatactataaaaataatgatatttcatctattattattggtgaagaaaattatggtgaaggttcatctagggaacatgctgctatggagccaagatatatgggagttaaggctgtattagtcaaatcatttgcaaggattcatgagactaatcttaagaaacaaggaatacttgctttaacttttgttaataaatctgattacaataaaattaaggaagatgattcattttctattttaaatttaaatagttttttacctgatagtaacctagaaattcaaattaaccataaggatgaatcctcagaaatcatagaggtttgtcatacttataatattaatcaaatt

SEQ ID NO: 282404 - DNA, 497 bp, Unknown
  Bacterial polypeptide expressing nucleotide sequence isolated from the Sargasso Sea
aaatgagattgcaccaggcactgaaggtggttttacaaaactataccctgagggcaaggtcatgcctatatatgatgcggttgtggaatataaaaaaagaggcacagatttaatagtaattggtggtaaagaatatggtacaggctcatcaagagattgggcagcaaaaggaacaaaacttttaggtattaaagctgtgattgccgaaagttttgaaagaattcatagatccaatttaattggtatgggtatacttcctttacaatttatggaaggtgttgatagaaaaaaactgaaactaactggttcagagttaatttctattctaaaaattgaaaatggaataaacccgtcagataaaattgaaatagaaataaaatatcaatcaggtgatataaagaaaatcaaaacattatgtagaatagatacacagaatgaacttgagtattataaaaatggaggaatcctacaatttgtcttgaggaatatgatgtaag

SEQ ID NO: 282405 - DNA, 538 bp, Unknown
  Bacterial polypeptide expressing nucleotide sequence isolated from the Sargasso Sea
atggttagaggaacctttggtaatcttagaataaaaaatgaaatattaaaagatgttgaaggtggttttactaaatattttccaactaataaacaaatgtcaatttatcaagctgcaactgaatatgcaaaaaataatacacctttaattgttattgctggtaaagagtacggcacaggttcttcaagggattgggcagcaaaaggcactaaattattaggtattaaagctgtgattgctgaaagttttgaacgcatacacagatctaatttaattggcatgggcgttttgcctttagaatttcaagatggtcaaaatagaaaaacattgcaattaagtggatatgaaaaattttccattaaaggaattgaaaaaataaaaccccaaaccaatctaaaatgtgaaattcaatttgataaaaaaaatctattaattaatttaagatgcagaattgatacaaaaaaagaacttgattattataaagcaggcggaatacttaactatgtattaaattcaattatagataaagcatcataaa

SEQ ID NO: 282406 - DNA, 599 bp, Unknown
  Bacterial polypeptide expressing nucleotide sequence isolated from the Sargasso Sea
tactgacaaagtagatcgtcttccatttacgcataaaattcttcttgaaaatgcacttcgatattcagaggacgacaatgaagggcctaaagatgtggagacaattctcaattgggattcaaaatccgatcgatcaacagaaatatcctttacacccagtcgtgtcattctccaagatttcactggggtgccggctgtagtggatcttgccacaatgagagatgcagtggtatcaatgcaaggcaacccaaatgacatcaatccactttctcctgcggaattggtgattgatcattccgttcaagtggatcattttggaagtctggatgcactagagaagaacaataaagttgaatttcaaagaaatcaggagagatatagatttctgagatgggggcaggatgcattttccaattttgaagtagttcctccaaatactggaattgttcaccaagtcaatcttgaatatctgggtcgtgttgtattctcgaaagatgattcattggcttacccggataccctggttggaaccgattctcacacgacgatgatcaatggaattggatgcctaggatggggggtaggtggaattgaggcag

SEQ ID NO: 282407 - DNA, 465 bp, Unknown
  Bacterial polypeptide expressing nucleotide sequence isolated from the Sargasso Sea
aatattttccaaataataaaaagatgtcaatttatgaggcagcaattgaatatgcaaaaaaaaatacacctttaattgttattgctggcaaagaatatggaacaggatcttcaagagattgggcagcaaaaggtactaaattactaggtattaaagctgtgattgctgaaagttttgagcgaatacatagatctaatttaattgggatgggtgttttgcctttagagtttcaggatggacaaaatagaaaaacattgaaattaagtggaaatgaaaaattttccattaaaggaataaaactaataaaaccccaatctaatctacaatgtgaaattcattttaataaaaaaaatgtattaattaatttaaaatgtaggatagatacaaaaaaagaacttgattactataaagcaggcggaatacttaattatgtattaaatacaattatagataaagcttcttaaa

SEQ ID NO: 282408 - DNA, 499 bp, Unknown
  Bacterial polypeptide expressing nucleotide sequence isolated from the Sargasso Sea
gaaattatacctggaacagaaggtggcataacaaaatcttttgtctcaaataagaaaatgtcaatatatgatgcctcaatagaatattcaaaaaataatattccgttggtaattgttgctggtaaagagtatggcacaggctcttcaagagactgggctgccaaaggaactaaattattaggtataaaggcggtaatagctgaaagtttcgagagaatacaccggtcaaacttaataggcatgggagttcttccattacaatttacttcaaaccaaaatagactatctttaaatttgaatggtagcgaaaaaatttcaattaaaaacattattaatatatttccaaatatggaatttgactgtgaaataatttctgaaaatgaagcaagattaattaaattactatgcagaattgatacaaaaaaagaaatagaatattataaagcaggcggaattttacaatatgtattaaaaagtattattgataaagcttcctagt

SEQ ID NO: 282409 - DNA, 859 bp, Unknown
  Bacterial polypeptide expressing nucleotide sequence isolated from the Sargasso Sea
tatggatttatcagtaacaccagcaagtttagtttcctcggtttatgaaaagttaaccgagaatataaacagtttaagggcaagaaaagatgctcctctcacacttgcagaaaaacttctttttggccatgcaacagacatttcatctgtttctttgaataaaggtgaagattatggagattttgctccagacagagttgccatgcaagatgcaacagctcagatggctttattacaatttatgcaagcagatttacctgaaacagcagtgccaacgactgttcactgtgaccatttaattcaagcatatgagggtgcaagtactgatcttcaggtagcaaacaaaacacacaaagaggtttttgattttctaagaactgcttcagaaaagtatgaaataggattctggggaccaggagctggaattattcaccaggttgttctcgaacaatatgcatttcctggaggaatgatgattggtactgacagccacacacctaatgctgggggattatccatgattgccattggagttggaggcgcagacgctgttgacgttatggctggtatgccatttaatacgaagattccaaatttgattggtgtcaaattaacaggatcattgagtggatggacgtcaccaaaagatattattttaaaagtagcagaaattcttacagtcaagggagcaacgaatgcaattgttgaatactttggcgaaggaactcaaactatttcaactactggtaaagcaaccatcacaaatatgggtgccgaaattggtgcaacgtgttccatttttccatacgatgaaaagggtagtgattatctaaaagctacaggtagagaagaattagct

SEQ ID NO: 282410 - DNA, 865 bp, Unknown
  Bacterial polypeptide expressing nucleotide sequence isolated from the Sargasso Sea
tcggattctgccattgtagagcaaaataatgaaatttatgatcttaatcacggagatgtggttatagccgccattacaagttgtacgaacacaagcaatccaggagttatgatagccgctggtcttcttgcaagggaagcgagaaaaagagggctaaatgtgaaaccgtgggtaaaaacatcgttagcgccaggcagtcgcgtggttacggaatattatgatgtgaatgggctaacagaagatttggatgctcttggttttcataatgtggggtacgggtgcaccacttgtattggaaactcagggccgctcgatgcctcgatagaggctgctatcgatgaagccaatttgattgtaggctctgtgatttcaggaaacagaaattttgagggaagagtgcatcaaaaagtaaaggcatcatatctggcaagtccgccgttggtagtggcttatgcccttgcggggacacttgacattgatttcgagaaagatcctctcggtatttcggcagatgggcaacgcgtcatgctatccgatgtttggccgtcagaggaagatgtggctaaagccatggcgaatatcaggccggagatgtttactgagagatatggtactgttatgcaagaagaccgatgggatgcgattccagccgaatcaaccccaatctacccttgggatgaagcatcgacctacattcgtttgccaagtttcttccaaaatatctccatggaggtccctcccattgagccaatatcagatgcaagtgtcctactattccttggagactccgttactaccgatcatatttcacccgctggagcttttccagaagatggccctgcaggacgctggctcacagagcgaa

SEQ ID NO: 282411 - DNA, 303 bp, Unknown
  Bacterial polypeptide expressing nucleotide sequence isolated from the Sargasso Sea
tttttgggaccaaggatcaacttatgtaaaaaaaccacctttttttgacaatctttcagatgaaccagatggatttaaacaaataaaggatgcaagaccgttattaatcttaggagatatggttactacagaccatatttctcccgcaggatccatacaaaaagaaagtccaactggcgattattttatgaaacatcaaattttgccaaaagattataattcttatggttcaagaagaggtaatcatgaggttatgatgagaggaacttttgcaaacataagaattagaaacgagatagcccc

SEQ ID NO: 282412 - DNA, 735 bp, Unknown
  Bacterial polypeptide expressing nucleotide sequence isolated from the Sargasso Sea
ttgtcgtatcgattttgaaagtggcgaaggaacttcttcaatttatagtctggaagcactccaaaaaaagggtgtcgggcatattgataatcttccattttctatccgtattttactggaacaggctctacgaaacgttgaagagtcaaaatcaaatcctgaggatgtaaatttactagctaattggaatgcttcagaaaattctcctgaagaaattccttacaggcctgcgcgtgttattttgcaggattttaccggtgtgcctgctgttgttgaccttgctgcactgagatcagctgtggttgaaatggaaggtgatcccgcagttattaacccacgcgtcccagttgatttagtaattgatcactcaatacaagttgatgtttttggaagttctgatgcactcaaaaaaaatatggatattgagtttaaacgaaatcgagaacgttatgaatttcttaaatggggcaagcaagcattcgataatttcaatgtatatcctccaggggtaggaatagtgcaccaggtgaatctggaaactgtagcaagtgttgttcaatttagaaatggagtttgctttcctgacacacttgtaggtacagattcccacactacaatgataaacggccttggagtgatgggttggggagttggaggaatagaagcagaatctgtaatgcttggtcagccaatatatatgctggtaccagaagtaattggtttccgtttgcatgg

SEQ ID NO: 282413 - DNA, 820 bp, Unknown
  Bacterial polypeptide expressing nucleotide sequence isolated from the Sargasso Sea
actggcatttttgcattaggaggaagtttatcctttaacccattgaaagattcacttgagacagacgatggcaagaaaattacgctatcaccaccaccaattgcaccagaagtacctgagaaaggatttgttgtagcaaaagatgtctatatttctccatctgaaaaaccagaagacgtagaagttattatcgatccaaatagtgacagattacaaaaacttgaaccattcaaaccatggaatggggatgattttactgaactatcattaatgatcaaggcaaaaggaaaatgtaccactgatcatatttcccctgctggtccatggcttagactccgtggtcatcttgataagctaagtgataacttgctgttgggtgcagttaatgcattttccagtgatgttggaaaaacaaaaaatatgttaacaaatgagatagaaaattgcgccgaaattgctagaaaatataaaaaagaaaatatcaattggcttatagttggagataccaattatggtgaaggaagtagtcgtgaacatgctgcaatgactcctagatttttaggctgtgtagttgtaattgcaaaatcctttgcaagaatccatgaaactaatttaaaaaagcaaggaattcttgcattaacattcgatgatgtagatgattatgaaaaaatcaatgaagatgataaaataagtattactggattagaaaattttgtagagaactcagttgttacatgtgaattgaaacatactgatggtaaatctgaaaaaatctctttaaggcattcatataattcctcacagattgagtggtttaaag

SEQ ID NO: 282414 - DNA, 985 bp, Unknown
  Bacterial polypeptide expressing nucleotide sequence isolated from the Sargasso Sea
tcggtctgcgcgaaatatggggctggcttttggaaacctgaaagtgggatcattcatcaggttgttttagaacagtacgcatttccaggaggcatgattatcggaaccgacagccacacacccaatggcggtggcctcggaatgatagcaattggagtcggcggcgccgatgctgttgacgtcatgacaggtttcccttggaatgtcaggtggccaaaattgattggcgttcaccttacgggatcactgaatggatggagcgcgccaaaagatgtaattctaaaagtcgcagagattttgacagttaagggcggaacaggggccatagttgaatactttggtgaaggtgctgataatttatctgcaaccggaaaagcaaccatatgtaacatgggtgctgaaattggagcaacgacttctatttttccttacgaccaagccatcgagcggtacctaaggtctacttccagagaagcagtggccgatcttgccaaccagcatgcaggtgacctaagagcagacgatgaagttttagagaatcccgaaaagtttttcgatcaagtgattgaaattgacttatctcaacttcgtcctcatattaatggaccacacacacccgatctcgcaagagagttgaaggatcttggttcagaagccaccgagaatgggtggccacttgaaattagcgctgcccttatcggtagctgcacaaactcttcatatgaagacataacacgagctgcatcgattgcaagagaagcagctgcttctggcctaaaaacacaaactcgtctactaatcacaccaggatctgaaaaagttcgcgctaccatcactcgcgatggtcttcttgcagactttgaagcacttggtgcggtagtactagcaaatgcttgcggtccatgcattggccaatgggacagatctttagaggatcgtgtagctggaacacctaatgttattgttacttcttacaacaagaaat

SEQ ID NO: 282415 - DNA, 768 bp, Unknown
  Bacterial polypeptide expressing nucleotide sequence isolated from the Sargasso Sea
tatgaaaccaggaaatagaaattcatttaaatctttaaaatcaataaagataaataataaaaattataaatatttttctctaatagaagctgaaaaaaatggtttggccggtatttccaatttaccgaaatcattaaaagtcttattagaaaacttacttagatatgaagatgatttatcagttactaaaaatcaaatagaagcaattcaaaattggttgaaagaaaaaaaatctaataccgaaatagcctacagaccagcaagagttttgcttcaggattatacaggtataccagcggttgcggatctagctgcaatgagagaggcagttaaagaaaaaaataaagatccaaatactattaacccactttctgctgttgatttagtaatagaccactcagtacaagttgatcagtctgcaaaatctgactcattcgaaagaaatgttgaaatagaatttaaaagaaatagtgaaagatattcttttttaaagtggggacaacaagcttttgataattttagaattgttcctccaggcactggtatatgtcatcaagtaaatttagaatatttatcaaaggttgtttggtctaaaaaatataaagatgatgaatatttgtttccggatactttagttggaacagatagtcatacaacaatggtaaacggtttatcagtcctcggctggggtgttggtggtatagaggcagaagccggtatgcttggacagccaatatcaatgttaattcctgaagttataggttttga

SEQ ID NO: 282416 - DNA, 514 bp, Unknown
  Bacterial polypeptide expressing nucleotide sequence isolated from the Sargasso Sea
ttgcaatattagaattagaaatgagatagcaccaggtacagaaggtggatttacaaaaatttacccagaaggcaaagtagtgtcaatatatgatgcggttgttgagtataaaaaaagaggtactgatttgatagtaattggtggaaaggaatatggcacaggttcatcaagggattgggcagcaaaaggtacaaaacttttaggtattaaagctgtgatagccgaaagttttgaaagaatacatagatcgaatctgataggtatgggtatactacctttgcaatttatgagtggggttgatagaaaaaaacttaacttaattggttctgaattaatttcgattttgaaaattgaaaatggaataaatccttcagacaaaattgaggtagaaataaaatatcaatcaggagatattaaaaaaactcaaacattatgccgaatagatacaaaaaatgaacttgaatattataaaaatggtggaattcttcaatttgttttgagaaaaatgatgtaa

SEQ ID NO: 282417 - DNA, 651 bp, Unknown
  Bacterial polypeptide expressing nucleotide sequence isolated from the Sargasso Sea
tatgtcagatcatacaaattcattctcaatcaatgaaaaatcatataagtattttgatttaaagtcgctggatactgacaaagtagatcgtcttccatttacacataaaattcttcttgaaaatgcacttcgatattcagaggacgacaatgaaggtcctaaagatgtggagacaattctcaattgggattcaaaatccgaccgatcaacagaaatatccttcacacccagtcgtgtcattctccaagatttcactggggtgccggctgtagtggatcttgccacaatgagagatgcagtggtatcaatggaaggtaacccaaatgacatcaatccactttctcctgcggagttggtgattgatcattcagttcaagtggatcattttggaagtctggatgcactagagaagaacaataaagttgaatttcaaagaaatcaggagagatatagatttctgagatgggggcaggatgcattttccaattttgaagtagttcctccaaataccggaattgttcaccaagtcaatcttgaatatctgggtcgtgttgtattctcgaaagatgattcattggcttaccccgataccctggttggaaccgattctcacacgacaatgatcaatggaattggatgcctaggatgggg

SEQ ID NO: 282418 - DNA, 833 bp, Unknown
  Bacterial polypeptide expressing nucleotide sequence isolated from the Sargasso Sea
tatgaaaccaggaacaaaaaattcatataattcattatcagagattaagattaataacaaaatctataaaattttttccctatctaaagcggagaataatggtttaagtggtatttcaaaattgccaaaatctttaaaggttcttttagaaaatcttttaagatatgaagatgacttgacagttaacaaaaatcaaatagaggcaataaaaaattggcttgaagaaaaaaaatctaaaacagaaatagcatatagaccagccagagtgctgttacaagattatacaggaataccagctgttgctgatttagcagcaatgcgtgaggctgtaaaagaaaaaaacaaagaccctaaaacgataaatccactttccacagttgatcttgttattgatcactcagtccaagtagatcaagcagctaaatccgattcttttgataaaaatgtagagattgaatttagcagaaatggagagagatattcttttttaaagtggggacaacaagcatttaataattttagaattgtccctccaggcacaggaatatgtcaccaagtaaatttagaatatttatctaaagtagtttggacagctaaatacgaagatcatgattacttattcccagatacattggttggaacagatagccatactacaatggtaaatggtttatcagttttaggttggggagttggaggtatagaggcagaagctggtatgctgggtcaaccaatatcaatgttaattccagaagtaataggtttcgaagtaaaaggcaaaatgcctgaaggcactactgcaactgatttggtattaactgttgtcaaaatgt

SEQ ID NO: 282419 - DNA, 781 bp, Unknown
  Bacterial polypeptide expressing nucleotide sequence isolated from the Sargasso Sea
gatatctacttatgttaaacatccaccatactttgaagacatgaatttcagtcaaggaaatataagtaatattttaaatgcaagggttttaggaatatttggtgactctgttacaacagatcacattagtcctgctggatcaattaaaacaaacgggcccgcaggagattatctaaaaagtaaatcagtaaagattcatgattttaattcatttggcgctagaagaggtaatcatgaagtaatgatgagaggtaccttttcaaacatcaggattaaaaatgaaatgcttgatggcattgaaggagggtatacaaaacactatccatctaaaaaacagatgtcaatttttgatgcggcaataaaatacaaaaaagagaataaaccactggtcatattttctggaaaagattatggaatgggttcatcaagggattgggctgcaaaaggaacaaatttacttggtgtaaaagctgttatagctgaatcttatgagcgtattcatagatcaaatcttgtaggaatgggagttttacctcttcaatttaataaaggacaaaatcgtaaatctctcaagctaaatggttcagaagtaatctctattactggcctagataaagaaataactccaaatatgatattgccaatgacaattaaatactcatcaggaaaaatatttgagacaaaagttaattgtttaattaagaccgttaatgaggttgaatatcttcaaacaggtgggatactgcaatacgttttaaaaaatcttgcagagacagcctag

SEQ ID NO: 282420 - DNA, 532 bp, Unknown
  Bacterial polypeptide expressing nucleotide sequence isolated from the Sargasso Sea
atgatgagaggaacatttgcaaacataagaataagaaatgaaatggcacctggaacagaaggaggttatacaaaaatatatcctgaaggagaagttcttccggtttacgatgcagttgttgaatataaaaaaagaaataccgatctagttgttattggtggcaaagaatacggaaccggttcttcaagagattgggctgcgaaaggaacaaaattactgggcgttaaagctgtaatagcagaaagttttgaacgtatacacagatcaaatttaataggtatgggtattttaccattgcaatttaaagataatgtaaataggaaaaatttaaatttaattggttctgaactaataagcgttattgatattgaaaaaggaataaaaccatcagatgaagtcactttagagattaagtacgtatctggtgaaatcaaaaaaattaaaactttatgcagaattgatacaaaaaatgaactagaatattataaaaatggaggcattctccaatatgtattaaggaatatgatttaat

SEQ ID NO: 282421 - DNA, 423 bp, Unknown
  Bacterial polypeptide expressing nucleotide sequence isolated from the Sargasso Sea
atgcagtagttgaatataaaaaaaggggcatagatcttgtagtaataggtgggaaagaatatggaacaggatcatcaagagactgggcagcaaaaggaacaaaattactaggaataaaagtggtaatagctgaaagtttcgagaggattcatagatccaatttgataggcatgggtatcctgccattacaatttatgccaggatttgatagaaaaaaaattaatttgataggatctgagcttatttcaataatagattttgagaaaggaatagatccgtctgaaaaagtaaaagttgaagtaaaatacgaaagtggagaaattaaaattattgaaactatttgcagaatagatactaaaaatgagatggagtattacaaaaatggaggaattctccaatatgttctaaggaatatgatctaat

SEQ ID NO: 282422 - DNA, 745 bp, Unknown
  Bacterial polypeptide expressing nucleotide sequence isolated from the Sargasso Sea
cttcaatttatgatggcaggaaaagataaagtatcagtaccgtcaacggttcactgcgatcatttaattcaagctaaagttgatgctagttcagatctaaacagtgccttagatatgaataatgaagtatttgattttttagagtctgtctccaataaatatggaattggtttttggaagccaggtgcaggaataattcatcaagtaattttagaaaattatgcttttccaggaggcatgatgattggaaccgatagtcatactgtaaatgctggtggcttaggcatgattgctataggcgttggcggtgctgatgcagttgatgtcatgacaggtatgccatgggagctcaaactaccaaaattaattggcgttaagctttcaggtgaattatcaggatgggcttctccaaaagacgtaatacttaaattagctggaattttaactgttaagggcggcactggttcaattatagaatactttggggatggggtaagtaccttatcttgcactggcaagggcactatttgcaatatgggtgccgagattggtgctaccacatcaatttttagctacgataataaaatggaagaatatcttaatgcaactggacgaagtgagttggcagatatggcaaataaaataaaagaatttttagtccctgatttagaggttattgataatccaaaaaaattctttgacgatgtaatagagattaatctatccaaattagagcctcatttaa

SEQ ID NO: 282423 - DNA, 844 bp, Unknown
  Bacterial polypeptide expressing nucleotide sequence isolated from the Sargasso Sea
cgtaggaggtatagaagcagagtctgcaatgcttggtcaaccaatttctattaacactccaaaagtagtaggttttaaaataaccggttctttaaaagagggggtaacagcaacagatttagttttaactattacggaaaaattaagatcgcatggagtggttggaaagtttattgaattttatggaccaagtttggcaaacctaactctagctgatagagcaacaatatctaatatggcacccgagtatggagccacttgtggatattttcctactgatgaagaaacacttaaatatttaaaattatcaggaaaagaaacacatcagatagaactcatctctgagtatactaaactacaaaaattatggcattatagtaaccaggaaagtaaatatgatgatataattaattttgtactaaacgatgttactccgtcggtatctggtccaaaaagacctcaagacagaatatcattaaaagatgttccgccttcatttaaaaaaatgatcaacaacaatgttaaagataaaagaataaaaaatgaaataatttcaggggacattgttattgcagcaattactagctgtaccaatacttcaaaccctaatgttatgattgcagcaggtttggttgcaaaaaaagcttttgagttaggattaaaagtaaaaccttgggttaaaactagtttggcacctggcagtaaggtagtaagtgattatttagataagtccgatttatctaaatatcttaatgcattaggttttcgcctggtcggatatggttgcactacatgcattggtaattctggatcacttaatcaagaaatttctaatcaaatcaaa

SEQ ID NO: 282424 - DNA, 649 bp, Unknown
  Bacterial polypeptide expressing nucleotide sequence isolated from the Sargasso Sea
catttctcctgctggatcaattcaaaaagaaagcccaacaggagaatattttatgaaaaatcaaatattaacaaaagattacaattcatatggtgcaagaagagggaatcatgaagtaatgatgagaggtacatttgcaaatattagaataagaaatgaaattgctcctgaaacagaaggaggttttacaaaattatatccagaagaaaaaataatgccggtatatgatgctgttgtagaatacaaaagaagaggagttgatttggtagttgtaggtggaaaagaatatggaactggatcatcaagagactgggctgctaaaggaacaaaacttttgggaataaaagcaatattagctgaaagttttgaaagaatacatagatcaaatttaattggaatgggagtcttgccattacaatttattgataaaatgaatagaaaaaacttaaatctaaatggctctgaattaattagcattctaaaaattgaaaaaggattaaaaccgagcgatcatttagatgttgaaattaaatatcaatcaggagagctaaaaaaaattaaaatgttatgtcgaatagataccaaaaatgaattagaatattataaaaatggtggaatcttgcaatatgttttaaggaaaatgatataa

SEQ ID NO: 282425 - DNA, 406 bp, Unknown
  Bacterial polypeptide expressing nucleotide sequence isolated from the Sargasso Sea
cattctgttcccttagttgtgttagctggcaaagagtatggtactggttcatctcgagactgggcagctaaaggtaccaagcttttaggaattagagccataatagcagaatcatttgaaagaattcatagatctaatttgataggaatgggagttttgccgtttgagtttacagaaggtcaaactcgtataaatttatcaatcgagggagatgaaaaaatttcaattttgggaataagccaaattgctccaaataaaataattgagtgtactatatcaggaaaggatttttctaaaaaaataaaattaagatgtagaatagatacaataaaagagcttgaatattttaaagctggaggcattttgcagtatgttcttaactcaattattgacaaagcttcttaaa

SEQ ID NO: 282426 - DNA, 745 bp, Unknown
  Bacterial polypeptide expressing nucleotide sequence isolated from the Sargasso Sea
tatggattacaagagcgatataaattgcaagaataaagatttcacgatatataatatctcaaaatcacaaatcgcacacctaccttattcattaagagtgttatttgaaaattatgttagaaataactcgtctaaactatctcagagcgtaattgataattttatttcttggagcggagatattaccacaccaacggaactatcattttatcctagcagagttattatgcaggatttcactggtgttccagctgttgttgatcttgcatcgatgagagatgctgtaaaaaaatctaatggcaatccatcattaataaatccacagtgccagacagacttggtgattgatcactctgttatggttgatcatcatggaagtgaaaaatctatggaacttaacacaaaactagaatattccaggaactctgagaggtatcgtctgcttaaatggggacaaaaggcattcaaaaactttagaatcgtgccacccagtaacggtatcatacatcaaataaatattgaattcatatcacaagttgtctttgaaaaaaatcggaacctttatcctgatactgtagttggcacagactcacataccacgatggtaaatggacttggtgtgttaggctggggtgtaggaggcattgaggctgaagcagctatgcttggacagcctattcctatgcttttaccagaagttattggatttagactagatggacagctagctaaaacatctacagct

SEQ ID NO: 282427 - DNA, 485 bp, Unknown
  Bacterial polypeptide expressing nucleotide sequence isolated from the Sargasso Sea
tcctggtactgaagggggatttacaaaactttatccagaaaataaagtcatgccagtttatgatgcggtcgtagaatataaaaaaagaggtacagatttagttgtaataggaggcaaagaatatgggactggttcctcaagagattgggcggcaaaaggcactaaattattaggaattaaagttgttatagcagaaagttttgaaaggatacatagatctaatcttataggtatgggaattttaccattacaatttactgatggatttaatagaaataaattaaatttaataggttctgagttgataactattttggacttcgaaaaaggagttaatccaacagataaagttaaggtagaatttaagtatgctactggagatacgaaaattatagaaacaatttgcagaatagatacaaagaacgagcttgaatattataaaaatggaggaatactccaatatgttcttagaaacatgatatgaa

SEQ ID NO: 282428 - DNA, 769 bp, Unknown
  Bacterial polypeptide expressing nucleotide sequence isolated from the Sargasso Sea
gtgatcccgccgggcaacggcatcatgcaccagatcaatctggagaaaatgtccccggtgattcaagtgcgtgacggtgtggccttcccggatacctgtgtcggtaccgacagccatacgcctcacgtagacgccctgggtgtgatcgccatcggcgtcggtggcctggaagccgagagcgtgatgctcggccgcgcgtcgtggatgcgcctgccggaaagcgtgggcgtggaattgaccggcaagctgcaaccgggcatcaccgccaccgatatggtgctggcgctcaccgaattcctgcgccagcaaaaggtggtcggcgcctggctggagttcttcggcgaaggggcctcggcactgaccttgggtgaccgtgccaccatctccaacatggccccggagtacggcgccaccgccgcgatgttctacatcgacgcgcaaaccatcgcttacctcaaactcaccggccgcgaagacgaacaagtcgccttggtcgagcaatacgcacgtcacaccggcctgtgggcggacgacttgaaaggcgcgcagtacgagcgcagcctgagcttcgacctctccagcgtcgtgcgcaacatggccggcccgagcaacccccatgcccgcctggccacccgcgacctggcgtcaaaaggcattgccggccaatgggatgacgtgccggggcaaatgcccgacggcgcggtgatcatcgctgccatcaccagttgcaccaacaccagcaacccgcggaacgtgattgccgccggcc

SEQ ID NO: 282429 - DNA, 791 bp, Unknown
  Bacterial polypeptide expressing nucleotide sequence isolated from the Sargasso Sea
tatgaaaccaggaacaaaaaattcttttaattcattatcagaaattcagatcaatgacaaaaggtataaaattttttctctatcgaaagctgaagctaacggattaaatggtatttcaaaattaccaaaatcactaaaggttcttttggaaaatcttttaagatatgaagatgatttatcagttaatagaaaccaaattgaggcaataaaagattggcttaaagaaaaaaaatctaaaacagaaatagcttatagaccggctagagttttactacaagattacacaggaatacctgctgttgcagatttggcagcaatgcgagaagctgtaaaagaaaaaaataaagatccaaatactatcaatcctctttccgctgttgatcttgtaattgatcattctgtccaagtagaccaatcagcaaaatcagattcttttgataagaatgtagaaattgaatttaatagaaatggagaaagatattcctttttaaaatggggacaacaagcttttgataattttagaattgttcccccaggtactggtatatgccatcaagtaaatttggaatatctatctaaagtagtttggtcagcaaaatacaaagatgataattatttatttccagatactcttgttggcacagatagccatactactatggttaatggtttatcagttttaggttggggtgtaggaggcattgaagcggaagctggtatgttaggtcaaccaatatcaatgttaattccagaggtaataggatttgaggtaaaaaataaaatgcccgaag

SEQ ID NO: 282430 - DNA, 975 bp, Unknown
  Bacterial polypeptide expressing nucleotide sequence isolated from the Sargasso Sea
tcaaacttgaccaatgtggttggtccacacactccggatcttgttagaccaatattaaaactagctgatgatgtgaagaagaatgattatcttgataacatttctgttgcattgattggaagctgtacaaattcttcgtatgaggatatgtctagagcagcaagccttgcaaagcaagcgcaatcaaagggaatcaaagcaaagattccgttacttgtaactcctggatctgagcaaattagggctaccatagagagagacggtcagattgacttgctgaaatcaattggtgctacagttctcgcaaacgcttgtggtccttgcattggacagtggtctagaccagaactgaagaaaggagagcaaaacaccatagttacatcgtataatcgtaattttccaggcaggaatgatggtaagcgggaaacaatgaacttcattgcaagccctgaattggtaattgcattagcgttaggcggaaatctttcttttaatccattagatgattccctcactagttctgatggaaagacgttcaagcttgatgcaccagaaaaagcgccagacgttcctgacagtggatttgtagacgctgaggatgtttacgtatctccatcagaaaaccctggttctgtacaggtgttgattgatcctaatagtgaaagattgcaaaaactagaaccatttggcgtatgggatggcaaggacttggatgagctacgtgtgatgattaaggcaaaaggaaaatgtacgacagatcatatctcgcctgctggtccttggttaagacttagaggacacttggataagttaagtgacaatctgttgctgggagctgtcaacgcattcaatgatcaggtgggtcaagccaaaaacatgcttagtaatgagattgaaagttgtgcacagattgccagacaatacaaggaaaagaagatctcctgggtcatagttggcgacaaccactatggtgag

SEQ ID NO: 282431 - DNA, 445 bp, Unknown
  Bacterial polypeptide expressing nucleotide sequence isolated from the Sargasso Sea
tatgagttccaccgatccatttgactcaatcagagaatttgagactagttctggtaagcatgcatcctatgcttcgcttcatgtattagaagaaagtgaaaatattgatctatcttcattaccgtatagtattcgaattctattggaagccgcattaagaaaatgtgatgggtttttggttactcaagaagatgtcaagagaattgcatcttggagtcctactcagtcgccagctgaaattccgtttatgcctagtagagtaatcttacaagattttacaggtgtccctgcagttgttgatattgctgcattaagagatgcaatggtggctttaggaggagatccttcgaaagtaaatccacaagttcccgtagatttagtaatcgatcatagcgttcaagtcgatatttcaggtttatttccggatgctgaggagagaaatcta

SEQ ID NO: 282432 - DNA, 625 bp, Unknown
  Bacterial polypeptide expressing nucleotide sequence isolated from the Sargasso Sea
cccgcaggtgattatttaaaaagtaaatcagtaaagattcatgattttaattcctttggcgctagaagaggtaatcatgaagtaatgatgagaggtaccttttcaaacatcaggatcaaaaatgaaatgcttgatggcattgaaggaggatacacaaaacactatccatctaaaaaacagatgtcaatttttgatgcagcaataaaatacaaaaaagagaataaaccactgatcatattttctggaaaagattatggcatgggttcatctagggattgggctgcaaaaggaacaaatttacttggtgtaaaagcagttgtagccgagtcttatgagcgtattcatagatcaaatcttgtgggaatgggagttttaccacttcaattttataaaggacaaaatcgtaaatctctcaagctaactggttctgaaataatctctattgctggtctagataacgaaataactccaaatatgatattgccaatgacaattaaatactcatcaggaaaaatatttgagacaaaagttaattgtttaattaagaccgttaatgaggttgaatatcttcaaacaggcgggatactacaatacgttttaaaaaatcttgcggaaacagcttagt

SEQ ID NO: 282433 - DNA, 895 bp, Unknown
  Bacterial polypeptide expressing nucleotide sequence isolated from the Sargasso Sea
caaccaatttcaatggttgtccctgaggtaatcggttttgaaattaaaggtaaaattaaagaaggtataactgctacagatttagttcttacaattacagaacaactaagaaaaaaaggggtagttggtaagtttgtagaattctttggcgagggacttaaagaattatctatacctgacagggctacaatttcaaatatggctcctgagtatggagcaacatgtggtttttttccaattgatgaagaaacaatcaaattcttaaaagtaagtggtagagatgaaaatggtattcagcttgtaaaaaaatacgcaaaacttcaagggctatgggaagattataaaaaaaatgacagggtttatactgataaaatgcaattaaacttgtcacacatattaccgagtcttgcaggacctaagagacctcaagataaaatagttctatcaaaagtttcaaatgaattcttgaagtcactcaaaacagagttctcacaaaaaaaacttattaatttatctaaagttaatggtgcaaaatttgaaatagaccatggtcatgtggccatagctgcaattacaagctgcactaacacatcaaacccaagtgtgatggtaggagcaggattgcttgcgaaaaaggctgccgggttaggcttaaaaactaaaccttgggtaaagacttcacttgcacctggctcaaaaattgtaactgactatttaacaaaatcagggttacaaaaatatttagatcatttaggatttcatttggttggctttggatgcacaacttgtattggaaattcgggacctcttgataaaaatatatcagataccattagtaaaaataatctcatagtaagtggtgtactatcggggaatagaaatttgaaggaagaat

SEQ ID NO: 282434 - DNA, 916 bp, Unknown
  Bacterial polypeptide expressing nucleotide sequence isolated from the Sargasso Sea
ctaattgtcgaccactctttagcggtagagcacgctggttttgaagaagacgcttttgaaaaaaatcgcgctattgaagacagacgtaacgacgaccgttttcactttattaactggacaaagacagcgtttaaaaatgtggacgttatacctccaggtaacggcattatgcaccaaatcaatttggagcgtatgtcgcctgttattgaatctcgcgatggcgtggcgttccccgacaccttagtaggaacagacagccatactcctcatgtagatgctcttggtgttattgctattggtgtgggtggacttgaagctgaaagcgtcatgcttggtcgtgcgtcgtacatgcgtctgcctgacattgtaggtgtcgagttaaccggtaagccacagcctggtattactgcaactgatatcgtactggcacttactgagttcttgcgcaagcagcgagtagtgtctgccttcttagagttttatggcgaaggtgcttcacaccttacccttggcgatcgtgctaccatttcgaatatgacgccagaatacggcgccactgccgctatgttctatatcgatcagcaaaccatcgattatttgcgccttaccggtcgtgaagaagaccaaatagccttggtagagaactacgcgaagcacacgggcttatgggctgatgatttaaaaaccgctgaatacgagcgcgtactcactttcgatttatcgtcagtaggtcgtaacatggcaggaccatctaatccacatgctcgcttggcaactagcgaccttgccagtcgcggcattgcggctaagtgggaacaagaagacgataaaatgcctgacggcgcggttatcatcgctgccattacaagctgtaccaatacgtctaacccacgcaatgtgattgctgctggtctta

SEQ ID NO: 282435 - DNA, 774 bp, Unknown
  Bacterial polypeptide expressing nucleotide sequence isolated from the Sargasso Sea
cactctaactgaaaaaatattatttagtcacctcgctgaagatgataagaatttggattacaaaaggggtgaatcttatgtctctttcagtcctgatagagttgccatgcaagatgctactgcgcagatggctttattacaatttatgatggctggtaaagataaagttgcagtaccaactacaacccattgtgatcacttaattcaagcaaaagttggtgctgagaaagatctagaaatagccaaagatattaatacagaagtttatgattttttagaatcagtatcaaataagtatggagttgggttttggaaacctggcgcaggaattattcaccaagtagttttagaaaactatgcttttcctggtggtatgatgattggaactgatagtcatactgtaaatgctggtggtttaggtatggttgcaattggtgtaggtggagctgatgcggttgatgtaatggccggtatgccatgggaattaaaatttcctaaactaataggtgttaagcttacaggaaaaatgaatggatggacttcagctaaagatgtaattttaaaattagctggtattcttactgtaaaaggtggcactggtgctattgtagaatattttggtgatggtgctgataaaatttcatgtactggtaaaggaactatttgcaatatgggtgcagaaataggtgcaacaacatcaattttctcttatgataaaaaaatgggagaatatttacgatcaactggccgaaaagaattagccttattagcaga

SEQ ID NO: 282436 - DNA, 628 bp, Unknown
  Bacterial polypeptide expressing nucleotide sequence isolated from the Sargasso Sea
tgcccttctgggcaatttttaatatccaatgatgttcctaggtctcaatttaattcttatgggtcgagaagagggaaccataacattatggctagaggcacttttggaaatatcagattgcgaaataatttagttcctgaatctgaaggggattggacgatttatcatcctgaaaataaaaagatgagaatatttgaggcatctgaaaaatataaatctgacaatacacctttaattgttattgcaggaaaagaatatggtacaggttcttcaagggattgggctgcaaaaggacctaatttattgggagtaaaacttgttattgcacatagttatgaaaggattcacagaagtaacttgatcggcatgggggtaatgcctacagaatttatggatgacgattcatttgaatcactaggattgaatgggtctgaatatttttcattcgaagaagttaatgattccacgaaaccaatggctacattaaaagtaaatgcccgaagagatgttaattttgatataaattttaatgttaaattaagaattgacactgaggttgaaaaaaaatatcttttaaatggaggtgttttgcaatttgttcttagaaatatgttccaaaatagctagt

SEQ ID NO: 282437 - DNA, 785 bp, Unknown
  Bacterial polypeptide expressing nucleotide sequence isolated from the Sargasso Sea
gcgcaccgaactggcagacgcctacggcaaggcggacgaactgaacgcgcgcgtgcccgttaacggcgcggacttcacgcttggccatggcgacatcgccatcgctgcgatcaccagttgcactaacacctccaatccctcggtacttgtcgcggcaggtctgctcgctcgcaaggcgcgggcgcggggtctggtgcccaaaccctgggtgcgtgcgacgctctctcccggcagcaaggtggtgaccgactatcttgtccgctccggccttcaggaagaccttgatgcgctgggcttcgcgctgaccggctatggttgcatgacctgcattggcaattccggttcgctggaaacgtctatcagcgaggcgatcaatcgaaacggccttgtcactgctgccgtgctatcgggcaatcgcaactttgaaggccgtatttcacccgatgttcgcgccaactatctggcctcgccgccgctggtagtcgcctacgccctgctgggtagcgtgtcgcgcgacattagcaccgaaccgctcggcaatggcgcggacggacagccagtatatctgcgcgacgtctggccatccaacgccgaggttgccgccactatcgccacttcgatcgatcctgagatgttcgccgcccgctatgccgatgtttacgaaggcgacgcgcgctggagggcgctggcggtcaaaaaaggcgctacatatgaatggccgacgtcctccacctacatcgcggaaccgcccttcttcgaagccctggatcgtcagcctgcgccgg

SEQ ID NO: 282438 - DNA, 382 bp, Unknown
  Bacterial polypeptide expressing nucleotide sequence isolated from the Sargasso Sea
tggtggaaaagaatatggaactggttcttcaagagattgggcagcaaagggaacaaaactattaggtgtaaaagctgtaattgcagaaagctttgaaagaatacacagatctaatcttattggcatgggagttttacctttgcagtttgtggaaaatatgaacagacagaatttaaacctaaaagggtcagaattaatttcagtattaggtcttgagaaaggaattaatcctggcgatcatttagaagttgaaattaaatatgcaacaggggacattaaaaaaattaaaatgttatgcagaatagatactaaaaatgaattagaatactacaagaatggtggtattcttcaatatgttttaaggaatatgattaatggatga

SEQ ID NO: 282439 - DNA, 439 bp, Unknown
  Bacterial polypeptide expressing nucleotide sequence isolated from the Sargasso Sea
agcaaattatttagcatcgcctcctttagtagttgcttatgctttagcaggacatatggaagttgatttgataaaagatcctttaggtaaaaataatgatggaaaagatatttatcttaaagatatttggcctactaataaagaaatagaggagactttaagcaaatctctaaatccagatatgtttgtaaaaagatattcgaatgtttctttgggtccagctcaatggcaaaaaattaaaactgaaaaaagtagtatttataattgggatgaaagttctacttatgttaaaagaccgcctttctttgactcgttaccagaaaaacctgaaggatttaaagagattaaggatgctcgaccattattaattttaggggacatggttaccactgatcatatttctcctgcaggatctatccaaaaagatagtccaacagga

SEQ ID NO: 282440 - DNA, 858 bp, Unknown
  Bacterial polypeptide expressing nucleotide sequence isolated from the Sargasso Sea
gctgttcccacaaccgttcattgcgatcatttaattcaggcaaaagtaggtgctgaacaagatttgatcaatgccaaacagtcgaattctgaggtatataattttcttgaatctgtttccaaaaaatatggtattggtttctgggaacctggtgctggcatcattcatcaagttgttttagaaaattatgcatttcctggtggaatgatggttggcacagatagtcataccgtaaacgctgggggactgggtatggttgccattggagttggaggtgcagatgctgttgatgtaatggttggaatgccatgggagttaaagtttccaaagctcattggtgtttgtctcaaaggtgagcttagtggatgggtttctgcaaaagatgttattctgaaggtagcaggcatattaacagtaaaaggcggtactggttctatagtagaatactttggtccaggagcggacaagttatcttgtactgggaagggaacgatatgcaacatgggtgcagagataggtgctacaacctcaatcttttcttacgatcaaaatatgtccaactatcttcgatccactgatagacatgagcttgctgaccttgcagatcaaaacgctgattatttatgcggagataaagaagtctacaataatcctgaaaaatattttgatgaggttataactatagatcttgatactttagagcctcacattaatggtccattcactccagatctagctacaccaatatcaaaatttgcagagtcggctaaagaaaatggttggccgttaaagctagatgtaggtttaataggttcttgcacaaattcttcttatgaggatattaccagagcagcatca

SEQ ID NO: 282441 - DNA, 835 bp, Unknown
  Bacterial polypeptide expressing nucleotide sequence isolated from the Sargasso Sea
tggattttttccaattgactcacttaccattgagtatctaaaaatgactggcaaagatgaagaacatttaaaaattgttgataattacagtaaagagtgcggattttttagagatgatagtcaaaatataaaatatacagatactctatctctagatatgagtaaagtgcaagcttgtttatctggacctaaaaggccccaagatagggtgctgttatctgatgtaaagaaaatctctgagaaagagattagcaatctcaaaaaaacagaaaaaacaactggagtcataaatgatggtgatatattgattgctgcaataacaagctgtactaatacatcaaatccaagcgtcataataggcgcaggacttttagctaaaaatgcaatcgaaaagggtttgtccacaaaagattgggttaaaacatctctagcgcctggatcaagggttgttgaaaattatttaaaaaaggcagaccttttggattctctcaaccaactaggttttaacattgttgggtacggatgtacaacatgtattggtaattcaggaccattagatgaaaagtatgtaaaggaaattaatgacagagatcttgttgttagttctattttatcaggtaacagaaactttgagggaagaatacatcctgagattaagatgaacttcttagctagtccaatgcttgttgttgcatattctcttgttggaaaaatcaatgttgatatcaatcaaacaatacttggacaagacgcaaatggtgtagatgtgtatctcaaagacatatggccttcaaatagcgagataaacgatgtcatggcaaaaactatcgatggt

SEQ ID NO: 282442 - DNA, 833 bp, Unknown
  Bacterial polypeptide expressing nucleotide sequence isolated from the Sargasso Sea
gtcacttgcggatagatcaactatttcaaatatggcgccagaatatggagcaacttgtggttttttttcaacagatcaagaaactttaaattatttagagttatctggaaaggatgaacatcaattaaaaattgttaaagaatacaccaaggttcaaaaactttggattgaagatgattataatccctcttttgatgaaactttatatttagatttagatacaattgatgcatctgtggcaggaccaaagcgtccacaagataaaatatttgtcagagatataccaaaagtttttaataaaataaataactcagcttttaacatccaagataatagaaaagaaatgcaatcaggagatattgtaattgcagcaattactagctgcacaaatacatcaaacccaaatgttatgattgcagcaggattagttgctaaaaatgctgtagagttaggtttaaaagttaaaccatgggtgaaaacaagcctagcaccaggcagtaaagttgtaagtgattacttagaaaaagcagatctatctaactttttaaatgaaattggtttcaatttagtaggttatggttgcacaacctgtattggtaattctggtccattaaatgaatgggtctccaaagaaataaaaaacaaaaatttaactgtttgttctgttttatctggaaatagaaactttgaaggtcgtgttcatcaagaagtaaaagctaattttctcgcttcaccacccttagttgttgcttttgcaatcgctggaaacatgaatataaatttgtttgatgatccaattggaataagcaaatatggagaagaggttttttaaa

SEQ ID NO: 282443 - DNA, 485 bp, Unknown
  Bacterial polypeptide expressing nucleotide sequence isolated from the Sargasso Sea
tcctggaacagaaggaggttttaccaaattataccctgaaggaaaaataatgagtatttacgaagcagctatggaatataaaaaaagaggaaacgatctagttgtaattgctggtaaagaatatggagcgggatcttctagggattgggcagcaaaaggtaccaaattgttaggggtaaaagcagtaatcgtagaaagttttgaaagaattcacagatcaaacttaatcggaatgggaatactaccacttcaatttaagcatggttttaatagaaaaaaactaaatcttaaaggatctgaactttttactattttgggtatggaaaaaggcataactccaggtcaagaagtagaatgcgaaattaagtacgataatggagtagctaaaaagattaatttgctttccagaatcgatacggcaaatgaagttgaatattataaaaatgacggaatattaaaatacgttttaagaagcatgttataat

SEQ ID NO: 282444 - DNA, 562 bp, Unknown
  Bacterial polypeptide expressing nucleotide sequence isolated from the Sargasso Sea
atgggccttaaaactttaaatgaatatagctactttagtattgaagaggttttgtctgcttcagaaataatcaaacttccgtactctgtaagaatattattggaaaatatgattagggttcataattttaatttaggtacgcaagatgatattaaaaatgtgtcatcctggactcctgtctcaataagccaaaaggaaattccattccttccgtctagggtagtattacaagactttactggagttcctgctgttgtagatttggcaacaatgcgagatgcagcaaaaaatttaggttttagtccacaaaaagttaatccgcttgttaggtcagacttagtaatagaccattctattcaagtagatttttataaaacctcagaagcattgcaaaaaaatactgaaattgaatttagaagaaatattgaaagatataaattcctgaaatggggccagcaagcttttgataatcttagaataatccctccgggtgtaggtatagtgcatcaagttaacttagagtatctagctcctaggtattttagaaatcgaaaaagataat

SEQ ID NO: 282445 - DNA, 681 bp, Unknown
  Bacterial polypeptide expressing nucleotide sequence isolated from the Sargasso Sea
tatgaaaccaggaaataaaaactcttataaatcacttacctcgattatcattaatgaaaaagaatataattatttttctttaaaaattgcagaaaaaaatggtttaaaaggtatagaaaaattaccaaaatcattaaaagttcttttagaaaacttactaagatacgaagatggtactacagtaacaaaaaatcaaattcttgctttgcaaaaatggttaaaagacaaaaaatctgagacagaaattgcgtatagacctgctagagtacttttacaagactatacaggaatacctgcggttgcagatttagctgctatgcgtgaggctgtaaaagaaaaaaataaagatccacaaataatcaatccattgtcttctgttgacttagtaattgaccattcagtgcaagtagataagttttcaacgccagactcattaaaaaagaatgttgaaattgaattccagagaaacgctgagagatattcttttttaaagtggggacaacaagcttttgataattttagaatagttccaccagggactggaatatgtcatcaagttaatcttgagtatctttccaaagtagtatggaaagaaaaatttaaagataaagattatatttttccagatactttagtaggaactgatagccataccactatggtaaatggtttgtctgttct

SEQ ID NO: 282446 - DNA, 408 bp, Unknown
  Bacterial polypeptide expressing nucleotide sequence isolated from the Sargasso Sea
aaaaaagaaaaaatgatttaatagttgttgctggaaaagaatatggaactggatcttcaagagactgggcagctaagggaactaaattacttggaataaaagctgtgttagccgaaagttttgagagaattcatagatcaaatcttgttggaatgggtgtcttaccacttcaatttaaagatggatacgatcgaaagaaacttaaaattatgggctctgaacttgtaacagttatcgatattgagaagggtgtaaaaccaagatcagaagtgatttgtgaaattaaatataaaaatggtacagcaaaaaaaataaatttacttagtagaattgatacagaaaatgaaatagaatattataaaaatggtggtatacttcaatacgttcttcgtaatatgttaaattaat

SEQ ID NO: 282447 - DNA, 673 bp, Unknown
  Bacterial polypeptide expressing nucleotide sequence isolated from the Sargasso Sea
gaaggggtaacggcgacggacctggttctgaggattgtagaaatgttgcgtcagaaaggagtggtagagaaattcgtcgagtttttcgggatcggactttctgcgctgcctcttgcggaccgtgccaccgtggccaacatggctccggaatatggtgcaacaatgggatttttcccgatcgattctgaaaccctgaattacctgagaaataccggtcggccggaagaattggtgcaaagggttgagatttattccaaagaacagggactgttccgaaccgaatccactcccgatccggaatacagtgactttctcgaattggacctggagagtgtcgaaccctctcttgcaggaccgaaacgtccccaggatcgggttccactgaactcaatgcatagtacatggaagaagacccttcaggccccgatgaaggaacgtggttttgaactcgaatcttcacagcttgaatcctcggtaaatttgaaagatacggggtcttcactcaaacatggttcagtcgtgattgctgccatcacctcctgcaccaataccagtaatccttccgtgatgatggccgcaggattgctcgcagaaaaatgcggtggaaagaggactacgtcccaaaaattgggtgaaaacttctctcggtccgggatccagagtggtaactgat

SEQ ID NO: 282448 - DNA, 972 bp, Unknown
  Bacterial polypeptide expressing nucleotide sequence isolated from the Sargasso Sea
ggaccacatactcctgatctagcacggccaatctctggattaaaagaagatgcaaacgcaaatgactatccacttaagatttctagtgcattgattggatcatgtacaaactcatcctatgaagatattggaagagctgcatttattgcgagagaagctgcaaagcatggtttaaaagcaaaggttcctttaatggttactcctggatctgaacaaacaagagccacgattgagcgagatggctatcttaaagatctggaggctatcggtgcaacagtcctagcaaatgcatgcggtccttgtattggtcaatggaaaagagatgacataaaagaaggagagagtaattcaattgtttcatcctttaatagaaacttccctgcaagaaatgatggaaacgcagaaacattatcatttattggatctcctgaaacagtaataggacttgcccttggtggcacactagatttcaactttcttgacgatacattaataagtaaagatggagaagagataaccctcaacccaccaattgccgatgagttacctgataaaggatttgaagagactttagagggatttattcaacctacaccaggtgacgatgtagaggtggtaattgaccctgaatcaaatagattacaaagactaactccttttgaagcacctaatgagagtgaatacgaatcaatgagtgtattaatgaaagcagaaggaaaatgtacaactgatcatatatcaccggccggtaagtggttgcaattcagaggtcaccttgaaaacatttctcaaaacttatttaatggagtaaataatgctttcgcagaaaatgctggcgatggagtaaatgttttaacaaaagaagttgataccttaccaaacattgcaaaaaattatcatgctgagaatgttagctgggttgcagtaggcgatgaaaactatggagagggatcttcaagagagcatgcagca

SEQ ID NO: 282449 - DNA, 604 bp, Unknown
  Bacterial polypeptide expressing nucleotide sequence isolated from the Sargasso Sea
tatgaaacatcaaattcaacaaaaagattttaattcttatggtgctagacgaggaaatcatgaagtaatgatgagaggaacttttggaaacattaaaattagaaatgaaatggcaccaggtactgaaggtggatttacaacgcttcaaccagatggaaaagtaatgagcgtttatgaagctgcaatggaatacaaaaaaagaaacaatgatttggttgtaatagctggtaaagaatacggaacaggttcgtcaagagactgggcagctaaaggaactaaacttttaggaattaaagctgttttagcagagagttttgagagaattcatagatcaaatttaattggaatgggagttttacctcttcaattcaaagaaggttttgaccgtaaaaaattaaatattacaggagcagaattagtttcagttattgatattgataaaggtgtaaagccaaggcaagaagtaacttgtgagattaaatatcaagatggaactagtaaaaaaattcaaatgctttgtagaattgatactgctaatgaagttgagtattataagaacggaggaattttgcagtatgttttaagaaatatgcttgctaattaa

SEQ ID NO: 282450 - DNA, 741 bp, Unknown
  Bacterial polypeptide expressing nucleotide sequence isolated from the Sargasso Sea
tatgaagataaatagcaaagattcatttaaatctttaaaaaaattacaagtagataataaaatttataatatatttagtctcaaggaagctgaaagaaatggactagagggtatttcaaaattacccaaatcaataaaagttttacttgaaaatttactaagatttgaagacgaaaaatcagttaagaaagaacaaattttatctaccaaatctcagttagataaaaaaaattcaaaaactgaaattgcttttagacctaccagagttctcatgcaagattacactggcataccagcagtagctgatcttgcagctatgcgtgatgcagttaaatcaaaaaaaaaagatccaaaaaaaataaatcctttatcaacagttgatttagttattgatcattctgtaatggtagatacttatgcttcaaaagattcttttaaaaaaaatgttgaaaaagaatttttaagaaatgaggagcgttattcttttttaaaatgggggcagcaagcttttaataattttagagttgtcccaccaggtgccggaatttgccatcaagttaatttagaatatttatcaaaggttgtttggtcatctgatggttttgcttatccagatacgcttgtaggtacagacagtcatacaaccatggttaatggcctttcggttcttggttggggagtcggtggaattgaagctgaggcagcaatgctgggccaaccaatatcaatgttaattccaga

SEQ ID NO: 282451 - DNA, 703 bp, Unknown
  Bacterial polypeptide expressing nucleotide sequence isolated from the Sargasso Sea
taactttttagaatcagtatctaataaatatggaattggcttttgggagcctggtgcgggtataattcatcaagtcattcttgaaaattatgcttttccaggaggtatgatgatagggactgatagtcatactgttaacgcaggaggtttaggtatgattgccatcggtgttggtggagctgatgccgttgatgttatggcaggtatgccgtgggaattattatttccaaagttaattgggataaaacttacaggtgaattaaacgggtggacatcctctaaagatgtgatacttaaggttgcaggattgctatctgtaaaaggaggaacaggtgctattattgagtactttggttcaggcgccaagaatctttcttgtactggaaaaggaacaatatgcaatatgggagcagaaataggtgctacaacatctgtttttgcatatgatgaaaatatggctaagtatcttcaagcaactggtcgttcagaagttgtagaattagctgataattatagagattatttacaagctgatatggaagtatatgctgaaccagaatcttattttgatcaagttatagagataaatctatctgaactggagcctcatttaaatggtccatttactcctgatttagcaacacctatatctcagatgactaaagtcgcaaaaaagaataattggccaactaaaattgaagtt

SEQ ID NO: 282452 - DNA, 763 bp, Unknown
  Bacterial polypeptide expressing nucleotide sequence isolated from the Sargasso Sea
aactattgaaagagatggttatttgaaagatttagaggatattggagcagtagtgttagcaaatgcttgcggcccatgcattggtcaatggaaaagagatgatattaaagagggcgagagcaactcaatagtttcttcatttaatagaaactttcctgcacgtaatgatggaaatgctgagacattatcttttattggttctccagaatcagttatagggctagcccttggaggaagattagattttaatttcttgagtgacacaataactgatgaagaaggtaatgaaatctcattaagtccaccagttgcggaggaattaccagaatctggttttgaaacaactcttgaaggctttattcaaccagatgatggggaagtagagataattattgatcctgaatcaaacagattacaagcactagttccatttagtcctttcgaagataaaaattatcactcaatgacagtattaatgaaagcaagtggtaaatgtacaacggaccatatttccccagctggaaaatggttgcaattcagaggtcatttagaaaatatctcgcagaacttatttataggagttaataatgcattcactgaaaatgcaggtgaaggtataaatcagttagataattcgactatgtccttaccggatattgcaaaatcatatcatgaagagggcataaactggatagcagttggtgatgaaaattatggtgaaggttcatcaagggaacatgcagcaatggaaccaaggtttaga

SEQ ID NO: 282453 - DNA, 379 bp, Unknown
  Bacterial polypeptide expressing nucleotide sequence isolated from the Sargasso Sea
gttgcgggcaaagaatacggtacgggttccagccgcgactgggctgccaagggcaccaacctgctcggcgctaaagcggtcatcgctgaaagctacgaacggattcatcgctccaatctgattggcatgggcgtgcttccgctgcaattcccagaaggtactgaccgcaaaacgctcaacctggacggcacggaagaggtggatattccagacctgaacaataacctaaaacccggcgacaccatcaccgtgatattccgtcgcgatggcaaggagcagaaagtggcggccatctctcgcctggataccgcagcggaagtggagtattacaagaatggcggcatcctccattacgtgttgagacagatgatgcagtaga

SEQ ID NO: 282454 - DNA, 856 bp, Unknown
  Bacterial polypeptide expressing nucleotide sequence isolated from the Sargasso Sea
ggttgcaggacctaagagaccacaagataaaattttattaaaagatatttccaaatcatttaaaaatttagatccaacacctattattaaaaacaaacccgtaaatcaaattcagtcaggagatatcgtaatagctgcaattactagttgtacaaacacatcaaacccttttgttatgattgctgcaggtttagttgcaaaaaaggctatagcgtttggattaaatgttaaaccgtgggtaaaaactagtttatctcctgggagtaaagtagttagtgattatttagatatttcaggtttaacaagcaatttaaataaaataggttttaatcttgtaggctatggatgcactacttgtataggaaactctggcccacttaaagattggatttcaaaagaaataaaaaacaaagatttatcagtttgttcaatattatctggtaaccgtaattttgaaggcaggattcatcaagaggttaaggctaattatcttgcatctcctccattagtgatcgcatatgcattggttggaaatattaatattaatatacaaaatgatccaattgggaaatccattgatggtaaaaatatttttctaagagatatatggccatctacaaaagaaataaataaagtgttagaagattcaatttcttcagaattatttacaaaaagatatagtgaaatttaccaaggtgatgaaaattggaaatcaattaaaagtataaaaaacacaacatacgattggaagccatcaagcacttatattaagcaccctcctttttttgaaaaatctacttctaaaaatttaattgatctaacagatgcaagaatattagtcatgttaggtgatagt

SEQ ID NO: 282455 - DNA, 954 bp, Unknown
  Bacterial polypeptide expressing nucleotide sequence isolated from the Sargasso Sea
ggctgaagctgcgatgctggggcaaccgattccaatgttacttccagaagttattggatttgaactcactggagagctcggacagacaactactgcaactgacctggttcttacaattgtgcagatgcttcgcgaaaagaatgttgtaggtaagtttgttgaattttatggctcaggtttagacagtttaacaattgcagacagatgcacaatatcgaatatggcacctgaatatggagcaacctgtggattttttccaattgactcacttaccattgagtatctaaaaatgactggcaaagatgaagaacatttaaaaattgttgataattacagtaaagagtgtggattttttagagatgatagtcaaaatataaaatatacagatactctatctctagatatgagtaaagtacaagcttgtttatctggacctaaaaggccccaagatagggtgctgttatctgatgtaaagaaaatctctgagaaagagattagcaatctcaaaaaaacagaaaaaacagatggaatcataaatgatggagatatattgattgctgcaataacaagctgtactaatacatcaaatccaagcgtcataataggtgcaggccttttagctaaaaatgcaattcaaaagggtttatccacaaaagattgggtaaaaacatctctagctcctggatcaagggttgttgaaaattatttaaaaaaggcagaccttttggattctctcaaccaattaggtttcaacattgtcgggtacggatgcacaacatgtattggtaattcaggaccattagatgaaaagtatgtaaaagaaattaatgacagagatcttgttgttagttctattttatcaggtaacagaaactttgagggaagaatacatcctgagattaagatgaacttcttagctagtccaatgctttgtgttgcatattctcttgttgg

SEQ ID NO: 282456 - DNA, 625 bp, Unknown
  Bacterial polypeptide expressing nucleotide sequence isolated from the Sargasso Sea
ggtttatctgttttgggatggggagttggtggaattgaagctgaagcaggaatgttgggacaacctatttcaatgttaattccagaagtaatgggatttgagataacaaataaacttcctgaaggaactacagctaccgatttagttttaacagttgtgaaaatgttgagagataaaggagttgttggaaaatttgtagagttttatgggaaaggtttaaaaaatttaacattagcagatagagcaacaatagccaacatggctcccgaatatggcgccacttgtggtttttttccaatcgataacgaaactttaaaatatttaaagttctcaggaagagatagccaaataatagatattgttgaaacttatgcaaaagagcaaggtctttgggaaagtagagatattatatttactgatagtttatcattagatatgtcaacagttgtcccaacaatatctggacctaagagaccccaagataaggttctactaacagcggctgcaaaaaattttaaaaaagtatttgaggaatcttcaaaaaaaaatagtctaaccgtttcgaaagtcgaaaatgaaaagttttcaattaaagatggggatattttaattgcagcaataactt

SEQ ID NO: 282457 - DNA, 695 bp, Unknown
  Bacterial polypeptide expressing nucleotide sequence isolated from the Sargasso Sea
tatgggagctgtgataccagctatttcgggtcctaaaaggcctcaagatcatttagatctccgaaaagccaaggatgcatttcatttggaaatgaaaaataattttaagcgccctgtagataaattagtaaaggtaaaggggcaagatttttctttgtcctctggtaaagtggtcatagcgtccataacttcctgcacaaatacttctaatccctttgttatggtggcagcaggactggttgctcggaaggcaaggcaattgggtttgaaaagtaaaccttgggtaaaaacttctttagctcctggaagtaaggtggttagcgattatctttccaggtcaaatttacaagaagatttagattgtattgggtttaacctagttggatatgggtgtactacttgtattggcaactcaggtccgttatctccagaaatatcagatgccatacatagtggtgacctagtggtaacatcagttctttctggaaatagaaattttgaaggtagaattagtcctgacattagggctaactatttagcctcaccacctttggtagttatatactctctatgcggtgatatgaatattgatgtgacttcagaaccgcttgcagtttccgaaggtggaaaagagatatttctgaaggacctttggccaacttctgaagaagtaaacaatgtgattaaagcctgtg

SEQ ID NO: 282458 - DNA, 425 bp, Unknown
  Bacterial polypeptide expressing nucleotide sequence isolated from the Sargasso Sea
tgatgctgtagtagaatataagaaaagagaaatcgatttggttgttatggagcaaggggaatatggaacaggatcttctagagactgggctgctaaaggaactaagcttttaggagtaaaaatggtaattgccgagagttttgaaagaatacatagatcaaatttagttggaatgggaatattgccattgcaatttatagataatattaatagaaaaaacttaaatttattaggatctgaattaattagtgttattgatattgaaaatggaataaatcctggagataaagttgaagtacaatttaaatatcaatcaggagatattaaaaaaattaaaatgttatgcagaatagatactaaaaacgaattagaatattataaaaacggtggaattttacaatatgtattaaggaaaatgatataat

SEQ ID NO: 282459 - DNA, 818 bp, Unknown
  Bacterial polypeptide expressing nucleotide sequence isolated from the Sargasso Sea
tatgaaacctggaaacaaaaattcttttaactctttaaagtctattaatataaatggattgaattataactattattccattgccgaagctgaaaagaatggactttatggggtttccaaacttccaaaatcaataaaagtattattagaaaatttattaagatacgaggatggcaaaactgttacgaaaaatcaaatagaagcaataaaggaatggctaaataaaaaaaaatcaaatactgagattgcatatagacctgcaagaatcttgctacaagactatacagggattccagctgttgctgatttagctgcaatgagagatgcagtaaaagaaaaaaataaggatccaaactcaataaaccctctttcacaagttgatttagttattgatcattctgttcaagttgaccagtatgcaaaaaaagattctttagaaaaaaatgttgaaattgaatttaaaagaaatggagaaagatattccttcttaaaatggggacagcaagcatttaataattttagaatcgtacctcctggaacaggaatttgccatcaagttaatttagaatatctttcaaaagttgtatggtctgaaaaacataatgcaaaggagtatttatttcctgatactttggtaggaacagacagccatactacaatggtaaacggtttgtcagtactcggatggggtgtagggggaatcgaagcagaagcaggaatgttaggacagccaatttcaatgcttataccagaagtaattggatttaaatttacaaacaaactatcagaaggaaccactgccacagacttagttctaa

SEQ ID NO: 282460 - DNA, 596 bp, Unknown
  Bacterial polypeptide expressing nucleotide sequence isolated from the Sargasso Sea
accaatctcaatggtagttcctgaatttattggttttgagataaagggaaaaatcaaagaaggaatcacagctacagacttagtcttaacaattactgagaaactaagaaaaaaaggggtggttggtaagtttgttgaattttatggaaaaggactgaaagatctatcagttccagaccgagcaacaatttcaaatatggcgccagaatatggagcaacatgtggttttttcccaactgatgaggaaacaattaaatttttgaaagttagtggtagacctatagaagaaattagacttgtagagaaatattctaaaattcaaggtttttgggaagactataaagagaataaaagagtgtatacagaaactatgaaattagatttgtcttgcattgagcccagtttggcaggacctaaaagacctcaagataaaattttgttaactaatgtagcaaataaatttgtaagctcttttgaaaatgaatttggtaatagcaaagtagaaaacccttcttctgtaaaaaatgaaaaattcaaaattgataacgggcatgtcgtaattgctgcaattacgagctgtacaaatacttctaacc

SEQ ID NO: 282461 - DNA, 817 bp, Unknown
  Bacterial polypeptide expressing nucleotide sequence isolated from the Sargasso Sea
atgaaaccaggtacaaaaaattcttacagatctctatcagaccttatggtggatggaaaaaattttaaattttattcactttccaaggctgaaagcaatggccttgatggtatctcaaaattacccaaatctttaaaagtactattagaaaatcttttaagatatgaagacgatttaactgtcacaaaaaatcaaatagaggctataaaaatttggttaaaagataaaaaatcaaaaactgaaattgcatatagacctgcaagagttttattacaagattatactggtattcctgctgtagcagatttagctgcaatgcgtgaggcagtaaaagaaaaaaataaagacccaaatacaattaatccactttctgcagtggacttagtcatagatcattctgttcaagttgatcaatcagctaaaaaagattccttcgataaaaatgttgaaattgaatttaatagaaatggtgaaaggtattcttttttaaagtggggacaacaagcttttaataattttagaattgttccacctggaacaggaatatgtcatcaagttaatctagagtatttatccaaagtagtatggtctgaggattttaacaatgaaagttatctttttccagatactttagtcggtacagatagtcataccactatggtaaatggactatctgttttaggctggggtgtaggaggcattgaagcagaggcaggaatgttaggccaacctatttcgatgttaattccagaagtaattggttttgaagttaaagataaaatgcctgaaggcacaacagctacggatttagttttaa

SEQ ID NO: 282462 - DNA, 668 bp, Unknown
  Bacterial polypeptide expressing nucleotide sequence isolated from the Sargasso Sea
tgaggatgatttatccgtaactaaagatcaaatagaagcattaaaaaactgggttaataaaaaaaaatctaatacggaaatcgcttatagaccagcaagagttttgctgcaagattatacaggaatacctgctgtcgcagacttagcagcaatgagagaggctgtaaaagaaaaaaataaagacccaaatactattaatccactttcttctgttgatttggttatagatcattcagtccaagtagaccaatctgctaaatctgattcatttgaaaaaaatgtagatatagaatttaaaagaaatggtgaaagatattcttttttaaagtggggacaacaagcttttaataattttcgaatagttcctccaggtacgggtatttgtcatcaagtaaatttggagtatctatcaaaagtagtttggtcagaaaaatataaaggagatgaatatttgtttccagacactttggttggaaccgatagccatacgaccatggttaatggattatcagttcttggttggggtgtcggtggtatagaggccgaagcaggaatgcttggacaacctatttcaatgttaattccagaagtaatcggtttcgagtttaaaaataaaatgcccgaaggcactacagctacagatttggttttaacagttgtaaaaattt

SEQ ID NO: 282463 - DNA, 919 bp, Unknown
  Bacterial polypeptide expressing nucleotide sequence isolated from the Sargasso Sea
tatggtcatattgattcagaatcagctattaattcagcaattagaggtgtctcatatgatgaatttaatcctgatagggtagcaatgcaggatgctactgcacaaatggctctattgcaatttatgatggctggtaaaagcagggttgctgttccctctaccgtccattgcgaccatttaatccaggcaaaaattggatctgacgccgatttacttagagcaaaagattcaaattcagaggtttatgattttttagaatcagtatccaaaaaatatggaattggcttttggaaacctggggcgggaattattcatcaggtagtattagaaaactatgcttttcctggaggtatgatgattggcaccgatagtcatacagttaatgcaggtggcttgggtatggttgctattggtgttggaggagcagatgctgtagatgttatggttgggatgccatgggagcttaaattcccaaaattaattggtgttcgtttaattgggaaaatgagtggatggacctcatcaaaagatgttatccttaaattagctggaatgctaaccgttaaaggtggtactggctctattattgaatattttggagagggtgctgaatcaatttcatgtacaggtaaaggtactatttgtaatatgggtgctgaaataggagcaactacttcaatctttccatatgatagaaatatgtcaagatacttaaaagctactaatcgtaatgatttagctagacttgcagatgatattgagcaccatctaaaagctgatgagaaagtctataaaaaaccagaaaaattttatgatgaagttattgaaatagatttaaacgctctcgagccatatgtaaatgggccatttactccagatttggcgacgcctattccaaacttaaaggaaaagcaaaaga

SEQ ID NO: 282464 - DNA, 545 bp, Unknown
  Bacterial polypeptide expressing nucleotide sequence isolated from the Sargasso Sea
tgaggtaatgttgagaggaacatttggaaatataagattaaaaaatgaactagttccaaacacagaaggtggaataacaaaatatttttttgatggtaaaaaaacttcaatttttgaagcagcaatgaaatacagaaaaaataatattcctttagttgttctagctggtaaagaatatggaactggatcatcaagggactgggctgctaaaggtacacgtttattaggagttagggcggtaatagctgagtcatttgaaagaattcatagatcaaatttaattggtatgggagttttgccattggaatttaccaagggtcaaaatagaaaaaatttattcattaggggagatgaagaatttacaataatgaatattaaaagtttaaaaccaaaaaaaactattatatgtgaaataaaaaataaggaaaaaataaaaaaaataaatcttttgtgtcgtattgatacagctattgagcttcaatattttcaagctggaggaacacttcattatattttaaataaaatattattagaatctaaataat

SEQ ID NO: 282465 - DNA, 610 bp, Unknown
  Bacterial polypeptide expressing nucleotide sequence isolated from the Sargasso Sea
atgaaaataaatagcaaaaactctttcgactcgattgacaatttaaaaatttcaggaaaaaattataaattttttagcttaaaaaaagcagaaaaaaatggtttaaaaggaataaacaaattgccaaaatcattaaaggttttgttggaaaatttgcttagattcgaagacaataaaacagttgataagaaacaaatcaacgcgcttaaagattggttaaaatcacaatcctctaaaactgaaatagcttacagaccttctagagttttgttacaagactacaccggaattcctgccgtagctgatctagctgctatgcgagatgctcttaaatctaaaaataaagatcccaataagataaaccctttatcaaccgttgatcttgttattgatcactctgtaatggttgataactatgcaaacacagattcttttagtaaaaatgttgagagggagtttaatagaaatagtgaaagatactcatttttgaaatggggtcaaaatgcatttaataattttagagtagttcctcctggaacaggaatttgtcatcaagtcaaccttgagtatctttcaaaagtttgtttggacaataaaaactcagaatgat

SEQ ID NO: 282466 - DNA, 655 bp, Unknown
  Bacterial polypeptide expressing nucleotide sequence isolated from the Sargasso Sea
atgagatcatcttctgtagctattagcatcaagacagttcaagaacaatatgcttctttagccagtcgtgttgatttatggcgaaaaactcttggcaggtcccttactttgtcagaaaaaattctttttagtcatttgcaatcagatcatgatttaaagaacttgaaaagaggagagagctttttaatgctcaaccccgatcgggttgctatgcaagatgctacagctcaaatggctctcttacaatttatccaatcaaaaagatcacaagtgagtgttccaacaacagtacactgtgatcatttgatcattgctcatatgggcgttaattcagatattaaagtagcaagaaaagacaatgccgaggtctttgattttttaaaatccgcttcacaaaaatatggcattggattctgggggccaggatcagggattattcatcaggttgtttttgaaaactatgcttatccaggagccctgatgattggaacagattctcatactcctaatgcaggaggactggggatgttagccattggagtaggaggagctgatgctgttgatgtgttaacaggaagtccctgggagcttttaaacccccaatattattgctgtgaaactaaaaggtcagcttcagtcctggaccagttcaaaa

SEQ ID NO: 282467 - DNA, 416 bp, Unknown
  Bacterial polypeptide expressing nucleotide sequence isolated from the Sargasso Sea
ggaatataaaaaaagaaataatgatctagttgtcattgctggtaaagaatatgggactggttcttcaagagactgggcagctaaaggaacaaaattattgggtattaaagccgtattagcagaaagttttgagagaattcacagatcaaatttagttggtatgggggttttgccattacaatttaaagaaggttttgatcgaaaaaaattaaaaatcacaggcgctgagctcgtaacgataattgatattgagaaaggtataaaaccaagagctgaagtaacatgtgaaattaaatttaaagatggcacaattaaaaaaattcaagccttaagtagaatagatactgaaaatgaaatagaatattacaaaaatggtggaattcttcagtacgttttacgtaacatgctcaattaat

SEQ ID NO: 282468 - DNA, 622 bp, Unknown
  Bacterial polypeptide expressing nucleotide sequence isolated from the Sargasso Sea
atggcatttgatatagaaatgattaaacaagtgtatgcaactatggctgagcgagtagataaagctcgtgaaatagttggtcgtccacttaccttatcagaaaagattttatattcgcatctttgggatggaaaccctacaacagcttatacaagaggaaaagattatgtagactttgctccagatagagttgcttgtcaagatgcaacagcacagatggctttattgcaatttatgcacgctaacaaaaaaacagttgctgtgcctacaacggttcattgtgatcatttaattttagcaaaagatggtgcaaagaaagatttagcattagcaaataatcagtcaaaagaagttttcgatttcttatcatcagtttcagataaatacggaattggtttctggaaacctgggtctggaattattcatcaaattgtattagaaaattatgcatttccaggaggaatgatgattggaacagattcgcatacagtaaatgctggtggattaggaatgttagcaattggtgtaggtggtgcagatgcagttgatgtaatgtctggtatgtcttgggaattaaaatttccaaaattaatcggtgttaaattaactggaaaactttctg

SEQ ID NO: 282469 - DNA, 397 bp, Unknown
  Bacterial polypeptide expressing nucleotide sequence isolated from the Sargasso Sea
ccttgtagtcatagcaggtaaagagtatggagcgggatcttcgcgagattgggctgcaaagggaacgtctctattgggtgttaaagctgtaatagctgaaagttttgaacgaatacatcgatctaatctggttgggatgggagtaattccgctcgaatttattgatggactaaatgcggatgagttagaaatcacaggaacggaaaacgtaacaatattaggtcttgaagaaggcttgcgacccagatctcatgtatcagtatgcataaagaatttgaccggtaaaaggagagtttttgaggtacggtgcaggatagatactgaagtcgagaaaacttacgttgagaatgggggagtgctacactacgttttaagaaaattggcgaattcttcgtaa

SEQ ID NO: 282470 - DNA, 498 bp, Unknown
  Bacterial polypeptide expressing nucleotide sequence isolated from the Sargasso Sea
gaaacgagatggcgccaggtaccgaaggcggttttacaaagttatttccagaaggaaaagtaatgacagtttacgatgctgtagtacaatataaaaaaagaggaactgatttagtggtaataggaggaaaagaatacggaactggttcatctagagattgggctgcaaaaggtactaaattattaggtgttaaaacagttatagctgaaagctttgaaagaattcatcgttctaatcttattggaatgggaatattacctttacaattcatagatggaatgaatagatcaaatttaaatttaaaaggatctgagttaatcagcgtactaaatatcgaaaagggcctatcgccttcagataaagtagaattagaaattaaatatatatctggtgatataaaaaaaattaaaacattgtgcagaatagatacaaaaaatgagttagaatactacaaaaatggtgggattctacaatacgttttaagaaatatgatttaat

SEQ ID NO: 282471 - DNA, 874 bp, Unknown
  Bacterial polypeptide expressing nucleotide sequence isolated from the Sargasso Sea
ttatcagttttaggttggggtgttggtggtatagaagctgaagcagtaatgttagggcaaccaatatctatgcagttaccagaggttataggggtagaattgtcaggaaaattaagcgatggagtgacagcgactgacttggttttaaatataactgagaatttaagaaaactaggagttgttggaaaatttgtagaattttatggcgatggtttgaaaacactaaatctatctgaaagatcaacgatttctaatatggcaccagaatatggagcaacttgtggaattttcccaatcgataatgaaactctggattacttggatattactggcagatctgataaacaaataaagattgttgaaaaatattctaaagaacaattaatatggcatactaattttgaaaaaattaaatacaatgagaagattagtattaatttaaataaaattgaaccatgcattgcaggacctaaaagacctcaagataaaataaacctaggagatgtacctaaaaaatttaaagatactctggaggtagaagaaaaaattataagacaagatgttaataaccttacccatggtaaagtttgcatagcagcgataacaagctgtacaaatacatcaaatccttcggttttaattatggcaggtctcattgcgaaaaaggctgtagagctgggcattaaggttccgtggtgggtaaagacgtcatttgcaccaggaagtaaagttgtcgataaatatttgactaaatcaaatttgttagaatatttaaacaagttaggttttaatattattggttatggatgcactacttgtattggaaattcgggaccattagacaaaaaagttaacgaagaaataatctcaaaaa

SEQ ID NO: 282472 - DNA, 817 bp, Unknown
  Bacterial polypeptide expressing nucleotide sequence isolated from the Sargasso Sea
gataaagaaacgttaaactatcttaaactaactggcaaaacttcccatcatttaaaaattatagaagaatatacaaaaaaacaaaatctttggtttgatgaaaattattcacctgattttgatgaatatattaatttagatttaaataatattgaagcttcattagcgggaccaaaaagaccacaagataaaatttttttgaaagatattccaagcacttttaaaaaggtttttttaaatactgataaagaaaaaaaatctaatgaaaatattcaaaatggagatattgtaattgctgctataacgagttgtacaaatacctcaaatcccaatgtaatggttgcagccggtcttttagcaaaaaaagctattaaacttggcctgaataaaaaaccttgggtaaaaacaagtttagcaccaggaagcaaagtagtaagtgattatttagaaaaggctggtctttctaaatatcttgatgaattaggttttaatcttgttggatatggttgtacaacttgtataggaaattctggacctttagacgaatggatttcaaacaaaataaaaaataaaaagttaaccgtatgttctatactttctggaaatagaaactttgaaggaagagtgcatcaagaggtaaaagctaattttttagcatcaccaccacttgttgtagcatttgcattgttgggaactattaattttgatattattaacaaatcttttggagtagataaaaatggtaaagaaatttttttaaaagatttgtggccaacaacatctgaaattaataatgttgttagtcaatctttatctt

SEQ ID NO: 282473 - DNA, 921 bp, Unknown
  Bacterial polypeptide expressing nucleotide sequence isolated from the Sargasso Sea
gtggatgtaatgggtggaatgccgtgggaattgaaatatcctaaaataattggagtgaatttaacgggtcagttatcagggtgggcatcaccaaaagatgtgattttaaaacttgctggaatactaacagttaaaggtgcaacaaatgctatagtagagtattttggtccaggaacaagtcaattatcggcaactggtaaggggacaatttgtaatatgggtgcagaaattggtgcaacaacaagtgtctttccttacgacgaaaaaatggctgcatatttaaaagttacaggaagggagcgtattgttcctatggttgaagagattaaacatatgcttattgcagatgatgaggtaacatctaatccagaattgtattatgatcaagtcatacatatcgatttaagtacgttagaaccatatattaatgggccattcactccagatttagctacgccgatatcacaattttcaaaaaaagcagttgaaaataaatggccactggatttagaggttggattaattggttcttgtacaaattcttcatatgaggatatgaagagagctgaatctattgcaaagcaagcggttgaaaaaaacttgtcagcaaagtcagaatttacaattacaccgggatctgaaatgattcgattaacagtagagcgagatggtgttttggatacttttgattcaatgggagggactgtattagctaatgcatgtggtccttgtattggccaatgggcaaggcatacggatgatccaaatagaaagaattcaatcattacatcatttaataggaattttgcaaaacgaaatgatgggaacccaaatacacattcatttgtggcatcccccgaaattgtaacggccatggctttagctgggcgattagattttaaccctttaactgattcaatt

SEQ ID NO: 282474 - DNA, 787 bp, Unknown
  Bacterial polypeptide expressing nucleotide sequence isolated from the Sargasso Sea
atgaaaccaggaacaaaaaattcttataattcgctttcagaaatagaaataaataaaaaaaaatataaattttattctttaaaaaaagctgaagaaaatggtttagatggaatttctaaattaccaaaatcattaaaagttcttttagaaaatcttcttagatatgaagatgatttgtcagtcaataaaaaacaaatcgagtcaattcaacaatggttaaaagataaaaagtcaaaaactgaaattgcatatagacctgcgagagttttattgcaagattatacaggaataccagcagttgctgatttagctgcaatgcgtgaagcagttaaagagaaaaataaagacccgaatacaattaatcctctttctgctgtggatcttgtaattgatcattctgttcaagtagatcaatcagcaaaagctaactcatttgacaaaaatgttgaaattgaatttaatagaaatggagaaagatattcatttttaaaatggggccaacaggcatttaataatttcagaattgttccacctggaacaggcatctgtcatcaagtaaatttagagtatttatctaaagttgtatggtgtgagaaatttaattcagaaaattatctttttcctgacactttagttggaactgatagtcatactactatggttaatggattgtcagttttaggttggggtgtaggaggtattgaggctgaagcaggaatgttgggccaaccaatatcaatgttgattcctgaagtgataggatttgaacttcaaggtaaataccaga

SEQ ID NO: 282475 - DNA, 451 bp, Unknown
  Bacterial polypeptide expressing nucleotide sequence isolated from the Sargasso Sea
gatggcaaggttatgagcgtttatgaagctgccatggaatataaaaaaagaaataatgatttagttgtcattgctggtaaagaatacggaacaggatcttcaagagactgggcagctaaaggaacaaagctattaggcattaaagctgtgttagctgaaagttttgagagaattcatagatcgaatttagtaggtatgggtgttttgccacttcaatttaaagaaggttttgatagaaaaaaattaaaaataacaggagctgaactcattacaataattgatattgaaaagggaattaaaccaagagctgaggtagcttgtgaaattaaatataaagatggcacaattaaaaagatacaagctttgagtagaatagatactgaaaatgaaatagaatattacaaaaacggaggaattcttcagtttgttttacgtaacatgctcaattaat

SEQ ID NO: 282476 - DNA, 478 bp, Unknown
  Bacterial polypeptide expressing nucleotide sequence isolated from the Sargasso Sea
aggtggcaacacgctctatcagccgagtggcgagaagctctcgatctacgacgccgccatgcgctaccaggccgagggcgtaccgctggtggtgatcgccggcaaggaatacggcaccggttccagccgtgactgggcggccaagggcaccaatctgctgggcgtcaaggcggtgatcgccgagagcttcgagcgcatccatcgctccaacctgatcggcatgggcgtgttggcgctgcagttcgtcggtgatcagacgcgccagtcgctgggcttgaacgggacggagaagttgtcgatccgcggtctaggcgccgatatagcgccgcgccagatgctgaccgtggatgtggagcgcgccgatggttcgcgtgactcgttccaggtgctgagccgcatcgatacgctcaacgaggtgcagtacttcaaggctggcgggattctgcactacgtgctgcgccagctgatcgggagctga

SEQ ID NO: 282477 - DNA, 371 bp, Unknown
  Bacterial polypeptide expressing nucleotide sequence isolated from the Sargasso Sea
ggagtacggaacaggttcatctagagattgggcagcaaaaggaactaaattgcttggaattaaagctgttattgcagaaagttttgagaggatccatagatcaaaccttgtaggcatgggtattttaccattagaatttaaagccggttttgacagaaaaaaattaaatattaaaggcacagagttatttaccattattgatattgagaagggtattaatcctagagcagaggtaagttgtgaaattaaatacgccgatggttctagcaaaaccataaaacttttatcaagaatagatactgaaaatgaaattgagtattataaaaatggtggaattctccaatacgttttaagaaatatgcttaattaat

SEQ ID NO: 282478 - DNA, 477 bp, Unknown
  Bacterial polypeptide expressing nucleotide sequence isolated from the Sargasso Sea
aactattaaagtggggccaacaagcatttaaaaatttgcgtattgtacctcctaataatggaattattcatcagattaatattgaatacatcgcaagagttatatatgagaaagagggcatgctttatcctgacacggtagtaggaacagactcccatacaactatggtaaacggcttaggcgttttgggttggggcgtaggaggaatagaggctgaagctgcgatgctggggcaaccgattccaatgttacttccagaagttattggatttgaactcactggagagcttggacagacaactactgcaactgacctggttcttacaattgtgcagatgcttcgcgaaaagaatgttgtaggtaagtttgttgaattttatggctcaggtttagacagtttaacaattgcagacagatgcacaatatcgaatatggcacctgaatatggagcaacctgtggattttttccgaattgac

SEQ ID NO: 282479 - DNA, 622 bp, Unknown
  Bacterial polypeptide expressing nucleotide sequence isolated from the Sargasso Sea
ggctctttcaaagatactacaccagcaggtaaacacttaattgaaaactcagttaatgttaaggactttaattcatatggttctagaagagggaattttaagataatgcaaagaggaacatttgcaaatgttcgactatcaaataaattagtcccacagaaaactggcgggtttactaaacatctaccaaatggcaatgaaatgtctatatatgatgctgcacaggagtataagaaaacggatactaatctgattatatttgctggtaaagactatggttgtgggtcatcacgtgattgggctgccaaagggacaaaattgttaggcgtcaaggctgtaattgccgagagttttgaaaggatccatcgatcaaatttagttggtatgggaataatgccacttcagtttaataacggcgatacatttgactcgcttggtttatctatggaatcatcttttactatagagtctatacacaaaacagcaaaaacagtttttattattgaagacagttcaagcaaaaaatttgaggtcaaagttagaattgacacagctaaggaatgggaatatttcgtcaatgatggaatacttaattatgtcttgaaaaaattagctaactaaa

SEQ ID NO: 282480 - DNA, 844 bp, Unknown
  Bacterial polypeptide expressing nucleotide sequence isolated from the Sargasso Sea
agttgaattatattgtaaacatcagggtttgtggggttttaatgatgaaccaaattttaatgaaaaattagaactgtcattaaatgacgttgaggctgttgtagctggacctaataaacctcatcaaaaattaccattatctgcgttaaaagaagaattccaaaaagattttagtccatcggaaaaggatgtatcttacaataaccaagaggtttttaaagatggatcagttgtaattgcttcaataacaagctgtactaatacttctaacccaagtcttgtgatgggcgctggacttgttgctaagaaagcagttgaaaagggattaacaataccatcttatgtaaaaacgtctcttgcacctggctcacaagttgcaacagaatatctcgaggagtctggtttgttaactccgcttgaaacattaggatttaatgttgccgcttatggttgtgcaacgtgtattggaaatagtggaccattagatgaatcaatagagaaagcaattaaagaaaatgatatgactgttgccgcagtattatcaggaaataggaactttgaaggtagagttcatcctctaacaaaagcaaattatttagcttctcctccacttgtaattgcttacgcattagcaggcacagttaatattgatctagaaaatgaacctcttggaaaagatttatctggtaatgatgtttatttgaaagatatctggttcacttcaaaagaactcttagacgcaacaaaaatttccgcaaactctgattactataaggacatttattcagatgtatttaacgctaatgaccaatggaatgcattaccaatttctggaggagagaca

SEQ ID NO: 282481 - DNA, 834 bp, Unknown
  Bacterial polypeptide expressing nucleotide sequence isolated from the Sargasso Sea
gatgctgatccccgacgtcgtcggcttccgcctgatcggcgctctgcccgagggcgtgaccgcgaccgacctcgtcctcaccgtcacgcagatgctgcgcaggcacggcgtggtcggccgcttcgtcgagttctgcggccccggcctcgatgtcctgccgctggccgaccgcgccacgatcgccaacatggcgcccgaatacggcgcgacctgcggcttcttcccggtggacgaggcgacgctgacatacctgcgcctcaccggccgcgatcccgcgcgcgtcacactggtcgaggcttacgccaaggcgcagggcctgtggcgcgatgccgccagccccgagccgatgttcaccgacatgctggaactcgatcttgccaccgtgctaccctcggtcgccgggccgcgccgcccgcaggatcgcgtactgctcaaggacgccgccgagggcctgcgcgccgaactgaccagtggctacggaaaggccggggaactggccacccgcgtgcccgtaaacggcaaagacttcaccctcgggcacggcgacatcactatcgccgcgatcaccagctgcaccaacacctcgaacccttcggtcctcgtcgccgctggtctcgtcgcgcgcaaggcgcgggcgctgggcctcgtgcccaagccctgggtgcgcgccacgctctcgccgggcagccaggtcgtcaccgactatctgatccgctcggggctgcaggacgatctcgacgcgctgggcttcgcgctgaccggctacggctgcatgatctgcatcggcaattccggctcgctcgatgcccccatcagcgaggcgatcaacgccaa

SEQ ID NO: 282482 - DNA, 704 bp, Unknown
  Bacterial polypeptide expressing nucleotide sequence isolated from the Sargasso Sea
tccaattacagataaattaataaatcaagaaggagatgaagttatattatatcctccaataggaattgaacttccatctaaaggctttgaatatgaagataatggatatattgaaccttcagttgatggaagtaaaatagaagttgttgtgaaagagaattctcaaagacttgaaatactcaaaccttttaaaccatggaatggtcaaaatattattggagctaaattacttattaaagcttttgggaaatgtactacagatcacatatcaatggcagggccttggctaagatacagagggcatttagataatatttctaacaattgtcttattggtgctgtaaatgcatttaaccaaaaaacaaattttgtaaaaaatcaattagatggagaatatggtgcagttccagatattcaaagaaaatataaagagtctggaatagaaactattgtagttggagactacaattatggggaggggtcttctagagaacatgctgcaatggaacctagacatttgggtgttaaagtagttttagtaaagtcatttgctagaattcatgagactaatttaaaaaaacaaggaatgttagccttaacttttgaaaatgaatcagattatgatttaatacaagaagatgatacatttaacctaattgatctaaaagatttctctcccaataaatcaattactattgagatta

SEQ ID NO: 282483 - DNA, 482 bp, Unknown
  Bacterial polypeptide expressing nucleotide sequence isolated from the Sargasso Sea
agaaggaggtataacaaagttttttaatacaaataaacaaatgtcaatttatgatgctgcaatagagtattccaaaactgaaataccactagttatttttgcaggaaaagaatatggaacaggatcttcaagagattgggcagctaagggaactaaattattaggaattaaagctgttattgcagagagttttgaaagaatacaccgttctaacttgataggtatgggtgttttgccattacagtttataggaaatcaaaataataaatcactcaatcttaacggaagtgaaataataacaataaagagtttagagagtatttatcctaactcagaacttttttgtgaaattaaatctagtgaagaaacaaaagaaataaaacttttatgtaggatagatactatcaaagagttagattattataaacaaggtggtattttaaattacgtgttgaattcaattattaaaaaaacatcttaat

SEQ ID NO: 282484 - DNA, 532 bp, Unknown
  Bacterial polypeptide expressing nucleotide sequence isolated from the Sargasso Sea
ataaaaattaaaagttcttctacctttaattggtctattaattcaacatatataaaaaagcctccgtttttagagaatgagttaagtaaaagtaatgatatttttgaagccaggcctttgcttatacttggcgactctattactacagatcatatttctccagctggttttattaaagaaaaaagtgaggcaggaaaatacttattagagagacaaattaagaatgataattttaattcttttggtgcacgtagaggaaatcatgaaattatggtcagaggaactttttcaaatttaagaattaaaaatttaatggttaatagacaaggtggctactcaaaacatttcccctcagaaattgaagatgaggtttataatattgccgaaatgtattccaatcaaaaagttcctttaattgtggtagcaggtaaagaatacggaacaggatcatcaagagactgggcggcaaaagggacaaaattattaggtgttagagtggttttagcagaaagttttgaaaggattcacagat

SEQ ID NO: 282485 - DNA, 517 bp, Unknown
  Bacterial polypeptide expressing nucleotide sequence isolated from the Sargasso Sea
ggaaatataagaataagaaatgaaatggcaccaggtacggaaggaggattcacaatattacaaccagacggaaaacagatgagcgtatatgaagcagctgaagaatataaaaaaagaggcaacagtcttgttgtaattgctggaaaagaatatgggacaggttcatctagagattgggcggctaaaggaactaaattattaggtatcaaagcagttatcgctgaaagttttgaaagaattcatagatctaaccttgttggaatgggcattttacctcttgaattcaaagcaggtttcgacaggaaaaaattaaatatcaaaggtacagaattatttactattattgatattgaaaaagggattaatcctagagcagaagtcagttgtgaaattaaatatgctgatggctctagtaaaaccattaaacttttatcaagaatagataccgaaaatgaaattgaatattataagaacggtggaattctacaatatgttttgaggaatatgattaattaaa

SEQ ID NO: 282486 - DNA, 790 bp, Unknown
  Bacterial polypeptide expressing nucleotide sequence isolated from the Sargasso Sea
tatgatacctggtaaaaaaaattcttttaaatcactcaaaataataaatattaatggagatgaatatagttattattcattgattgaggcagaaaaaaatggtctgcaaggaatatctaagttgccaaaatctttaaaagttctattggaaaatttacttagatatgaagatgacataagtgttactaaaaatcaaatagaagcaattaaaaattggttaaaaaataaaaaatctaatactgaaatagcctatagaccagcaagagtcttacttcaagattacacaggcataccagctgttgctgacttagcggctatgagagaagcggttaaaaaaaagaataaagacccaaataatattaacccactttcacaggttgacttggtaattgatcactctgtccaagtagataaatttgcagaaaaaaattcaatagatcaaaatgtagaaatagaatttcaaagaaataatgaaagatattcttttttaaaatggggacaacaagctttcaataattttagaattgtacctccaggaacaggaatctgtcatcaagtaaatttagaatatttgtcgaaagttgtttggtcagaaaaatttaatggaaaaaattatttattccctgatactctagtaggaactgacagtcatacaacaatggttaatgctttgtcagtacttggatggggtgttggaggaatagaagcggaagccggcatgttaggacagccaatttcgatgctgattccagaggtaataggatttaaaattacaaacaagttgcctgaa

SEQ ID NO: 282487 - DNA, 735 bp, Unknown
  Bacterial polypeptide expressing nucleotide sequence isolated from the Sargasso Sea
tagtaaaagcgaattatttagcttcacctccgttagtagtagcttatgcaattgccgggtcaatgaatttagatttatataaagattctttaggcaaagatgcaaatggaaaggatatttttcttaaagatatttggccaagcaatcaagaaattgaagaagttttaaaaaattctttaaatcctgaaatgtttattaatagatattcaaatatctctaatggaccagaacaatggcaaaaaattaaaactgaatcaagtagtatttataactgggatgataattctacttatgtaaaaaaaccacctttctttgaaaacttatcagacgaaccggaaggttttaaagaaataaaagatgcaagaccattacttattttaggagatatggtaactacagatcatatttctcctgcaggaactattcaaaaagaaagtcctacgggagaatattttatgcatcaccaaattctgcccaaagattataattcatatggagcgagaagaggaaatcacgaagtaatgactagaggaacatttggaaatattagaataagaaatgagattgcatctggcacagaaggtgggtatacaaaaatttttccagaaaataaagtaatgtcaatttatgatgcagctattgaatataagaaaagaggaactgaccttatagtagttggaggaaatagagtatggaactggatcctcaagagattgggctgccaaggggactaaa

SEQ ID NO: 282488 - DNA, 577 bp, Unknown
  Bacterial polypeptide expressing nucleotide sequence isolated from the Sargasso Sea
cttcaaccagtacggcacgcgtcgcggcaaccatgaagtgatgatgcgcggcaccttcgccaatatccgcatccgcaaccacatgctcggcccgaacggcaaggaaggtggctacaccatccactatccgtccaaggaagagatgtcgatcttcgacgcggcgatggaatacaagaaggaaggcgttccgctcgtcatcttcgccggcggcgaatatggcaatggctcctcgcgtgactgggctgccaagggcaccaacctgctcggcgtgcgcgccgtgattgccgagagctacgagcgtatccaccgctccaacctcgtcggcatgggcgtcatcccgttcaccttcgaggacggcgcgacgtgggaaagcctcggcctgaagggcgacgagaccgtcaccatcgagggcctggccgacatcaagccgcgcgagaagaagatcgccaaggtcaccttcgccgacggcacgatcaaggacgtcccgatcctctgccgcatcgacacgctggacgaactcacctacgtcaacaatggcggcatcctgcagacggtgctgcgcgatctggctgcgtaa

SEQ ID NO: 282489 - DNA, 790 bp, Unknown
  Bacterial polypeptide expressing nucleotide sequence isolated from the Sargasso Sea
aatggcccctggatcaagagttgtgactagttacttagaaaaatcaggacttgataaacatctaaataatttaggatttaacacagttggttttggatgcactacctgcataggtaattctggccctttagatcaagatatttctgaagaaattgaacattcaaatttggttgttgcaagtgtacttagcggaaatagaaattttgaaggaaggattcaccctctagtaaaagcaaattttttagcatctcctcttcttgtaattgcttattcaattactgggacagtagatgttgatttgacttctgatcctttaggaaaagataaaaatggcagaaatgtcttcctttctgatgtatggccctcatctaaagaaatacaagataaaattgataattctataaattctgagatgtataatgaacaatattctaaagccattgctggtaacttagagtggaataatctttcatctgatgcaggagaaaattataattgggataaagaatcaacatatattcagaaagccccattttttgataatttttcaagagaaatagatcctcctaaacccattgagaatgcaagattattgtgtttacttggagattcagtaacaactgatcatatttcacctgcaggttcaataccagaacttgcgccctcaggtcaatttttaatatctaatgatgttccaagaattcaattcaattcttatggttcaaggagaggtaatcataacattatggccagaggaacttttggaaatataaggttgagaaacatgtta

SEQ ID NO: 282490 - DNA, 918 bp, Unknown
  Bacterial polypeptide expressing nucleotide sequence isolated from the Sargasso Sea
actttggtactgttagatcaagtttgtcaggcccaaaaagaccacaagataaaattttcttaaataatgttaaagatgtgtttagtaaagaatttcataacttaaataatgatcctgaaaatttgagcgacggttcggttgttgttgctgcaattactagttgtacaaatacttcaaacccttcagtaatgatgggggctgctttacttgcaaagaaaatttaccaaaagggtttgtcaccaaaaccttgggttaaaacttcaatggcgcctggatcaagagtggttactagctatcttgaaaaatctggtcttgataaatatttagatcttttaggttttaacactgtaggattcgggtgtactacctgtattggaaattcaggtccgttagaccaaaacatatctgaagaaattgagcattccaatttaactgttgcaagcgttttaagtgggaatagaaattttgaaggcaggatccatcctcttgttaaagctaattttcttgcatctccacttctagtaattgcttattcaattgcaggcactgtagatattgatttaacaaattcatctcttggaaaagatgagtcaggaaaagaagtatttctttcagacgtatggccttcttcaaaagaaataaattatgaaattagcaaatccattaattcaaatatgtacaacgaacaatattctaatgctataaaaggtaacattgaatggaataacctttcttcagatacaggagaaaattataattgggataatgaatctacctatatacaaagagcgcctttttttgataatttttctaaagaagttaaatcccctaagccagtcaagaatgctagagtgttatgtttactaggcgactctgttactactgaccatatttctccagcaggatccattacctgag

SEQ ID NO: 282491 - DNA, 541 bp, Unknown
  Bacterial polypeptide expressing nucleotide sequence isolated from the Sargasso Sea
aatgtttaaagaaagatacaaagaaatttacaaaggtgacgataattggaaattaattaataattctaaaaaaacaacttatgactggaatgatactagcacttatataaaacatccacctttctttgattcacaaaataaatttgaacttaaagatataaatgaagcaagaatattagcattactaggcgacagtgtgactacagaccatatttctcctgcaggcagcattaaagaagatagtccggctggtctttatttaaaagaaagacaaatcaattctaaaaatttcaattcctatggatcaagacgtggcaatcatgaaataatgatgagaggtacttttgcaaacataagaataaaaaatctgattttagataatgttgagggaggttttactaaatcttttatctctaataaacagatgtcaatttatgatgcagctcaagagtacattaacagtaatattgatacagttataatagctggaaaagatatggcacaggttcgtccagagattgggcagcaaagggcacaagac

SEQ ID NO: 282492 - DNA, 725 bp, Unknown
  Bacterial polypeptide expressing nucleotide sequence isolated from the Sargasso Sea
tatgaaaccaggaaatataaatacttttaaatctttaaaatctataaatatagataatagaagttataaattttattctttaaaagaatcagagaaaaatggtctttctggaatatcaaaacttcctaaatctttaaaagttcttttagaaaatctacttagatatgaagacgatttgtcagttaataaaaaacaaattaaagccgtccatgaatggttaaatgaaaaaagatcaaaaacagaaattgcttataggcctgcaagagttttgttgcaagattatactggtataccggcagtggcagacctagcagcaatgcgcgaagctgttaaagaaaaaaataaagatccaaatactatcaaccctctttcctctgttgatttagtaatagatcactcagtgcaagttgatcaatctgctcaatcagactcatttgaaaaaaatgtagatattgaatttaaaagaaatggcgaaagatactcatttttaaagtggggacaacaagcttttaacaattttagaattgtacctccagggacaggaatttgtcatcaagttaatctagagtatttatccaaagtagtatggtcagaaaaatataaaggtgaagattacttgtttccagatactctggtcggcactgatagtcatacaaccatggttaacggattatcggttcttggatggggcgtaggaggaattgaggccgaggcaggaatgcttg

SEQ ID NO: 282493 - DNA, 765 bp, Unknown
  Bacterial polypeptide expressing nucleotide sequence isolated from the Sargasso Sea
gctgatcgcggccatcacttcgtgcacgaacacgtccaacccgagcgtgctgctggcagccggcctgctggccaagaaggccgtcgaagccggcttggaagtggcaccgcacatcaagacctcgctcgccccggggagccgcgtggtgacgaagtatctggaagccgccggcctgctgccgtacctggaaaagctgggctttggcgtgacggcctacggctgcacgacctgtatcggcaatgccggcgatctgacgccggaactgaacgatgccatcgtgaagaacgacattgttgctgccgccgtgctgtccggcaaccgcaactttgaagcgcgtatccacccgaacatccgcgccaacttcctggcttcgcccccgctggtcgtcgcctacgcgatcgccggcaacgtgacgcgcgacctcatgaccgaaccggtcggcaagggcaagaagggcaaggacgtctacctgggcgacatttggccgacctcggacgaaatcgccaagctgatgaagttcgcaatgaacgccgacacgttccgcacgaactacgaacaggtcaagaagccgtccaagctgtgggccaacgtcaagggcacgaagggtcaggtctacgactggccgaagtccacgtacatcgccgagccgccgttcttcgaaagttttggcatgacgccggctgttgcctcggcatcggtcaagggcgcccgcgcactgggcgtcttcggcgactccgtgacgaccgaccacatctccccggccgg

SEQ ID NO: 282494 - DNA, 655 bp, Unknown
  Bacterial polypeptide expressing nucleotide sequence isolated from the Sargasso Sea
catgaaatttaatagtaaaaattcctttaagtcattagataatatttcatcatctggtagaaattataaaatcttcaatttaaaaaaagctgaaaaacatggtttagacggaatttcgaaactaccaaaatctcttaaagttttattagaaaatttactaagatgtgaggatgatttaactgtcgataaaaaacagatcttagcaataaaagaatggttaaaaaataaaaaatctaatactgaaatagcttacagaccagcaagagttttaatgcaggactatacaggaattccagctgtagcggatttagctgctatgagagatgctgtaaaagataaaaataaagatccagaaaaaataaaccccttatcaactgtagacttagtgattgatcactctgtaatggttgatgaatatgcttcaggaaaatcatttgacaaaaatgtagaaagagaattttctagaaacggggaacgatactcttttttaaaatggggacaaaaagcttttgataattttagagttgtgccaccaggaacaggtatttgccatcaagtaaacttagaatatttatccaaagttgtctggtcatctaaaagtgggaaagatctttacgcttacccagatactttagtggaacagacagccacacta

SEQ ID NO: 282495 - DNA, 879 bp, Unknown
  Bacterial polypeptide expressing nucleotide sequence isolated from the Sargasso Sea
ttggagcgtatgtcgccagttattcaaaaccgtgacggcgtagccttccctgacacactagtaggtaccgacagccacacgccgcacgttgatgcacttggtgtaattgcggtaggcgtgggcggccttgaagcagaaagcgttatgctaggtcgtgcgtcttacatgcgtttgcctgatattgtaggggtcgaacttaccggtaagcctcagccaggtattacggctaccgacattgtattagcgcttactgaattcttgcgtaaagagcgtgtagtatctgcgtatcttgaattctatggtgaaggtgcatcccacttaacccttggcgaccgtgccaccatttcgaacatgacaccagaatacggcgcaacagcggccatgttctatattgatcagcaaactattgattacttgcgattaacgggtcgtgaagaaaagcaaattgcgcttgtagagcagtacgctaaacacacaggtttatgggcagatgacttagaaactgccgagtacgaacgcgtgcttacgtttgatttgtctgcagtaggcagaaacatggccgggccgtctaacccacatgcacgcttacctaccagcgacttagaaagccgcggtatcgcagcaaaatgggaagaggaagacggtaaaatgccagatggcgcggtgattatcgcggctatcaccagctgtactaatacctctaacccgcgcaatgttattgcagcaggcttacttgccagaaacgcaaacgcgcgcggtttaacccgcaagccatgggtgaaaagctctctggcgccaggttctaaagctgttaagttataccttgaagaagccaacttaatgagcgagttggaagacttaggcttcggggttgtggca

SEQ ID NO: 282496 - DNA, 853 bp, Unknown
  Bacterial polypeptide expressing nucleotide sequence isolated from the Sargasso Sea
caaagtggtcgggtttagattatcaggtgaattgcctgccggcgttacggctaccgacatggtgctcactattacccaacagttacgacaacacggcgtggtgggtaagtttgttgagttttatggtccagggttaaaacatctcactaccgcagacagagcgaccatcgcaaacatggctccagaatacggcgccacatgtggtatttttcctattgatgatgtggcgctcgactatttaaggctgacaggaagagacgaagcgcaaattacgctagtggaaacttacgccaaatcttccaatctgtggcatgacgatttcactaaagatgcacagtaccacgaaacactagaactcaatctgaatgaagtggttccctccattgcggggcctaagcgtccacaagacaaaatcgcgttggataacgcggcggaggccttcaatgagtggcataagtctcagattgatgtacaagtcatcgaagaagaggctaaatttgtagcggaaggcggtgttgcaccagaaattgatgaagaacacgattcctatgttgaatttggtggcaagaaatttaatttggaagatggggcaattgttattgcggctatcaccagctgtaccaatacgtcaaatgcttccgtgctaataggggcaggtttgctggcccagaaagcggttgaaaaaggcctagcgcgcaagccatgggtgaaaacatcactcgcgcctggttcgcaagttgtcactcagtatcttgaagatgcgcaattaatggatcccctgaaagcccttggttttaaaaaagtgggatacggttgtaccacgtgtatggaaattcaggtcctctgcctgacg

SEQ ID NO: 282497 - DNA, 472 bp, Unknown
  Bacterial polypeptide expressing nucleotide sequence isolated from the Sargasso Sea
tgaaggaggttttactaaaattattccttcaggagaaataacttcaatttatgaagcatctctaaaatattttgagaacagaactcctctaattgttttggcaggtaaagaatatggtacaggctcttctagagactgggcagcaaaaggaacctcattgcttggcatcaaggcagttgttgcttcaagttttgagagaatacaccgctcaaatctggtaggcatgggcgtactgccacttcagttcaaagaaaatcaaacacataaatctctgggcttaagtggagaagaagaatatgctgttttgggactgaatgataatctccaaccgggtcaggacttaattttacaggctggagaaaagaagattcctgtaacaagtcgcctcgatacacagattgaaattgaatattacaaaaatggaggtattttacataccgttttgaggaaatttttgcgtgaaaataagtag

SEQ ID NO: 282498 - DNA, 408 bp, Unknown
  Bacterial polypeptide expressing nucleotide sequence isolated from the Sargasso Sea
ataaaaaaagaggaaccgacttagttgtaataggtggaaaagaatatggaaccggttcatcaagagattgggcagcaaaaggaacaaagttattaggtgttaaagctgttatagcagaaagttttgaaagaattcacagatctaatttaattggtatgggaattttacctttacaatttataaataatattaataagaataatttaaatttaattggttctgaattaattactgttattgaaatagaaaaaggaattaatcccttggataaggtttttttagaaattaaatatgcatcaggagatattaaaaaaattgaaacattatgtaggatagatacaaaaaatgaattagaatattataaaaatggaggaatactccaatatgttttaagaaatatgatctaaa

SEQ ID NO: 282499 - DNA, 579 bp, Unknown
  Bacterial polypeptide expressing nucleotide sequence isolated from the Sargasso Sea
catgaaatttaatagtaaaaattcctttaaatcattagataatatttcatcatcaggcaaagaatataaaattttcaatttaaaaatagctgaaaagaatggtttagacggaatttcaaaactaccaaaatctcttaaagttttattagaaaatttgcttagatacgaagatgatataactgtagataaaaaacagattttagcaatcaaagaatggttaaaaaataaaagatcaaatactgaaatagcttacagaccagctagagttttaatgcaggactatacaggaatcccagcagtggcggatttagcagctatgagagatgcggtaaaagataaaaataaagatccagaaaaaataaaccccttatcaactgtagacttagtaattgatcattcagtaatggttgatgaatatgcttcaggaaaatcgtttgataagaatgtagaaagagaattttctagaaacggagagcgttattcttttttaaaatggggacaaaaagcttttgataatttcagagtagtgccacccggaacaggtatttgccatcaagtaaacttggaatatttatctaa

SEQ ID NO: 282500 - DNA, 535 bp, Unknown
  Bacterial polypeptide expressing nucleotide sequence isolated from the Sargasso Sea
aagttatgatgagaggacttttggaaatattagaattcggaatgaaatggctccaggtacggaaggtggatttacgaaaatttatcctgaagaaaaaataataccaatctatgaagcagttgttgaatataaaaaaagaggaacagatttagttgttattggtggaaaagagtatggaacaggttcatcaagagactgggcagcaaaaggaacaaagctacttggagttaaagcggttatagcagaaagctttgagagaattcatagatcaaatttaattggcatgggagtgctaccactgcaatttaaagatggtatggatcgattaaatttaaactttgtaggatcagaattaattagcgtcattgatttagagaagggagtaggacctaaagatattgttaaaattgaaataaaatatgcaactggtgatattaaaattattgaaaccttgtgtagaattgatactaaaaatgaaatggaatactataaaaacggtggaattctacaatatgttttaagaaaaatgatttga

SEQ ID NO: 282501 - DNA, 943 bp, Unknown
  Bacterial polypeptide expressing nucleotide sequence isolated from the Sargasso Sea
atggatttatcagtaacaccagcaagtttagtttcctcggtttatgaaaagttaactgagaatataaacagtttaagggcaagaaaagatgcccctcttactcttgccgaaaaacttctttttggacatgcaacagacatttcatctgtttctttgaataaaggtgaagattatggagattttgcacctgacagagttgctatgcaagatgcaacagctcagatggctctattacaattcatgcaagcagatttacctgaaacagcagtaccaacgactgtgcactgtgaccatttaattcaagcatatgagggtgcaagtacggatcttcaagttgcaaacaaaacacataaagaggtttttgattttctaagaactgcttcagaaaagtatgaaataggattctggggaccaggggctggaattattcaccaagttgttctcgaacaatatgcatttcctgggggaatgatgattggtactgacagccatacacccaatgctgggggattatcaatgattgccattggggttggaggtgcagacgctgttgatgttatggctggtatgccattcaatacaaagattccaagtttgattggtgttaaattaacaggatcattgagcggctggacttcaccaaaagatattattttaaaagtagcagaaattcttacggtcaagggagctacgaatgcaatagtcgaatactttggcgaaggaactcaaactatttcaactactggtaaagcaaccattacaaatatgggtgccgaaattggagcaacatgttcaatctttccatatgacgaaaagggtagtgattatctaaaagctacaggtagagaagagatagctgaattagcaaactctagaatggatttactcactgctgatgaagaggttttaaaaaatccagaaaactattcaatcaagttatgaa

SEQ ID NO: 282502 - DNA, 772 bp, Unknown
  Bacterial polypeptide expressing nucleotide sequence isolated from the Sargasso Sea
atgaaaccagggacaaaaaattcttacaaatcattatctgaaataaagattaataataaaaattataaaattttttctttatctaaagcagaggagaatggtttaagtggtatttcaaaattaccaaaatcacttaaggtgcttttagaaaaccttttaagatatgaggatgatttatcagttaataaaaatcaaatagaagcaattaagaattggctagtagaaaaaaaatcaaaaacagaaatagcatataggccagcaagagtcttacttcaggattacacaggaattccagctgtagcagacttagcggcaatgcgtgacgctgtaaaagaaaaaaacaaagacccaaaaactattaatcctttgtctgcagttgatcttgtaattgaccattccgttcaggtagatcagtcagctaaatctgattcttttgataagaatgttgaaattgaatttaacagaaatggtgaaagatattcttttttaaaatggggacaacaagcttttgataattttagaattgttcctcctggcacagggatatgtcatcaagtaaatttagaatatctttctaaagtagtttggtcagcaaaatacaaaaatgatgattatttatttccagacacgctagtaggtacagatagtcataccacgatggtaaatggtttatcagtattaggttggggtgttggaggaattgaagcagaagctggaatgttaggtcaacctatatcaatgctaattccagaagtaataggtttgaagtaaa

SEQ ID NO: 282503 - DNA, 1142 bp, Unknown
  Bacterial polypeptide expressing nucleotide sequence isolated from the Sargasso Sea
tttgcacctgatagagtagctatgcaagatgcaacagctcaaatggcccttttgcaatttatgcaggcaggaatggaaaaaacagcggtaccttctactgttcactgcgatcatcttattcaagcatatgaaggagcaagtagtgacttagcggttgcaaaccagacacataaagaagtttttgattttttacgttctgcatcgcagaaattcggaataggattttggggtccaggagctggaataattcatcaagttgttttagaacagtatgctttccctggtggaatgatgattggtacagatagtcatactcctaatgctggagggcttggaatggtagctattggtgtaggaggagcagacgcagttgatgttatggccggaatgccttttaatacgaaaattccaaagttaattggagttaaattaacaggttctttaagtggatggagctcacctaaagatataattcttaaagttgctgagattctaactgttaagggtggaacgaatgcaatagttgagtattttggtgaaggaacttcttcaatatcaactacaggtaaatcaactattacaaatatgggtgcagagataggtgcaacctgctcaattttcccatatgacagtaaaggaaatgactacctagtttctactggaagatcagatattgcagagcttgcatcaacaagaacggatctattaacagctgatcaagaagttttagatgaaccagataagtattttgaccaagtgattgagatagatttggatactcttgaaccacatattgttggccctcacacaccagatttagctagaccaataactgatctaaaagaagatgttgaagaaaacgaatatccaataaaaatatcaagtgcattaataggttcttgtaccaattcatcttacgaagatatcgggagagcagcctttattgcacgagaagcagcaaagcatggtcttaaagcgaaagttccattaatggttactccaggttcagaacaaacaagagcaactattgaaagagatggttatttgaaagatttagaggatattggagcagtagtattagcaaatgcttgtggtccatgtattgggcaatggaaaagagatgatattaaagaaggagagag

SEQ ID NO: 282504 - DNA, 630 bp, Unknown
  Bacterial polypeptide expressing nucleotide sequence isolated from the Sargasso Sea
catgacatttataaattctctaaaaacttgtaaaaatctaacaattgataaagtgatttataagtattttgacttaaatacacttgcagacctttataattttgaattatccaaaattccaaattcgataaaaataattctcgaaaatttaataaggaatgaagatggagaagctgtaactagagaaatgatagacaatttatgtaaaaaaatatctgaacctaaagaaaattatgaaatatctttcactccaagtcgtgttcttatgcaagattttacaggagtcccagcagtagctgatttagctgcaatgagagacgcattacaaaaaaaaggtattaacccaaataagattaatcccttatcaagagtagatttagttattgatcactcagttatggtagactcttttggaagcgataatgctttagaacaaaatgttaaaaaagaatttgagcgcaataaagaaagatatgagtttttgaaatgggggcaaaagacatttaataatttttatttagcaccaccaggaggtggaatttgtcatcaagtaaaccttgagagtattgctagaaccatttggtcaaataaaataaaaaatgataactatctttatccagactctggtgt

SEQ ID NO: 282505 - DNA, 1453 bp, Unknown
  Bacterial polypeptide expressing nucleotide sequence isolated from the Sargasso Sea
tatggcaaattaccttagagcaacaggtagaagtgaagtggctaatatcgctgatttaaatgctgacaatcttcgttctgacaaagaagttctttctaatcctaataattactttgatcagctcattgaaattgatctttctaaacttgagcctcatattaatggaccatttactccggataaagcaactcctatttcgaagatgagatcagaggccgagaaagaagggtggcccgttaatatacaagtcggtcttattggttcttgcactaactcatcatatgaagatatatccagagcagcttcaattgctaagcaggctgtagataatggtttaaagactaaagcaagattcactattacacctggttccgagcaggtcagatttacaatagaacgagatgggtttatagatatttttgaaaagctgggagcagatgtatttgctaatgcctgtggcccgtgtattggacagtgggcacgttctggttcagaaaaagaggagaagaatacgattgttcattcgtttaaccggaactttgcaaaacgtgcagatggtaatcccaatacacatgcatttgtggcatcacctgagttggtaacagccctagcaatttctggaaatttgacttttaatcctgaggtcgattttataaccgataaagatggtaataaggtcaaattgaatccccctgttggatttgatcttccccaaaatggttttgaagtagaagatctaggatatcaggctcctgctgctaacgggtcaaatattgaagttaaggtcgaccccggttcaactaggctacaacttttaactccttttgacccatgggataataaaaattatattggaatgagattgctaataaaggctaaaggtaagtgtacaactgaccatatatcaatggcaggaccatggttaaaatatagggggcatttagataatatctctgataatatgctgacaggagcagttaattactttaatagtaaaactaattgtgtaaaaaaccatttaactggagaatatctaccagttcctcaaactcagcgccaatataaggatgcagggattcctaccattgtagttggagatgaaaattatggagaaggatcatcgcgtgagcatgctgcaatggagccaagacatttaggcgtaagagttgttctggtcaagtcctttgcaaggattcatgaaacaaatttgaaaaagcaaggtatgctaggtcttacttttgctgataagtctgattatgataaaataaatgaggatgatatatttgatttgattgacattgattcctttagtgagggtaatactctgactatgttagtacaccataatgatggaaataaagaaaaagtcatatgtaatcatacctataatgaaacgcagattgattggtttagggcaggttcagcactaaatcttattagatcacagaattaa

SEQ ID NO: 282506 - DNA, 1252 bp, Unknown
  Bacterial polypeptide expressing nucleotide sequence isolated from the Sargasso Sea
tgtaaaaatcaaggtaattggcatgataataattttgataaaataaattaccatgttctagaagagataaatttaaactctattgagcattgcgtatctggtccttcaagaccccaagataggataaaattaaatgaagtaaaaaaaacatacgggaattctttaaattctttagaattaaaagaattaattatacatgaatctaataaaaaactttttggccatggaaaagtttgtttagcagcaatcactagttgtacaaatacatctaatccgtctgtattgatcatggcaggacttatagcgcaaaaagcagtagagttaggtataaaaattccgtggtgggtaaaaacatcctttgcacctggtagcagagttgttgagaaatatttagaggatgcaaatctaattaatccacttaattctttaggctttgatattgtaggatatggttgcacaacatgtattggtaattcaggccctttatcaaaaaaagtttctgaattaattgaatctggagatttaaatgtttgcagtgttatttccggcaacagaaattttgagggaagaatccatccattaattaaatctaattttttagcctctcctccattggtaataatatacgcaattgctggaacggtgaacatcgatttgctaaaaacccctttaactatattagacgggaaaaaaatattctttaaagatttgtggccatctagcaatgaagttgacagtgttatgaataaagttttatcaagaaaaatttttaaaaaaaattattctaaaatttttgaaggagataataattggaaaaatttgaaaattaacaagtctgatacattcaattggtcaatttcttctacttatataaagaaacccccattttttgaaatgaagagtaaaaaaattaataaagattttaaaggtaggcccttacttattttaggtgattcgataacaactgatcacatatcaccagcaggggttataaaggaagatagtgttgctggtgaatatttatcacaaagacaagttaaaacatcagaattcaactcttacggagcacgaagaggaaatcatgaaattatggttagaggaacttttgcaaacattagaattaaaaataagatggtgaatattcagggaggatttacaaaacattatccgagtaaaaagaaaggagagattttcaagatttctgaaaaatataaaaaagataatgtttctcttgtggtttttgcgggtaaaa

SEQ ID NO: 282507 - DNA, 1087 bp, Unknown
  Bacterial polypeptide expressing nucleotide sequence isolated from the Sargasso Sea
atgtttgattttgaaataatcaaagatttatatgcaaatctatcagagcggatagactttgcaaagaacatacttaaccgtcctttaacatatactgaaaagatattatatagccatttatttgacccaaaatttaacaacgaatttcttagagctaaatcatatgttgaattttccccggatagagttgcaatgcaggatgcaacagctcaaatggctttattgcaatttatgatggcaggtaaggttaaagttgcaaaaccaacaacagttcactgcgaccatttaattcaggctaaaattgatgctgaaaaagatttgtctgtcgctcttgacactaatggtgaagtctataactttttagaatcagtatctaataaatatggaattggcttttgggagcctggtgcgggtataattcatcaagtcattcttgaaaattatgcttttccaggaggtatgatgatagggactgatagtcatactgttaacgcaggaggtttaggtatgattgccatcggtgttggtggcgctgatgccgttgatgttatggcaggtatgccgtgggaattattatttccaaagttaattgggataaaacttacaggtgaattaaacgggtggacatcctctaaagatgtgatacttaaggttgcaggattgctatctgtaaaaggaggaacaggtgctattattgagtactttggttcaggcgccaagaatctttcttgtactggaaaaggaacaatatgcaatatgggagcagaaataggtgctacaacatctgtttttgcatatgatgaaaatatggctaagtatcttcaagcaactggtcgttcagaagttgtagaattagctgataattatagagattatttacaagctgatatggaagtatatgctgaaccagaatcttattttgatcaagttatagagataaatctatctgaactggagcctcatttaaatggtccatttactcctgatttagcaacacctatatctcagatgactaaagtcgcaaaaaagaataattggccaactaaaattgaagttagcttgatcggatcatgtacaaattcatctt

SEQ ID NO: 282508 - DNA, 550 bp, Unknown
  Bacterial polypeptide expressing nucleotide sequence isolated from the Sargasso Sea
gaatcatgaaataatgatgaggggtacttttgcaaatatcagaataaaaaatgaaatgttagataatgttgaaggaggatatacgattcattatccatcgaaaaaacaaatgtcaatttatgacgctgcaataaaatacactaaatcacaaacaccattagtagtcattgcaggaaaagattatggaatgggctcgtcaagagactgggcagcaaaaggaacaaatttacttggtgttaaagctgtaattgctgagtcttatgaaaggatacatagatctaacctaatcggaatgggagtactaccttttgtattcaaagatggcgagaatagaaaatctctaaagttagaaggcccagaaaaaataacaataagtggggtcaatgataatttgaaaccacaatctttttataatgcgatgatagtttataaaagcggcaaaaatatatctaccaagataaagctccttgtaaatacatcgacagaagtagaatacctcaaaagtggaggtattctgcaatttgttctaaaagaattagttaattcatag

SEQ ID NO: 282509 - DNA, 1303 bp, Unknown
  Bacterial polypeptide expressing nucleotide sequence isolated from the Sargasso Sea
atgtttgattttgatttaataaaagatttatatgaaaatttgtcagagcgtgtagattttgcaaagtctattttgaaacgaccattaacatactctgagaaaattttatatagccacttatttgaaaacaactttgatagtgaatatatcagatctaaatcatatgtagaattttctcctgatcgagttgcaatgcaggacgcaacagctcaaatggcattattgcaatttatgatggctggtaaaagcaaagtggcaaagccaacaacagttcactgtgatcatcttatccaagcaaaggtggatgcaaaaaaagatttatctgttgctttggattctaatggtgaagtgtatgactttctagaatcagtatctaataaatatggaattggtttctggaagcctggcgctggaataatccatcaggttattcttgaaaactatgcattccctggagggatgatgattggaacagatagtcatactgtaaatgccggtggtcttggaatggttgctattggtgtagggggagcagatgctgtggatgttatggcaggtatgccttgggaattattattccctaaattaattggaattaagctaattggtgagttgaatggatggacttcttcaaaagatattatattaaaagtagcaggattattatcggtaaaaggagggactggtgcaatagtagaatattttggtccaggagcgaagaggctatcttgtactggaaaaggaacgatatgtaatatgggtgcagaaataggtgcaacaacatctatttttggatatgatgaaaatatggctaaatatcttcattcaacaggacgctctcaagttgctgaactagcagataaatttaaaaattatctacaagctgacaatgaagtgtatgctgatccagaattattctttgatcaagtaattgaaattgatttatctcaattggaacctcatttaaatggcccatttacacctgataaagctacgccaatatcagaaatggctaacgaagcaaagaaaaatgattggccaacaaaaattgaagttagtcttattggatcatgtacaaactcatcttatgaagatatatcccgctcagctagcatagctaagcaagcaatagataagaatttgattgttaaaagtgattttactataacacctggaagtgaacaggttagatatactgtcaatagagatggcttattagaagtatttgaaaaaatcggggggattgttttggctaatgcatgtggaccctgcatagggcaatgggatagacatacaaatgatc

SEQ ID NO: 282510 - DNA, 1339 bp, Unknown
  Bacterial polypeptide expressing nucleotide sequence isolated from the Sargasso Sea
gatggatctttcaaaaacacatattgaattagtacaagaagtttacaaaaatcttgaatctaaaatttcagattttaagacgagaaaagacagctctctcactcttgctgaaaaagtattgtacggacatgcaaaagatgtcaaaaatatttcattaaatacaggaaaagattttggcgattttctacctgacagagtcgcaatgcaggatgcaactgctcaaatggctttgctccaatttatgcaagccgaactacctgaaacggcagtgcctactacagttcactgtgaccatctaattcaagcatatgaaggtgcaaatagtgatttaaaagtagctaataaaacacataaagaagtgtttgattttttaagaacagcatctgaaaaatttaatattggtttttggggtccaggagcaggaattattcatcaagtcgttttagaacaatacgcatttccaggtggaatgatgattggaactgatagccatacaccaaatgcaggggggctgggtatgattgcaattggagttggtggagctgatgcagttgatgtaatggctggcatgcctttcaatacaaaaataccaaaattaattggggtaaaacttacaggaaaattaagtggttggacagctcccaaagacataattttgaaagttgcagaaattttgaccgtaaaaggcggcacgaatgcaattgttgaatattttggcgaaggtacagagtctatttctactacaggaaaagcaactataacaaatatgggtgctgaaattggcgcaacatgctctatatttccatttgatgtaaaaggtgaggaataccttaaggccacaggaagaggagacatagcgtctcttgctagggaaaatatgcatttgttaactccagacgatgatgttgttgtaaaccctgaaaattattttgatcaagttattgaaattgatttagatagtcttgagccacacgttgtgggtccacatacaccagacttagctcgcccggtatcaaaattgaaagatgatgctgtagaaaatagttatcctttagaaatttcaaacgctcttataggttcatgcactaattcatcttatgaagatattggtcgagcagcttttatagcaagagaagcagccaaaaaaggtttaaaatctaaagtcccacttatggttactccagggtccgaaattactagagcaactattgaaagagacggatacctaaaagatcttgaagcaataggtgctactgttctcgcgaatgcatgtggaccatgcattggacagtggaaaagagatgatatgaagaaggacaaactaacacaatttctcttc

SEQ ID NO: 282511 - DNA, 862 bp, Unknown
  Bacterial polypeptide expressing nucleotide sequence isolated from the Sargasso Sea
gagcagtttcagaatcgatatgggaatgtctggagctccaatgaacgatggaatgctgtgcctacaacggagggtgaactctacgattggcagggagatagcacgtatgtgcaggagccaccgtttctcgcagaattgactcgagaggcaacaccaccagtgagtgtgagcggtgctcgcgtgcttcttgcattgggtgatagtgtgacgactgaccatatttcacctgccggtgcgatcgccaaagacagtccggctggacgatatcttgtcgagaacggcgtaccacctgaagaattcaatagctacggtgcacgtcgtgggaatgaccgggtcatgacacgcggcacctttgcgaatattcgcattcgcaatctacttgcaccggggacagaaggtggtgtgacccgtctgcttcctgaaggcgaacagatggcagtctatgacgctgcgatgcagtatcgggaacgaggcgtgccgctggttgtccttgctggtgctgagtatggcacgggcagttctcgtgactgggcagccaagggcacgatgctgctcggcgtgcgggcagtgcttgcgacaagtttcgaacgaatccaccgttcaaatcttgtcggtatgggcgtgctgccacttgtgcttcccaagggttggcaagaactcggcctcacaggtgaagagacgtttgatattccatttgatgatctcaccccgcggagcacgcttgaagtaacagcaacccgggcaaacggaacaaccgtgtcgctgccgtgtacggttcgaattgatacaccggttgaacttgatcagttcaaggtcggtggcattcttccatttgtgctgagaaagttgctggcaagctaga

SEQ ID NO: 282512 - DNA, 1471 bp, Unknown
  Bacterial polypeptide expressing nucleotide sequence isolated from the Sargasso Sea
taccagcgatttagaaagtcgcggtatagcagcgaagtggaccgaggaggaaggcaaaatgcctgatggcgcggttattatcgcggctatcacaagttgtaccaatacatctaacccacgcaatgtaattgctgcaggtttacttgctcgaaatgccaacgcgcgcggtttaacccgtaagccgtgggttaagagctcactagcaccaggctctaaggccgttaagctgtatcttgaagaagctaacctgatgagcgagctggaagatttaggctttggcgtggttgcctttgcgtgtactacctgtaacggtatgagcggcgcgctagaccccaaaattcagcaagagatcatcgaccgcgatctttactcaacagcagtattgtcgggtaaccgtaacttcgacggccgtattcacccttacgcaaagcaagcattcttagcatcgccaccactggttgtagcttacgccatcgccggtaccgtgcgctttgatattgaaaaagacatattgggcaccgacaaagaaggcaacccagtaacgcttaaagatatttggccaagcgatgaagagattgacgctattgtagcgaaatcggtgaagccagagcacttcagaaaagtgtacgagccaatgttcgatttaagcgtggactacggcaaagacattaacccgctttatgactggcgtgaaatgagcacctacattcgtcgcccgccctattgggaaggcgcgatggatgctgagcgcaccatgaaaggtatgcgtccactggctattttgggagataacatcaccaccgatcacttgtcgccttcaaacgctattttagccagcagcgcggcaggtgaatacctccacaaaatgggcttaccggaagaagactttaactcgtatgccacacaccgtggtgaccacttaaccgcacagcgcgctacccttgcgaacccgaaagtgttcaacgagatggtgctggaaaacggtgaagtgaagcaaggttcactggcgcgcgttgagccagaaggacaagttatgcgcatgtgggaagctattgaaacctacatgaaccgcagacagccgctgattattgttgctggcgctgactatggtcagggctcgtcacgagactgggcagccaaaggcgtgcgccttgcgggtgttgaagtcattgtggctgaaggtttcgaacgtattcaccgtactaaccttattggtatgggcgtattaccccttgagtttaaaccgggaactacgcgtaaaacactagagctagatggcacagaaacttacgacgttagcggcgaaccgtcaccaggtgcaacgctaacactggtagtgaaccgtcaaaacggcgagcaattagaagtaccggtaacctgtcgcttagacacagcagaagaagtctctatttacagcgcaggcggggtattacagcgcttcgccaaggacttcttagaagctgaagctagc

SEQ ID NO: 282513 - DNA, 2605 bp, Unknown
  Bacterial polypeptide expressing nucleotide sequence isolated from the Sargasso Sea
tatgaccacagccatgaataccttatatcgcaagcccttaccaggcactgcactcgactatttcgatacccgcgaagccgttgaagccatcagccccggcgcctacgcgaaactgccctacacctctcgtgtactggctgaaaacctagtccgtcgctgcgagccagaggcactcaccgcctcactaaaacaaattattgaatcaaagcaagaactggatttcccttggtttccagcccgcgtcgtgtgccacgatattttgggtcaaaccgcgctggttgatcttgcgggtctgcgtgatgcgattgccgctaagggtggcgatccagcgcaggttaaccctgtggttccaacccagctgattgttgaccactcgctggcggtggaatacggcggcttcgataaagacgcctttgcgaaaaaccgcgccatcgaagacagacgcaacgaagacagattccactttatcaactggacgcaaaaagcctttaaaaacatcgatgtgatccctcagggtaacggcatcatgcaccagattaacctcgagcgaatgtcacctgtggtgcatgcgcgcgacggtgttgccttccctgataccttagtgggtaccgacagtcacacgccacacgtggatgcactcggcgttatcgccatcggtgtaggtggccttgaggccgagagcgtgatgttaggccgcgcctcttatatgcgtctgccagacattatcggcgttgagttaacgggcaaaccgcagcctggcattaccgctaccgatatcgtattggccctgaccgaattcctgcgtaaggaaaaagtggtttcatcctacttagagttcttcggcgaaggcgcagaggccttaactcttggtgatcgcgcaaccatctctaacatgaccccagaatttggcgccaccgccgccatgttctatatcgaccaacagacgctggactacttaaccctcacgggccgtagcgacgagcaagtcaagctggttgaaacctatgctaagaccacaggtttgtggagcgatgaccttaaacatgcagaatacccacgtaccctgcgctttgatctgtcatcggttgtgcgcactatcgcgggtccgtctaacccacatgcccgcgtgccaacctctgagcttgccgcgcgcggcattagcggcgtagttgaaaacgaacctggcctaatgccagatggcgccgtgattattgccgccatcaccagctgcaccaacaccagtaatccacgcaacgtgattgcggcgggcctgctggcacgtaacgctaataccaagggcttaagccgtaaaccgtgggtgaaaacctcactcgctcccggctctaaggcagtgcaactgtatttagaagaagccaatttgctgcctgagcttgaatccctaggcttcggtatcgtcggttttgcctgcactacctgtaacggcatgagcggcgcgctcgaccctgttatccaacaggaagtgattgaccgcgatctttacgccaccgccgtattatccggtaaccgtaacttcgacggccgtattcacccttacgctaagcaagccttcctcgcatcaccgccattagtggtggcctatgcaatcgcaggcaccatccgcttcgatatcgagaaagatgtcttaggccacgataaagacggcaacccagtgcgtttaatcgatatttggccaagcgatgccgaaatcgatgccgtgattgcgaaaagcgttaagccggagcagttccgtaaagtctacgagccaatgtttgatttaagcgtcgactatggcgataaggtcacaccactgtacgactggcgcccacaatcgacctatatccgccgcccaccttactgggaaggcgcattagcgggcgagcgcaccctcaagggcatgcgtcctttagcggtattgggcgacaacatcaccaccgaccatttatcgccatcgaacgcgatcatgatggacagcgcggcgggcgaatacctgcacaagatgggactgccagaggaagattttaactcctatgcaacccacaggggcgaccacctaacggcgcagcgcgccacctttgccaaccctaaacttaaaaacgagatggcaattgtcgatggcaaagttaagcaaggctcactggcgcgtatcgaaccagaaggccaagtgactcgcatgtgggaagccattgaaacctatatggatcgcaagcagccgctgatcattatcgccggcgccgactatggtcagggttcatcccgtgactgggccgccaagggcgtgcgtttagcgggtgttgaggccattgttgccgaaggcttcgagcgtattcaccgcactaacttagtgggtatgggtgtattaccgctggaatttaaagcgggcgagaatcgcgcgacctacggcatcgatggtaccgaagtgtttgacgtttatggtgacatagcaccacgtgcagatctaaccgttatcatcacccgtaaaaacggtgagcgtgtcgaagtgcccgtgacctgtcgtttagataccgcagaagaagtgtctatctactcggctggcggcgtgctacagcgttttgcgcaggactttttagagtcaaatctgaagtaa

SEQ ID NO: 282514 - DNA, 904 bp, Unknown
  Bacterial polypeptide expressing nucleotide sequence isolated from the Sargasso Sea
ttgtttgacctcaatattataaaagcattttatgaagaaattcccaataggatttctgatgctagaaaattaattgatcgccctttaactcttactgaaaaaatattatatagtcatttaaataaaaatccatctagtccgtttgaccgaggaaaatcttatgtagaatttcatccagatcgtgtagcaatgcaggatgcaacggctcaaatggcacttcttcaatttatgatgtcaggcaaaaacaaagtatctgtcccatctacagtacattgtgatcatttgattcaagcaaaaattgatgcaaaagcagatttaatgctagcacaagatataaataacgaagtttatgattttcttgaatctgtttctaataaatatggcattggattttggaagcctggcgcaggaataattcatcaagttatattagaaaattatgcttttcctggaggaatgatgattgggacagatagtcatacagttaatgctggaggcttaggaatggttgcagtaggagtaggaggagcagatgcagtagatgtaatggctggaatgccatgggaattgaaatttcctaaattaattggagtcaagctaattggagagatgaaaggttggacttcagctaaagatataatattaaaagttgcaggaatattaactgttaaaggaggtactggagccattttagaatattttggagaaggagcagataagatgtcctgcactgggaaaggtacaatttgtaatatgggtgcagaaataggtgctactacatctatatttgcttatgatgatcatatggcaaattatcttagtgctacaggtcgatcagaagtagctgatttggctaatgaaattaaagatcacttgaaggcagataaagatgtatatagtaatc

SEQ ID NO: 282515 - DNA, 1058 bp, Unknown
  Bacterial polypeptide expressing nucleotide sequence isolated from the Sargasso Sea
gcctatagagaagcccttcaaaaaaaaggaattgattctaaagatattcaaccagatgtacctgtagatttggttattgatcattctttgcaggttgattattttggaaatgataaagctgaaattgaaaacttaaaaaaagagtatgaaagaaattctgagagattttcttttttaagatggtgttctaaatttttggataaagttaatgtaattccaccaggggttggtatttgtcatcaggtaaatattgaatatttatctaaagtcgtatggagagaaaaaaagaaagatctaaatctaattcatccagatacttgcataggaactgatagtcatactccaatggtaaatgctataggtgttttaggttggggtgttggtggagttgaggcagaaatttctatgcttggaaaaacaatacctatgactgtgccagagatagttggggtaaatttaaagaaccaacttaaggaaggaataacttcaacagacttagttttatatattacaaaattattaagaaaaaataaggttgttggaagctttattgaattttgtggagaaggagttgaaagtcttactgttggggatagagcaactatttcaaatatggcaccagagtatggggcaactgcagtcctatttcctgttgacaattcaactttagagtatttgcgtatgacaggaagaacagacgaagaaattcaagttgttgaagaatattctaaacatcaaaaactatggcgaagatctgatattacaccagactataacagagttttgaatcttgatttatcctcaatagaaccatgtgtgtcaggacccaaaaatcctgaggataaaattaatttaaataagttttcaaatgaaattaattctcactcaaacatactttacagtcaagatttacgagaggatgaatttgaagtacctaatcttagttacaaagtaaaagatgcagacattatgattgcagctataacaagctgtacaaacactgcaaatccaaaaaatgttattgctgcaggtttgattgcaaaaaaattagttgagct

SEQ ID NO: 282516 - DNA, 733 bp, Unknown
  Bacterial polypeptide expressing nucleotide sequence isolated from the Sargasso Sea
atgaaaccaggaaataaaaactcatataagtctttaaagaccataaatgtaaatggaaaaaattataaatattattctcttcttgaggctgaaaaaaatggattaagcgatatttcaaaattaccaaaatcattaaaggttcttctagaaaatttgctcagatatgaagatgatacatctgtaactaaagatcaaatagaagcgataaaaaattggatactggaaaaaaaatcgtctacagaaattgcatatagaccagcaagggttttgttgcaagattatacaggcataccagcagtggcagatctagctgcaatgcgtgaagcagtaaaagaaaaaaataaagatcctaatactattaatcctctttcttctgttgatttagttatagatcattcagtccaagttgatcaatctgcaaagcctgattccttcgaaaagaatgtggatatagaatttaaaagaaacagcgaaagatactcttttttaaaatggggacaacaagcttttaataatttccgaatagtacccccaggtacaggcatttgtcatcaagtaaatttagagtatttatcaaaagtagtttggtcagaaaaatatcaagaggatgaatatctttttccagatactttggttggtactgatagtcacacaaccatggttaatggattatcagttcttggatggggtgtaggcggaattgaagctgaggcaggaatgctcgggcagccca

SEQ ID NO: 282517 - DNA, 1297 bp, Unknown
  Bacterial polypeptide expressing nucleotide sequence isolated from the Sargasso Sea
tcagagctactgggaaggaatgatattgctgatgctgcaaacaatgttaaggagcatttaactgcagattctgaagtctacaataatcctgagaaatattttgaccaggtaattgaaataaacttaaatgaactaacacctcacataaatggtccattcacgccagatcttgcaactccagtttcggaaatgaaatcaaaagctaagtcaaacaattggcctatcaaaattgaatggggcctgattggctcttgtacaaattcatcatacgaagatctttcaagggcagcatcaattgcacaacaagctgtcgaaaaaaaattaaatactaaagctgattttggaattaatcctggctcagaacaagtaagatatactgctgaaagagatggactattagaaattttcgaaaaattgaatgcaaaaatttttactaatgcatgtggaccgtgtattggtcaatgggacagagatggtgctgaaaatcatgaaaaaaattctataattcactcttttaacagaaactttgcaaaaagagcagatggtaatcctaatacacatgcatttgtggcgtctcccgaaattgttgcggccattgctatttctggaagattggatttcaatccaattacagacaaattaataaacgaagaaggaaatgaagtttttcttgatcctccaaagggaaatgaacttccagacctagggtttgatgtaaaagaaaatggatatttagaacctgtctcggatggatctgatttaacagttgaagtctctgacaaatccgaaagattgcaactactagaccccttccagccatgggatggttctaatatcaaaggcttaaaactattgattaaagcgcatgggaaatgcactacagatcatatttcaatggcaggcccctggttgagatttcggggacatttggataatatatcaaacaattgtcttattggagctgtaaattcatttaacaacaaaaccaatttagttaaaaatcaaattactggtgagtatggtggtgttccagacactcaaagagagtataaaaaaaataacattccatcaattgtagtaggagaccataattatggtgagggttcttctagagaacatgctgctatggagcctcgccatcttggagttaaagttgtattggttaagtcttttgcaagaattcacgaaactaatctaaaaaaacaaggaatgttaggtattacatttgataatgaaaaagattacgatttaatcgaggaggatgacacttttaattttattgatttaaaaaatttca

SEQ ID NO: 282518 - DNA, 680 bp, Unknown
  Bacterial polypeptide expressing nucleotide sequence isolated from the Sargasso Sea
gatggatttatcagtaacaccagcaagtttagtttcttcagtttatgagaatctaagtgagaatattaagaaattaagagagagaaaaaatgctcctctcactctggctgaaaaacttctctttggccatgctacagatattgatactgtttctctaaataaaggggaagactacggagactttgcacctgatagagttgcaatgcaagatgcaacagcacaaatggctcttttacaatttatgcaagcagaccttccagaaacagcagttccaacaactgtccactgtgaccatttaattcaagcttatgaaggagcagctagcgatcttcaagttgcaaataaaactcataaagaggtttttgactttcttagaactgcttcggaaaaatatgaaataggcttttggggacctggagctggaatcatccatcaagtagttttagaacaatatgcatttccaggaggaatgatgatcggtacagatagtcatactccaaacgctggaggtttatccatgattgcaattggtgttggaggtgcagatgcagttgatgtaatggccggtatgcctttcaatacaaaaatacctagcttaattggagttaagctaactggttctttaagcggctggacatctcccaaagacattattttaaaagttgcagaaatcttgacgg

SEQ ID NO: 282519 - DNA, 432 bp, Unknown
  Bacterial polypeptide expressing nucleotide sequence isolated from the Sargasso Sea
tctcaatctttgaggcagctgaagaattcagatcaagcgatactgacttaatagtactcgcaggcaaagaatatggtacgggctcctctagagattgggccgcaaaaggagtctctcttttgggtgtaaaagctgtgatcgctgaatcttatgaaagaatccatcgctcaaacctcataggcatgggtgtactgccattggagttcaataatggtgagtctgctgaatcgattggtcttaatggctttgagagttttgatattgactccattacgaaggattcaagagtcttatctgttaaagctaaatcaatagatggagaggtaaacacttttgaagtaaaaattagaatcgatacaccaaaggaatgggaatacttcgaacacggtggaatcttgcattatgtcattaggcgtcttgtcgcaaaataat

SEQ ID NO: 282520 - DNA, 781 bp, Unknown
  Bacterial polypeptide expressing nucleotide sequence isolated from the Sargasso Sea
tatgaagcctggaaatcaaaattcgttcaattctttaaaagaactaaatataaatgggaaaaactattctatttattctctaaaagaagctgaaaaaaatggcttagaaggcatcaataaattaccaaaatcaattaaagttttacttgagaatcttctaaggtatgaggacaatatcactgtaaataaacaacaaatattatcaattaaagattggctaaatacaaaaaaatcaaaaactgaaattgcatatagacctgcaagagtacttttacaagactatactggtataccagctgttgctgaccttgccgcgatgagagatacagtcaaagaaaaaaataaggacccaaataaaattaatccactttcttcagtagatttggttattgatcattctgttcaagtggataaatttgctacaaaaaattcattaaaagaaaatgttgatatcgaatttgatagaaactttgaaagatattcctttttaaagtggggacaacaagcgtttgataattttagaattgttccacccggaactggaatttgccatcaagtaaatttagaatatttatcaaaagtagtatggaatgaaaggtttgaagaaaaagaatatttgtttcctgatacactagttggaactgatagtcatacgacaatggttaatggtttatcagtacttgggtggggagtaggaggaattgaggcagaagcagggatgctaggtcaaccaatatctatgttgataccagaggtcatcggatttcaaatgaaaaataaa

SEQ ID NO: 282521 - DNA, 850 bp, Unknown
  Bacterial polypeptide expressing nucleotide sequence isolated from the Sargasso Sea
tatgtcggatcacacaaattcattttcaataaaagaaaaaacatataaatattatgatttaaagtcactcgacagcgaaaaagtagatcgactccctttcactcataaaattcttctagaaaatgctcttcgacatgcagaaaatgatcatgaaggaccaaaagatgttgaaacaatattgaattggaatccaaaatctgatcaatcaactgaaatatcgttcactccaagtcgggtcattctccaagatttcactggcgtaccagctgttgttgatcttgcaacaatgagagatgcggttgtatccatgcagggtgatccaaaagacataaacccactttcaccagcagaactggtgatcgatcattcagtgcaagtagatcattttggaagtttagatgcgcttgaaaaaaataataaagttgaatttcaaagaaatcaggaaagatatcgatttcttaggtggggtcaggatgcattttccaattttgaagtggttcctccaaacactgggatcgtgcatcaggtcaatcttgaatacttgggtcgtgtagttttctctaaagatgattctctggcctatccggatacattagtgggaaccgattctcataccacaatgatcaatggtataggttgcctgggatggggtgttggtggaattgaagctgaggctgctatgttggggcaacccatcacaatgcttctgccagaggtgattggagtttctgtaaagggttcactaaaagaaggtgtaaccgcaactgatctagtgcttacactgacagaaatattgagaaattatggcgttgttggaaaatttgttgaattcttcggcgatggcttggat

SEQ ID NO: 282522 - DNA, 718 bp, Unknown
  Bacterial polypeptide expressing nucleotide sequence isolated from the Sargasso Sea
ggttttattgatcctgagaagttttctagcaaagaaattgaaattgatattgatcctaattcaaaacgcatacaattgcttaagccttttgattcatgggatggtaaaaacattaagaatcttaagttactaataaaggtaaagggtaaatgtactacggaccatatatcgatggctggcccttggcttttttatcgaggacacttagataatatatccaataacttattaattggagctatcaattactttaatgacgaatcaaatcatataaaaaatcagattgatggttcgtatggcgaagttccggatgttcaaaggcaatatcgatcgaaaaatatacccaccattgttgttggagacgaaaattatggtgagggctcttctagagagcatgctgcaatggagccaaggtatcttggggtaagggtggtgctggttaaatcttttgctagaattcatgaaacaaacctaaaaaaacaaggtatgctagcgcttacttttaaaaacaaagaggattacaatatgattcttgaggatgatactcttgatttaattaatctaaacgaattcagcgtagggaagtccataaaaataaaaattacacactctgatggttcaagtgatatcataaattgcaaccatacatataatacttcacagatagaatggtttcgcgcaggttcagcattgaatctcattagatcaaaacaataat

SEQ ID NO: 282523 - DNA, 1435 bp, Unknown
  Bacterial polypeptide expressing nucleotide sequence isolated from the Sargasso Sea
tatggcttttgatattaatgttataaagactgtgtacgcaaagatgtcttctaagattgataatgcaagaaaaattgttggtagacctttaacttattcagaaaaaattttatactctcatctttgggatgaatcatcaaagacagtttttaaaagaggtgaagattatgtcgattttggtccagaccgtgttacatgccaagatgctacagctcagatggcacttcttcaatttatgcaagctggaaaggataaagtagcagttccaacaactgtacattgtgatcatttaattttagctcaatcaggtgcccaaaaagatcttaagaatgccaataaagttagttcagaagtatttaattttttagagtctgtatcaagaaaatatggtattgggttttggaaaccaggagcaggaatcattcatcaagttattctagaaaattacgcttttcctggaggcatgatgattggtactgattcacataccgtaaatgctggtggattagggatggttgccataggtgtgggaggagcagatgcagttgatgttatggcaggaatgccatgggagttaaaatttccaaaattaattggtataaaactaactggtaaattaaatggttgggcttcagctaaagacgtaattttaaaagttgcaggaattttaactgttaaaggtggaacaggatatatacttgaatatttcggagatggcgctgaatctctctcatgtaccggaaaaggtacaatctgtaatatgggtgctgaagttggggcaaccacatcaatatttgcatatgatgaatcgatggaaagatatttaaaatctactgaaagagaagatgtcgttaaagctgcttcaaatattaaagataatcttaaagcagaccaagaagtatatgataatcctgaaaaatattttgatgaagttattgaaattgatttagattcgctaataccacatattaatggaccgttcactcctgatcttgcaacaccggtaaatgagatgaaagataaagccaagtcagaaggctggccgactgatataaaatggggtcttattggctcctgtacaaactcatcatatgaggatctttcaagagctgcatctattgccaaacaagctttggaaaaaaatattaagataaaatctaaattaggaataaatcctggttcagagcaggtaagatatacagctgaaagagatggtataattgagctttttgaaaaacttgaatctaaaatatttactaatgcatgtggaccttgtataggtcaatggaatagggaaggtgaggataatactgagaaaaattcaattattcattcttttaatagaaattttgctaaaagagcagatggtaaccctaacactcatgcctttgtgacctcaccagaaatggtaatggctgttgccttatctggaaat

SEQ ID NO: 282524 - DNA, 2584 bp, Unknown
  Bacterial polypeptide expressing nucleotide sequence isolated from the Sargasso Sea
catgctgagcgcgtatcgcgagctggccgccgaccgcgaagcccaaggcatcccggccctgccgctaaccgctgagcagacccagggcctgaccgaactgctgcaacaaccacctgcaggggaggacgaagccctgttgcatttgctcattgagcgcattccacccggagttgacgaagccgcttatgtgaaagccacctggctcagcgccgtcgcccaagggcaagcgacaacccccctggtgtcaccactggatgccactcgcctgctcggaaccatggtgggtggttacaacgtggcagctctgattgagctgcttcagcacagcgacgagcagctggccagctgcgcggctgaaggcctcagccgcaccctgctggtttacgacgcctttaatgacgtgatggagctggcggcgagcaatcgcttcgccaatcaggtggtggacagctgggcggcggccgaatggttcacccgccgtgagcccctggccgacacgatcacggtcaccgtgttcaaggtggaaggggaaaccaacaccgacgacctctcacccgccacccacgccaccacccgaccggacattcccctgcacgccctggcaatgctcgagactcgggatcccgagggtctgacaacgatcgcagccctcaaagaaaagggtcatccggtggcctatgtgggcgacgtagtgggtaccggcagctccaggaaaagtgcgatcaactccgtgctctggcacaccggcaacgacattccccacgtccccaacaaacgaggcggcggcgtgattctcggcggcaagatcgcgccgatctttttcaacaccgccgaagactccggagccctgccgatcgaatgcgatgtcactgtcctgaacaccggtgatgtgatcaccatcaggccccacgccggcacgatcgaacgcgatggcgaggtggtgagtcggtttgaactcaaacccagcaccatcagcgatgaagtgcgggccggaggccgcatccctttgatgatcggccgggccctaacagacaaggtgcgagcgcagctgggtctcaccccttcggacgccttcatccgaccctcggcaccagcagacaccggcaagggcttcaccctggcccagaaaatggtgggcaaggcctgcggactgccgggcgttcgccccggcaccagctgcgagccactgatgaccaccgtcggctcccaggacaccaccggaccgatgacacgggatgagatgaaggagctggcctgtctcggcttctcctccgacctggtgatgcagagcttctgccacaccgcggcttaccccaaaccagtggatctgcagacccagaaggatctgccggacttctttgcccagcgcggcggtgttgcccttcgcccaggcgacgggatcatccacagctggctgaaccgcatgctcctgcccgacagcgtgggcacgggtggggacagccacacccgcttccccctcggcatttccttccccgccggttccggcctggtggccttcgctgctgccatcggtgcgatgcccctggacatgcccgagtcggtgctggtgcgcttcagcggttcgctgcagccgggtgtgacgctgcgggatgtggtgaacgccattccctgggtggccattcagaagggcctgctcacggtggagaaggccaacaagaagaacgtcttcaacggccggatcatggagatcgaaggtctgccggatctcaagctggagcaggccttcgaactcaccgatgccaccgccgaacgctcctgcgccggctgcacgatcaagctctcggaagcaaccgtgagcgaatacctgcgcagcaatgtggccctgctgaaaaacatgatcgccaggggctacagcgatgccaaaaccctggctcggcggatcaaggccatggaggcctggctggccaatccgcagctgctgagcgctgatccggatgctcaatatgccgaagtcctggagatcaacctcgacgagctcaccgaaccggtgctggcctgtcccaacgatcccgacaacgtgaaactgctgagtgaggtcgccggcgaccccgttcaggaggtgttcatcggctcctgcatgaccaacatcggccactaccgcgccgcggccaaggtgctggaggggtccggcagcaacaaagcccgcctctgggtctgcccgccgacacgcatggacgaggaaaccctgaaagccgaggggtactacgccaccttcgaagcggccggctcgcgcatggagatgccgggttgttcgctctgcatgggcaaccaggcccgggtggaggacaacaccacggtgttctccaccagcacccgcaacttcaacaaccgtctgggcaaaggcgcccaggtgtatctgggcagtgccgagctggcagcggtctgcgccctgctgggtcgcattcccaccgccgatgagtaccgctcgatcgccgctgaaaaaatcgatccgctgtcagatgagctctaccgctacctgaatttcgatcagatcagtggctttgaagatcagggccgcgtgatgagtgcggatgaggaggcggctgtgctggctgaagcctga

SEQ ID NO: 282525 - DNA, 1516 bp, Unknown
  Bacterial polypeptide expressing nucleotide sequence isolated from the Sargasso Sea
atgttggacttcagctaaggatgttatactgaaagttgcaggaattttaactgtaaaaggtggaacaggatatataatagagtattttggagatggtgctgaatctctatcatgtactggtaaaggaacaatttgtaatatgggtgctgaggttggagctacaacatctatttttgcctatgatgattcaatggaaaggtatcttatttcgacagacaggcaagatgtagttgaagcagcaagtattataaaacacgaattaagatctgatgatgaagtttacaaaaatccagaaaaatattatgaccaaatcattgaaattgatttagataaattatctcctcacataaatggaccttttactccagatctagccacaccagttagtgaaatgaaggctaaagttgaatctgaaggttggcctaacgaaattcaatggggcttgatagggtcttgtacgaattcatcttatgaagatttatcaagagctgcatcaattgcacaacaagcactagaaaataaaataaaaatcaaatctaaacttggaatcaatcctggatctgaacaagtaagatttacagctgaaagagatgggattattgatatttttgaaaaacttgaaagtaaaatttttaccaatgcttgtgggccatgtattggacaatggaatagggaaggtgaagataaatctgaaaagaattctataatacactcttttaatagaaactttgcaaaaagggcagatggtaacccgaacactcatgcgtttgtttcatctcctgaaatggtgatggcagttgctctttcgggtaaacttgactttaaccctttgacagataagctaatgaatgaagatggtgaagaaattattctcagcccaccaattggtgatgagttaccttccaaaggttttgcatgtgaagataatgggtatatagagcctcctcttgatggtaaagacatagagattataattaatcctgagtctcaaagacttcaaaaacttgaaccttttcttccttgggatggaaaaaacataatgaatgcgaggctgcttattaaagctcacggtaagtgtacaacagaccatatttctatggcaggtccatggttaagatttagaggtcaccttgacaatatatcggataactgcttgattggagcagtcaaccacttcaatatgaaaactaacagtgtgaagaatttaattacaggtgattatggtcctgttcctgagactcaaagattttataagaaaaataatattgatacaattgttgtaggagatcataattatggagagggttcatcaagagaacatgctgcaatggagcctagacatctaggaattaaggtagttattgttaaatcttttgcaagaatccatgagactaatttaaagaagcagggtatgcttgcactaacttttgacaatgaatctgattatgataaaatacaagaagaagatgcttttaactttatagatctagagtcattttctcctggtaatcattaa

SEQ ID NO: 282526 - DNA, 2024 bp, Unknown
  Bacterial polypeptide expressing nucleotide sequence isolated from the Sargasso Sea
tatgaatattgattaccgtaaaccgcttccaaacgcaggtatcgattttttcgatacccgtgaagcggtagatgctattgagcctggcgcctacgccaagctgccttacacctcacgtgtactggctgaaaacttggtgcgcaaatgcgcacctgagatgctcaccgactcgctaaaacagctgatttatcgcaagcgcgacttagacttcccgtggtttccggctcgcgtagtgtgtcacgacattttgggtcaaacggcacttgtcgacctagctggtcttcgcgacgctattgcagaaaaaggtggcgacccggcgaaggtaaaccccgttgttcctacgcagctaattgtggatcactcattggctgtagagcatgctggtttcgagaaagacgcgtttgaaaagaaccgtgctatcgaagacagacgtaacgacgaccgtttccacttcataaactggacaaagacggcatttaaaaacgttgatgttatccctccgggtaacggcattatgcaccaaattaacctagagcgtatgtcaccggttattcaagctcgtgacggcgttgccttccctgatacgctagtgggtacagacagccatacgccgcatgttgatgcacttggcgttattgcggtaggtgtgggcggtcttgaagcggaaagcgtaatgttgggccgcgcgtcttacatgcgtttgcccgacattgtaggtgttgagctaacgggcaaaccacagccaggtattacggctaccgacattgtattagcgcttactgaattcttgcgtaaagagcgcgtagtctctgcttaccttgaattctacggtgaaggtgcatcgcacctgacgctgggcgaccgtgctactatttcgaacatgacaccggagtatggcgccactgcagccatgttctacattgaccagcaaaccatcgattacttacgcctaacagggcgtgaggaaaagcaaattgcacttgttgagcaatatgccaagcatactggcttatgggctgatgacttagaaaccgccgagtacgagcgggtgcttacattcgacctgtcttctgttggccgtaacatggctggcccttctaacccacacgcacgtttacctaccagcgatttagaaagtcgcggtatagcagcgaagtggaccgaggaggaaggcaaaatgcctgatggcgcggttattatcgcggcaattacaagctgtaccaatacctctaacccgcgtaacgtcatagcggcaggcttattggcacgcaacgctaacgcgcgcggtttaacccgtaaaccatgggtaaaaagctcgctagcacctggttctaaggccgttaagctgtatcttgaagaagccagcttaatgagcgagttggaagatttaggctttggcgtggttgcctttgcgtgtactacctgtaacggcatgagcggcgcactagaccctaaaatccagcaagaaattatcgaccgcgacctttatgcgactgcggtactatctggtaaccgtaacttcgacggccgtattcacccttacgcgaagcaagcctttttggcatcgccaccgctagttgttgcatatgctatcgccggtaccattcgctttgatattgaaaaggacgtattgggcaccgacaaagacggcaacccggtaacgcttaaagatatttggccaagcgatgaagaaattgacgctattgtagcgaaatcagtgaagccagagcacttcagaaaagtgtacgagccaatgttcgatttaagcgtggactacggcaaagacattaacccgctttatgactggcgtgaaatgagtacctatattcgccgtccaccctattgggaaggcgcaatggatgccgagcgcaccatgaaaggtatgcgtccgctagccattttgggagacacatcaccaccgatcacctgtctccttctaatgctattttggcaagtagtgcagcgggtgaatatttggcgaaaatgggtctacctgaagaagactttaactcgtatgcacacac

SEQ ID NO: 282527 - DNA, 565 bp, Unknown
  Bacterial polypeptide expressing nucleotide sequence isolated from the Sargasso Sea
tatgtttattcaaagatactcaaatgtttctgatggtcctactcaatggcaacaaattaaaactgaaaaaagcagtatttataaatgggatgaaggttcaacttatgtaaaaaaacctccattctttgaaggtttatctgatgaaccagaaggatttaaagaaattaaagatgcaagaccgttattaatattaggtgacatgataacaacagatcatatttcaccagctggcagcatacaaaaagatagtccaactggagaatattttatggaacatcaaattttacctaaagattataattcttatggctcaagaagaggtaaccatgaagttatgatgagaggaacttttgcaaatattagaattagaaatgaaatggcgccaggaactgaaggtggatttacaaaattatatcctgaagaaaaagttatgcctgtttatgatgcagttgttgagtataaaaaaagaggaactgatctagtagttataggtggcaaagaatatggaactggctcctcaagagattgggctgctaaaggaactaaacttttaggagtaaaaagc

SEQ ID NO: 282528 - DNA, 1069 bp, Unknown
  Bacterial polypeptide expressing nucleotide sequence isolated from the Sargasso Sea
atgtcagatcatacaaattcattctcaatcgatgaaaaaacatataagtattttgatttaaagacactggatactgacaaagtagatcgtcttccatttacgcataaaattcttcttgaaaatgcacttcgatattcagaggatgacaatgaagggcctaaagatgtggagacaattctcaattgggattcaaaatccgatcgatcaacagaaatatccttcacacccagtcgtgtcattctccaagatttcactggggtaccggctgtagtggatcttgccacaatgagagatgcagtggtatcaatgcaaggcaacccaaatgacatcaatccactttctcctgcggagttggtgattgatcattccgttcaagtggatcattttggaagtctggatgcactagagaagaacaataaagttgaatttcaaagaaatcaggagagatatagatttctgagatggggacaggatgcattttccaattttgaagtagttcctccaaatactggaattgttcaccaagtcaatcttgaatatctgggtcgtgttgtattctcgaaagatgattcattggcttaccccgataccctggttggaaccgattctcacacgacgatgatcaatggaattggatgcctaggatggggggtaggtggaattgaggcagaggcagcgatgctgggtcagcccatcacaatgcttctaccagaagtcattggagtctctgtgaagggcgcgttaaaggaaggtgtaaccgcaactgatttggtgcttacgctgacggaaatactcagaaattatggagttgttggaaagtttgtggaattttttggcgacggcctggatcatcttcccgtctctgatcgggcaactttgagcaatatggctcctgaatttggaagcacttgtgccatttttccaatagacgaagcaacaatcaggtacttaaaactctcagggcgaagcgaacaccaggtcgaattggttgaaacatactccaagattcaaggtttatggagagaaaccgattctaatattgactatacagacgtgatcgagttagatc

SEQ ID NO: 282529 - DNA, 1129 bp, Unknown
  Bacterial polypeptide expressing nucleotide sequence isolated from the Sargasso Sea
tattgcacgagaagcagcaaagcatggtctgaaagcgaaagttccattaatggttactccaggttcagaacaaacaagagcaactattgaaagagatggttatttgaaagatttagaggatattggagcagtagtattagcaaatgcttgtggtccatgtattgggcaatggaaaagagatgatattaaagaaggagagagtaactcaattgtctcatcatttaatagaaactttccagctcgtaacgacggtaatgctgagaccctatcttttattggttcaccagaaacagttataggactagcactaggtggaagattagattttaatttcttgaatgatactttaactgacgaagaaggtaatgaaataacattaaatccaccagttgctgatgagttgcctgagtcaggatttgaaacaacacttgaaggctttattcaaccagatgacggggaagtcgagataataattgatcctgaatcaaatagattacaagcactagttccatttagtcctttcgaaagtgataattaccactcaatgacagtattaatgaaagcaagtggtaaatgtacaacggaccatatttccccagctggaaaatggttgcaattcagaggtcacttagaaaatatctcacagaacctatttataggagttaataatgcattcactgaaaatgcaggtgaaggtataaatcagttagataattcggttatgtccttaccggatattgcaaaatcatatcatgaagagggcataaactggatagcagttggtgatgaaaattatggagaaggttcatcaagagaacatgcagcaatggaaccaaggtttagaggatgtaaggtggttttagtaaaaagtttcgcaagaatccatgaagcaaatcttaaaaaacaaggtattcttcctctgacttttgaaaataaagatgattacgacctgattgaacaagaagataaaataacaatagaaaatttagaagcaattgctcctgatgcttcagtaaatataacaatcgaaaaaactgacggagaaacaaaagacattaaagctaaccattctctttctgatgaacaaattgaatggtttaaagctggatctgctctaaattcaatataa

SEQ ID NO: 282530 - DNA, 487 bp, Unknown
  Bacterial polypeptide expressing nucleotide sequence isolated from the Sargasso Sea
gctcctggaactgaaggtggatttacaaaattataccccgaaggaaaagtaatgcctgtttacgatgcagtagttgaatacaaaaaaagaggcaccgatttagtagtaatagggggcaaagaatatggtacaggttcctcacgagactgggcagctaaaggaaccaaattattaggtgtaaaggcagtgattgctgaaagttttgagagaattcataggtcaaatttaattggcatggggatattgcctctccaatttaaagataatataactagaaaaagtataaatcttaatggttcagaattaataagtgttattgatattgaaaaaggaatcgatccatctgatacggtcaaattagaaattaaatatctaactggtgacattaaaattattaaaacattgtgcagaatagataccaaaaatgagttagaatattacaaaaacggaggaatacttcagtatgttcttcgtaatatgatttaat

SEQ ID NO: 282531 - DNA, 244 bp, Unknown
  Bacterial polypeptide expressing nucleotide sequence isolated from the Sargasso Sea
attgtctggtaacagaaactttgaaggtagaattaatccagatgtaaaggcaaattacttagcatcaccacctttagtagttgcttatgctttagcaggtaatatgcatcacgatctttataaaaattcattaggtaaagatcaaaatggaaaagatgtctttttaaaagatatttggccttcaaataaagaaatcgaagagttaatgttaaaatctattaatgccgatatgtttgttaagaga

SEQ ID NO: 282532 - DNA, 529 bp, Unknown
  Bacterial polypeptide expressing nucleotide sequence isolated from the Sargasso Sea
atgatgagagggacatttgcgaatatccgtttgagaaataaactcgcgccaggaactgaaggtggctggacaaaactatcagaaaatgaagaaccaatctcaatctttgaggcagctgaagaattcagatcaagcgatactgacttaatagtgctcgcaggcaaagaatatggtacaggctcctctagagattgggccgcaaaaggagtctctcttttgggtgtaaaagctgtgatcgctgaatcttatgaaagaatccatcgctcaaacctgataggcatgggtgtactgccattggagttcaataatggtgagtctgctgaatcgattggtcttaatggctttgagagttttgatattgagtccattacgagggattcaagagtcttatctgttaaagctaaatcaatagatggtgaggtaaactcttttgaagtaaaaattagaatcgatacaccaaaggaatgggaatacttcgaacacggtggaatcttgcattatgtcattaggcgtcttgtcgcaaaataat

SEQ ID NO: 282533 - DNA, 478 bp, Unknown
  Bacterial polypeptide expressing nucleotide sequence isolated from the Sargasso Sea
cgataaaacaggtggatacacaaaacacatacctactaataaaattgtcagcgtttatgaagcttctgaattatataaaaatgaagatagggagcttattgttattgctgggaaaaattatggttgtggttcttcaagagattgggctgcaaaaggaactaagttattaggagttaaagcagttatagcagagagttttgagcgcattcatcgatcaaatttagtagggatgggtgttcttcctttagaatttataaaaggtgaaaattatgaatctctaggaattgataataattcaacattcacgattgctgcgttaaagcgaaatgatacaaatgtaaatattaattctactaaaaacggacaaccatacacgtttaaagctaaagtaagaatagacaccgataaagaatgggattattttttaaacgatgggatattaaactatgtattaaagaatatatctaattcaacttag

SEQ ID NO: 282534 - DNA, 638 bp, Unknown
  Bacterial polypeptide expressing nucleotide sequence isolated from the Sargasso Sea
aatgcaatatcaatcatctgcaaagaaagaattaaccatcaataatagaaaatttgagtattttgatcttaactcaatagataatgaacttgtaagaacccttccctattcattaaaaatacttcttgaaaatcttctaagacatgaagatggtattaacgtgaccagagaagatatactggcaattgcaaactgggatccaaaccaaaaaccggaaaaagaaatttcattcacaccgtcgcgtgtgattttacaagattttaccggtgttccagctgtagttgatttagcggcaatgagagacgctatagtaaatctaggttcagatgcaaataaaataaatccgttatctcctgttgagctcgtaattgatcattctgtacaagtagataactacgccaaatccaatgcactagatttaaacaatataatagaattcaaaaggaataaggaaagatattcatttttgaagtggggtcaaaaagaattcaagaattttaaagttgtacctccaaatacaggaattgttcatcaagttaatttggaataccttagccgggttgtttttaatcacaactcctctgattcaaatacgctatatccagacacagtagtaggaaccgacagtcatacgacga

SEQ ID NO: 282535 - DNA, 766 bp, Unknown
  Bacterial polypeptide expressing nucleotide sequence isolated from the Sargasso Sea
tatgtcggatcacacaaattcattttcaataaaagaaaaaacatataaatattatgatttaaagtcgctcgacagcgaaaaagtagatcgactccccttcacgcataaaattcttctagaaaatgctcttcggcatgcagaaaatgatcatgaaggaccaaaagatgttgaaacaatattgaattggaatccaaaatctgatcaatcaactgaaatatcgttcactccaagtcgggtcattctccaagatttcactggcgtaccagctgttgttgatcttgcaacaatgagagatgcggttgtatccatgcagggtgatccaaaagacataaacccactttcgccagcagaactggtgatcgatcattcagtgcaagtagatcattttggaagtttggatgcacttgaaaaaaataataaagttgaattccaaagaaatcaggaaagatatcgatttcttaggtggggtcaggatgcattttccaattttgaagtggttcctccaaatactgggatcgtgcatcaggtcaatcttgaatacttgggtcgtgtggttttctctaaagatgattctctggcctatccggatacattggtgggaaccgattcacataccacaatgatcaatggtataggttgcctaggatggggtgttggtggaattgaagctgaggctgccatgttgggacaacccatcacaatgcttttgccagaagtcattggagtttccgtaaagggttcactaaaagaaggcgtaaccgcaact

SEQ ID NO: 282536 - DNA, 676 bp, Unknown
  Bacterial polypeptide expressing nucleotide sequence isolated from the Sargasso Sea
tatgaaaccaggaaataaaaactcttataactcattaaagtcattaaatattaatggcaaagaatataagtattattctcttttagaagccgaaaaaaatggtttaaaagatatttctaaattaccaaaatcattgaaagttcttctagaaaatttgcttagatatgaagatgacttaactgtaactaaagaccaaattgattcaattaagaattggcttaaagaaaaaaaatctaaaacagaaattgcatatagaccagctagagttttattgcaagattacactggaattcctgctgtagctgatcttgcagctatgagagaagcggttaaaaaaaaaaataaagatccaaataccataaatcctctttcaaaggttgacctggttatagatcattcagttcaagtggataaatctgctaaatcagactcatttgaaaaaaacgtagatatagaatttgagagaaatggagaacgatattcctttttaaaatgggggcaacaagcatttaataattttcgtattgttccacctggaactgggatttgtcatcaagttaatttagaatacttgtcaaaagtagtttggactgaaaaatttgaaaataataattatattttccctgatacattagttggaactgatagtcatacaactatggttaatggattatca

SEQ ID NO: 282537 - DNA, 811 bp, Unknown
  Bacterial polypeptide expressing nucleotide sequence isolated from the Sargasso Sea
atgaaaccaggaaaaaaaaattcttataactcattaaaatcattaaatattaatggtaaagagtataaatattattctcttttagaggcagaaaaaaatggtttaaataatatttctaagttaccaaaatctttgaaagttcttttagaaaatttgcttagatacgaagatgaattaacagtaacaaaacatcaaatcgtttcaattaaagattggcttaaagaaaaaaaatctaaaacagagattgcatatagacctgctagagttttattgcaagactacactggaattcctgcagtagccgatcttgccgcaatgagagaagcagttaagaataaaaataaagatccaaatactataaatcctctttcaacagttgacttagttatagatcattcggttcaagttgataaatcagcaaaatcagattcatttgaaaaaaatgttgatattgagtttgaaagaaacggagaaagatactcttttttaaaatggggccagcaagcttttagcaactttagaattgttccacctggaacaggaatttgccatcaagtaaatttagaatacttatcaaaagttgtctggacagaaaactttgaggaaaataattatatttttcctgacactcttgttggaaccgatagtcacacaactatggttaatgcattatcagtacttggatggggcgttggaggtatagaagctgaagcgggaatgcttggaacaccaatttctatgttaattccagaggtaattggatttgaagtgaaaaataattacctgaaggaactacagcgacagatttagt

SEQ ID NO: 282538 - DNA, 831 bp, Unknown
  Bacterial polypeptide expressing nucleotide sequence isolated from the Sargasso Sea
tatgtttgattttgaaataatcaaagatttatatgctaatctatcaaagcgggtagattttgctaagaacatacttaaccgtcctttaacatatacagagaagatattatatagccatttatttgacccgaaatttaacaacgaatttcttagagctaaatcatatgttgaattttccccggatagagttgcaatgcaggatgcaacagctcaaatggctttattgcaatttatgatggcaggtaagattagagttgcaaagcctacaacagttcactgtgatcatttaattcaggctaaaattgatgctgtaaaagatttgtctgtcgctctagatactaatggtgaagtctataactttttagaatcagtatctaataaatatggaattggcttttgggagccaggtgcgggtataattcatcaagtcattcttgagaattatgcttttccaggtggtatgatgataggtacagatagtcatactgttaacgcaggaggtttaggtatgattgccatcggtgttggtggcgctgatgccgttgatgttatggcaggtatgccgtgggaattattatttccaaagttaattgggataaaacttacaggtaaattaaacgggtggacatcctctaaagacgtgatacttaaggttgcaggattgctatctgtaaaaggaggaacaggtgctattattgagtactttggttcaggcgccaagaatctttcttgtactggaaaaggaacaatatgcaatatgggagcagaaataggtgctacaacatctgtttttgcatatgatgaaaatatggctaagtatcttcaagcaac

SEQ ID NO: 282539 - DNA, 2605 bp, Unknown
  Bacterial polypeptide expressing nucleotide sequence isolated from the Sargasso Sea
tatgagcactgttatgaacacccaatatcgcaagcctttacccggcacagcactcgactatttcgatacccgcgaagccattgaagccattgcccccggcgcctatgcgaaattgccttacacctcgcgcgtgttagcggaaaacttagtgcgtcgctgcgagccgcaggcgcttacagactcgctaaaacaaattattgaatcaaaacaggaactagatttcccatggttcccggcccgcgtggtgtgccacgatattttggggcaaaccgcgctggtagaccttgcaggtctgcgtgatgcgattgctgctaagggaggcgatccggcgcaggttaaccctgtggtcccgacccagctgattgtcgaccactcactggctgtggaattcggtggtttcgataaagatgccttcgccaaaaaccgcgccatcgaagacaggcgcaacgaagacagatttcactttatcaactggacgcaaaaagcctttaaaaacattgatgtgatcccacagggtaacggcatcatgcaccaaatcaacctggagcgtatgtcacccgtggtgcatgctcgcgatggcgtggcattccccgataccttagtgggcaccgacagtcacacgccacacgtggatgcgctgggcgtcatcgctatcggagtgggtggacttgaggccgaaagcgtgatgctgggccgcgcctcctatatgcgtctacccgacattatcggcgttgagctaacaggcaagcctcagccaggcattaccgccaccgatatcgtattagccttgaccgaattcctgcgtaaggaaaaagtggtttcttcttatttagagttcttcggcgaaggtgctgaggctttaacccttggcgatcgtgcgactatctctaacatgacgccagaatttggcgccaccgccgccatgttctatatcgaccaacaaacgctagactacctaaccctcacgggtcgtagccatgagcaagttaaattggttgagacctatgccaagaccacaggtttgtggagcgatgatctcaagcaggccgagtacccacgtaccctgcattttgatctatcatcggtagtgcgtaccattgctggcccatcgaatccccatgctcgcgttccgacttcagagttggccgcgcgcggcatcagcggcgtggttgaaaacgagccaggcttaatgccagatggtgcagtgattattgcggctattacaagctgcaccaacaccagtaacccacgcaacgtgattgcggctggcctgctggcacgtaacgccaatgccaaaggcttaagtcgcaaaccttgggttaaaacctcactcgcccccggctctaaggcggtacaactctatttagaagaagccaacttgctgccagagctagagtcattaggcttcggtattgtcggttttgcctgcaccacctgtaacggtatgagcggcgcactcgacccggtgattcagcaggaagtgatcgaccgcgatctgtacgccaccgccgtattatccggtaaccgtaacttcgacggtcgtatccatccttacgctaagcaagccttcctcgcatcgccaccgttagtggtggcctatgcaattgcgggtaccattcgtttcgatatcgagaaggatgtgttaggccacgataaagacggcaagccagtgcgcttaatcgatatttggccaacggataccgaaatcgatgcagtgattgcggcaagcgtgaagccagagcagttccgcaaagtctacgagccaatgttcgacctgagcgtcgactatggcgataaggtcagcccactgtacaactggcgtccacaatcaacctatatccgccgcccaccttactgggaaggtgcattagcgggcgagcgcaccctcaagggcatgcgtccactcgcggtattaggcgacaacatcaccactgaccatttatcgccatcgaacgcgattatgatggacagcgcggcgggcgaatacctacataaaatgggcctgccagaggaagactttaactcctacgcgacccacaggggcgaccatttaaccgcccagcgcgcgaccttcgccaaccctaaactcaaaaacgagatggcaattgtcgatggcaaagttaagcaaggctccctggcgcgtatcgagccagaaggccaagtgacccgcatgtgggaagccattgaaacctatatggatcgcaaacaaccgctgattattatcgctggtgccgactatggtcagggatcatcccgtgactgggcggccaagggcgtgcgcttagcgggcgttgaggcgattgtcgccgaaggctttgagcgtattcaccgcacaaacttagtcggtatgggcgtgttaccgctggagttcaaatcgggcgagaatcgcgcgacctatggcatcgatggcaccgaggtgtttgatgttgttggtgatatcgcgccacgtgcagacttgaccgttatcatcacccgtaaaaacggtgagcgcgtcgaagtgcctgtgacctgtcgtttagataccgctgaagaagtgtctatctactctgctggcggcgtactgcaacggtttgcgcaggactttttagagtcaaatctgaagtaa

SEQ ID NO: 282540 - DNA, 1555 bp, Unknown
  Bacterial polypeptide expressing nucleotide sequence isolated from the Sargasso Sea
taatgctgaagtccaagttaaatcaattttagaaaaaaaaatcggtgaagcaataaattttgctccaaatagaattttaagtcatgatatattgggtaaagtaatgttggtagactttattgcttacagagaagcacttcaaaaaaagggaataaactcaaaagatattcaaccagatgtacctgtggatttggttatcgaccattctttgcaggttgattattttggtgatgataaagctgaaattgagaacctaaaaaaagaatatgagagaaattctgagagattttcttttttaagatggtgctcaaaatttttagataaagttaatgtaatcccaccaggggttggtatttgtcatcaggtcaatgttgaatatttatctaaagttgtatggagagagaaaaaggaaaattttaatcttattcatcctgatacatgcataggaactgatagtcatactccaatggtaaatgctataggagttttaggttggggggttggtggtgttgaagctgaaatttctatgcttggaaaaaccatacctatgactgtcccagaaatagttggagtaaacttagaaaatcaacttaaagaaggaataacttccacagatttagttttacatataacaaaactattaagagcaaataaggttgttggcagctttattgaattttgtggagaaggagtagaaagtttgactgttggagatagagcaactatttcaaatatggcccctgagtatggtgcaaccgctgtcttatttcctgttgataattcaactttagattatttaaaaatgacaggtagaactgatgaagaaatccaagttgttgaggagtattctaaaaatcaaaaattatggcgaagatcagatattactccagattataatagggtattaaatcttgatttgtcctcaatagagccttgtgtttcagggcctaaaaatcctgaggataaaattaatctaaataagttttcaaatgaaattaactctcactcaaagatgctttacaatcaggatttaagaccagatgaatttgaagtacctgatcttgaatataaaataaaagatgcagacataatgatagcggccataacaagctgcactaacactgcaaatccaaaaaatgtaatcgcagcaggtttggttgcaaaaaaattagttgaactaggttttaaaaaaaaaaataaaataaaaacatcttttgcacctggtagcaaggttactgcagaaatattaaatagatctggtttacaaaaatatttagatcaattaggttttaatgtagtaggttttggatgtacaacttgcaacggcagctcaggacctttagatgagaacttagcaaatactattgagaaagaaaaaattttttcagttgcagtactttcaggaaatagaaatttccaaggtagaatacaccctaatataagagcttcatatttagcatcacctgcattggtggtactattttctataacaggtaacgtcaaaattaatcttttaaaagatagtttaggaaaaagtaaaaatgatgaaaatatt

SEQ ID NO: 282541 - DNA, 433 bp, Unknown
  Bacterial polypeptide expressing nucleotide sequence isolated from the Sargasso Sea
tcagtttatgatgcagtagtggagtataaaaaaaggggaactgacttagttgtaattggtggcaaagaatatggaacaggctcctctcgtgattgggctgcaaagggaactaaattattgggtgttaaggtagtaattgcagaaagttttgagagaatacacagatctaatttaattgggatgggaatattgccattgcaatttacagaaaatatgaacagaaaaaatcttaatttattaggttctgaattgattagtgtagtagatattgaaaaaggaattaatccctctgacaaagtaaaagttgagattaaatatgcatcgggtgatgtaaaaataatagatacgctgtgcagaattgatactaaaaatgaattggaatactataaaaatggtggaatacttcaatatgttttaagaaatatgatttaaa

SEQ ID NO: 282542 - DNA, 1351 bp, Unknown
  Bacterial polypeptide expressing nucleotide sequence isolated from the Sargasso Sea
attgtctaaaacagagatagaaactacccctgaatttgtaaaaaatgtatatgaaaaatctgaaaaaaatattacaaaatttcgaaatacactaaaaagacctctcactcttactgaaaaaattcttgcaggacatcttgaagatgaatttttagataaattattagatgaaaaaaagaattatgtttttcttagacctgaccgtgttgctctacaagacgttactggtcaaatggttatgttacaatttatgcaagcaggtttgaaatctgttacattacctacaactgtacattgtgatcatctaatacaagcacgaactgaaggaaaatctgatacaaaattagcaatgtatgaaaataatgaagtgtataaatttcttgaaactgcatccagcaagtacggtgctggattttggaatccgggtgcaggaatcatacatcaagtagttttagaaaattatgcatttcctggaggtttaatgattggaactgattctcatactccaaatgcaggtggattaggaatgatagctgtaggtgttggtggtcttgatgcagctgaaacaatggcaggtatgccatgggaattactttacccaaaacgaataggtgttcatcttaaaggaaaaatgagtggatggactgctcctaaagatgtaatattatttgttgcaggaaaactttcagtatctggaggtacaaattctattatcgaatattttggtcctggtgtagaatcaattagttgtactggtaaagcaacaattacaaacatgggtgctgaaattggtgcaacatgttcaatatttccttatgataaaaggatggaaacatatctgaattcgacaaatagaaaagaaattgcatctcttgcaaatgatcatatgagtttacttcaagctgatcctgaagtcgaacaaaacccggaaaaattctttgataaaattattgaaattgatctttcaactcttgaacctcatgtagttggaccacatactcctgatctagcaagaccaatttcaaaattatctgacgaaatagactcaaatgactacattgataaaatttctgttgcattaattggtagttgtacaaactcctcttatgaggacatgtctagatcatctagtgttgcaaaacaggctgaaacacatggaattaaggcaaaaattccattattagtaactcctggttcagaacaaattcgttctaccattgaaagagatggacaaattgatactttgaaatcaatcggtgcaactgttcttgctaatgcatgtggtccttgcattggtcaatggcaaagacccgagctaaaagatggagaaaaaaattctattgtcacatca

SEQ ID NO: 282543 - DNA, 745 bp, Unknown
  Bacterial polypeptide expressing nucleotide sequence isolated from the Sargasso Sea
tgcaaatggatttgtaaacaccgaaggaatttaccttcctccatctgaaaatcctgaaaatgttgaagttttactagatccaaaaagtgagagattacaaaaacttgaaccattctcgtcttggaatggtaatgatttcactggattaaatttaattttaaaggcaaaaggaaaatgtaccactgatcatatttctccggcaggtccttggcttagacttcgtggacatttggataaccttagtgataatttactcttaggtgctgtaaatgcatttaatgatgaagtaggtaaagcaaaaaacattcttacaaataatattgaaaattgctcacaaattgcaagaagctacaaagaaaaaaatatgcgttgggtgatagttggagataataattatggtgaaggtagtagtcgtgaacatgcagcaatgactcctagatttttgggttgtgctgttgttattgcaaaatcttttgcaagaatacatgaaacaaatctcaaaaaacaaggcatacttgcattaacatttgaaaactctgatgattatgaaaagatcaaagaagatgataaaattagtatctcaggattaagtgattttgctcctgacaaatcctttgaatgtcaattagaacactctgatggcaatactgaaaaaatcatgttaaaacattcttacaattcatcacaaattgaatggttcaaagctggttctgctttgaatgttttaaaaaataaaacatcgtaa

SEQ ID NO: 282544 - DNA, 1294 bp, Unknown
  Bacterial polypeptide expressing nucleotide sequence isolated from the Sargasso Sea
tcatattgttggaccacacacaccagatttagctagttcaatttctggattaaaaaaagatgcaaacgacaatgagtatcctgtaaaaatctcaagtgcattgattggatcttgtacgaattcatcatatgaggacattggtagagccgccttcattgctagagaagctgcaaagcacggtctgaaggcaaaagtgcctttgatggttactcctggatcagaacaaactagagcaacaatagaacgggatggatacttaaaggatttagaatcgattggagctactgttcttgcgaatgcatgtggtccttgtatcggtcaatggaaaagagatgacatcaaagaaggggagagtaactcaatcgtctcatcgtttaatagaaactttcctgctagaaatgatgggaatgcagagacactatcatttattggttcacctgaatcagttataggtttagcacttggtggaacattagatttcaacttcttaagcgacactcttactactcaagatggggaagaaattttactcaacccacctgttgcagatgaattacctgataaaggttttgaagaaacactggagggatttattcaaccaacacctggtgatgatgttgaagtaataattgatccagaatcaaatagacttcaaaaacttatcccatttcttccacctaatgaagaagactatgcttcaatgagcgtcttaatgaaggcagaaggaaaatgtacaactgaccatatttctcctgctggtaaatggttacagttccgaggtcatcttgaaaatatttcacaaaacttgttcaatggagtcaataatgcatttgctgaaaaagcaggtgatggtgtaaacatactcacaaaggaagtcgatacattgccaaacatagcaaagaattacagtgaggagaatgttagctgggtagctgttggggatgaaaactatggtgagggctcatcaagagagcacgcagcaatggagccgagatttagaggctgtaaggtcgtgttggtaaaaagttttgcacgaatacatgaagcaaacttaaagaagcaaggtattttacctctagtctttgaagacaaaaacgattatgaaaagattgaacagttcgacaaaatgactatcggtagtctgaaagacattgcagttgacacacccgttgagattatcctcgaaaaagaaaatggtgaaacagagacaatcaaagcaaatcattctctatctgaggatcagattgcttggttttttgctggttctgcattgaactatatcaaatcaaaataa

SEQ ID NO: 282545 - DNA, 1045 bp, Unknown
  Bacterial polypeptide expressing nucleotide sequence isolated from the Sargasso Sea
actgcgtcgagaggatggacgcatggtgacgatcgacgatgtgaacgccttaatcaactggcgtgaagcatgtcattcagatcatgaaatcgcttatcgtcctgcccgggtattactccaggatttcacgggcgtacctgcgattgtcgacttggcgtctatgcgtgacgccatggtcgatataggcgacgacccggagagaattaatccgctttcgccggttgatctggttatagatcattcgttaatggccgaatacgccggcacccacggcgccatcgaaaagaatgtccgaatggagttcgagcgcaaccaggagcgctacgagttcctgaaatgggggcaaggcgccttccagaacatgcgggtcgtgccgccaggtacggggatttgccatcaggttaatctcgaatatctcgcccaagtcgttttttccgagaaagtcgatggcaaggaggtcgcctatccggacactttggtcgggacggatagccataccacaatggtgaatggactatcggtcctcggttggggtgtcggcggcattgaggcggaagccgtcatgctggggcagccaatttcgatgctggtgccggaggtgattgggttcaagctcgctggggcgatgaccgagggcacaaccgctacggaccttgttctgacagttgtcgagattttgcgtcatgagggtgtggtagggaagttcgtggagttttatggccctggcttagataatttgaccctggccgatcaagcgacgattgcaaacatggcgcccgagtatggcgcgacctgtggtttttttccaatcacccaggcgacgctagattacatgaccttcactggtcgcgatgcccatcaggtggccttggtcgaggcctacgccaaggtgcaggggatgtggcgtgggcgagatacgccggaccctgtgttttcggacatccttgagctggatcttggcgatgtcgcggcgtccatcgcaggcccaaagcgtccgcaggaccggatttcgctgaaagacgcatcgatcactttcaaagcgcaa

SEQ ID NO: 282546 - DNA, 1036 bp, Unknown
  Bacterial polypeptide expressing nucleotide sequence isolated from the Sargasso Sea
atgaaaccaggaaataaaaattcttacaaatcattatctgacctagaggttaagggtaaaaattataaatattattcattaaaaaaagctgaatttaatggtttagaaggtgtttcaaaattaccaaagtcattaaaagttttattagaaaatttacttaggtatgaggacgatatatcagttaataaaaaacaaatagaagcagtaaaaaactggcttgatacaaaaaaatcaaaaactgaaatagcttacagaccagctagggttttactccaagattatacagggataccagcagtggctgatttagctgctatgagagaagctgtaaaagaaaaaaataaagatccaaatacaattaaccctttatctgcagtcgatttagttattgatcactctgttcaagttgatcaatcagccaaaaaagattcatttgaaaagaatgtagatatcgaatttaaaagaaatggcgaaagatattcctttttaaaatggggtcaaagcgcttttaacaattttagaattgttcctccaggaactggtatctgtcaccaggttaatttagagtatttatcaaaagtagtttggtcagaagaatacaaaggagaaaaatatttattccctgatactcttgttggaacagacagtcatacaaccatggtcaatggtttatcagttttaggatggggtgttggtggaattgaagctgaggcgggtatgttgggacaacctatttcaatgttaatccctgaagtcattggatttgaagtaacaaaaaaaatgccagagggcacaactgctacagacttagttttaacagttgttaaaatgcttagagacaaaggagtagttgggaaatttgttgaattctacggtgagggattaaaaaatttaactttagcagacagagcaacaattgctaatatggcaccagagtatggagctacatgcggattctttccaatagatgaggaaactttaaaatatttagaattttctggaagagataaagaaacagtcgcgattgttgaaaagt

SEQ ID NO: 282547 - DNA, 955 bp, Unknown
  Bacterial polypeptide expressing nucleotide sequence isolated from the Sargasso Sea
aacagcatttgcaaaagttttcaaagaaaatgcaaagcgatctaagcctgtagagactgatgttaatggtgcagattttaaattaaaagatggagatattgtcatagcagcaattacgtcatgtacgaatacttcaaatccaagcgttttgataggagctggactcctagctaaaaatgcctacgaaagaggattgagagtaaagccctgggtcaaaacttctttagcgccaggatcacaagttgttaccgactatttagaaaaggctggcttaaataaatatttagatgagttaggttttaatctagtaggatatggctgcactacttgtattggtaactcaggtccacttaaaaaaaatatctctgatgccattaatgataaagatttatacgctgtatcagttttatctggaaatagaaactttgagggcagaattaatcccgatgtaaaagccaattatttggcatcaccccctttggtagttgcttatgcattagcaggcaatatgaattttgatttatacaaatcttcactaggaaaagataagggcggaaaagatgtatttttaaaagatatttggccaagtaacaaagaaattgaagatataatgcttaaatcattaaacgctgatatgtttaaaaaaaggtattcaaatgtttctgaaggtccaaaagagtggagagaaataaatacagttgatagtgatatttataattgggaacaaaactcaacttacgtgaaaagaccacctttttttgataatcttccagataaacctgagggttttaaaccaataaatgacgccagaatcctattattactaggagatacggtaaccacagaccatatttcaccagcaggcagtataaagaaagaaagtccaactggcgattattttatggaacatcaaattcaacaaaaagattttaattcttacggagccagaagagga

SEQ ID NO: 282548 - DNA, 886 bp, Unknown
  Bacterial polypeptide expressing nucleotide sequence isolated from the Sargasso Sea
atcgaggaaactatagatccagttatgttcagtaaggcctatgaatattcaatacaaggagatgatgcatggaagaatctagaaacacctcaaggtgaaatctatcaatgggaagagaactcgacttatataaaaaaaccgccctactttgaatcaatgagcatggatattccaggaataaaaaccatacaaaatgcaagagcccttgcattacttggtgattctgtcaccactgatcacatttcaccggcgggtaatattgatccagaatcacctgcgggtagatatctaaaagataacggtgtagaaagaaaagatttcaattcatacggttccagaagaggcaatcatgaagtcatgatgagagggacatttgcgaatatccgtttgagaaataaactcgcgccaggaactgaaggtggctggacaaaactatcagaaaatgaagaaccaatctcaatctttgaggcagctgaagaattcagatcaagcgatactgacttaatagtgctcgcaggcaaagaatatggtacaggctcctctagagattgggccgcaaaaggagtctctcttttgggtgtaaaagctgtgattgctgaatcttatgaaagaatccatcgctcaaatctgataggcatgggtgtactgccattggagttcaataatggtgagtctgctgaatcgattggtcttaatggctttgagagttttgatattgagtccattacgagggattcaagagtcttttctgttaaagctaaatcaatagatggagaggtaaacacttttgaagtaaaaattagaatcgatacaccaaaggaatgggaatacttcgaacacggtggaatcttgcattatgtcattaggcgtcttgtcgcaaaataat

SEQ ID NO: 282549 - DNA, 946 bp, Unknown
  Bacterial polypeptide expressing nucleotide sequence isolated from the Sargasso Sea
caatattataggttatggatgtacaacatgtattggtaattcaggacccattgatgagaagtatgtaaaagaaattaacgacaacgatatagtcgctagttctgttttatcaggaaataggaattttgaagggcgtattcatccagaagtcaaaatgaactttttgatgtctccaatgttagtgatagcatactcacttattggcaatataaatttcgatattacccgtgaaagtttgggtaaggataaaaataacaatgatgttttcttatcagatatatggccatcatcagacgatataaattcagttattcaaaaaaatattgatagtaatatgtttgtaaattcttataaagatttatttgagggagatgataattggaaaaatatatcaactagtcagtctgaattttttaattgggaagattcatcaacctatattcaaccatcacccttttttacaactcaaaatgattctgaaaacaaactagaggaaattacagatgcttacccattactagtcttaggtgatagtgtaactaccgatcatatttcacctgctggttcttttaaagaatctacacctgctggtacatatctagttgatcaaggaactagtgtattagactttaattcatatggatcaagacgcggtaattttaaaattatgcaaaggggaacatttgcaaatattcgaattgccaataaacttgttcccgataaaacaggcggatacacaaaacacatacctactaataaaattgtcagcgtttatgaagcttctgaattatataaaaatgaagatagggagcttattgttattgctgggaagaattatggttgtggctcttcgagagattgggctgcaaaaggaactaagttattaggggttaaagcagttatagcagagagttttgagcgcattcatagatcaaatttagtaggg

SEQ ID NO: 282550 - DNA, 709 bp, Unknown
  Bacterial polypeptide expressing nucleotide sequence isolated from the Sargasso Sea
taaacaaattaaagatgcaagaccattattaattttaggagacatggtcacaacggatcatatatcgccagcaggctctattcagaaagaaagcccaactggagactattttatgaagcatcaaattttaccaaaagattttaactcctatggctcaaggagaggaaaccatgaagtaatgatgagaggaacttttgcaaatataagaattaaaaatgagatagcaccgggtacagagggaggatttacaaaattatttcctgaggaaaaaattatgccagtttatgacgctgttgtagaatataaaaaaagaggaactgacttggttgtaattggaggaaaagaatatggaacaggctcatctagagactgggctgctaaaggaacaaaattactaggtataaaagttattattgcagaaagttttgagagaatacacagatcgaatcttgttggaatgggtatcttgccattacaatttgttgatggaatgaatagaattaatttaaaacttgaagggtctgaactatttagcttactaaatattgaaaaaggcatggagccttcagaaaaagttgaattagagatcaaatataaatctggggatattaaaaaaataaaaacattgtgcagaattgatacaaaaaatgagttagaatattataaaaatggaggaattcttcagtatgtgctgagaaatttaatttaa

SEQ ID NO: 282551 - DNA, 581 bp, Unknown
  Bacterial polypeptide expressing nucleotide sequence isolated from the Sargasso Sea
tcaaaaaaatttcaactcctatggttctagaagaggaaatcacgaaattatgatgagaggaacatttgctaatattagaattaaaaatgaaattttacctgaaactgaaggcggtcttacaaaatcattcatttcgaatcaaaagatgtcaatttacgatgcttcacaagaatatataaaaaataatatagatactgtaattatagcaggtaaggagtatggcacaggctcttcaagagattgggctgcaaaaggaacaaagcttttaggtataaaagcagtaattgctgaaagttttgaaagaattcatagatcaaatttaattggcatgggtgttttgccattagaattcgttgatagtaataaatatgaattgcaaataaaaggtgatgagctcattacaataacaggcatatcaaacttagcaccaaataaaattctaaattgtaaaattgtttcaacaaaaactaaatctataaatttaaaatgtcgaatagatacagaaaaagaattagattactatcgagcaggaggaatattaaattttgttcttaatgaaattatttcaaatgctgcttaaa

SEQ ID NO: 282552 - DNA, 1002 bp, Unknown
  Bacterial polypeptide expressing nucleotide sequence isolated from the Sargasso Sea
tttgctgcaaaaaaaagcaattgaaaaaggacttacaacaaaaccttgggttaaaacatcattagcgccaggctcgcaagttgtaacagattatttagcaaaagcaggtttaaatacttatcttgatcaacttggatttaatttagtaggttatggttgcactacttgtataggaaattcaggtccattacctgacaatatttctgatgcaattaaagatgaaaatatttatgcagtttcagtcttatctggcaatagaaactttgaaggaagaatttcgcctttagttaaagctaattacttagcatcacccccattagttgttgcttatgcaattgctggatctatgaataaagatttatacaaagatccacttggaaaagataaagaaggaaatgatgttttcttgaaagatatttggccaacaaatcaagagatagaagatactttacaaaaatctttaaatgctgaaatgtttattaaaagatattcaaatgtttcagagggacctgaacaatggcaaaaaattaaaacagaggaaagcagtatttataattgggaagatacttcaacatatgtaaagaaacccccgttctttgataatctttctgatgaacctgaaggatttaaagaaataaaagatgcaagacctcttttaattttaggagatagtgtcacaacggaccatatttctccagcaggctctattcaaaaagaaagtccaacaggtgaatattttatgaaacaccaaattctaccgaaagattataactcttatggttcaagaagaggcaatcatgaagttatgatgagaggaacttttgcaaatattagaattagaaatgaaatggcaccaggaaccgagggtggatttacaaaattatatccagagcaaaaagtaatgccggtttatgatgctgtagttgaatataagaaaagaggaactgatttagttgttattggtggaaaagaatacggcacaggatctcaagagactggcag

SEQ ID NO: 282553 - DNA, 958 bp, Unknown
  Bacterial polypeptide expressing nucleotide sequence isolated from the Sargasso Sea
ctttatgtgaggctgaaaaatggtctaaaaggtatttcaaatttaccaaagtcattaaaagttttattagaaaaccttcttagatatgaagatgatttgtcagttactaaaaatcaaatagaggcaattcaaaagtggttagtagaaaaaaaatctaatatagaaatagcctatcgacctgcaagagttttactgcaggactatacaggaataccggcggttgcagatttagctgcaatgagagaagctgtaaaagaaaaaaataaagatccaaatactattaaccctctttcttctgttgatttagtaatagaccattcggtacaggtggaccaatctgcaaaatctgattcatttgaaaaaaatgtagatatagagtttaaaagaaatggagaaagatattctttcttgaagtggggacaacaagcttttaataattttagaatcgttcctccaggtactggtatatgtcaccaagttaatcttgaatatttgtcaaaagtagtttggtgtgaaaaatataaagaagaaaaatatttgtttccagatactctggttggaactgatagccatacaacaatggtaaatggattatcagttcttggttggggagttggtggaatagaagcagaggcaggaatgcttggccagccaatttcaatgttaataccagaggtaataggttttgagcttaaaaataaaatgccagaaggtaccacagctaccgatttggttttaactgttgttaaaattttaagagacaaaggcgttgttggaaaatttgttgaattttatggagatggattaaaaaatttaacacttgctgatagagcgactatagcaaatatggctccagaatatggtgctacatgtggtttttttccaattgacgatgagactattaaatatcttagattttcaggaagagatgaacatacagttgttacagtagaaaaat

SEQ ID NO: 282554 - DNA, 792 bp, Unknown
  Bacterial polypeptide expressing nucleotide sequence isolated from the Sargasso Sea
tcttttttaaaatggggacagcaagcctttaataattttagaattgttcctccaggtacaggaatttgtcaccaggtaaatttagaatacttatcaaaagtagtttggaatgaaaaatttgaggataaagagtacttatttccagatacgctagttggaactgatagccatactacaatggttaatgggttatcagtgctaggttggggtgttggaggaattgaagctgaagctggtatgttgggacaacctatatcaatgttgataccagaagtagttggatttgaaatgaaaaacaagctacccgaaggtacaactgctaccgacctagttttaacagtagttaaaatgttaagagataaaggtgttgttggtaaatttgtagaattttatggagaaggtctaaaaaatctaacacttgctgatagagcaactattgcaaatatggcacctgagtatggcgctacctgtggatttttcccaatagatgatgaaactttaaaatatttagaattttcaggaagatcaaatgaaaatattcaaatcgtagaaaaatatgcaaaggaacaaaatttatgggcaagtgatgatcttgtattcactgatactttatctctagatatgtctacagtagttccaacaatttctggaccaaaaagacctcaagataaagttcttttaacagaagcatcaaaaaattttataaaagtttttgaagatgtttgtaaaaaaaaaaagccaacaatagcaaaagttaaagacacagattttgagataaaagatggagatata

SEQ ID NO: 282555 - DNA, 919 bp, Unknown
  Bacterial polypeptide expressing nucleotide sequence isolated from the Sargasso Sea
aagcaaatgagcttgggtttaagcaccaaaagttgggtaaagaccagcctagctcctggctcgagagtcgtgactgattatctggaaaaagcaggtcttgataagcatctcgataagcttggatttcaaactgttggctatggttgtactacatgcataggtaattctggaccgctcaaccaagacatatcagaagcagtcattgaaggaaatataatcggttgcagcgttctatcaggaaatcgaaattttgaaggcagaatccacccactagttcaaatgaattttcttgcgtcacctccgctggttgttgcttattcattagtaggaaccatgaacattaatttatctaatgatcctatcgggaaagataaaaacgacaatgatgtttatttaaaagatatctggccaagccaaagtgaagtctcggccgcactttcatcttctatcaactcagaaatgtttgcctccagctataaatctgtctttgatggtgatgacaattggaattctcttgatatagctacaggagagaaatttgcatgggacaataattccacctatataaaacatccaccatacttcgaaaatatgaaacaagaacctgctggtgtaatggatataaaaaatgcaaggttattagctctgcttggtgattctgtgacaacagatcatatatcgcccgctggtgcaatcgcaaaaggcagtcctgctgcaaaatacctaattgatcagggagttgatgaaaataatttcaactcatatgggtccagaagaggaaatcatgaagtcatgatgaggggtacatttgctaatatcaggttgcgcaataaaatggcaccaggaactgagggaggatggacgacacatcaccccagtaacgaaataatgacaatttatgatgccgcacaaaaataca

SEQ ID NO: 282556 - DNA, 1003 bp, Unknown
  Bacterial polypeptide expressing nucleotide sequence isolated from the Sargasso Sea
tcattagatattaatggtaaaaaatataaatattattctcttttagaagcagaaaaaaatggtttaaaagatatttcaaaattaccaaaatctttaaaggttctattagaaaacttacttagatatgaagatgatttaacagtaacaaaagatcaaatcgactcaattaaaaattggcttaaagaaaaaaaatctaaaacagaaatagcatatagacctgcaagaattttattacaagattatacaggaatacctgcagtagctgacctagcagcaatgagagaggcggttaaagaaaaaaataaagatccaaatactataaatcctctttcaaaagtagacttagttatagatcattccgttcaagttgataaatctgcaaaatcagacgcatttgaaaaaaatgtcgatattgaatttgaaagaaatggtgaaagatattcttttttaaaatggggacaacaagctttcgacaactttaggatagttccccctggaactggaatttgtcatcaagtgaatttagaatatttatcaaaagttgtttggacagaaaagtttgaaaaagattattacattttccccgacactttggtgggtacggatagtcataccacaatggttaatgggttatcagtactaggatggggagttggaggtatagaagctgaagcgggtatgcttggacaaccaatttcaatgttaattccagaagttgttggttttgaaatgaagaataaattaccagaaggaacaaccgcaacagatttggttttaacagtagttaaaatgctaagagacaaaggtgtcgttggaaaatttgtggaattttatggagaaggcttaaaaaatttaacattagctgatagagcaactattgcaaatatggccccagaatatggagctacttgtggtttctttccagtagatgatgaaactttaaaatatttaaatttttctggaagagaaaaacatacagtagatattgttgaaagttatgcaa

SEQ ID NO: 282557 - DNA, 928 bp, Unknown
  Bacterial polypeptide expressing nucleotide sequence isolated from the Sargasso Sea
aatcttcctcttcctgatagggctacaatagctaatatggcacctgaatatggagctacgatgggctttttccctgttgatcaagaagcattaaattattttaaattaactggtagaacatctgaagaaattgaattagctaaagaatattatataaatcaaaacagttttagagattctacaagtaaggaccccaattattataagtcattgtatttaaatcttgaaacagttcaacctgccttagcaggtccaaaaagacctcaagataggattcttttagctgacatgaaagaatctctccatgcagaattaaaatcaagaaaaattaaaaatgatgaagaatttgaagttgaaaatactaacgaatctttaaaaaatggttctgttgttcttgctgcaattactagttgcacgaatacatcaaatccttatgtaatggttacagctgggcttgttgcaaaaaaagcgcatgatttaggtttaaaagtaccttcgtttgttaaaactagcttagctccgggttcaaaagtagttgtagactatctcgagaatgctggactgctagaaagtctttcagatattggttttaaaactgttggatttggatgtacaacttgtataggtaatagcggcccacttcccgatgaggttgcaaacttagttactgataaggagcttcatgtggcagctgtttccagtggaaacagaaatttcgaaggaagagtgcatcctttaattcgattatcttatcttgggtcccctcctttagtagttgcatatgcattagcaggtacagtcgatatagatttttatagagaagaaattggtaaatccaaagatggtaaagatatttttttgaaagatatttggccaactaatcaggaaataaaagatactgttaacaagtctatacttccagatacat

SEQ ID NO: 282558 - DNA, 922 bp, Unknown
  Bacterial polypeptide expressing nucleotide sequence isolated from the Sargasso Sea
tgtggtttttttccaattgatgaagaaactttaaaatatttaagattttcaggaagagatgaacatacagttaatactgttgaaaaatatgcaaaagaacaaggactttgggcgagtgataatattgaatttactgatacagtttcacttgatatgtcttcagttgttccaacaatatccggaccaaaaagaccacaagacaaagtattgttgaatgaggcttcatctagatttaaaaaagttttcaaaaatactacatcaagaaaaacaaatcttatctcgaaagttaaaggtgctgattttgaaattaaagatggttcaatattaattgctgcaattacatcttgcactaatacatctaacccaaatgtcttaattgctgcaggtttgttggcaaaaaaagctgttgaactaggtttgatgactcaaccttgggtaaaaacttctttagcaccaggctcacaagtagtaactgattatttaaaaaaatctggtcttaataaatatttggacgaattaggttttaatttagttggctatgggtgtacgacatgtattggaaattcaggtcctttaccagaaaatattgttgaagcgatcgaaaaaaatgatttatatgcagtttctgttttatctggtaacagaaattttgaaggccgaatttccccacatattaaagcgaattatcttgcttcacctccactagttgtagcttatgcgctagccggtcatatggaggtagacctatatagagatcctttaggaaaggataaaaatggaaataatattttcttaaaagatatttggccctcaaataaccaaatagaggaaactttgagagatgcattaaatgctgaaatgttcgttaaaagatatgccaacgtttccgaaggaccgatccaatggcaaaaaataaaaactg

SEQ ID NO: 282559 - DNA, 1021 bp, Unknown
  Bacterial polypeptide expressing nucleotide sequence isolated from the Sargasso Sea
ggtagtggcttactcattagttgccaatatgcatcatgatttatacaaatccccattaggtaaagataagaatggaaaagatgtatttctcaaggacatttggcccactaataaagagattgaagaattaatactaaattcaataagtgcagacatgtttgtttcgcgttattcaaacgtttctgaaggttcaaaagaatggagctcaattaaaacagatcagagcagtatttataattggaaagagaattcaacatatgtaaaaaaaccaccttttttcgacaatctacctgatgaacctgagggatttaaaaaaataaaagatgcaagacctcttttaattctaggcgataccgttacaactgaccacatttctccagcgggatttattaaaaaagatagtccaactggtgattattttatggaaaaacaagtacaacaaaaagattttaattcatatggtgctagaagaggtaatcatgaagttatgttgagaggtacttttggaaacattagaataagaaatgaaatggcacctggcacagagggaggtcttacaattttacagccagatggtaaacaaatgagcgtttacgatgcggctatggaatataaacaaagaggtaatgatcttattgttattgctggcaaggaatatggaactggatcctcaagagattgggctgcaaaaggaaccaaattacttggtataaaatcagttattgctgagagttttgaaaggatacacaggtcaaatttggtaggaatggggattttacctctacagttcaaagagggatttgatagaaaaaaattaaatataaaaggcacagaattatttacaataataaatattgaaaagggattaaatccaagagccgaagtaagttgcgagataaaatatgttgatggctcaagtaaaacaattcagctcttatcaagaatagatactgaaaatgaaattgaatattataaaaatggtggaattcttcaatttgttttaagaaatatgttaaattaa

SEQ ID NO: 282560 - DNA, 820 bp, Unknown
  Bacterial polypeptide expressing nucleotide sequence isolated from the Sargasso Sea
ttggaattctattaaaactgtttctcaagatacttttaaatggagagaaacaagtacctatattaaacatcctcctttttttacaaataattctaataatacaaaagaagatataaatgatgcaagaatactagctcttttaggagacacagtaaccacagatcatatttctccagctggtgcaataaaagaaaaaagccctgctggtgaatatctttccatgagacaaatatctaaagaaaattttaattcatacggatctagaagaggaaatcacgaaataatgatgaggggtactttcgcaaatataagaataagaaatgaaattaacaagaatatagaaggagggataacatattgttatattaataataagaatatgccaatttatgatgctgcgatggaatacgccaaacactctattcctctagttgtactagctggcaaagagtatggcaccggctcttctcgtgactgggcagctaaaggaactaagcttttagggattagagctattatagctgagtcatttgaaagaattcacagatctaacctaatcggaatgggagtaataccatttgaatttacagaaggccaaaaccgaataaatttgtcaataaagggagatgaaaaaatttctattttgggaataaatcaaattgcccccaacaaaataattgagtgcactatatcaagaaaagattttcttaaaaaaataaaattaagatgcagaatagatactataaaagaacttgaatattttaaagcaggaggtattttgcaatttgttcttaactcaatcattgcaagagcttcttaa

SEQ ID NO: 282561 - DNA, 626 bp, Unknown
  Bacterial polypeptide expressing nucleotide sequence isolated from the Sargasso Sea
aagaaagtccaactgggtgaatattttattggaacatcaaattttaccaaaagattataattcatatggatcaagaaggggaaatcatgaagttatgatgagaggtacatttgctaatataagaataaaaaatgagatagcgcctggcactgaaggtggttttacaaagttatttccagaaggaaaagtaatgacagtttatgatgctgtagtagagtacaaaaaaagaggaaccgatttagtggtaataggtggcaaagagtatggaactggttcatctagagattgggctgcaaaaggtacgaaattattaggtattaaaacagttatagctgaaagttttgaaagaattcatcggtctaatcttattggaatgggaatattacctttgcaattcatagatggaatgaatagatcaaatttaaaactaaaaggatctgagctaatcagtgtattaaatctcgaaaaaggcctatctccttcagataaagtagaaatggaaataaaatacatatctggtgatataaagaaaattaaaacattgtgcagaatagatacaaaaaatgagttagaatattataaaaatggtgggattctacaatacgttttaagaaatatgatttaat

SEQ ID NO: 282562 - DNA, 925 bp, Unknown
  Bacterial polypeptide expressing nucleotide sequence isolated from the Sargasso Sea
agagttttgttgcaagactatactggaattcctgcagtagctgatttggcagcaatgcgagaagctgttaaagagaaaaataaagatccaaatactatcaatccactttctgccgttgacttagtaatagatcattcagtacaagttgatcagtctgcaaaacctgattcatttgaaaaaaacgttgatatagagtttaaaagaaatggtgaaagatattcctttttaaagtggggacaacaagcttttaataattttagaattgtcccaccaggcactggtatctgtcatcaagtaaatttagaatatctatcaaaagttgtttggtcagaaaaatataaagaagatgaatatttatttcctgacactttagttggaacagatagtcatacgacgatggtaaacggattatcagtacttggttggggtgttggtggaatagaggctgaagcaggaatgcttggtcagccaatttcaatgttaattcctgaggttataggttttgaagtaaaaaacaaaatgcctgaaggtactacagctactgatttagttttaacagttgtaaaaattttaagagacaaaggtgttgttggaaaatttgtagaattttatggagatggattaaaaaatctaacacttgctgatagagcaactatcgcaaatatggctccagaatatggagcaacttgtggtttttttccaattgatgatgaaactttaaaatatttaagattttcgggaagaaacgaacatatagtttctattgtagaaaaatatgcaaaagagcaaggattgtgggtaagtgaaaatattgaatttacagataaggtttcactagatatgtcttcaattgttccaacaatatctggaccaaaaagaccacaagacaaagttttattaaacgaagcatcatcagaattttaaa

SEQ ID NO: 282563 - DNA, 1025 bp, Unknown
  Bacterial polypeptide expressing nucleotide sequence isolated from the Sargasso Sea
aaatttgttgaattttatggagatggactaaaaaatttaactcttgctgatagagcaactattgcaaatatggccccagaatatggtgccacttgcggtttttttccaattgatgatgagactttaaaatatttaaaattttctggaagagataagcaaactgttactattgtagaaaaatatgcaaaagaacaggggttatgggcaagtgaaaatgttcaatttacagataaggtttcactagatatgtctttacttgttccaacaatatcaggaccaaaaagacctcaagataaagttttattaaacgaagcatcatttgggtttaaaaaagtatttgaaaataccacagaaagaaaagaaaaaagtatttcaaaagttagtggaactgattttgaagttaaggatggttctatattaatagctgcaattacatcatgcactaatacatctaacccaaatgttttaattggagcaggcttgttagcaaaaaaagctgtagaatttggattaaaaacaaaaccttgggtaaaaacttcactagcacctggatcacaggtagtaactgattatttagaaaaagctggtctaaataagtatttggacgaattgggatttaatttggttggttatgggtgtaccacatgtattggaaactcaggtccattgcctgataatattgtagaagcaattgaaaaagaaaatatatattcagtttcagttttgtctgggaatagaaattttgaaggacgtatatctcctcatataaaagcaaattatcttgcctcgccgccacttgttgttgcttatgctctagctggtcatatggaagtagatttatataaagattctttagggaaagataaaaatggtaaagatatatttttaaaagatatttggccttcaaacaaagaaatagatgaaactttaaaagaagcattaaatgcagaaatgtttgttgaaagatactccaatgtttctgaaggaccagttcagtggcaaaaaattaaaactgaaaaaagtag

SEQ ID NO: 282564 - DNA, 704 bp, Unknown
  Bacterial polypeptide expressing nucleotide sequence isolated from the Sargasso Sea
aattaaaaatgcgagaccacttttaattttgggcgacatggttaccactgatcatatatctcccgcaggctcaattcaaaaagaaagccctacaggagagtattttatgcaacatcaaatacttccaaaagattacaattcttatggatcgagaagaggcaatcatgaggtaatgatgagaggtacttttgcaaatataagaattagaaatgaaatagctccaggaacagagggcggttttacaaaactatttccagaagaaaaaataatgccaatttacgatgctgttgttgaatataaaaaaaggggcacagatttaatagtcattggagggaaagaatacggaactggatcatctagagactgggctgctaaaggcacaaagctattaggaataaaagttgtcatagccgaaagttttgaaagaatacatagatcaaatttgattggaatgggaatactacctctgcaatttgtagaaaatgttgatagaaagaaattaaatctagttggatctgagttgattacagtattaaatatcgagaaaggagtaaatccttcagacaaagtaaaagtagaaattaaatatttatcaggagatatcagaataattaatacaatatgtagaattgatacgaaaaatgaattggaatattatagaaatggtggaattctccaatacgttttaagaaatatgatttgat

SEQ ID NO: 282565 - DNA, 861 bp, Unknown
  Bacterial polypeptide expressing nucleotide sequence isolated from the Sargasso Sea
agaacggcgaaacctatgcctatccggacaccctggtcggcaccgactcgcacaccaccatgatcaatggcctcggtgtgcttggctggggcgttggtggtatcgaggccgaggcggcaatgctcggccagccggtgtcgatgctgatccctgaagtgatcggcttccgcctgaccggcaagctcaacgagggtgtcaccgccaccgacctggtgctgaccgtaacgcagatgctgcgcaagcacggcgtggtcggaaagttcgtcgagttcttcggccccggcctggatcacctgccgctggccgaccgcgccaccatcggcaacatggccccggaatacggcgccacgtgcggcttcttcccggtcgaccaggtgaccatcgattacctgcgcctgacaggccgcaatgaagagcgcatcgcgctggtcgaggcctacagcaaggcgcagggcatgtggcgcgacaccaactcgcccgatccggagttcaccgccactctggaactcgatctcagccaggtgcgcccgtccgtggctggaccgaaacgtccgcaggatcgtgtgacccttggcgatatcggcgcgaacttcgacctgctgcttgaaaccagcgggcgcaagcagcagaccgataccgagtttgcggtcgccggtgaacagttccagctcaagcacggcgcggtggtgatcgcagccatcacctcctgcaccaatacctcgaacccgaacgtgctgatggccgccggcctggttgcgaagaaggccatcgaacgcggcctgcaacgccaaccctgggtcaaaacctctctggcgcccggctcgaaggtggaaccgactacctcgagcgcgccggcctgac

SEQ ID NO: 282566 - DNA, 919 bp, Unknown
  Bacterial polypeptide expressing nucleotide sequence isolated from the Sargasso Sea
aaaagctaactatctggcttcacctccacttgttgttgcatatgcaatagccgggcatatggaagttgatttatacaaagatccattaggaaaagataaagaaggaaacaatgtatttttaaaagatatttggccttctaataaagagatagaagatactttaaaagagtcaattaatgcagagatgtttatacaaagatattcaaatgtttctgagggcccaactcaatggcaaaaaattaaaactgataaaagcagcatctataactgggatgagggatcaacatatgtaaaaaaacctcccttttttgactcgttgccagataaaccagaaggatttaaagaaattaaggatgcaagaccattattaattttaggtgatatggttactactgaccatatatcgccagctggcagtattcaaaaggatagtccaactggtgaatatttcatgaaacaccaaattttacctaaagattataactcatatggttcaagaagaggtaaccatgaagttatgatgcgaggaacttttgcaaatataagaattagaaatgaaatggcccctggtacagaaggtggttttacaaagttatatccagaagaaaaagttcttcccatatatgatgcagtagttgaatataagagaagaggaacagatttagttgtaattggtggaaaagagtatggaactggatcatctagagattgggcagccaaaggaacaaaattattaggcattaaaacagtaattgctgagagttttgaaagaattcaccgatctaatttaattggaatgggaatattgccattgcaattcatcaacaatgtaaatagaaaaaatcttaaattaattggttctgaattaattagcattttaaatatagaaaaggggtgtgaatccctcagaagaaaagta

SEQ ID NO: 282567 - DNA, 853 bp, Unknown
  Bacterial polypeptide expressing nucleotide sequence isolated from the Sargasso Sea
ggtaagcgagaaactgggggacgtctcccgtctgccttattcgctgaaagttctgcttgagaacctgttgcgctatgaggatggccgcacggtttcgacggaggacgtgcaggccctggcggactggctcaaggagcagcgctcgccgcgcgagatcgcataccgaccggcgcgcgtgctgatgcaggatttcaccggtgttcccgcggttgtcgacctggcggcgatgcgcgatgcggtggacaatctcgacgccgaccctcgtctgatcaatccgctgtcgcccgtcgatctcgtcatcgaccattcggtcatggtcgaccatgccggcgatgatggcgcgtttgcgaagaatgtcgagcttgagtttgagcgcaacggagagcggtacgagttcctgcgctggggctccacggccttcaacaatttccgggttgtcccgccgggcacgggaatctgccatcaggtcaacctcgagtatctctccgagacggtctggtcggccgaagaggatggcaagacgatcgcctatcccgacacgctggtgggaaccgacagccacacgaccatggtcaacggccttggcgtgctgggctggggtgtcggcggcatcgaggccgaggccgcgatgctgggtcagccgatttcgatggtcgtccccgaggtggtcgggttccgtctcgatggggaactgaaggaaggcatgaccgcgaccgatctggtgctgacggtcacggagatgctgcgcgccaagggcgtggtcggcaagttcgtcgagttctatggcgacgggctggaccacctgaccctggccgaccgcgccaccatctcgaacatggcgccggaatatggc

SEQ ID NO: 282568 - DNA, 751 bp, Unknown
  Bacterial polypeptide expressing nucleotide sequence isolated from the Sargasso Sea
tatttaaaaacctcaggaagagacgatgcaacaattgcaattgtagaaaattatgcaaaagaacaaggactatgggcaagtaacaatattgaattttctgacactatttcgcttgatatgtcgacagtcttaccaacaatttctggaccaaaaagaccgcaagataaagttttgttaaatgaagcttcatctgaatttaaaaaggtatttaaaattgcaactggaaaaaataaaaaaagtatatcaaaaattaatggcactgaatttgaaattcaagatggatcaatattgattgcagcaataacttcttgtacaaatacatctaacccaaatgtgttaattggagcaggtttgcttgcaaaaaaagctattgaacttggattaaaaactaaaccttgggttaaaacttcactcgccccaggatctcaagttgttactgactacttagaaaaagctggtcttaataaatatttagacaaattaggttttaatcttgtaggctatggatgcacaacatgtattggaaattctggcccactaccagaaaatattgttgaagcaattcaaaaagaaaacatttatgcagtgtcagttttatctggaaatagaaattttgaaggtcgtatttcgccatatataaaagctaactatctagcctctcctccacttgttgttgcatatgctttagtgggccacatggaatttaatttctacagccaaccattaggtaaagataaaaatggtaaagaaa

SEQ ID NO: 282569 - DNA, 833 bp, Unknown
  Bacterial polypeptide expressing nucleotide sequence isolated from the Sargasso Sea
taatgaaaagtatttgttcccagactcagtagttggaacagatagtcatacaacaatggtcaactcactatcagttttaggatggggagttggagggatagaagctgaggcagctatgctaggccaagcaatttctatgaacattccagaagtaattggttttgagcttaaaggatcattgaaggaaggaattacagcaactgatttagttttatctattactaaaattctcagagataaaggtgtagttggaaaatttgtagaattttttggaaagggtttaaaaaatttatctctggcagatagagcaactatatctaatatggcacccgagtatggtgcgacttgtggattttttcctactgatgaagaaacaattaattacctcaaattaactggtaaagatattgaacacctgattattgttgaaaaatattcaaaaagacaaactctttgggcagatgaaaactataatccagaatattctgataaaatattattagatttagatacagttgaaccaactcttgctggaccaaaaaggcctcaagataaaattcttttaaaagaagttccaacggaattcagcaagatagataaaaatcaaagtattaataaaaataaactcaataccggtgatattgtcattgctgcaattaccagttgtacaaacacatctaacccaaatgttatggtcgcagcaggtctagttgctaaaaaggcaattgattttggtttagaagttaagccttgggttaagacaagtttagcaccaggcagcaaagttgttagtgattatcttgataaagctggtttgacagaatatcttgata

SEQ ID NO: 282570 - DNA, 907 bp, Unknown
  Bacterial polypeptide expressing nucleotide sequence isolated from the Sargasso Sea
aaaaataaggatccacaaataatcaatccattgtcttctgttgatttagtaatcgaccattcggtacaagttgataagttttcaacaccagactcattaaaaaagaatgttgaaattgaattccagagaaatgctgagagatattcttttttaaaatggggacaacaagcttttgataattttagaatagttccaccaggaactgggatatgccatcaagttaatcttgaatatctttctaaagtagtatggaaagaaaaatttgaggataaggattacatttttccagatactttggtaggaactgatagccacactactatggtaaatggcttgtctgttcttggatggggagtgggaggtatagaggctgaggccggaatgcttgggcaaccgatctctatgttaatacctgaggtaattggttttgaaataacaaataagcttccagaaggcacaactgcaactgacttagttttaacagttgttaaaatgctaagggataaaggtgttgttggaaaatttgttgaattttatggagagggactcaaaaatttaactttggctgacagagcgactatagctaatatggcaccagagtacggagcaacatgtggtttttttccaattgatgatgagactttaaaatatcttgagttttctggaagagataaaaatcaagtagaaatagttaaaagatatgcacaagaacaagggctatgggtaagtgataatatagtttttactgatactcttaaattagatatgtctacagtagttccaacaatctctggacctaaaagacctcaagataaagttttattaacagaagcttccaaaaattttgatttaaattttaagaatattacaaaaagagaagctttctctacttcaaaagtcgaaggga

SEQ ID NO: 282571 - DNA, 832 bp, Unknown
  Bacterial polypeptide expressing nucleotide sequence isolated from the Sargasso Sea
tcccttgctcccggtagtaaagttgttactgactatcttgaaaaagcagggcttcaaaaggatttaaattactttggatttaatttagttggctatggttgtactacatgtattggtaattcaggatctttgtctgaggatataaccaaaaatattcaagatgataatttaatggtatcatctgttttatcaggaaatagaaattttgagggacggataagtcctttggttagtgcaaattacttggcctctccacccctggttgttgcatatgctatagctggaacagttttaattaatttaaaaacagaaccattgggttttgataaagacgaaaagccaatttttcttaaagatatttggccttcaaacaaagaaatttcaaaaattatgaaaaaggttataaaacctgaaatgtatataaatcaatattcttctgtttttactggaggagaggattggtcaaaaattttatcagaaggtgaacttacatacaattggaatgaagactctacttatgtccaaaacccaccttattttgaaaacatgaaactgaaacctgataaaataggggatattttaaatgcaaaggctttagcaattttaggggattcgattacaactgatcatatcagccctgcagggacaatattaaaagatgcacctgctggggaatatttgcttgaaagacaagttaggccaaatgaatttaactcatatggatcccgaagaggcaatcataaagttatgatgcgtggaacttttgctaatattagactagcaaatttaatggttccagggcattctgggggatttactaaacattttccat

SEQ ID NO: 282572 - DNA, 811 bp, Unknown
  Bacterial polypeptide expressing nucleotide sequence isolated from the Sargasso Sea
ttgctggaaaatttactaagatacgaagatgacttgagtgttactaaatttcaaatagaagctatcaagaattggctcaaaacaaaaaaatctaaaactgaaattgcttatagacccgcaagagttttgcttcaagattacacaggaatacctgcagttgcagatttagctgcaatgagagaagcagtcaaagaaaaaaataaagatccaaatacaatcaatccattatctgctgttgatcttgttatcgatcattcggtacaagtagatcagtctgctaaagcagattcttttgaaaaaaatgttgatatagaatttgaaagaaatggtgagagatattcttttttaaaatggggacaacaggcatttgataattttagaatagttccaccaggaacaggaatttgtcaccaagtaaatctagagtatttatcaaaagttatttggtcagaggaatttaaaggggaaaaatatctttttccagatactttagttggaacagacagtcatacaacaatggtaaatggcttatcagttttaggttggggtgttggaggaattgaagctgaagcaggaatgttaggtcaaccaatttctatgttaataccagaagtaattggttttgaaatgaaaaacaaattgccagaaggaaccactgccacagatttagttttaactgttgttaaaatgttaagagataaaggagttgtaggtaaatttgttgaattttatggagaaggtttaaaaaatttaacacttgcggatagagcaacaattgcaaacatggcgccagaatatggtgcaacttgtg

SEQ ID NO: 282573 - DNA, 736 bp, Unknown
  Bacterial polypeptide expressing nucleotide sequence isolated from the Sargasso Sea
aacagaaatagcttttcgacctgcaagggttttgttacaagattatacaggtattccagcagtagcagatttagcagctatgagagaagccgtaaaaaaaaaaaataaaaatccaaacactattaatccactctccactgttgatttggttatagatcattcagtgcaagttgatcaatatgcaaattctaattcttttgaaaaaaatgttgatatagaatttgagagaaacggcgaaagatattcatttttaaagtggggtcaacaagcttttaataattttagaattgttcctccgggaacaggtatttgccaccaagttaatttagaatatctatcaaaagtagtttggtcagaaaaatttaaagaagaaacttatttatttccagatacattagttggcaccgatagtcataccacaatggtaaatggattatcagttcttggttggggtgtgggcggaattgaagcagaagcagctatgcttggtcaaccaatatcaatgttaatacctgaggttattggttttgaaatttttaataaaatgccagaaggaactactgctacagatctagtactaactattgtaaaaatgttgagagataagggagtagtaggaaaatttgttgaattttatggatctggagtaaaaaatttaacgttagccgacagagcaacaattgctaacatggcaccagaatatggtgccacatgtggtttttttccaattgatgaa

SEQ ID NO: 282574 - DNA, 763 bp, Unknown
  Bacterial polypeptide expressing nucleotide sequence isolated from the Sargasso Sea
acctggtacaggaatttgtcatcaggtaaatttagagtatttatcaaaggtagtgtggtcagaagaattcaaaggagataattatttgtttcctgatactttagttggaactgatagccacacaacaatggtaaatggattatctgtcttaggatggggagttggtggaattgaagccgaagcaggaatgcttgggcaaccaatatcaatgttaatacctgaagttattggttttgagatgaaaaataaaatgcctgaaggaactacagcaactgatttagttttaacagttgttaaaatgttaagagacaaaggagttgttggaaagtttgttgagttttatggagaaggtttgaaaaatttaactcttgctgatagagctacaattgcgaacatggcaccagaatatggcgctacatgcgggttctttcctattgatgaagaaactttgaaatatttaaaattttctggaagagatcaacatactgtaaatatagttgaaaattatgctaaggaacaaggattatgggcaagtagtgatttagaatttactgacatcatatctttagatatgtctacagttgttccaactatttcaggtcccaaaagacctcaagacaaagtacctttaactgatgcaccatattcttttaaaaaagtattacaggaagctacaagcaaaaatgaaaaatctgtttcaaaagtggctaatacagactacgatattaaagatggttctatattaattgctgcaattacttct

SEQ ID NO: 282575 - DNA, 864 bp, Unknown
  Bacterial polypeptide expressing nucleotide sequence isolated from the Sargasso Sea
aaaaaataatcaaggaaaagatgtttatttaaaagatatttggcctagtaataaagaaattgaagaaactttaaaaaattctttaaacgcagatatgtttgtaacaagatattcaaacgtttcagaaggacctgaacaatggcaaaaaattaaaactgaaaaaagtagtatttacaattgggaagaaacttcaacttatgtaaaaaaacctcctttctttgaaaatttacctgatgtaccagatgatattcaagatattaaagatgcaagacctttattaatattaggagatatggttaccacagatcatatttcaccagctggatcgattcaaaaagagagtccaactggtgaatattttatgagacatcaagtattaactaaagattacaattcatacggtgctagaagaggaaatcatgaagtaatgatgagaggaacttttgcaaatattagaattagaaacgaaattgcacctgaaacggaaggtggttttacaaaattatacccagaagaaaaagttatgcctgtctacgatgctgttgttgaatataaaaaaagaggaataaatttagtagttattggaggaaaggaatatggaacaggatcctctagagactgggctgctaagggcacaaagttattaggaataaaagctgttttggcagagagttttgaaaggatacatagatcaaatttaataggtatgggagtattgcctttacaattcattgaaggcatgaatagaaaaaatcttgatttaaaaggacccgaattaattagtattgttgatattgaaaatggattaagtcctggtgatcatgtaaaagtcgaaataaaatataaatcaggtgaatcaaaaaa

SEQ ID NO: 282576 - DNA, 841 bp, Unknown
  Bacterial polypeptide expressing nucleotide sequence isolated from the Sargasso Sea
ttaaatgctgaaatgtttgtgcaaagatattcaaatgtttctgaaggaccgactcaatggaaaaaaatcaaaactgagaaaagtagcatttataattgggatcaaggatcaacctatgtgaaaaaaccacctttttttgataatctttctgatgagccagaaggctttaaagaaattaaaaatgcaagacctttactaatcttaggtgatatgattacaactgaccatatatcaccagcaggatctatacaaaaagaaagcccaacaggtgaatattttatgaaacatcaagttttaccaaaagattttaattcttatggatcaagaagaggaaatcatgaagttatgatgagaggaacatttgcaaatataagaattagaaatgaaatggcagctgaaacagagggtggatttacaaaaatatatcccgaaggaaaagtaatgacagtttatgatgcagtagtggagtacaaaaaaagaggtactgatttggttgtgataggcggcaaagaatatggcacgggatcctctagagactgggcagcaaagggaactaaattgctaggaattaaagcggtaatagctgaaagctttgaaagaattcacagatccaatttaataggcatggggatacttcctcttcaatttaaagatggaaccaatagaaagaacctaaatcttattggatctgaattgataagtatattaaatttagaaaaaggtatcaatccttcagataaaattgttttagaaattaaatatgcatcaggtgatataaaaaaaatagagactttatgcagaatagatactacaaatgaattagaatactataaaaatggag

SEQ ID NO: 282577 - DNA, 876 bp, Unknown
  Bacterial polypeptide expressing nucleotide sequence isolated from the Sargasso Sea
tggaaggacagattatgaaatagaagatggttctatattaattgcagcaataacattatgcacaaacacatctaaccctaatgttttaattggtgcaggacttcttgcaaaaaaagcagtagagttaggtttaaaaacaaaaccatgggtaaaaacctcattggctccaggctcacaagtagtcactgactatttggaaaaatctgggcttaacaaatacttagatgaactcggttttaatttggttggttatggatgcacaacgtgtattggaaattctggacccttacctgaaaaaattgtagaggcaattgaaaaagaagatttatatgctgtatctgttttatctgggaacagaaacttcgagggtagaatatctccacatataaaagcaaattatcttgcttcacctccacttgttgttgcttatgctttggctggtcacatggaggtagatttatacaaagatcctttaggaaaagataaaaacggtaaagatatttttttaaaagacatttggccatcaaaccagcaaatagaggaaactttaagggaagctttaaatcctgaaatgtttgtcaaaagatattcaaatgtttctgaaggtccttctcaatggcaaaaaattaaaacggaaaaaagcagcatttataattgggatcaaggttcaacttatgtaaaaaaaccacctttttttgaaaatttatctgatgagccagagggttttaaacaaataaaagatgcaagaccattattaattcttggagatatggttacaactgatcatatttctcctgctggatcaattcaaagagaaagtccaaccggtgaatattttatggagcatcaaattttaccaaaagattataattctta

SEQ ID NO: 282578 - DNA, 691 bp, Unknown
  Bacterial polypeptide expressing nucleotide sequence isolated from the Sargasso Sea
ggcgacagtatcaccactgatcatatatcacctgcgggtgccatccagtcagatagtcctgcgggtatctatttgaaggacaagggtgtggatccaacggcattcaatagctacggttctcgccgtggtaaccacgaggtgatgatgcgtggtacctttgccaatattcgtttgcgcaatgagatggtacccaagcgtgaaggtggttttacccggtgttggccgttgggtgatgagacaactatttttgatgcagccatggcgtaccagcaggagggtgttgcatcggtaattatcgcaggtaaggaatatggcacaggctcatcacgtgattgggctgccaaagggccttatttgcttggtgtaacgtgtgtgatagccgaaagttatgagcgaattcaccgttccaatctgattggtatgggtattctgccgctacaatttgaaggtggcgaaagccgtaaaaccctggggttgatcggtgatgagcgtgttaatgtcgacttggatggcaacattcatgcaggctgtcaaattaaagtgacatttgtacgccccaatgatgaagagttccaggttgcttgtttgtgccgtttggacacgcctcaagaattaaagtattttcatgacggtggtgtgttgcgccatgtgttaagaaaaatgctcagtggtggtgagtcaagtcaatgag

SEQ ID NO: 282579 - DNA, 718 bp, Unknown
  Bacterial polypeptide expressing nucleotide sequence isolated from the Sargasso Sea
atgaaaaacatgaattctttcaattctgaacatttgattaaaataaataaccaaaattttagatattttgatttaaatgtagtagcaaaacaatttgatattgatctttataaagttccaatttcaataaaagtaatactagaaaatttaattagaaatgaggatggtgaaaatatttctaaaagtatgatctctaatgtattttcctcattaaaagatagaaataaaaaaaatgaaaaaacagagatagctttttttccaacacgtgtacttatgcaagattttaccggagttccagctgttgctgatttagctgcgatgagaaatgcactaaaatcaaaaggaattgagccaaaaaagataaatcctctttctagggttgacttagttatagaccattctgttatggttgataattataaaaataataactcccttaatgaaaatgttaagaaggaatttgaaagaaataaagaaagatatgaatttttaaagtggggtcaaagttcatttgataacttttacttggtaccccctggagctggtatttgtcatcaagtaaatttagaaaatattgctaagacagtttggttaaaagaaattgagaataaaaaatatttatttccagattctgttgtaggaactgatagtcatacgacaatggttaattctctttcagtactaggatggggtgtaggagggattgaagctgaggcag

SEQ ID NO: 282580 - DNA, 704 bp, Unknown
  Bacterial polypeptide expressing nucleotide sequence isolated from the Sargasso Sea
aactgcaacagacttagttttaatcattgttgaaatgcttagaaaaaaaggtgtggttgggaaatttgtggagttttatggtgagggtttgaaaaatttaactttagctgatagagctacaattgctaacatggcccctgaatatggagctacatgtggtttctttccaattgatgatgaaactctaaaatatttaaaattatctggaagagatcaagaaacaatagctttagttgacaaatattcaaaagaacaaggtctttgggcaagcaatgaagttgtgtttacggatactctttcattagatgttggcaatgtagtaacaagcatttctggacctaaacgacctcaagataaagttttacttactgaggcttcaactgcatttgcaaaagtttataaagaaaatgcaaaaagagataaggccatcgaagccaaagttgaaggtactgaattcaatataaaagatggtgatattgttattgctgcgataacatcttgtactaacacttcgaatccaagtgtaatgatcggtgcaggtcttttagcgaagaaagcacatgaaaaaggattaaaagttaaaccttgggtaaaaacttcacttgcaccaggatcacaagttgtaactgactatttagaaaaagcaggtttaaataaatatttagatgaacttggttttaatttagttggttatggttgcacaa

SEQ ID NO: 282581 - DNA, 939 bp, Unknown
  Bacterial polypeptide expressing nucleotide sequence isolated from the Sargasso Sea
ttggtaactctggaccgctacctgatgccattaccgacgccattagaaaagcgaaacttacggttacctcagttttatctggtaaccgcaactttgaagggcgtatccatcctgatgtggctgcaaactaccttgcatcaccaccactggttgttgcatacgcgttggctggaaacatgaatgtagatatcactaaagagccgttaggtaaggcgagtgatggttctccggtatatctaaaagacatctggcctaccgaagacgaaattcagcaatatatagcggaaaacgtcaccggtgatttgtttaaagaaaagtatgcagatgtatttaaagggagcggtgaatggaatgaactgcaggtaagtaaaacatcagtctacgactggccagaatcaacctacattaagcatccacctttctttgaagtaatgggtaaagagcctgaggctttaactgcaattgaaaacgcacgatgcttggttaaggtgggcgattcgattactaccgaccatatttctccagccggcgccatcgcagaagatagcccagccggagagtacctgcaggcccaaggggttgagcctaaagactttaactcttatggatcgcgtcgtggtaaccacgaggttatgatgagaggtacgtttgctaacgtgcgtcttcaaaaccaactggcacctgggacgagaggcagtgcaaccacacacttcccaagtggcgatagtatgtcaattttccatgctgctatgcgttacaaagatgacggcgtaccagccattgtcattggtggaaaagagtacggtactggctcgagtcgagattgggctgctaaaggcccttctttgatgggggtgaaagcagtactagctgagagctacgaaagaattcaccgctcgaacctcattgggatgggaattttaccgctccaaatttaag

SEQ ID NO: 282582 - DNA, 862 bp, Unknown
  Bacterial polypeptide expressing nucleotide sequence isolated from the Sargasso Sea
gtcaccaagtacctggaagaatcaggactcttacctgaattggaacaaatgggattcaatattgttggatatggttgcaccacttgtattggcaattcgggcccactcaatccagaagtttcacgagcagttcaagagctaaatttaactgcctcatcagtgctgtctggtaacagaaattttgagggaagaattcatcctctggtcaagcataattttcttgcatcgccacctttggtggtggcatacgccattgctggctcaacattgcttgatctgaccaaagaaccattgggacggatcgatggaaaagacatattcttaaaagacatatggccgagccaaaacgagattgaggaaatcatagagaacacaatagatccggtcatgttcagtaaagcttacaaagactccatccaaggtgatgatgcgtggaaaaaccttgaaacacctcagggtgaaatctatcaatggcaagaaagctcaacttacattaaaaagccaccctactttgaatcaatgaccatggatctacctggcatccaaacgatcaaggacgcgagggtcctcgcacttttgggagactccgttacaaccgatcatatctcaccagcaggcaatatagatcccgaatcaccagcaggcatttatctaaaagacaaaggcgtggaaagaaaggatttcaattcctatggctctagacgaggaaatcatgaagtaatgatgagaggaacatttgccaacattcgattaagaaataagcttgcaccgggtactgaaggcgggtggacaagtttggcacaaaatgaaaaacctgtttcaatttttgaggctgcagaggaatttcgatcaaaaaatactg

SEQ ID NO: 282583 - DNA, 756 bp, Unknown
  Bacterial polypeptide expressing nucleotide sequence isolated from the Sargasso Sea
ttaaacaccctcctttttttgaggatcaaaatagtgttgagcttaaagatattaaagatgctcgcatacttgctcttttaggtgatagtgtaaccactgatcatatatcaccagctggtaacattaaagaggatagtccagcaggagtttatcttagtaagagacaagttaattataaaaattttaattcatatggctctagaagaggaaatcatgaaataatgatgagaggtacattcgcaaatatacgtattaaaaatgaaatattaccaggaacggaaggaggattaacaaaatctttcatatcaaataaatcaatgtcaatttatgatgcatcacaagagtatataaacaataaaatagataccgtggtgatcgctggcaaggaatatggaacaggctcttctagagattgggctgctaaaggtacaaagcttttaggaataaaagcagttattgctgagagttttgagagaatacatagatcaaatcttattgggatgggtgttttacctttagagtttatggatggattaaatagacagaaattggaaatcaagggtgatgaaaaagtttctatttttggtattaaaaatttagaaccaaatatagttctaaagtgtcaaatctcttccaataatattgactcaattaaccttagatgtagaatcgatacaaaaaaagagcttgattattataaagctggaggaattcttaattttgttttaaatgaaattatttcaaaagcagcatagc

SEQ ID NO: 282584 - DNA, 889 bp, Unknown
  Bacterial polypeptide expressing nucleotide sequence isolated from the Sargasso Sea
ggatcacttcggccagcctcaggcgctgaaaagcaatgcccaattggagtacagccgaaacgcggagcgctatgctttcttgcggtggggtcagacggcgttcagtaactttcgtgtcgttcctcccgcgactggaattgtgcatcaggtaaatattgagtatctcgcgagcgttattttcagtcgggaggtagacggggtagagttggcttatccagacaccgttgtgggaaccgactcccacacgacgatggtcaacgggctcggtgtattgggctggggtgtcgggggaatcgaagcagaggccgcgatgctgggtcagccggtcacgatgctcattccggacgtagtgggatttgagctgaccggcacgctgacagagggcgcgacagctaccgatcttgtcctgaccgtagtggaaatactgcgccaaaaaggtgttgtcggtaaattcgtggagttttttggagacggcttgaatcacctttctctcgcggataaagcaaccatcgccaatatggcgccggagtacggcgccacctgcgggtttttccctgttgacaatgaggcgcttgagtacctcaaattgacgggtcgctcagacgacgaaatcgcgctcgttgaagcttacagccggcgtcagggcctgttccgtacggcggataccccggtcgcgcaatacaacgacacggtcagtcttaatcttgccgacgtcgtcgccagcatcgcaggcccaaagcgaccccaggacagaattgcgttaactgacgccaagcacacgatcattgctgcgctgagtgacgcccgcgaggggagtccagcgcaaggtcaatcgcttgaacttgaggggggccatcatacgcttcccgatctcgcggtggtgatcgcc

SEQ ID NO: 282585 - DNA, 788 bp, Unknown
  Bacterial polypeptide expressing nucleotide sequence isolated from the Sargasso Sea
ccaaataaaatcaatcctctttctactgtagacctagttattgatcattcagtgatggtcgataattatgcaaaaaaagattctttctcaaaaaatgtacaaagggaatttgatagaaatggtgaaagatattctttcttaaaatgggggcaaagtgcgtttaataatttcagagttgttccaccaggaacaggtatttgccatcaagttaatttggaatatttatctaaagttgtttggtcttcagaggccgacggccagttatttgcttatcctgatactttagttggaacagacagtcatactacgatggtaaatggtttatcagttcttggctggggagttgggggtattgaagcagaagcagctatgttaggtcaaccaatttcaatgttaatacctgaagtaattggttttgaaattaatgggaaactaactgagggaacaacagcaagtgatttagttttaacaattgtacaaatgttaagaaaaaagggtgttgttggaaaatttgtagaattttttggtgatgggctaaaaaacttatcattagctgatagagcaacaattgcaaatatggcgcctgagtacggagctacttgtggattttttcctattgatgatgaaactattaagtatttaaaattctctggaagagaccaaaatacaatttctcttgttgaaaaatattctaaagaacaaggactatggtcaaaccaaaatgatcaaattgaatttactgatacaatctcattagatttaaattctgtggttccaagtatttctgg

SEQ ID NO: 282586 - DNA, 862 bp, Unknown
  Bacterial polypeptide expressing nucleotide sequence isolated from the Sargasso Sea
gaagaaacattgaaatatttaaaattttcaggaagaaatcaacatactgtaaatatagttgaaaattatgctaaggaacaaggattatgggcaagtagtgatttagaatttactgacaccatatctttagatatgtctacagttgttccaactatttcaggtcccaaaagacctcaagacaaagtacttttaactgatgtaccaaattcttttaaaaaagtattacaggaagctacaagtaaaaatgaaaaatctgtttcaaaagtagctagtacagactacgatattaaagatggctctatattaattgctgcaattacttcttgcaccaatacttcaaatccaaatgttttgattggagcaggacttttagcaaaaaaggcaattgaaaaaggtttacaagttaaaccatgggtaaaaacttctttagcacctggatctcaagtagtaactgattatttaaaaaaagctggattaaattcatatttggaccaattaggatttaatctagttggttatggatgtactacttgtattggtaactcaggtccattagccgaaaatattgttgatgcgatccaaaaagaaaatatttatgcggtttcagtcttatcaggaaatagaaattttgaaggaagaatttcaccacatattaaagctaattatctagcttcacctccactagttgtagcatatgcaatagctggacatatggaagttgatttatataaagatccacttggaaaagataaagagggtaacaaagtatttttaaaagatatttggccttctaataaagagatagaagaaactttaaaagattctcttaatgcagaaatgttcataaaaagatactccaatg

SEQ ID NO: 282587 - DNA, 866 bp, Unknown
  Bacterial polypeptide expressing nucleotide sequence isolated from the Sargasso Sea
aaaggtgtggttggaaaatttgtagaattttatggcgaaggtttgaaaaatttaactttagctgatagagcgacaattgcaaatatggctcctgaatatggagcaacatgtggcttcttcccagttgatgatgaaactctcaagtatttaaaattatctggaagggatcaagaaacaatagctttagtagaaaaatattcaaaagaacaagggctttgggcaagcaatgatgttgtgtttaccgatactctttcattagatgttagcagtgtagtaacaagcatttctggaccaaaacgaccacaggataaagttttactcacagaggcttcaacttcttttgcaaaagtttataaagaaaacacgaaaagagataaagttattgaaactaaagttaaaggttctgactttaatattaaagacggtgatattgtaattgctgcgataacatcttgcacaaatacttccaacccaagtgtaatgattggtgcaggtcttttagcgaagaaagctcatgaaaaaggactaaaagttaaaccatgggtaaaaacttctttagctcctggctctcaagttgttactgactacttaaaaaaagcaggtttaaataaatatttagatgagcttggttttaatttagttggttatggctgcacgacttgtattggtaactcaggccctctaaatcaaaatatttcagaggcaataaataaaaacgatctttatgccgtttcagttttgtcaggaaataggaactttgaaggaagaattaatccagatgtaaaagctaattacttagcatcacctccattagttgtagcttatgctttagcaggcaatatgaattttgatatgtataagtccgc

SEQ ID NO: 282588 - DNA, 838 bp, Unknown
  Bacterial polypeptide expressing nucleotide sequence isolated from the Sargasso Sea
tgggattgaggcagaggcaggcatgttaggtcagccaatatcaatgttaatacctgaggtagttggatttgaattaaaaaataaattaccagaagggacaacagctactgatttagttttaactgttgtaaaaattttaagagataaaggagttgtaggaaaatttgtagaattttatggttctggattaaataatttaagtttagctgatagagcaactattgcaaatatggctcctgagtatggggctacttgtggtttttttcctatagatgatgaaactctaaaatatttaaaattttctggaagagacaatcaaactatcaatatagttgaaaaatatgctaaagaacaaggactatgggcaagtgaaaatattgaatttactgatacagtaaaattagatatgtccactgtagtcccaacgatatcaggacctaaaagaccacaagataaagtgccacttacagaagctaaaacctcttttgaaaaaaactttaaagaaattacaaaaagacaaaaagaaaaaatatctgaagtatctggtgcagagtttaaattaaaggatggttcaatagtgattgcggcaattacttcatgcacgaatacctcaaatccaaatgttttgataggtgcaggactagttgcgaaaaaagctattgaaaaaggcttaaaaaccaaaccatgggttaagacttctttggcaccaggatctcaagttgtaacagattatttgaataaatcaggtttaaataaatacttagacgaactcggttttaatcttgttggctacggttgtacaacatgcattggtaactctgggcctttacctgaaaat

SEQ ID NO: 282589 - DNA, 837 bp, Unknown
  Bacterial polypeptide expressing nucleotide sequence isolated from the Sargasso Sea
agataattttgcttatccagatacacttgtaggaactgtttttcacacaaccatggttaatggtctttcagttcttggttggggggtaggtggaattgaagccgaagcagcaatgttaggacagccaatatcaatgataatacctgatgttgttggttttaaaattcaaaacaaacttccagaaggaaccactgctactgacttggttttaacaatagttcaaatactgagacaagaaggggtagtagggaaatttgttgagttttatggtgatggattaaaaaatctttcactagcagaccgagctacaattgctaatatggctcccgagtatggagcaacttgtggtttttttcctatcgatgaagaaactttaaagtatttgaaattttctgggagagaccagcatacaattttacttgtagaaaaatattccaaagaacaaggactttgggctgatgaaaatatttcttttactaaaagtttagaattagatttatctacagtcgtgccaagtatttcaggtcctaaacgcccacaagataaggttttactatctgaatcaagcaaatcatttatgtcatcattcaaagaaaatatgaatagagaaaatataaaagaagaaaaagtttcaaatgaaaactttaaattaaaggatggaaatattgttatagctgcgattacatcatgcaccaacacttccaatccaagcgtgttgataggagcagggttacttgctaaaaaagcagtagaaaaagggttaaaagtaaaaccttgggtgaaaacttctttggctccaggttctcaggttgttacagattatcttgaaaaagcagg

SEQ ID NO: 282590 - DNA, 836 bp, Unknown
  Bacterial polypeptide expressing nucleotide sequence isolated from the Sargasso Sea
acagtgggaggatgccattggacccgagatgttcgtcaataggtattccgatgttctgagagagcctcgttgggactctattcctagcgagcctagcgagctatacccctgggaccaggagtccacctatgtcagattaccttcctttttccaagggatttccccggagccaacgcctattgaccccataattgacgctagggtgctggtcaaagtgggcgactccgtcactaccgaccatattagtccggcgggtgcgtttcccagtagcgggcccgcgggccaatacctggtcagcaagggggtcgagcccagggacttcaactccttcggaagcagaagagggaaccatgaagtcatggtaagggggacatttgcaaacataaggatgaggaatcaggtagcccccggaactgagggcgggtactctacccacttccccaccaatgaagtcaccagcattcacgaagcgagcgagagataccaaggagaggagaccccacttatcgttctcgccggctcccagtacggatcgggtagcagtagggactgggctgcaaagggaactatgctactcggagtaaaggcagtgattgcgaaatcatacgagaggatacatagatccaacctagttggcatgggggtcctcccactaactttcctagaaggtcaagactcagaaaccctaggaatagatggttcagagtacttcagcatacccacctcaggtgagctagaacccctctctaagttattagtcacggcgaaaaggccaaacggcgagcaaatcacatttcacaccacggtcaggcttgagacccctgttgaggtgcagt

SEQ ID NO: 282591 - DNA, 922 bp, Unknown
  Bacterial polypeptide expressing nucleotide sequence isolated from the Sargasso Sea
agggattttgaaggaagaattaatcctgatgtcaaagcaaattatttagcctctcctcccttagtggtagcctatgctttagctggcaatatgcatcatgatttatataaaacccctttaggcaaggataaagaaggtaaagaagtatttctaaaagatatttggccaactaataaagaaatagaagaattaatactaaaatctataaatgcagatatgtttgttaaacgttactcaaatgtttctcaaggaccaaaagaatggagttcaattaaaactgacgcaagcagtatctataattggcaagaaagctcaacatatgtgaaaagaccacccttttttgacaatttaccagataaacctgaaggttttaaaaaaattaaagatgcaagaccacttttaatacttggcgatacagtaacgacagatcatatttctccggctggctcaataaaaaaagatagcccgactggtgattattttatgaaacatcaagtacaacaaaaagattttaattcgtatggagcaagaagaggtaatcacgaagttatgttaagaggaacttttggaaatattagaataaaaaacgaaatggttcctggaacagaaggaggatttacagttttacagcctgacggaaaacaaatgagcgtttatgatgctgctatggaatataaaaagagagaaaatgatcttgtagttattgctggtaaagaatacgggacaggctcatcaagagattgggcagcaaaaggcacaaaattattaggtataaaagcagtcatagctgagagttttgagagaattcatagatcaaacttagtcggaatgggaattttgccacttcaattcaaagagggttttgatagaggtaaattaaatataaagggaacggaattatttactattataaacatgaaaa

SEQ ID NO: 282592 - DNA, 874 bp, Unknown
  Bacterial polypeptide expressing nucleotide sequence isolated from the Sargasso Sea
atcgccgacagagccaccatcgctaacatgtgcccggagtacggagccaccattggcttcttccccgtggacaagaggagcctggaatacctgaggcagaccaacagggacgagaaggtcatcagctacgtcacggaatacatgaagagcgtcgggatgctgagagacttcagcgacccggcccaggacccggtcttcagcagcgtctacgagctggacctgtccagcgtggtgcccagtctgtcggggcccaagaggccgcacgacagggtggcggcggctgacgtgaaggaggacttcgttgcctgcctcaccaacccggtcggcttcaagggctacggccttccaggggacaagttggccacctgcgtccccttcctctacgaggggaccgagtacctggtgagacacggctccgtcctgatagccgccatcacctcctgcaccaacaccagcaacccctccgtgatgctgggggccggcctcatggccaagaaggctgtccaggctggtctgacggtggctccgtatatcaagaccagcctcagtcccggctcgggggtcgtcacctcctacctccaccagtccggggtcatccccttcctggagaccctcggcttcggagtggtcggctacggctgtatgacctgcatcggcaactccgggcctctgcctgagcctgtagtggaggctgtggagaagggagagctggtctgctgcggggtcctgtctggaaacagaaacttcgagggcagaatccacccagtgacccaggcaaactacctggccagccccctctttgtcatcgcctacgctatcgctggccgtgttgacattgacttccagtcagaacccctcgctgtactgacaacgg

SEQ ID NO: 282593 - DNA, 940 bp, Unknown
  Bacterial polypeptide expressing nucleotide sequence isolated from the Sargasso Sea
tgcaaaagatttcgataaagcgtttaaagaaaatacaaaaagaaaggttcctttagaagctaaagttaataataaagaatttaaaattaaagatggcgatattgttattggcgcgattacttcttgtacaaatacatcaaacccaagtgttatgattggtgctggactagtagcaaaaaaggctgttgaaaaaggtttaaaggtaaaaccatgggtaaaaacatcattggcaccaggatctcaagtcgtaacagactatttagaaaaagctggattaaataagtatttagatcaattaggtttcaacttagttggctacggttgtactacttgtattggaaactctgggcccttagataaagaaatttctgagacaatacataaagaaaatctttatgcagtttcagtattgtcaggtaacagaaactttgaaggtagaattaatccagatgtaaaagcaaattacttagcatcaccacctctagtagttgcttatgctttagcaggtaatatgcatcatgatctttataaaaattcattaggtaaagatcaaaatggaaaagatgtatttttaaaagatatttggccttcaaataaagagatcgaagagttaatgttaaaatctattaatgccgatatgtttgttaagagatactcgaatgtttctgaaggaccaaaagaatggagttctattaaaacagaccaaagtagcatttataattgggaggaaagctccacttatgtaaaaagaccacctttttttgataatttaccagacaagccagaaggatttaagaaaattaatgatgcaagaccacttttaatattgggtgataccgtaacaaccgatcatatttccccagctggatctattaaaaaagatagcccaactggtgattactttatgaaacatcaggttcagcaaaaagattttaattct

SEQ ID NO: 282594 - DNA, 786 bp, Unknown
  Bacterial polypeptide expressing nucleotide sequence isolated from the Sargasso Sea
gctggtttaactaaatatttagatgagctaggttttaatttagttggttatggttgtacaacatgcatcggtaattcagggccattaaatgaaaatatttcaaaagccataaataattctgacctttatgcagtatctgtactttcgggaaacagaaattttgaaggaagaattagtcctgatgtaaaagcaaattatttggcttctccacctttagtagttgcttatgctttagcgggttctatggatatagatttatataaagactcattaggaaaagataaaaataaccaagatgtatatttaaaagatatttggccaagtaataaagaaattgaagatttaattctcaaatcaataaatgctgaaatgtttaaaaaaaggtatgagaatgtctcttctggtcctaaggaatggcaaaaaataaatatacctgcaagtgaaatttattcatgggatgacaattcaacttacgtcaaaaaacctcctttctttgaaaacttaactgagaagcccgagggctttaaatcaattaaagatgcaagaccacttttaatgttagctgataccgtaactacggatcatatttctccggctggctcaatccaaaaggatggaccaacaggtgaatattttatgaaaaggcaaattatgccaaaagattttaactcatacggaaccagacggggtaaccacgaagttatgatgagaggtacttttgcaaatatcagaataagaaatgagatagctccaggcacagaaggtggtttaactaagctatatcca

SEQ ID NO: 282595 - DNA, 782 bp, Unknown
  Bacterial polypeptide expressing nucleotide sequence isolated from the Sargasso Sea
ttttaaagaaatcacaaagagacatgtagaaaatacatcaaaagtttcaggagcagatttcaaactcaaggatggctctatagtaatagctgcaattacatcatgtacaaatacttctaatcccaatgtacttattggcgcaggattattagctaaaagagcaatagaaaaaggattaaaaacaaaaccttgggttaaaacttccttagcaccaggatctcaggttgtaacagattatttaaataagtctggattaaataaatatttagacgaattaggatttaatttagtaggatatggatgcacaacatgtattggtaattctggtccattacccgaaaatatttcaaactcaattaaagaaaatgatatttatgcagtttcagtattgtcagggaatagaaattttgagggcagaatatctccattagttaaagcaaattatttagcatcgcccccacttgttgttgcttattctttggcaggatttatgcaagtggatttgtataaagatccccttggcaaagataagagtggaaaagatgtttatttaaaagatatttggccaagtaataaagaaattgaagacattttattaaagtctttaaaccctgaaatgtttagagaaaggtattcaaatgtttcaaaaggacctgatcaatggcaaaaaattaaaacaaaaaaaagcagtatttatgattgggataataattctacctatgtaaaaaaaccacccttctttgaaaatctttcgccgagcccagagggttttaaaccaatta

SEQ ID NO: 282596 - DNA, 922 bp, Unknown
  Bacterial polypeptide expressing nucleotide sequence isolated from the Sargasso Sea
atttttaatttaagaaaagccgaaaagaatggtttagaaggaattgcaaaattaccaaaatccctgaaagttttattagaaaatttactcagatatgaagacaatttaacggtagacaagaagcagatcttggcaattaaagattggcttaaaaatagaaaatcaaatacagaaatagcttatagacctgcgcgtactttattacaggattatacaggaattcctgcaattgcagaccttgcagcaatgagagacgctgtaaaagataaaaataaaaatccagataagattaatccattatcaactgttgatttagttatagaccattcagtaatggtagacgaatatgcttcaggaaaatcatttaatcaaaatgttgaaagagaattttcaagaaatggtgaaagatattcttttttaaagtgggggcaaaaagcatttgataatttcagggttgtacctcctggaacaggaatttgtcatcaagtgaatttagaatatttatcaaaagttgtttggtcatcaaaaagtggaagtgatttatatgcttatccagatacattggttggaaccgatagtcatacaacaatggtaaatggtttatcagttttaggttggggtgttggcggaatagaagcagaggctgcaatgttaggtcagcctatttcaatgttaattccagaagttattggagttgaacttaaaggaaaattaaaagaaggaacaactgcaacagacttagttttaatcattgttgaaatgctgagaaaaaaaggtgtggttggaaaatttgtagaattttatggtgaaggtttaaaaaatttgactttggctgatagagcaacaattggcaacatggctcctgaatatggggccacatgtggtttctttcctgtagatgatgaaactcttaatatttaga

SEQ ID NO: 282597 - DNA, 933 bp, Unknown
  Bacterial polypeptide expressing nucleotide sequence isolated from the Sargasso Sea
attagaaaatttattaagatttgaagatgacgtatcagtgaccaaaggccatattgatgcaattaagaagtggctagaagttaagaaatctaatactgaaattgcatatagacctgcaagagtcttattacaagattacactggaatacctgcagttgcggacctagctgcaatgagagaagctgtaaaagaaagaaataaggatccaaaaaaaataaaccccttatctccagtagatttagtgattgatcactcagtccaagttgatgattttgcaagtttatcatctctaaaaaaaaatgttgacattgagtttaatagaaatggagaaagatattcatttcttaagtggggacaacaagcatttgataattttagaattgttccacccgggactggaatttgtcaccaagtaaatttagagtatttatctaaagttgtatggtgtgcgaaatcaggtaatgatgaatacatatttccagatactcttgttggcacagatagtcacacaactatggtcaatggtttatccgttctaggctggggagtaggaggcattgaagccgaagcaggaatgttgggacaaccaatttcaatgcttataccagaagttattggattcgaattaacgaaaaaactaccagaaggaactactgcaacagatttagttttgacagtagttaagattttgagagacaagggggtagttggtaaatttgtagaattttatggtacaggattaaaaaatttaagtttagctgacagagcaacaattgctaatatggctcctgaatatggagcaacgtgtggtttttttcctattgataatgaaactttaaaatacttaaaattttctggaagagataataatacagttgaaattgttgagaattatgcaaaagagcaggggctttgggcaagtaatgatattga

SEQ ID NO: 282598 - DNA, 909 bp, Unknown
  Bacterial polypeptide expressing nucleotide sequence isolated from the Sargasso Sea
acatggcaacgggtgtgcctacaatttctggacctaagaggccacaagataaagttttattaagccaggcatcttctgaatttaaaaaaatactgaaaagtattactggaaaggacaaaagcaaagtatcaaaagttaatgaagctgaatttgaaattagagatggaactatactgatggcagcaattacttcttgcacaaacacatcaaatccaaacgttttaattggagcaggcttactcgcaaaaaaagctgtagaacttggaatgaaaacaaaaccttgggtaaaaacatcattagcgcctggatctaaggtagtaactgattatttggaaaaatctagtttaaacaaatacttagatcacttaggttttaatctcgtaggatatggatgcacaacgtgcattggaaattctggcccattaccagaaaatattgttgaagcagtcgaaaaaaataatatttatgccgtatctgttttgtctggtaatagaaattttgaaggccgtatttcacctcatataaaagcaaattatttagcatcaccaccacttgttgttgcgtatgctttagcaggtcatatggaatttgatttttataaagaatctttaggcaaagataaaagtggcaaagaaatttatttaaaagatatttggccctcaaacaaagagattgaagacactttaagaagttcattaaattcagaaatgtttgtaaaaagatattccaatatatcagaaggaccaatccaatggcaaaaaattcaaactgaaaaaagtagtatttataattgggacgaaggatcaacttatgttaagaaaccaccgttctttgacaatcttccagataaaccagaaggttttaaaaaaataacagatgcaaggcctttattaattttggcgatatgat

SEQ ID NO: 282599 - DNA, 895 bp, Unknown
  Bacterial polypeptide expressing nucleotide sequence isolated from the Sargasso Sea
tacttcaatccaagcgtaatgattggagccggattgctcgctaaaaaagctatagaaaaaggcctaaagattaagccgtgggtaaaaacttctttagcaccaggttcaaaagttgtaacagactatttagaaaaagctggattgaataaatatcttgatgaacttggatttaacctagtcggatatggttgcacaacatgtattggaaattctggccctctaaataagaatatttctgaagctatacataaagaaaatttatatgcagtttctgttttatcagggaatagaaattttgaaggtagaataagtcctgacgttaaagctaattatctagcctcacctccgttagtagtagcttttgctttagcaggtaatatgaattttgatatgtacaaggattctctaggcaaagacaaagatgacaaagaagtttttttaaaagatatttggccaagtaatcaagaaattgaggatataatgttaaaatcaattaatgctgagatgtttattaatcggtattcaaatgtttcagaaggacctaaagaatggagtgctattaaaacagtagacagcagcatttataattgggaagataattctacatatgttaaaaaacctcctttctttgaaaacttaactgatcagccagagggatttaaaccaatcaaaaatgcaagattattacttttattagctgattcagtcactacggatcatatctctccagctggaaatataaaaaaagatagcccaacaggagagtattttatgaaaaatcaggttcaacaaaaagactttaattcatatggggccagaagaggaaatcatgaggtaatgatgagaggaacatttggaaacattaaaattagaaatgaaatggcgcctggcacag

SEQ ID NO: 282600 - DNA, 833 bp, Unknown
  Bacterial polypeptide expressing nucleotide sequence isolated from the Sargasso Sea
attgtcatttttcccaactagagttttaatgcaagattttaccggcgttccagctattgctgatttagcagctatgagagatgctatcaaatccaaaaatattaatcctaaaataattaaccctgttgctagagtcgatttaattattgaccattctgttactgttgatagttttggcaattcttcatcatatattgaaaatgtaaaaacagaatttcaaagaaataatgaaagatatgaatttcttaaatggggtcaaaactcttttaataacttttatttagtgcctcctggcgcaggtatttgtcatcaagtaaacttagagaatattgctaaaactatatgggtaaataaaatagaaggtaaaaattatatttatcctgactctgttgttggaactgatagccacacaacaatggttaatgcgctatcagttttgggctggggtgtcggaggcatagaggctgaagctgtaatgttaggccaacctatttctatgaatcttccaaaagtattagggtttaatattagtggatcactaaatgagggaataacagctacagatcttgtattaactattactgaaaagctacgggcacatggggttgttggaaagtttgttgaattttttggaagtggtctagaaaatttaactttgtctgatcgtgcaactatttcaaatatggctccagagtatggagctacatgtggtttttttccaacggacaacaaaactctaaactatcttaaattatccgggaaggacatagatcatatttcaatagttcaagagtatactaaaaaacaaaaactatggcatgatagtaaaaatg

SEQ ID NO: 282601 - DNA, 702 bp, Unknown
  Bacterial polypeptide expressing nucleotide sequence isolated from the Sargasso Sea
ttaaaagattggcttaaaaacaaaaaatcaaatatagaaattgcatacagacctgcacgtactttattgcaagattacacaggaattccggccattgccgatttagcagccatgagagacgccgttaaagataaaaataaagatccagaaaaaattaatccattatctactgttgatttagttatagaccattcagtaatggtcgatgaatatgcatccggaaaatcatttaatcaaaatgttgaaagagaatttttaagaaacggtgagcgatactcatttttaaaatggggacagaaagcatttgataattttagagttgtacctccagggacaggaatttgtcaccaagtaaatttagaatatttatccaaagttgtctggtcatcaaaaagtggaaatgatttatatgcttatccagatactttagttggaaccgatagtcatacaacaatggttaatggattatcagttttaggctggggtgttggaggaatagaagctgaggctgcaatgttaggtcagccaatttcaatgttaattccagaagtcgttggcgtagagcttaaaggaaaattaaaagaaggaacaactgcaacagacttagttttaattattgttgaaatgctaagaaaaaaaggtgtagttggaaaatttgttgagttttatggagagggtttaaaaaatttaactttagctgat

SEQ ID NO: 282602 - DNA, 745 bp, Unknown
  Bacterial polypeptide expressing nucleotide sequence isolated from the Sargasso Sea
tatggctcctgaatatggagctacttgtggtttttttcctatcgatgaagaaactttaaaatatttgaaattttctggtagagatcaacacacaattttacttgtagaaaaatattctaaagagcaaggactttgggctgatgaaaatatttcttttagtaaaattttagatttagatttatctaaagttgtaccaagtatttctggccctaaacgtcctcaagacaaggttttactatctgaatcatcaaaatcatttatgagatctttcaaaaaaaatatggatagagaaaacttaaaagaagaaatagtttcaggtgaaaactttaaattaaaagacggaaatgttgttatagctgcaattacatcatgtaccaacacttcaaatccaaatgtacttataggagcaggcttacttgctaaaaaagctgtagaaaagggacttaaagtaaaaccttgggtaaaaacttctttggcgccaggctcccaagttgttactgactatcttgaaaaagcaggtttaaataaatatttagatcagcttggttttcacttagtgggttatgggtgtacgacttgcataggcaattcaggacctttaaacgaaaatatttcaggggctattcagaaaggaaaattgtacgcagtttcagttttatctggaaatagaaattttgaaggaagaattaatcctgatgtaaaagcaagctatcttgcttcaccgcctttagttgtggcttacgca

SEQ ID NO: 282603 - DNA, 764 bp, Unknown
  Bacterial polypeptide expressing nucleotide sequence isolated from the Sargasso Sea
tttgacaattctactaggaagaaaaaagaataatatttcaaaggttaggaatgctaaatttgaaattaaagacgggtctatattaatagcagcaataacttcttgtacaaatacatctaatccaaatgttttaatcggagcaggtttgttagcaaagaaagctgtagaattaggattaaaaacaaaaccttgggttaaaacttctttagcaccgggatcacaagtagtaactgactatttagaaaaatctggactaaataaatatctagatgaattaggattcaatttagtaggctatgggtgtacaacatgtattggaaattcaggaccattacctgaaaatatagttgaagcaattgaaaaagaaaatatttatgcagtttcagttctttcaggaaatagaaattttgaaggacgtatttcaccacatattaaagcaaattatttagcttccccgccacttgtggttgcctacgctttagttggtgacatggtatttgatttttataaagattctttaggagaaaatagaaagggtaaaaaaatttttttaaaagatatttggccatcaaacaaagagatagaaaaaactttaaaagattcaataaatgctgaaatgtttaccaaaagatactcaaatatttctcaaggaccaattcaatggcaaaaaattaaaactgaaaaaagtagtatttataaatgggatgaaggatctacttatataaaaaaaccaccattctttgagaatatttctgatgagccag

SEQ ID NO: 282604 - DNA, 798 bp, Unknown
  Bacterial polypeptide expressing nucleotide sequence isolated from the Sargasso Sea
atcgactatttctaatatggctccagaatatggagcaacttgtggttttttccctattgatattgagacaataaattatcttaaatttactggaagagaaatagagacacttgagttagttgaagcttatgctaaagcccaaggaatgtggagagacattaacaccaaagaccctatattttcatcaactttggaattagacctaacagaaatcaaaccttccttagcagggccaaaaagaccacaggatagagttttggttagtgaattgaaagaaaattttatgagggccttagatgagacctctaatagaaaagaaataagaacatcagaattaaaatcaactaaactctctgatggtgacattgggatcgctgcaataacaagttgtacaaatacatcgaaccctggagttttaattgcagcagggcttcttgcaaaaaaggcatttgaattgggccttaaagttaaaccttgggtgaaaacttcactagctcctggaagtaaagtagttactgattatcttaatggatcaggactgcaaaaatacttggatgaattaggatttaatttagttggctacggatgtactacttgtattggaaattctggttccttaagtcgtgatataaccaatttaatagaaacaaatgatttattattaacctctgttttatcaggtaatagaaattttgaagggagaataagccctcatattaaggcaaattacttagcttctcctcctcttgttgttgcgtatgcaatagttggttcagttctaataaatctggatacaga

SEQ ID NO: 282605 - DNA, 616 bp, Unknown
  Bacterial polypeptide expressing nucleotide sequence isolated from the Sargasso Sea
atgtccgagacattgcgcgacacatgctgtgcaagccttgaagccgcaggcaaaacctaccactattattcgttggcggaacttgccaaggtctatccggcgcttgaaaaactgccattttctctcaaagtattgctggaaaatctgctacgtaatcaggatgactcgtcggtcgcaaccagcgatattgaggcactggccaactgggcagacagcggtcatcaaagtgaaatcgcgttccgcccgtcacgcattctactgcaggattttaccggtgtgccagcggtggtcgatttggccgccatgcgtgatgccatggagtcaattggaggcaatccagaaaaaatcaatccgctgtcgccggtagatctggtgattgaccattcggttatggttgaccatgccgggggcgccgatgccgcggcaaaaaacgttgtattggaatttgcccgtaatcaggaacgctatgagtttttgcgttggggggcatcagcctttgacaatttccgtgtggtgccacctgggactggtatttgccatcaggtgaatttggaatatctggcacaaaccattggacacatgatgaagatggtgtttcttatgcctatcccgactc

SEQ ID NO: 282606 - DNA, 792 bp, Unknown
  Bacterial polypeptide expressing nucleotide sequence isolated from the Sargasso Sea
ctttaaagagaatacaaaaagaaaagttcctttagaggctaaagtaaatgaaaaagaatttaaaattaaagatggagatattgtaattggtgcaatcacatcctgtacgaatacctcaaatccaagtgtgatgatcggagctggattgctggccaaaaaagctgttgaaaaaggtttaaaagtcaaaccgtgggttaaaacttctttagctcctggatctcaagttgtaactgattatttagaaaaagcaggtttaaataaatacttagaccaattgggttttaatcttgtaggctatggttgtacaacttgtataggaaattctgggcctttagataaagatatttcggatgctattcacaaagaaaatttatatgcagtttccgttttatcaggaaatagaaattttgagggaagaattaacccagatgttaaagcaaattatttagcatctccaccattagtagttgcttacgctttagcaggaaatatgcatcatgatttatataaaaattctttaggcaaagaccaaaaaggaaaagatgtatttttaaaagatatttggccaactaacaaagaaattgaagagttaatattaaaatctattaatgccgatatgtttgttaaacgttactcaaatgtttcagtgggaccaaaagaatggagcgagattaaaacagatcaaagtagtatttataattggcaggaaagttcgacatatgtaaagagaccacctttttttgacaacttaccagacaaaccagagggatttaaaaaaataaaaaatgcaag

SEQ ID NO: 282607 - DNA, 728 bp, Unknown
  Bacterial polypeptide expressing nucleotide sequence isolated from the Sargasso Sea
agatgacccagaaggttttaaaaatattatagatgctagaccattattaattttaggagatatgataacaaccgatcatatttcaccagctggatcgattcaaaaggaaagtcctacaggagaatattttatgaagcatcaaattttaccacaagattataattcatacggatcaagaagaggcaatcatgaggttatgatgagaggagcatttgcaaatattagaattaaaaacgaaatagctcctgaaacagaaggtggatttacaaaactttatcctgaagaaaaagttttgacagtttttgatgctgttcaagaatataaaaaaagagggacagatttagttgtaattgccggaaaagaatatggcacaggttcatcaagagactgggctgcaaaaggaacaaaattattaggtattaaagtaattattgcagaaagttttgaaagaatacatagatccaacctaataggaatgggagttcttccattacagtttacaagtggtatgaatagaaaaaatttaagtttaactggtccagaattaataagcatattaaatatagagggaggatttaagcctggatctgaaatagaagtggaaataaaatacgcagatgcatctataaaaaaaattaaaactttatgcagaatagatacacaaaatgaattagagtattataaaaacggtggaattttacaatacgttttaagaaatatgatttaaa

SEQ ID NO: 282608 - DNA, 742 bp, Unknown
  Bacterial polypeptide expressing nucleotide sequence isolated from the Sargasso Sea
cataactgctacagacttagtgcttacaataactaaaattctaagagaaaaaggagtagtcgggaaatttgttgaattttttggaaatggactcaaaaatctatcattggctgatagagctacaatctctaatatggcgcctgaatatggtgctacttgtgggttttttccaactgatgatgaaacgatcaattatcttaaattaacagggaaagatgatcatcatcttaatttagttaaaaaatattctaagagccaatttatgtatgttgatgaaaattataatccaaaattcaataaaacaattaatttagatttaaatacaatagaaccttcattagctggcccaaaaagacctcaagataaaattttgctaaaggatatccctgaagaatttaacaaattagtaaaaaaagatgaaagcaattcaaataagctgtcatccggagatatagtaatagcagcaattactagttgcactaacacctcgaacccaagtgtgatgattgcagctggattgttagcaaaaaaagctgttgaatacaatttgcaaactaagcattgggttaaaaccagtctagcaccaggaagtaaagtggtaagtgattatttagatcaagctggactttctaaatatttaagtaaagttggatttaatacagttggctatggttgtacgacatgtataggaaattctggtcctttagatgagtgggtgtcacaagagatcaattcaaataag

SEQ ID NO: 282609 - DNA, 916 bp, Unknown
  Bacterial polypeptide expressing nucleotide sequence isolated from the Sargasso Sea
agttttagtaaaagttttaaagaaattacaaaaaaaaatgatttctctatctctaaagtttccaactctgagtttgagatcaaagatggttcaattttaattgcagcgataacttcttgtacaaatacatctaatccaaatgttctaattggagcgggcttgcttgcaaaaaaagcagtcgaactaggtcttgaagttaaaccttgggttaaaacttcactagcaccaggatctcaagtagttactgattatttagaaaaagcagggttaaatacttatttggataaacttggattcaatcttgttggatacggttgtacgacatgtattggtaattctggaccattggcagaaaatattgttgaggcaattcaaaaagaaaatatttatgcagtttcagttttatctggtaatagaaattttgaaggaagaatttcacctcatataaaagcaaactacttagcgtcacctccattagtcgtagcttatgctttagctggtcatatgaattttgatttatataaagattccttaggtaaagataaaaatggtaaagatatttttatgaaagatatttggccatcaaataaagaaatagaagaaactttaaaatcatctctaagtgctgagatgtttattaaaagatactctaatgtttctgaaggtccaaaacaatggcaagaaataaaaactgaaaagagcagtatttataattgggaagataattcaacgtatgtaaaaaaaccccctttttttgataatcttccagataaacctgaaggtttcaaagaaattaaaaatgcaagaccgttattaattttaggcgatatggtaacaacagatcatatttccccagcaggcaatattcaaaaagagagtccaactggagaatattttatgaaacaccaaaatttta

SEQ ID NO: 282610 - DNA, 907 bp, Unknown
  Bacterial polypeptide expressing nucleotide sequence isolated from the Sargasso Sea
gatgaatatatcttcccagacactttagttggaacagacagccatactactatggtaaatggtttatccgttctaggatggggtgtaggaggcatagaagccgaagctgggatgttaggtcaaccaatatcaatgttaattccagaggttattggatttgaattaattaataaattacctgaaggaaccactgctacagatttagttttaacagttgttaaaatgttaagagacaaaggagttgttggtaaatttgtagaattttatggaaaaggtttaaaaaacctaagtttagcggatagagccaccattgcaaacatggcacctgagtatggagctacttgtggattttttccaatcgatgatgaaactttaaaatatttaaaattctcaggaagagataatcaaacaatcaaaatagttgagagatatgctaaagaacaaggcttatgggctagtgaagatattgaatttactgatgttgttaaattagacatgtcaacagtggctccaacaatatcaggccccaaaagacctcaagataaagtattgcttaatgaagcaaaaacatcatttgaaaaaagttttaaagaaatcacaaaacgtcaaaataaaaataaatcaaaagtctctggaacaaattttgagataaaggatggatcaatcgtaattgcggcaattacttcatgcacaaatacatcaaatcccaatgttctaattggagcaggtcttcttgccaaaaaagctattcaaaaaggacttaaaactaaaccatgggtaaaaacatcattagctcctggttcacaagttgtaactgactatcttaataaatctggattaaataagtatttagatgaattaggatttaaccttgttggttacggatgtacaacccatgccattggta

SEQ ID NO: 282611 - DNA, 751 bp, Unknown
  Bacterial polypeptide expressing nucleotide sequence isolated from the Sargasso Sea
aaaaaatggattagaagatatttcaaaattaccaaagtcactaaaagttttattagaaaatttattgagatttgaagatgaaaaatttgttaaaagggaacaaattttatcaattcgatcttggttagataaaaaaaattctaaaaaagaaattgcctttagacctaccagagttcttatgcaggattataccggtataccagcagtagctgatcttgcggctatgcgtgatgctgtgaaatcaaaaaaaaaagatcctaaaaaaataaatcctttatcaacagttgatttggttattgaccactctgtgatggtggatgcttatgcttctaaagattctttcaaaaaaaatgttgaaaaagaattttcaagaaatggagagcgttattcttttttaaaatggggacaacaagcttttaacaactttagagttgttccaccagggactgggatttgtcaccaagtaaatttggagtatttatcaaaagttgtttggtcatctgataattttgcctatccagatacacttgtaggaactgacagtcacacaactatggttaatggtctttcagttcttggttggggagtaggcggaattgaagccgaagcagcgatgttgggacaaccaatatcaatgttaattcccgatgttgttggttttaaaattaaaaataaactttcagaaggaacgactgctactgatttagttttaacaatagttcaaatattaaggcaggaaggagtagttgga

SEQ ID NO: 282612 - DNA, 933 bp, Unknown
  Bacterial polypeptide expressing nucleotide sequence isolated from the Sargasso Sea
ttcataaaagtaatattagaaaatttaattagaaatgaggatggtgaaaatatttctaaaagcatgatctctaaagtattttcttcattaaaagaaagaaataaaacaaataaaaaaatagaaatagcattttttccaactcgagttcttatgcaagattttactggagtaccagctgttgcagatttagcagcaatgagaaatgcactaaaatcaaaaggaattgagccaaaaaagatcaatcctctttctagagttgatttagttatagaccattctgttatggttgatgattataaaaataatagttctctaaaagaaaatgttaagaaggaatttgaaagaaataaagagagatatgaatttttaaagtggggtcaaagttcatttgataacttttatttagtaccccctggtgctggaatttgtcatcaagtaaatttagaaaatattgccaagacagtttggttaaaagaaattgataataaaaaatatttatttccagactcagtggtaggaactgacagtcatacgacaatggttaattctctgtcagtgctaggttggggtgtaggaggcattgaagctgaggcagctatgttaggtcaggcaatttcaatgaatatacctgatgtaatcggttttgaactcaaaggatctttgaaggaaggaattactgcaactgatttagtcttatcaattacaaaaattttacgagataaaggtgtggttggaaaatttgtagaattttatggaaacggtttaaaaaatttatctttggctgatagagccactatatctaatatggcgcctgagtatggagcaacttgtggattttttcctacagatgaagaaacaattaattaccttaagttaaccggtaaagataatgaacatttaaatattgttgaaaagtattctaaaaaacaaact

SEQ ID NO: 282613 - DNA, 745 bp, Unknown
  Bacterial polypeptide expressing nucleotide sequence isolated from the Sargasso Sea
caaatacatcaaaccccaagtgttatgattggtgctggactagtagcaaaaaaggctgttgaaaaaggtttaaaggtaaaaccttgggtaaaaacatcattggcaccagggtctcaagtcgtaacagactatttagaaaaagctggattaaataagtatttagatcaattaggtttcaacttagttggctacggttgtactacttgtattggaaactctgggcccttagataaagaaatttctgagacaatacataaagaaaatctttatgcagtttcagtattgtcaggtaacagaaactttgaaggtagaattaatccagatgttaaagcaaattatttagcatcaccacctctagtagttgcttatgctttagcaggtaatatgcatcacgatctttataaaaattcattaggtaaagatcaaaatggaaaagatgtatttttaaaagatatttggccttcaaataaagagatcgaagagttaatgttaaaatctattaatgccgatatgtttgttaagagatactcgaatgtttctgaaggacctaaagaatggagttctattaaaacagaccaaagtagtatttataattgggaggagagctccacttatgtaaaaagaccacctttttttgacaatttaccagacaagccagaaggatttaagaaaattaaagatgcaagaccacttttaatattaggcgatactgtaaaaactgatcacatttcgccagccggatcta

SEQ ID NO: 282614 - DNA, 592 bp, Unknown
  Bacterial polypeptide expressing nucleotide sequence isolated from the Sargasso Sea
gaagcagttaaagaaaaaaataaagatccaaatacaatcaatccattatccgcagttgatcttgtcattgatcactctgtacaagtcgaccagtctgcaaaagcagattcttttgaaaaaaatgttgatatagaatttgaaagaaatggtgagagatattcttttttaaaatggggacagcaggcatttgataattttagaatagttccaccaggaacaggaatttgtcaccaagtaaatctagaatatttatcaaaagttgtttggttagaagaatttaaaggggaaaaatatctttttccagatactttagtcggaacagacagtcatacaacaatggtaaatggtttatctgttttaggatggggtgttggggggattgaagctgaagcaggaatgttaggtcaaccaatttcgatgttaataccagaagtcattggttttgaaatgaaaaacaaaatgccagaaggtaccactgcaactgatttagtcttaactgttgttaaaatattaagagataaaggagtggttggtaagtttgttgagttttatggagagggtttaaaaaatttaactcttgcggatagagcta

SEQ ID NO: 282615 - DNA, 871 bp, Unknown
  Bacterial polypeptide expressing nucleotide sequence isolated from the Sargasso Sea
gagagacgcaatgacatcattagatgagagtaaagctgatgcagttaatccacaatgccaaacggatctagtcatagatcattctgtcatggttgatcattttggaacttctgaatctaaagatctcaataccaagcttgaatatgagagaaatacggagagatataaactcttaaaatggggtcagcaagcattcaaaaatctaagaattgtgccacctaataacggaattatccatcagatcaacattgaatatatcgccagggtaatatatgaaaaagaaggacaactttatcctgatacagtggttgggactgactcacacacgacaatggttaatggcctcggagttcttggatggggagttggaggaattgaagctgaagctgccatgttaggacaacctattcctatgttacttcccgaagtaattggttttgaactgaccggtagacttggtcaaacaactacggcaacagatcttgtactcacaattgtccagatgcttagagaaaaaaatgttgttggtaaatttgttgaattttatggctcaggactagataacttgagtatagcagacagatgtacaatctctaacatggctcctgagtatggtgctacttgtggatttttcccggtagatgctttgacaatcgattatttaaaaatgacaggtaaagatgagggtcatcttgcagtagtagaacagtatagtaaaacatgcggattttttagagatgatagtcaagatattaaatatacagattctttatctttagatatgggagatgttgaagcttgcctttcaggtcctaaacgaccacaagatagagtgcttctctctgatgttaaagatatatctgaaagagag

SEQ ID NO: 282616 - DNA, 730 bp, Unknown
  Bacterial polypeptide expressing nucleotide sequence isolated from the Sargasso Sea
ttatcagataaaccagaaggatttaaaaaaattgaatatgcaagaccattgttaatattaggggatatgattacaactgatcatatttcacctgctggatccatacagaaggaaagtccaacaggtgaatattttatgaagcatcaaattcaacaaaaagattttaattcatacggttctaggagaggaaatcatgaagtaatgatgagaggcacgtttgcaaatattagaattaaaaatgagatggcaaaagatacagaagggggatttactaaattataccctgaggaaaaagttatgccaatctatgatgcagtagttgaatacaagaaaagaggaacagatttagtagttattggtggaaaagaatatggaaccggttcgtcaagagattgggccgcaaaaggtactaaattgcttggtataaaaatggtgctagcagaaagttttgaaagaattcacagatccaacttaattggtatgggaatacttcctttacaatttaaggaagatatgaatagaacaaatttaaatctcattggttcagaattatttagtgttttgaatattgaacagggctttgatccttcatcagatatagaagtagaaataaaatatgcggatgcaacaataaaaaaaattaaaacattatgcaggatagatactaaaaatgaattagaatattataaaaatggtggtatcttacaatttgtattaagaaaaatgatgt

SEQ ID NO: 282617 - DNA, 770 bp, Unknown
  Bacterial polypeptide expressing nucleotide sequence isolated from the Sargasso Sea
tatgaaaaacagaaattcttttgattctgaacaaaaccttgaaattaataactctatttataagtattttaatcttaaaatagttgcagataaattcaaaattaacctgtcaaaagtgccaatatcaataaagattttactagaaaacttattacgaaatgaggacggtgaaaatgttgataaatatatgatctcaaaaatttttaattctttaaaagaaaaaaataaaaaaaatgatttagaaatcgctttttatccaacaagagtgttaatgcaggatttcacaggtgttcctgctgttgcagatttagctgcaatgagaaatgctcttaaaaaaagaggttttgagccaaaaataattaatcctctttctagagttgatctagtaatagatcattcagtaatggtagataattataaaaatccaaattctctagaactaaatgtaaaaaaagaatttgaaagaaataaagaaagatacgagtttttgaaatggggtcaaaaatcttttgataatttctatttagtccctcccggtgctggtatctgtcatcaagttaatttagagaacattgcaaaaactgtttgggtcaaaaaaattaataatcaagaataccttttcccagattcagttgttggaactgatagtcatactacaatggttaatgcattatcagtattaggatggggggttggtggtatagaagcagaggcagctatgttaggacaaccaatctctatgaatgttccagatgttgttggtttcaaac

SEQ ID NO: 282618 - DNA, 924 bp, Unknown
  Bacterial polypeptide expressing nucleotide sequence isolated from the Sargasso Sea
gttgagttttttgggccaggtcttgaccacctgccactaacagaccgcgccactattagtaacatggcaccagagtatggagccacttgtggtttattcccaatagatgaaaaaacttgtgaatatctacaacaaactggacgcgaccaagatgtaattgatgttgtaaaagaatatgctcaacagcaaggcatgtggcgtgatgctgacagccgcgatgcgtcttacaccaaagtaatagaacttgatttaaatgaaattgaagcctctattgccgggcccaagcgcccacaagatcgtgtagcgttatctaatttacctaaaacaatgaatgagattctagatgagcaagttgaaaaccgtgaaacttatgctgaaattgagggagaaaagttcactcatggcgatatagtaattgccgcaattaccagttgcaccaacacatccaaccctggagttgtaatggccgcaggcttactagctaaaaaagccctagaacaggggctaacagtaaaaccatgggttaaaacttcacttgcaccaggatctaaaatagtaacccgctatcttgaacacgccaaactattagaaccattaaatcgactcggttttaatgttgtcggttatggctgtacaacatgcattggcaactccgggccgctgcctgaaaaagtaagtcaagcaatcgacaaaaacaatttacatgttagctcggttttatctggcaacaggaactttgagggccgcattcatccgcaggtgcgtgcaaactggttggcatcaccaccacttgttgttgcttacgctttagcaggtactacgcgtattgaccttaacaatgaaccacttgggaaaagtaccgctggaaaaccagtgttccttaaagatatttggccaactccagttgagctaaactgggcaata

SEQ ID NO: 282619 - DNA, 790 bp, Unknown
  Bacterial polypeptide expressing nucleotide sequence isolated from the Sargasso Sea
accacatatgattggaatgatgctagtacttacataaaacatccaccttattttgatacgcaaaataaatttgaactaaatgacataaagaatgcaagaatattagtattattaggtgatagtgtaacaacggatcatatttctcctgctggaagtattaaagaagatagtccagctggtctttatttaacaaatagacaaattaattctaaaaacttcaattcttatggatcaagacgtggtaatcatgaaattatgatgagaggaacttttgctaacataagaattaagaatctaattttagataatgttgagggaggttataccaaatcttttctctcaaacaaacaaatgtacatttatgatgctgcacaagaatatatgaacagcaatattgatacagttataatagctggaaaagaatatggcacaggttcgtctagagattgggcagcaaaaggtacaagacttttaggtgtaagagcagtaattgctgagagttttgaaagaattcatagatcaaatttaattggaatgggagttttacctcttgaatttatgaataatcaaaacaaaatgaatctaaatattggaggtgaagaaagtatatctatatttggactgtctaaactaaaaccaggaattgaacttaattgcgaaattaattctgaagcaagtagaagtataaacttaaaatgcagaatagacacaaataaagaactggaatattataaagctggaggaattttaaactacgttttaaatgaaataatttcagacgctgcataat

SEQ ID NO: 282620 - DNA, 759 bp, Unknown
  Bacterial polypeptide expressing nucleotide sequence isolated from the Sargasso Sea
taaaaacagaccaaagcagtatttataattggcaagatagttctacgtatgtaaaaaaacctccttttttcgataatttgcctgacaaacctgagggatttaaaaaaataaaagacgcaagaccacttttaattcttggagataccgtaacaacggatcatatctcaccagctggttctattaaaaaagatagtccgaccggggattattttatgaaaaatcaagtacaacaaaaagactttaactcttatggcgctagaagaggcaatcatgaggtcatgatgagaggaacgtttggaaatattagaataagaaatgagatggccccaggtacagaagggggttttacaattttgcaaccagatggaaagaaaatgagtgtttatgatgctgctactgaatacaagaaaagaaataatgatcttgtagtagttgcaggaaaggaatatggcaccggatcctcaagagattgggcggcaaaaggaacaaaattgcttggtattaaagcagttatagcagaaagttttgaaagaattcatagatcaaatttagttggtatgggtgttttgccactacaatttaaagaaggttttgatagaaaaaaattaaatatcaaaggcacagaattgtttactattattgatattgaaaaaggaataaatccaagagcagaagtaaaatgtgaaataaaatataaagatggtagtagcaaaaactataaatttgttatcaagaatagatacagaaaacgaaattgag

SEQ ID NO: 282621 - DNA, 913 bp, Unknown
  Bacterial polypeptide expressing nucleotide sequence isolated from the Sargasso Sea
ttgggtcaaaacgtctctagctccaggttcgaaggttgtttccgactacctggaagctggtggcctgcaagaacacctggatgccatgggttaccaagtcatcggatatggatgcaccacatgcattggtaactccggattaatccatgaaaagttggttgagtctatcaaagagcaagacataatcgtcactgcagtcttgtccggcaatcgcaacttcgaaggtcgtgtcagcccttggactaaggccaactacctggcctcgccgcccctcgtagtcgcctacgcgctggccggcaacatgaatattgatctccttaacgacgttattggaaaagactgggatggaaacccggtttatttgaaggatatttggccaaccaataaggaagtccaggaatatatccaatcggtcctcacgccagaaatgttccacaaacgctatgcaaatataatcgacggtgacccgaactggcagaagatcaaaaccgtacctagcctcacatacaactggtcgcctggatccacctatatcaagaagccgccgttttttgagaatgtgtcgcctgacgggcgcgaggctgcggatattttgggtgcgcggcctctagctttgttgggcgatttcatcaccaccgaccacatatcgccagccggctcaatcatgagagaaagtccggccggtgaactactgacccagcatcagattcgcccccaagatttcaactcctatgggtcgcggcgcggcaaccacgaggtgatgatgcggggtacgttcgccaatatccgtatcaagaatgagatgttgccaggtgctgagggtaattggacaatccaccgaccctccggcgagcgcatctctatgtacgaggcggcgatgcgctacaagaaagagggtgtgcctctgttcgtt

SEQ ID NO: 282622 - DNA, 781 bp, Unknown
  Bacterial polypeptide expressing nucleotide sequence isolated from the Sargasso Sea
acttgtggtttttttcccatcgatgaagaaactttaaaatatttaaaattttcagggagagatcaacacacgatatcacttgtagaaaaatattctaaagaacaaggtctttgggcagatgaaaatatttcttttactaaaattttagatttagatttatctaaagttgttcctagtatctcgggtcctaaacgtcctcaagataaggttttattatcagaatcttccaaatcatttatgacatcttttaaaaaaaatatgaatagggaaattataaaagaagaaatagtttcaggtgaaaaattcaaattaaaggatggtaatattgttatagctgcgattacatcatgcactaacacttcaaatccaagtgtacttataggtgcaggcctacttgcaaaaaaagctgtagaaaaggggttaaaagtaaaaccttgggtaaaaacttctttggcgccaggctctcaagttgttacagactatcttgaaaaagccggtttaaataaatatttggatcaacttggttttcatttagtcggctatggttgcacaacttgtataggtaattcaggacctttaaaagaaaatatttctcaagctatacaaaaaggaaatttatatgcggtttcagttttatctggaaatagaaatttcgagggaagaattaatcctgatgtaaaagcaaactatcttgcttcgccaccattagttgttgcttacgcattggcaggatcaatgaattttgatttatataaagagtctttgggaaaagataagcggg

SEQ ID NO: 282623 - DNA, 886 bp, Unknown
  Bacterial polypeptide expressing nucleotide sequence isolated from the Sargasso Sea
taggtctttcaatttttactctatagaaaaagctgaaaaaggcgggtttggaaatttttctcagttgccagcagttctacgagtagtcttggagaacttgttgcgttacgaggatggtaagactgtaacactgaacgacatctcagctttttcagattggtcagctaataacggaagaaatccccaggagatttcctacaggcctgctcgtgtgctgatgcaagatttcactggtgttcctgctattgttgatctggctgctatgagagatgctatggtctcattaggtggagatccacaaaagattaacccgcttaattcagtagatctagtaattgatcattctgtaacgattgatcattatggaaattctagagctttaagcttaaatgttgaacgagagtatgaacgcaattttgaaagatattcattcctaaaatggggtcaaaaagctttcaagaatttccgtgtagtgcccccaggtacaggaatttgccatcaggtaaatttagaatatctgggtaagactatttggattgataaagatcaaaaagggcaaactgtcgtttatcctgatactttagtaggcactgatagtcacacaacgatgattaacgctatggcaatcttaggctggggcgtagggggtattgaagcagaggctgcaatgctaggccaaccagtttcaatgttgatacctgaggttgttggttttgagctgacgggggaaattcttgagggtgtcacagcgactgatttagttttaaaagttgtaaaaatgttgcgtgaaaaaggagtagttggaaaatttgtagaatttttcggtaatggcctgtctaagttaccccttgctgacagagcaacgattgcgaatatggctccagaa

SEQ ID NO: 282624 - DNA, 843 bp, Unknown
  Bacterial polypeptide expressing nucleotide sequence isolated from the Sargasso Sea
gggtcagaaagcttttgacaattttagggtagtgcctcctggaacgggaatttgccatcaagtaaacttagaatatttatccaaggttgtttggtcgtctaaaagtggaaatgatttatatgcttatccggatacgttagtcggaacagacagccacaccacaatggttaatggtttgtctgtacttggttggggggtaggcggcattgaggctgaagcagcaatgttaggtcaacctatttcaatgttaataccggaagtagtaggtgtcgaattaaaaggaaaattaaaggaaggtacgactgcaacagatttagttttaacaattgtagagatgcttagaaaaaaaggtgttgtaggaaaatttgttgaattttatggagaaggtcttaagaatttaactttagctgatagggcgactatcgcaaacatggcaccagagtatggagctacctgtggtttttttccagttgatgaagagtctttaaaatatttaaaattatcaggaagagatgaatcaacaattttattagtagagaaatattcaaaggaacaaggattatgggcaagtaacgatgtagagtttacagataccgttacgcttgatgtaagttcggttgtaacaagcatttctggaccaaagagaccacaagataaggtttttcttaccgatgcatcaaatgcttttgcaaaagtttataaagaaaacactaaaagatccaaagaagttgaagcagttgttgctggaaaagattttaaattaaaagatggagatattgttattgctgcaattacctcctgtactaacacttctaatccaagtgtattaataggagcaggact

SEQ ID NO: 282625 - DNA, 970 bp, Unknown
  Bacterial polypeptide expressing nucleotide sequence isolated from the Sargasso Sea
agatttagtgttaacagttgtaaaaatgctgagagataaaggagtggtaggaaaatttgtagaattttacggagaaggattgaaaaacttaactcttgctgacagagctactattgcaaatatggcacctgaatatggagcaacatgtggcttttttccaatagatgatgagacattaaaatatttaaaattttcaggaagagatcagcatacagtagatattgttgaaatatacgcaaaagagcaaggtttgtgggcaagtgatgagattgaatttactgatattatatctttggatatgtctacagttgttccaactatctcaggtccaaaaagacctcaagataaagttttattaacagacgcatcaagttcttttaaaaaagtaatgcatgatgctactaataaaaaggaaaaatcaatttcaaaagtttctaatgcagactatcaaattagtgatggatctatactaattgcagctattacatcttgcacgaatacatcaaatcctaatgttttaattggagctggattgctggcaaaaaaagcagttgaattaggtttagaagttaagccatgggttaaaacttcattagcacctggctcgaaagtagttactgattatctagaaaaagctggattaaacaaatatttagataaattgggatttaatttagttggatatggatgcacaacttgtattggaaattcaggaccattagctgaaaacattgttgaagctatacaaagagataatatatattctgtttcagttttgtcaggcaatagaaattttgaaggtagaatttcacctcatataaaagcaaactatctcgcatcacctccactagtagtagcatacgcaatagcaggtcatatggaagttgacctatacaaagatccgtttaggtcagataaaaatggtaaggatatttacttgaaagatatttggccctcaataaagagatag

SEQ ID NO: 282626 - DNA, 877 bp, Unknown
  Bacterial polypeptide expressing nucleotide sequence isolated from the Sargasso Sea
tcaattgttccaacaatatctggaccaaagagaccacaagacaaagttttattaaatcaggcatcatcagaatttaagaaagtttatgaaaatataactgaacgaaaggaaaaacatatttcaaaagttaattatactgattttgaaattaaagatggatctatattgattgcggcaataacatcatgcaccaatacatccaatccaaatgttttaattggagcaggtttattggcaaaaaaagctgtggagctaggattaaaaaccaaaccatgggttaaaacttcattggcaccaggatcacaagtagtaactgattatttagaaaaagctggtttaaataaatttttagatgaattgggatttaatttagttggttacggatgtacaacatgtattggaaactcaggtcctttacctggtaatattgtagaagcaattgaaaaaaataatatatatgcggtatcagttttatctggaaatagaaactttgaaggaagaatttctccacacatcaaagcaaattatttagcctctccaccgcttgttgttgcatatgcattagcaggacatatggaagtagatttatataaagatcctttaggaaaagacaaaactggtaaagatatatttttaaaagatatttggccgtcaaataaagaaatagaagatattttagaagaagctctaaatgcagaaatgtttgttaaaagatattcaaatgtctccgacggaccaattcaatggcaagaaattaaaactgaaaaaagtagtatttataattgggatcaaggatcaacttatgtaaaaaaaccaccattttttgaaaacttatcagatgagccagaaggatttaaacaaattaaagatgcaagac

SEQ ID NO: 282627 - DNA, 874 bp, Unknown
  Bacterial polypeptide expressing nucleotide sequence isolated from the Sargasso Sea
gactcattaggaaaagataatgcgggtaacgatgtatttttaaaagatatatggccctctaataaagagatagaagataccttaaaagagtcacttaatgcagaaatgtttatacaaagatattcaaatgtatcagatggtccaactcaatggcaacaaattaaaactgataagagtagtatctataattgggatgaagcctcaacttatgtaaaaaaacctccattcttcgactctttaccagatgaaccagaaggatttaaagaaattcaagatgcaaggcctttattgattttaggagacatggtgactacagatcatatatctccagctggtaatatacagcaagacagtccgactggagagtattttatggagcatcagattttacctaaagattataattcttatggctctagaagaggaaatcacgaagttatgatgagaggaacttttgcaaatattaggataaaaaatgaaatggtacctggaacagaaggaggttttacaaaactttatccagaaggaaaaattcttccagtttatgatgctgtagttgaatacaaaaaaagaggaacagatttagttgtgattggagggaaagaatatggaactgggtcatctagagattgggcagctaaaggtacaaaattactaggaataaaagcagtcattgctgagagttttgaaagaattcatagatctaatttaattgggatgggagtattgcctttacaattcattgatggagtaaacagaaaaaatttaaatttaattggttcagaattaattagtattatgaatatagagaagggtgtaaatccatcagataagataactattgaaattaaatatgcatctggtgaaataaaga

SEQ ID NO: 282628 - DNA, 954 bp, Unknown
  Bacterial polypeptide expressing nucleotide sequence isolated from the Sargasso Sea
gcaggtctaaatacgtatttagatcaattaggattcaatctggttggttatggatgtacaacctgtatagggaattcaggacctttagcagaaaatatagttgatgctattaaaaaagaaaatttatatgctgtctctgttttatcaggtaatagaaactttgagggtagaatttcaccttatattaaagcaaattatctagcctctcctccacttgttgtagcttatgctcttgcaggtcatatggaatttgatttaatcaaagactcatttggaaaagacaaaaacggtaaagatgtttttttaaaagatatctggccttcaaataaagaaatagaggatacattgaagatttctcttaatgcagatatgtttgttaaaagatattcaaatgtttccgagggaccaaagcaatggcaagaaatcaaaacagagaaaagtagtatatataattgggatgaaaattctacttacgtaaaaaaacctcctttttttgaaaatcttagtgacgacccagaaggttttaaagagattaaaaatgctagaccattattgatattaggagatatggttaccacagatcatatttctccagctggtaatattcaaaaagatagcccaacaggtgaatattttatgaattatcaaattcttccaaaggactataattcatatggctcaagacgaggaaatcatgaagtcatgatgaggggcacatttgcaaatataagaattaaaaatgaaatggctcctggcaccgaaggtggttttacaaaattataccctgaggaaaaacttatgtcagtttatgatgcagtagtggagtataaaaaaagagggactgatttagttgtaattggtggtaaagaatatggcacaggctcctctcgtgattgggctgcaaaaggaacaaaattactaggagttaaagtagtaattgcagagagtttgaga

SEQ ID NO: 282629 - DNA, 730 bp, Unknown
  Bacterial polypeptide expressing nucleotide sequence isolated from the Sargasso Sea
ttcagataagcccgagggcttcaaagaaattaaagatgcgagaccattattaattttaggagacatggttacaacagaccatatttcaccagctggatctattcagaaagatagtccaacaggtgaatatttcatgaagcatcaagttttaccaaaagattataactcatatggctcaagaagaggaaaccatgaagtaatgatgagaggaacttttgcaaatataagaataagaaatgagatggctccagggactgaaggtggttttacaaaactataccctgaaggaaaagtcatgcctatatacgatgcggtagttgagtataaaaaaagagatacagatttaatagtaattggtggaaaagaatatggtacgggctcatcaagagattgggcggctaaaggaacaaaacttttaggcatcaaagctgtgatcgcagaaagttttgaaagaattcatagatccaatctaataggcatgggcatacttcctttacaatttgtaagtggggttgatagaaaaaaactaaaactaattggttcagaattaatttctattttaaaaattgaaaatggaataaatccatcagatgaaattgaaatagaaataaaatatcaatcaggtgatattaagaagataaaaacattatgcaggatagatacaaagaatgaacttgaatattataaaaatggaggaattctacaatttgttttgagaaatatgatgtaa

SEQ ID NO: 282630 - DNA, 910 bp, Unknown
  Bacterial polypeptide expressing nucleotide sequence isolated from the Sargasso Sea
tacagactatttggcaaaagctggattaaacacttatttagatcagcttggctttaatttagttgggtatggctgtacaacttgcattggaaattcaggaccacttccagaaaatattgtagaagcgatccaaaaagaaaatatttatgcagtttcagttttatcaggaaatagaaatttcgagggaagaatttctccacatataaaagctaactatttggcttcacctccacttgttgttgcatatgcaatagctgggcatatggaagttgatttgtacaaagatccattgggaaaagataaagaaggaaaagatgtatttttaaaagatatttggccttcaaataaagagatagaagaaactttaaaagattcacttaatgctgagatgtttatacaaagatactcaaatgtttctgagggcccaactcaatggcaaaaaattaaaactgataaaagcagtatctataattgggatgagggatcgacatatgtaaaaaaacctccgttttttgactcgttaccagataaaccagaaggatttaaagaaattaaggatgcaagaccgttattaattttaggtgatatggttactactgaccatatatcgccagccggtagtattcaaaaggatagtccaactggtgaatatttcatggaacaccaaattttgccaaaagattataattcatatggttcaagaaggggtaaccatgaagttatgatgcgaggaacttttgcaaatataaggattagaaatgaaatggctcctggtacagagggaggttttacaaagttatacccagaagaaaaagttcttcctgtctatgatgcagttgttgaatataaaaaaagaggaacagatttggttgtaattggtggaaaagattatggaacccggatcatctaa

SEQ ID NO: 282631 - DNA, 907 bp, Unknown
  Bacterial polypeptide expressing nucleotide sequence isolated from the Sargasso Sea
gagattaatgtaggtagtaaaaattacaaatatttttctttaatagaagctgaaaagtatggtttagttggaataaacaagctccctaaatctttaaaagttttgctagagaatttattgagatatgaggacgatttaagtgttacaaaatctcagatagaagcaattaaagattggttaaaaacaaaaaaatctaaaacagaaatagcttatagaccagctcgagttttgcttcaagattatacaggtatcccagcagttgcagatttagcagccatgagggaagcagtcaaagaaaaaaataaaaatccaaatacaatcaatcctttgtcagctgtggatcttgtaattgaccattctgttcaagttgataaatcagctgaagctgattcttttgaaaaaaatgttgatatagagtttgagaggaatggagagagatattcattcttaaagtggggccaacaagcatttgataattttagaattgttccgcccggcactggtatatgtcatcaagtaaatttagagtatttatcaaaagttgtttggtcagaaaaatttaaaggagatgaatatctttttccagatactttagtaggaaccgatagccatactactatggtcaatgggttatcagtattaggttggggtgttggaggaattgaggcagaggctggtatgttaggacagcctatatcaatgttaattccagaagttatcggttttgaaataaaaaataaaatgccagaaggaaccacagcaactgatctagttttaacagttgtaaaaatgcttagagataaaggagttgtaggaaaatttgtagagttttatggagagggattgaaaaatttaacccttgctgatagagctactatagcaaacatggcacctgaatatggagcta

SEQ ID NO: 282632 - DNA, 886 bp, Unknown
  Bacterial polypeptide expressing nucleotide sequence isolated from the Sargasso Sea
gatgattggagctggattgcttgctaaaaaagctgttgaaaaaggtttaaaagtaaaaccgtgggttaaaacttctttagctccaggatctcaagttgtaactgattatttagaaaaagctggtttaaataaatatttggaccaattgggttttaatcttgtaggttatggttgtactacttgtattggaaattccggacctttagatgaagatatttcagatactattcacaaagaaaatttatatgcagtttctgttttatccggaaatagaaattttgagggaagaattaacccagatgttaaagcaaattatttagcatctccaccattggtagttgcttacgctttagcaggaaatatgcatcatgatttatataaaaatcctttaggtaaagataagacaggaaaagatgtatttttaaaagatatttggccaaccaataaagaaattgaagaattaatattaaaatctattaatgctgatatgtttgttaagcgttactcaaatgtttctgaaggaccaaaagaatggagttcaattaaaacagatcaaagtagtatttataattggcaagaaaactcaacatacgtaaagagaccgcctttttttgataatttatcagacaaaccagagggatttaaaaaaataaaagacgcaagaccacttctaatacttggagatactgtaacaactgatcatatttcaccagctggatctataaaaaaagatagccccactggtgattattttatgaaacaccaagttcaacaaaaagattttaattcttatggtgctagacgtggtaaccacgaagttatgttaagaggaacatttggaaatataagaataagaaatgaaatggcacctggcacagaaagggga

SEQ ID NO: 282633 - DNA, 751 bp, Unknown
  Bacterial polypeptide expressing nucleotide sequence isolated from the Sargasso Sea
aaaagaaaagaaaaaaatatttcaaaggttagtggtacagattttgaaattaaagatggatctatattgattgctgcaataacctcttgtacaaatacatctaatccaaatgttttaattggagcaggcctgttggcaaaaaaagccgtggaattaggattaaaaactaaaccatgggtcaaaacttctttagcacctgggtcacaagtagtaactgattatttagaaaaagctggtctaaataaatatttagatgaattgggatttaatttagttggttacggttgcacaacttgtattggaaattcaggacctttgcctgataatattgtggaagcaattgaaaaaaaaaatatatatgccgtatcagtcttatctggcaatagaaactttgaaggtagaatatctccatacataaaggcaaactatttggcatctccacctcttgttgtagcatatgctttagcaggacatatggaagcaaatttatataaagattctttaggaaaagacaaaaatggtaaagatatatttttaaaagatatttggccttcaaataaagaaatagaaagtattctgcaaaaagcattaaatgcagagatgtttattaaaagatattcaaatgtttctgatggacctattcaatggcagaaaattaaaactgaaaaaagcagcatttataactgggatcaagaatcaacatatgtaaaaaaaccaccattttttgataacctaccagataaaccggaaa

SEQ ID NO: 282634 - DNA, 583 bp, Unknown
  Bacterial polypeptide expressing nucleotide sequence isolated from the Sargasso Sea
tttaccgaaagattataattcttatggtgccagaagaggaaatcatgaagtaatgatgagaggaacatttgctaatattagaataagaaatgagatggcacctggcacagaaggtggatttacaacgctttacccagaaaaaaaagtgatgccaatttatgatgcagttgttgaatataaaaaaagaggaacagatttagttgttatcggtggaaaagaatatggaacaggctcgtcaagagattgggcagcgaaaggaaccaaacttttaggagtaaagactgtaattgctgaaagttttgagagaattcatagatctaacttaattgggatgggtattttgccattacaatttattgataatattgataggaaaaatttaaaattaattggttcagaattgattagtataatcaatcttgagaatggaattaatccttctgataaagttaaagtagaaattaagtatgcttcaggtgaaattaaaacgatccaagcactttgtagaatagatactaaaaatgagctagagtattataaaaatggaggaatattacaatacgttctccgaaatatgatttaa

SEQ ID NO: 282635 - DNA, 934 bp, Unknown
  Bacterial polypeptide expressing nucleotide sequence isolated from the Sargasso Sea
aaaaattttaatttaaattttaagaatattacaaaaagggaatctttttctacctcaaaagttgaaggaacagattatgaaattaaagatggttctattttaatcgctgcaattacttcatgcacaaatacatcaaatccaaatgtattaattggtgctggtttgctagcaaagaaagcttgtgatcttggtttaaccacaaaaccttgggtaaaaacttctcttgcaccagggtctcaagtagttacagattatttagaaaaggccgggttaaatgtttatttagataggctagggtttaatcttgttggttacggatgtacaacttgtattggaaactctggtccattaccagaaaatatatcctcagctgtacaaaaaaataatatttacgctgtctcagttttatctggtaatagaaattttgaaggaagaatttcaccattgattaaagccaattatttggcatcaccacctcttgtagtcgcctatgcaatagctggtcatatgaaatttgatttttataaagactcactcggcaaatctaaagatggaaaagattttttcttaaaggatatttggccatctaataaggaaattgaagatacgttaagcaattctctaaacgcggaaatgtttataaaaagatattcaaatgtatccaagggaccatcgcaatggcaagatattaaaacaaaagaaagcagcatttatgaatgggatgacaattcaacttatgtaaaaaaacctccattctttgataatcttaaagatagtccagatggatttaaagatattattaatgcaagacctttattaattttaggggatatggttacgacagatcatatttcaccagctggctcaattcaaaaagagagtcctacaggtgattattttatgaaaaatcaagttttgcaaaaagattttaatc

SEQ ID NO: 282636 - DNA, 955 bp, Unknown
  Bacterial polypeptide expressing nucleotide sequence isolated from the Sargasso Sea
agtaatgatgtcacttttacagatcaactctctttagatgttagctctgttgtgactagcatttcaggtcctaagagaccacaagataaagtattattaacaaacgcttcatcatcttttgctaaagtttttaaagaaaatacaaaaagaaacaacccgatagaaactaaagttgaaggtaaagattttaaaataaaagatggagatatagtaattgctgctattacttcctgtacgaacacttcaaacccaagtgttttatttggagctgggcttttggcaaaaaaagcctttgagaaaggattaaaagtgaaaccatgggtaaaaacttctttagcacccggatcccaagtagttactgattatttagaaaaagctggattgaataaatacttagacgagctaggttttaatttagttgggtatggctgtacaacttgcattggaaattcaggaccacttaataaagatatatctgatgcaattaataataaggaaatttatgcggtatctgttttgtcaggaaatagaaactttgaaggaagaattaatcctgatgtgaaagcgaattacttagcctcgcctccgctagttgtagcatatgccttagcagggaacatgaattttgatttgtataagtcacctttgggaaaagataaagatggaaaaaatatttatcttaaagatatttggccaagtaataaagaaattgaagatctaatgatgacttctttaagttcagatatgttcaagaaaagatactcaaatgtatcagatggaccaaaagaatggaaagaaataaatactattgatagtgatatttataattgggaagagaattctacttatgtaaaaagaccacccttttttgataatttgtctgataaacccgaaggttttaaacaaattaaagatgcaagaattttgttattgcttgctgatacagttaccactg

SEQ ID NO: 282637 - DNA, 832 bp, Unknown
  Bacterial polypeptide expressing nucleotide sequence isolated from the Sargasso Sea
attaaagaattggttgaaaaataaaaaatcaaatacagaaatagcatatagacctgcaagagtattattacaagattatacgggaattccagcagttgccgatttagcagcaatgagagaagctgtaaaagaaaaaaataaagacccaaataccataaatcctctttcttcagtagatttggttattgatcactctgttcaagttgatcaatcagcaaaatcaaactcctttgaaaaaaatgttgatatagaatttaaaagaaatggcgagagatactcttttttaaaatggggtcagcaagcatttaataattttagaattgtgcctccaggtacaggcatatgtcatcaagtaaatttagagtatttatctaaagtagtttggcaagaaaaatataaaaatgaaaattatttatttccagatactttagtaggaaccgacagtcatacaactatggtaaatggattatcggttttaggttggggagtagggggaatagaagctgaagccggaatgttaggccaaccaatttccatgttgataccagaggtaatcggatttgagttgaaaaataaaatgccagagggaacaacggctactgacttagtacttacagtggtaaaaatgctaagagataaaggagtggttggtaaatttgttgagttttacggtgatggtttaaacaatttaaccttggcagatcgtgcaacaattgcgaacatggcacctgagtatggagctacttgtggtttttttcctgtagatgacgaaaccttaaaatatttaaaattttcaggtagagatgatcacacgattaaaattgtagaaaaa

SEQ ID NO: 282638 - DNA, 828 bp, Unknown
  Bacterial polypeptide expressing nucleotide sequence isolated from the Sargasso Sea
agcttcccctccacttgtagttgcttatgctctggcaggtaatatgaattttgatatgtacaaatcttcccttggtaaagataaaaatggtaaagatgttttcttaaaagatatttggccaagtaataaagaaattgaagatttgatgttaagttctttaaacgcagatatgtttaaaaaaagatattcaaatgtttcaaaaggacctaaagaatggcaagctattaacacaacagatagtgatatttataactgggaagctaattctacatatgtaaagagacctccattttttgatgatttgcctgatcaaccagaaggttttaaaccaatcaatgatgctagaattcttttattactagctgataccgtcacaacggatcatatttcaccagcaggaagtattaaaaaagatagtccaaccggtaattattttatgaagcatcaaatacaacaaaaagattttaactcttatggtgcgagaagaggaaaccatgaagtaatgatgagaggaacgtttggaaatattaaaataagaaatgaaatggcacctggcactgaaggtggatttacaacgttacagccagatggaaaagtaatgagtgtttatgaagctgcgatggaatacaaaaaaagaaaaaatgatttagttgtaattgctggaaaagaatatggaacaggttcatcaagggattgggcagctaaaggaactaaacttttaggaattaaggctgttttagcagagagttttgagagaattcatagatcaaatttaattggaatgggagttttacctcttcaattcaaagaaggctttgaccgtaagaa

SEQ ID NO: 282639 - DNA, 910 bp, Unknown
  Bacterial polypeptide expressing nucleotide sequence isolated from the Sargasso Sea
cccagcctggcaggcccgaagcgtccacaagataggatcaatttgagcgacgccaaggtagcttttaagcaattgcttgatgatgccccacaatccagagcaacggacatgtccgtgacagatggagacatcgtaatagctgcaatcaccagctgcaccaatacatctaatccgagtgtaatggtcgccgcagggcttttggctcgcaaggcccgacagcttgggcttactatcaagccatcagtcaagacgtcgctcgcgcccggctccaaagtcgtaactgactatctgataaactcaggccttgataaagatctggactccctgggatttaacctcgtcggctacggttgcacaacctgcataggaaatagcggcccattaaatccgcaagttgagtcccaaatccgcgccaacaatgcaattgtagcttctgtcttgtcaggtaatagaaactttgaaggccgtgtccatagtctgacacaagcaaattatttggcttcacccccattagttgtcgcgtacgccctagccggttccatgctcgttgacctatcgtctgagcccctgggaataggatcaaatggccaccccgtatacctaaaggatatatggccctcttccgaagaaattcagaataccattgagaattctttatcacctgagatgtttcaaaatcaatatgcccgcgcgacggagggagatagcagttggcgcgaaatcaaaacaccagagggccaaacatacacatggccagagtcaacttacgtccaaaaaccgccctattttgccaatatccagaaaacccccgagaaagtggggaatatcttgggtgcacgaattcttgccctactgggtgatagtgttacgaccgatcacatctcaccagccggagccataccctcagatg

SEQ ID NO: 282640 - DNA, 811 bp, Unknown
  Bacterial polypeptide expressing nucleotide sequence isolated from the Sargasso Sea
aactcaaatggtaaaaagtatgtttattattcgattcagaaagttgaagacgaaggtgtaagatacctttcaaagctgcctgcttgcttaaaagttgttttggagaacctgcttcgcttcgaagatggaaaattggtaactcaccttgatgtttgcgcattttcagattgggtatcaaagaaagggcacaatccaaaagaaatttcctttcgaccagctcgtgttctaatgcaagattttactggtgtgccagccgttgttgatctggctgccatgcgggacgccatgctacatcttggtggagatccacaaaaaattaaccccttaactccagttgatttagttattgaccattccgtgatgattgatgactttggcaatccaagagcgttttcaaagaatgttgatcgtgaatacgaacggaatatagagcgatataaatttttaaagtggggacaaaatgcttttaaaaattttagggttgtaccccctggaacaggaatatgccatcaggttaatcttgaatatctcggtcagacagcttggcacgatctggaccagtatggagagaatgtggtctacccggacactttagttggtaccgatagccatacaaccatggttaacggtctcgccattcttggctggggcgtaggtggaatagaagctgaagcagcgatgttgggacaaccaatttccatgttaattccagatgtcataggttttaagttgacgaaccaacttcgtgaaggcgtaacggcgacggatttggttttactcatagtaaaaatgttgcgggaaaaaggagtcg

SEQ ID NO: 282641 - DNA, 948 bp, Unknown
  Bacterial polypeptide expressing nucleotide sequence isolated from the Sargasso Sea
tgttccagaggtaataggttttgaaattaaaggtaaaataaaagagggaataacagcgacagatttagtcctcacgatcacagaacagctaagaaaaaaaggggttgtgggcaagtttgtggagttctttggtgaaggacttaaagaattatcgatacctgaccgggctacaatttcaaatatggctcctgaatatggagcaacctgtggtttttttccaattgatgaagaaacaattaaatttttaaaagtgagtggcagagatgaaaagggtattcaacttgtaaaaaaatacgcgaaactacaaggactctgggaagattataaaaagaatgacagagtttatactgataaaatgcaattagacttatcacaaatactaccaagtcttgctggacctaaaagaccccaagacaaaataattctttctaaagtttcagatgaatttttgaaatcacttaaatctgaattctcacaaaaaaatatttcaaatctatctaaagttaagggtgaaaattttgaaatggatcacggtcatgtggccatagctgcaataacaagctgcactaatacatctaaccctagcgtaatggtcggagcaggtttgctagcaaaaaaagcagctaagttaggtctaaagactaaaccatgggtaaaaacttcacttgctcctggttctaaaattgtaacagattatttaacaaaatcaggactacaaaaatatttagatgatttaggatttcacttagttgggtttgggtgcacaacatgtattgggaattctggacctcttgataaaaatatttctgataccattggaaagaataaccttattgtaagtggggtattatcaggtaatagaaactttgaaggaagaatcaatccatttgtaaaagcaaattatctagcttctccacctttagtttgtgcatacgcgcttgctggctc

SEQ ID NO: 282642 - DNA, 693 bp, Unknown
  Bacterial polypeptide expressing nucleotide sequence isolated from the Sargasso Sea
tacagtttcaggtaagaaatataatttttttaatcttgtaaaagctgaaaagaatggtttgaaaaatataaaaaaacttccaaaatcaataaaagtgcttctcgaaaacttattaagattcgaggatgacctaactgtaaataaaaaacaaatcaaagctatcgcaaactggttaaataccaaaagctcaaaacaagaaatagcctatagaccagcgagaattttattacaagattacactggaataccagctgtcgcagacttagctgcaatgcgggatgctgtaaaatcaaaaaataaagatccaaacaaaataaaccctctatcaactgtagacctagttattgatcattcagtgatggtcgataattatgcaaaaaaagactctttctcaaaaaatgtacaaagggaatttgatagaaacggtgaaagatattctttcttaaaatgggggcaaagtgcttttaataatttcagagttgtgccaccaggaacaggtatttgccatcaagttaatttggaatatttatctaaagttgtttggtcttcagaggccaacggccagttatttgcttatcctgatactttagttggaacagacagccatactacgatggtaaatggtttatcagttcttggctggggagttggaggtatcgaagcagaagcagctatgttaggtcaaccaatttc

SEQ ID NO: 282643 - DNA, 799 bp, Unknown
  Bacterial polypeptide expressing nucleotide sequence isolated from the Sargasso Sea
ttatttagataaagcaaatttatccatacatctaaataaaattggttttaatttggttggctatggctgcactacctgcatcggtaattccggaccacttgaggagtggatttctaaagaaataaaaaataacaacttaacagtatgttcagttttgtcaggaaatagaaactttgaggggagagttcatcaagaagtaaaagcgaattttttagcttcacctcctttggttgtagcctttgccattgcaggcaatatgaatattgatatttttaaagaacctattggaataagtaaattaggaaaagaggtttttctcaaggacttatggccatctacatctgaaataaataaaatagtagataattcaatatctactgaaatgtttaaaaaaagatataaagagatttataatggtgatcaaaattggcaatcaattaaaaacatttcagataagacttatgcttggaacgcatcaagcacttacataaaacacccacctttttttgctgatgaaaaacatcaggttaaagatataattaatgcaagaattcttgctatgcttggcgacagtgttacaaccgatcatatatcaccagcaggtgcaataaaatcagacagtcctgcaggtaaatatttaaatgaaaggcaaataagcagaaaagactttaattcttatggttctagaagaggcaatcatgaaataatgatgagaggcacttttgcaaacattcgtattaagaatgaaattgttcctggaatagagggaggagttactaagttttttgatcaagatgaa

SEQ ID NO: 282644 - DNA, 676 bp, Unknown
  Bacterial polypeptide expressing nucleotide sequence isolated from the Sargasso Sea
ggataaagttttacttacagaggcttcaactgcttttgcaaaagtttataaagaaaatgcaaatagagacaagtctatcgaagctaaggttgaaggggccgactttaatataaaagatggtgatattgtaatagctgcgataacatcatgcacaaatacctcaaatccgagcgtaatgattggcgcaggtcttttagcgaagaaagctcatgaaaaaggacttaaagttaaaccttgggtaaaaacttcattagcaccaggatcacaagttgtaactgactatttaaaaaaagcaggtttaaataaatatttagatgaacttggttttaatttagttggttatggctgtactacatgtattggcaactctggacctttaaatcaaaatatatcagatgcaataaacaaaaatgatctttacgctgtttcagttttatctggaaatagaaatttcgaaggaagaattaatccagatgtaaaagcaaattacttagcttcacccccacttgttgtagcttatgctctggcaggtaacatgaattttgatatgtataaatctgcgcttggaaaagacaaaaatggcaaagatgtttttttaaaagacatttggccaagcaataaagagattgaagatttaatgttaagttctttaaatgcagatatgttaagcaaagat

SEQ ID NO: 282645 - DNA, 748 bp, Unknown
  Bacterial polypeptide expressing nucleotide sequence isolated from the Sargasso Sea
atgtcgacagttaacagtctgaatacccagtccacgctagaggtggacggcaaaccctacaaatatcattcgcttctgaaagcggccgaacaactgaaaggcattgataagctgcctaagtccttaaaggtgctgctggaaaaccttctgcgcaacgaagacggtgacaccgtcactagagacgatattaaagccatcgccgactggttggataagcgttcgtccgaccgcgagatacaataccgccctgcccgcgtactgatgcaggatttcaccggtgtacctgcagttgtggacctcgccgccatgcgtgatgccatcgcccgcgcaggcggtgaccccgagagcatcaatccgctctcacccgttgatcttgtgattgaccactcagtgatggtggatcgctttgccgatgatcaggcgtttcacgataacgtagaaatcgaaatgcaacgcaatggcgaacgctacgctttcctgcgctggggccagaccgcctttgataatttccgcgttgtgccgcccggtacgggtatctgtcaccaggtgaaccttgaatatctcgctcagagtgtttgggccgccaatgtgaacggtgaagactgggcttacccggatacgctcgtaggcaccgactcgcacaccaccatgattaacggtatcggtgtactgggctggggtgttggcggcatcgaagcagaggcggccatgctgggccaacccgtttccatgctaataccggaagtca

SEQ ID NO: 282646 - DNA, 904 bp, Unknown
  Bacterial polypeptide expressing nucleotide sequence isolated from the Sargasso Sea
gaaaaaaataaagatccaaaaaaaataaatccactgtcctcagttgatttagttatagaccattcagttcaagtagatcaatcggctaaatcagattcttttgaaaaaaatgtagatattgaatttgaaagaaatggtgaaagatattcttttttaaaatggggacagcaagcattcaataattttagaattgttcctcccgggacaggtatttgtcatcaagtaaatctagaatatctatcaaaagttgtttggaaagaatcttacaaaaatgaagactacttatttccagatactctagttggaacagatagtcatacaacaatggttaatggtttgtcagttctcggatggggtgtcggaggtattgaagcagaagcgggaatgcttggtcaaccaatttcaatgttaatacctgaagtgattgggtttgaggtgaaaaataaattaccagagggaaccacagcaactgacctggttttgactgttgttaagatgttaagagataaaggagtagttggaaaatttgttgagttttttggtgatggattaaaaaatttatcactcgcagaccgtgcaaccatagctaatatggcaccagaatacggagccacttgtgggttttttccagttgataacgagaccttgaaatatttaaaattttcaggaagagatgaaaatgaagttaaaatagttgaagaatatgcaaaggcacaaggtctctgggcgagcgaagatatagaatttactgattcaatatcacttgatatgtcaaaagtggttccaactatttctggaccaaaaagacctcaagataaagttttattaaatgaagcttcagaaagctttaaaaaagtttttaaagacgcaacaggtcgaaatgaaaaaagcagtcaaaagtgaa

SEQ ID NO: 282647 - DNA, 898 bp, Unknown
  Bacterial polypeptide expressing nucleotide sequence isolated from the Sargasso Sea
aatttttttgaaagagatcaacaaactgttgatatcgtagaaaattacgccaaggaacaaggtttatgggcgagtaacgaaatagaatttactgacattatatctttagatatgtctacagttgtaccaactatttcaggacctaaaagacctcaagacaaagttcttttaacagatgcacctggttcgtttcaaaaagtattgctggaagctacaaataaaaatgaaaagtcaatttcgaaagtatcaaatacagattatgaaattaaagatggctcaatattaattgcagcaataacttcttgcacaaatacttctaatccaaatgttttaattggggctggactattagcaaaaaaagctattgaaaaaggtttgcaggttaaaccttgggttaaaacttcattagcacctggatcccaagtagttacagattatttagcaaaagccggattaaacacttatttagatcagcttggctttaatttagttgggtatggctgcacaacttgcattgggaattcaggaccacttccagaaaatatcgtagaagcaatccaaaaagaaaatatttatgcagtttcagttttatcaggaaatagaaatttcgagggaagaatttctccacatataaaagctaactatctggcttcacctccactagttgttgcatatgcaatagccggacatatggaagttgatttgtacaaagatccattaggaaaagataaagaaggaacagatgtgtttctaaaagatatttggccttcaaataaagagatagaagacactttaaaagattgtcttaatgctgagatgtttatacaaagatactcaaatgtttctgagggcccaactcaatggcaaaaaattaaaactgataaaagccagtatctat

SEQ ID NO: 282648 - DNA, 913 bp, Unknown
  Bacterial polypeptide expressing nucleotide sequence isolated from the Sargasso Sea
tttaaagatttattggccatcaacaaaagatattaacaagattgtagataattcattatctactgatatgtttttaaaaagatatgaagagatttatagtggtgatcaaaactggaaattaattagtagtgtttcagatactacttataaatggaatactttcagcacttatattaagcatccacctttctttgaaaatgaagaaaatgaagttaaagatattgttaacgctagaattcttgctattttgggcgacagtgtaactacggaccatatttctcctgctggagcaataaaaccagatagtcctgctggaaaatatttaaatgaaagacagataaatagaaaagatttcaattcatatggatctagaagaggcaatcacgaaataatgatgagaggaacatttgcaaacatcagaataaaaaatgaaattattccaggcacagaaggaggtataacaaagttttttgatgataaggatttagaaatgtccatatatgatgcagctatcgaatactcaaaaaagcaaatacctttagttatttttgccggaaaagaatatgggactggatcatcgagagattgggcagcgaaaggcactaaattattaggtatcaaagctgtaattgccgaaagttttgagagaatacaccgttcaaatttaataggcatgggcgtactaccattgcaatttatttcagatcaaaatagaaaatcacttaaccttattggagatgaaatgattacgataaaaggattaaactctattaaaccaaacgaagagttgatttgtgaaataaaatctgatgatataaggtctgtgaaacttctttgtagaatagatacgattaaagagttggattattataatcagggtggtattttaccatacgtgttaaattcattataa

SEQ ID NO: 282649 - DNA, 964 bp, Unknown
  Bacterial polypeptide expressing nucleotide sequence isolated from the Sargasso Sea
agatggagatatagtaatagcagccattacttcttgcactaacacttcaaatccaagcgtaatgattggcgcaggtctactagcaaaaaaagctatagaaaagggtttaaagattaagccgtgggtaaaaacatctttagctccaggatctaaagtagttaccgactatttagaaaaggcaggtttaaataaatatttagatgaacttggatttaatttagttggttatggttgtacgacatgtattggaaattctggcccacttaacaagggaatttctgatgcaatacataaagagaatttatatgcagtttctgttttatctggaaatagaaattttgaaggaagaataagtccagacgtaaaagctaattatcttgcttctccacctctggtagttgcctttgctttagctggcaatatgaattttgatatatataaaagctcctttggtattgacaaagaaggtaaagaagtatttttaaaagatatttggccaagcaataaggaaattgaaaacataatgttaaaatcaatcaatgctaagatgtttatcgatcgctattcaaatatttcagaagggcctaaagaatggagatctattaaaacagtggatagcagtatttataattgggaagataattccacatacgtgaaaagacctccattctttgataatttgccagatcagccagagggatttaagccaattaaagacgcaagattactacttttgctagctgacacggttactactgaccatatctctcccgctggtaatataaaaaaagacagccctacaggtgattattttatgaaaaaccaaatacaacaaaaagactttaattcatatggagcaagaagaggcaaccatgaagtaatgatgagaggtacgttcggaaatattaaaataagaaatgaaatggcacctggaactgaaggaggcttcactactctacagcct

SEQ ID NO: 282650 - DNA, 857 bp, Unknown
  Bacterial polypeptide expressing nucleotide sequence isolated from the Sargasso Sea
gggagtaggtggtattgaggctgaagccgcaatgttgggtcaaccaatatccatgctaatacctgaagtgattggtgtagagctcaaaggaaagctaaaagaaggtactactgcaactgatttagttctcactattgttgaaattctgagaaaaaaaggtgtagtcggaaaatttgtagagttttatggggagggattaaaaaatcttacattagcagatagagcaacaatagctaatatggctccagaatatggagcgacttgtggtttttttcctgtagacaatgaaactttaaaatatttaagattatcaggtagagatgatcaaacaatttcccttgttgagaattattgtaaagagcaaggtttgtgggcaaataatgatatcacattcactgatatcgttaaattagatgtaagcacagtagtcacaagcatatcaggacctaaaagacctcaagacaaagttctattaacaaactctgcaactaatttcgcaaaggtttataaggaaaatacaaaacgagataagcaagttacagctaaagttaaaggagttgattttaaaattacagatggtgatatcgtaattgccgcaataacatcatgcactaacacatctaatccaagtgttctaataggtgctgggctattagcaaagaaagcttatgagaaaggattaaaagtaaaaccctgggtcaaaacttccttagcgccaggctcacaagttgtaactgattatttagagaaagctggtttaaataaatatttagatgaattaggatttaacctagttggatatgggtgcaccacttgcatagggaactctgggcctttaaatgaagatatttctgata

SEQ ID NO: 282651 - DNA, 783 bp, Unknown
  Bacterial polypeptide expressing nucleotide sequence isolated from the Sargasso Sea
tttagcaaaaaaagcagttgcaaaaggattaaaaaagaaaccatgggtaaaaacctcactaggacccggttctcgtgtagtctctgattacctaattgcttcactgctgggagaatctcttgatgaactcggttttcacatagtaggctttgggtgcacaacttgtattggtaattcggggccacttccagagaaagttgttgatgcgattaacgaaggagatctgatagttgcatctgtgttgtcaggcaatagaaactttgaaggaaggattaatcagcatgtaaaggcaaattatctggccagtcccccgcttgtagtagcctatgcaatagcaggcaatgttaatcatgacttcaaaaatgatcctctcgggattggagaaaataaccaaccagtttttcttaaagatatttggccaagcaatgaagagattaagaaagcagaaaaatttatttccagagaaatgtacctcaaagaatatcaaaaagcagaccaaagctccccaatgtggaatgctatagaaactcctgccggagaagtttttcagtggaataaattttctacatatatacaaaatcccccttttttcaaaaatatggtacttgaaacagatccagtaaaggacatcaccggtgcaagggttttagcaaaacttggtgactcagtaacaacagaccatatttcaccagcgggagcattttctccagaaagtcctgcaggaaaatatttacttgaaagagggactcaaataaatgattttaattcttatggttctcgccg

SEQ ID NO: 282652 - DNA, 726 bp, Unknown
  Bacterial polypeptide expressing nucleotide sequence isolated from the Sargasso Sea
atgaaccagaagatattaccgatattaaagaagctaggcctttattaattttaggagatatggttaccactgatcatatttcgccagctggaacgatacaaaaagaaagcccaactggagaatattttatgaaacatcaaatattgacaaaggattataattcatatggtgcaagaagaggaaatcacgaagtaatgatgagaggaacatttgcaaacattagaataagaaatgaaattgcacctgaaacagaaggtggtttcacaaaattatatccagaagaaaagattatgccagtatatgatgcagttgttgaatataaaaaaagaggaacaaatttggttgttattggtggaaaggaatatggaactggatcatcaagggattgggcagcaaaaggcacaaagttattgggaataaaagcagtattagctgaaagttttgaaagaatacatagatcaaatttaattggaatgggagttatgcctttacaatttattgatggaatgaatagaaaaaatttagatttaaaaggccctgaattgattagtattctcgatataaaaaaaggattaaacccaagtgataatgtagaagttgaaattaaatatcaatcaggagaatcaaaaaaaatcaaaatgttatgtcgaatagacactaaaaatgaattagaatactataaaaatggcggcatcctacaatatgtactaaggaaaatgatataat

SEQ ID NO: 282653 - DNA, 778 bp, Unknown
  Bacterial polypeptide expressing nucleotide sequence isolated from the Sargasso Sea
cctgtgggttaaaacttcattagcacctggatcacaagttgttactgactatttagataaagctggtttaagcaaatatttagatgaattaggttttaatttagtaggttatggttgcactacttgtattggtaactctggacctttgccagataatattactgatgctgttaaagaaaataatttatacgcagtctcagttttgtctggaaatagaaattttgaaggaaggatttcacctttagtaaaggctaactatttagcttcacctcctcttgtagtagcttacgcaattgcaggatctatgagattggatttgtataaagatccgctaggcaaagatagcaaaggacaagatatttatctaaaagatatttggccttctaacaaagagattgaagatactcttaaacaatctttaaacccagaaatgtttgttaacagatattcaaatgtttcagagggaccagaacaatggcaaaaaattaaagtggaaaaaggaagtatttataattgggaagaaaattctacctatgtaaaaaaaccaccattctttgaaaatttaccagatgaaccagaaggttttaaggaaataaaagatgctagaccattattaattttaggagatatggtaacaacggaccatatatctcctgctggaagtattcaaaaagaaagcccaacaggaaattattttatgaagcatcaaatcttgcctaaggattataattcctatggcgcaagaagaggaaatcatgaagtaatgatgagaggaaca

SEQ ID NO: 282654 - DNA, 912 bp, Unknown
  Bacterial polypeptide expressing nucleotide sequence isolated from the Sargasso Sea
tgagggatttaaaaaatttacttttagctgatagagcgactattgctaatatggctcctgaatatggagcaacatgtggtttctttccaatagatcaagagactttaaagtatttagaattttctggacgagataaagaaacagtggcaatcgtcgaaaagtatgcaaaagatcaaggtttatggtcaagtgacgaaatcgagttcactgataaaatttctttagatatgtccactgttgttccgactatttcaggtcccaaaagacctcaggataaagttcttttaaccgacgcatcaagtaatttcaaaaaagtatttaaagaatctacaggtaaaaatgattataaaatctccaaagtaaaagacacacattatgaaattaaggatggttcaatattaattgcagcgatcacatcatgtacaaacacttcaaatcccaatgttcttattggagccggccttttggcaaaaaaagctgttgagttaggattaaatgttaaaccatgggttaaaacgtctttagctcctggatctcaagtagtaactgattatttagagaaagcaggtctaaatatttacttagatcaattaggatttaatttagttggttatggttgtacaacctgtatcggtaattcaggtcctttagcagaaaatatagttgaagctattcaaaaagataatttatatggagtctctgttttgtcaggtaacagaaactttgaaggaagaatttcacctcatatcaaagcaaattacttagcctcacccccacttgttgtagcatatgctcttgcaggtcacatggaatttgatttattcaaaaactcatttggaaaagataaaaatggtaaagacgtatttttaaaagatatctggccttcaaataaagaaatagaggatacttgaa

SEQ ID NO: 282655 - DNA, 831 bp, Unknown
  Bacterial polypeptide expressing nucleotide sequence isolated from the Sargasso Sea
tggtaaatggattatctgttttaggatggggtgtcggtggaatagaagctgaagctgctatgttaggtcaaccaatatcgatgttaattccagaagttattggcgtagagattaaaggaaaattagttgaaggtttaacagctaccgacttagttttagctatagttgagatgctaagaaaaaaaggagttgttggaaagtttgtagaattttatggagagggtttaaaaaatcttacactagctgatagagcaacgattgctaatatggctcctgagtatggtgcaacatgtggtttttttcctgtagatgaagaaacattaaaatatttgagcctttccggaagagataaagaaacgatagagcttgtagaaaaatattcaaaagaccaaggcctttgggccaacgaagatatggaatttactgacactttatccttggatataagcaccgttatgccaagcatctctggacctaaaagacctcaagataaagttttattaaccgattcctcaaaagcatttttaaaaacttataaagaaaatactaaaagagataaacctattgcaacaaaagtttcaggagtagattttgaagtcacagatggagatatagtgatagcagctattacttcttgcactaacacatcaaacccgagtgtaatgattggggcaggattactcgcaaaaaaagctatagaaagaggtttaaaaattaaaccttgggtaaaaacgtctctagcacctggctcaaaagttgtaactgactatttagaaaaagctggattaaataaatatttagataaactaggttttaatttggttggatagg

SEQ ID NO: 282656 - DNA, 716 bp, Unknown
  Bacterial polypeptide expressing nucleotide sequence isolated from the Sargasso Sea
aaaatcagcattatataaatgggataaaaactccacatatataaaagaggtttcatttttcaaagaaaaaacttctcctaagaaaaaaagtgtttcagcaagaatattacttaatcttggagattcggttactacagatcacatatcccctgcaggaaagttttcaaaaaatgaacctgctggaaaatatttattagaaaagggtctaaatccatctcaatttaattcttatggatctagaagagggaatgaagaagtaatggttagaggcacatttgctaatattagaataaaaaataaactaattgattatgaaggaggtttcactatatgctatccgatagaaaaagaaatgagtatatatgatgcttcaaaatattacattagtaaaaaaatcgatactgttgtaattggaggaaaagagtatggatcaggatcatccagagattgggcagcaaaaggaacaaaattacttggtataaaaagtgtcctcgcaaaaagttttgaaagaattcatagaagtaatttaatcggaatgggtgtaataccaattgaagctgacataagcaaattgaatataaaaggaaatgaaataattaaatttcaaattgataatttagatgtcaaaaatattattgatatttactttaacgacacaaaaattaaaggtattattagaattgattctgaaattgaaaaagaatattatgaagctg

SEQ ID NO: 282657 - DNA, 856 bp, Unknown
  Bacterial polypeptide expressing nucleotide sequence isolated from the Sargasso Sea
attaaagcaaactatctgctttcaccaccactggttgttgcatatgcattagctggtcatatggaaatagatttgtacaaagattctttaggtaaagacaaaaatggtaaagatatatttatgaaagatatttggcctacaaatatggagatagaaaaaactttaagcaaagcattaaacgccgagatgtttgttaaaagatattctaatgttgcagagggacctattcaatggcaaaaaattaaaacagagaaaagtagtatttataattgggatgagggatcaacttatgttaagaaaccacctttttttgacaacttaccagatgaacctgaaggatttaaagaaataaaagatgcaagaccattattattattaggagacatggtcacaacagatcatatttctccagctggctcaattcaaaaagaaagtccaacaggggaatactttatgaaaaatcagatactaccaaaagactataattcctatgggtctcgaagagggaatcacgaggttatgatgagaggtacttttgcaaacatacggattagaaacgagattgcacctggcacagagggaggatttactaaattatttccagaaggtaaagttatgcctatttatgatgctgtcgtagaatataaaaagcgaggtacagatttggtagttataggaggcaaagaatatggaacaggttcttcaagagattgggctgcgaagggaacaaaattattaggcatcaaagccgttattgcagaaagctttgaaagaatacataggtcgaatttaataggaatgggaattttacctttacaatttattgaaaacataaataggaaaaacttaaatttaa

SEQ ID NO: 282658 - DNA, 826 bp, Unknown
  Bacterial polypeptide expressing nucleotide sequence isolated from the Sargasso Sea
atggaatttaaaagcaaaaattcatttcaatcattagatacgcttgcagtttcaggcaagaaatataatttttttaatcttgtaaaagctgaaaagaatggtttgaaaaatataaaaaaacttccaaaatcaatcaaagtgcttctggaaaacttattaagattcgaggatgacctaactgtaaataaaaaacaaattaaagctattgcagactggttaaataccaaaagctcaaaacaagaaatagcctatcggccagcaagaattttattacaagattacactggaataccagctgttgcagacctagctgcaatgcgggatgctgtaaaatcaaaaaataaagatccaaacaaaataaaccctctttctactgtagacctagttattgatcattcagtgatggtcgataattatgcaaaaaaagattctttctcaaaaaatgttcaaagggaatttgacagaaatggtgaaagatattctttcttaaaatgggggcaaagtgcgtttaataatttcagagttgtgccacctggaacaggtatttgccatcaagttaatttggaatatttatctaaagttgtttggtcttcagaggtcaacggccagttatttgcttatcctgatactttagttggaacagatagccatactacgatggtaaacggtttatcagttctcggctggggagtcggtggtatcgaagctgaggcagctatgttgggtcaaccaatttcaatgttaatacctgaagtaattggttttgaaattaatggaaaacttactgaaggaacaacagcaagtgatttagttttaacgattgtac

SEQ ID NO: 282659 - DNA, 826 bp, Unknown
  Bacterial polypeptide expressing nucleotide sequence isolated from the Sargasso Sea
ataaatcttgttaaagaaccgcttggaaaaaataagaaagggaaaaatatttatttaaaagatatatggcctagttctaacgaaattaaaaaggtcattgattcaactatcaactctaaactttacagctctagatataaaaatgtttttaaaggagataagaagtggcaatcaattagatctccaaaaggtttaacttataagtggaataataaatctacttatgttcaacatcctcctttttttcaaagccttaatccaaatattgataatataaaaaatattaaaactgctcatatattgggaatatttggagattcggtaacaactgaccatattagtcctgctggatctatcaagggtgatggtcctgcaggcttttatttaaaaaagaataatgtaaaagaaactgattttaattcctttggttcacgtagaggcaaccatgaagtcatgataagaggaaccttttccaatatcagaattaaaaatgaaatggtcaatggaattgaaggaggatacacgatctgttatccatcgaaaaagcaaaaatctatttatgatgcagcaatgatttatcgaaaatcagcaacaccactagtaatttttgcaggtaaggattatgggatgggatcttctcgagactgggcagcaaaaggaacaagcttactaggtgtaaaagcagtaatagctgaaagttttgaacgtattcataggtctaacctaattggtatgggagtgctaccttgtcagtttttaaaaagtgaaaatagaaaaagtctaaaactcttaggttcagaaaaaatatcaattacaggtttagaaa

SEQ ID NO: 282660 - DNA, 903 bp, Unknown
  Bacterial polypeptide expressing nucleotide sequence isolated from the Sargasso Sea
ttgtgtttacagataccctttcattagatgttagcagtgtagtaacaagcatttctggacctaaacgaccccaggataaagttttacttaccgaagcttcaactgcctttgcaaaagtttatagagaaaatgcaaaaagagataaagctatcgaagttaaagttgaaagtaccgacttcaatataaaagatggtgacattgttattgctgcgataacatcttgcacaaatacttcaaatccaagtgtaatgctcggtgcaggccttttagcgaagaaagcacatgaaaaaggattaaaagttaaaccttgggtaaaaacttcacttgcaccaggatcacaagttgtaactgactatttagaaaaagcaggtttaaataaatatttagatgaacttggttttaatctagttggttatggctgcacaacttgtattggtaactctggacctttaaatcaaaatatatcagatgcaataaataaaaatgatctttatgctgtctcagttttatccggaaataggaacttcgaaggaagaatcaatccagatgtaaaagctaattatttagcttcacctccacttgtagttgcttatgctctcgcaggtaatatgaattttgatatgtacaagtcaccactcggtaaagataaaaatggcaaagatgttttcttaaaagatatttggccaagtaataaagaaattgaagatttgatgttaagttctttaaacgcagaaatgtttaaacaaagatattcaaatgtctcaaaaggacctaaagaatggcaagctatcaacacaacagatagtgatatttataactgggaagctaattctacatatgtaaaaagaccaccattttttgatgatttacctgatcaaccagagggctttaaaccaaattaat

SEQ ID NO: 282661 - DNA, 853 bp, Unknown
  Bacterial polypeptide expressing nucleotide sequence isolated from the Sargasso Sea
gggtaaaacttctcttgcaccagggtctcaagtagttactgattacttagcaaaggctggtttaaatgtttttttagataagctaggttttaatcttgttggttacggttgcacaacttgtatcggtaactctggtccattaccagaaaatatatcctcagctattcaaaaaaataatatttatgctgtttcagtactatctggcaatagaaattttgaaggaagaatctctccattgatcaaagctaattatttagcatcaccgcctctagtagtggcctatgcactcgcaggtcatatgaaatttgatttttataaagattcattgggcaaatctaaagatggaaaagatattttcttaaaagatatatggccatctaataaagaaattgaagatacgttaagcaattctctaaacgcagaaatgtttattaatagatattcgaatgtatcaaaaggaccatcacaatggcaaaatattaaaacaaaagaaagcagtatttataattgggatgataattcaacttatgtgaaaaagcccccattttttgataatcttaaagatagtccagatggattcaaagatataattaatgcaagacccctattaattctaggagatatggttacaacagatcatatttcaccagctggctcaattcaaaaagagagtcccacaggggattattttatgaaaaaccaagttttacaaaaagattttaattcttacgggtctaggcgaggcaatcacgaggtaatgatgagaggaacttttgcaaatattagaattagaaacgagatggcaccaggaacagaaggagggtttaccaaactgcatcctgaagaaaaataa

SEQ ID NO: 282662 - DNA, 826 bp, Unknown
  Bacterial polypeptide expressing nucleotide sequence isolated from the Sargasso Sea
tactgattttgaaattaaagatggatcaattcttattgcagcaattacgtcttgtactaatacttctaatccaaatgttttgataggagctggtttgcttgcaaaaaaagcaatagaacttggtttgaaaactaaaccctgggtgaaaacatcattagcacctggttctcaggtagtaacagattatttagaaaaagctggattaaataagtaccttgatatgcttggttttaatttagtagggtatggttgcactacatgcattggaaattctggtcctttaaaagaaaatattgtatcagcaattgagaaagaaagcatctacgctgtttcagtgttatctggtaatagaaactttgagggacgaatatcaccacacattaaagcaaactatttagcatcaccacctttagttgttgcttacgcattagcaggtcatatggaaattgatttatataaggatccacttggaaaagataaaaatggaaaagatatttttttaaaagacatatggccatcaaataaagaaattgaggtcacacttgcagactctttaaatgcaaacatgttcattaaaagatattcaaacgtatcggagggaccagttcaatggcaaaaaattaaaactgaaaaaactagtatttataattgggatgagagttctacttatgttaaaagacctcctttctttgatcaattatctgacgagccagagggatttaaagagattaaagacgcaagaccactactaattttaggagatatggtaactacagatcatatttcacctgctggctcaatccaaaaagaaagcccaactggagaa

SEQ ID NO: 282663 - DNA, 715 bp, Unknown
  Bacterial polypeptide expressing nucleotide sequence isolated from the Sargasso Sea
ttcttcttcagattacacaggtattccggctgtcgcagacttagctgctatgagagaggcggtaaaggaaaaaaataaagacccaaatactataaatcctctttcatctgttgaccttgtgattgatcattcagtgcaagtcgataaatttgcaagcaaaaattctttgaaagaaaatgttgatatagagtttaatagaaatgcagaaagatattcctttttaaaatggggtcaacaagcctttaataattttagaattgttcctccaggcacaggaatttgccatcaggtcaatttagaatatttatcaaaagttgtttggtctgaaaaatttaaagatgaaaattatatttttccagacacacttgttggaactgatagtcatacaacaatggtcaatgggttatctgtattaggttggggagtaggtggaatagaagcagaagctggtatgttaggtcaaccaatttcaatgctaatacctgaggtgattggattcaaattagtaaataaactaacagaaggaactacagctactgatttagttttaacagttgttaaaatgttaagggacaaaggagttgttggtaaattttgtagattttatggcgaaggtttaaaaaatttaactttagctgatagagcaacaatagctaatatggcacctgaatatggagcaacatgtggttttttccctattgataaagaacaataa

SEQ ID NO: 282664 - DNA, 709 bp, Unknown
  Bacterial polypeptide expressing nucleotide sequence isolated from the Sargasso Sea
atgaaatctttaaattcttttaatgcctgcaaaaatgtaataattgataaaaaaaattataaatactatgatttaaatgttcttgcccaaacttataattttgatttattaaaagttcctaattcaattaagataatattagaaaatttattaagaaatgaggatggagaatctgttacagagcagatgatctctaaattgtgtaaacaaattaatgaaacaaaagataattttgaaatatctttttcacctacaagggttctcatgcaagattttactggtgttccggcagtagtagatttagcagcaatgagggatgcattaaaaagtaaaggaattgatcctaataaaattaatccaaaatcaagagtggatctagttatagatcactctgttatggttgatcagtatgggagcaataaagcttatgaagaaaatgtaaaaaaagaatttgagagaaataaggaaagatatgaatttttaaaatgggggcagcaagcctttgataatttttatttagttcctccaggtggtggaatatgtcatcaagttaatcttgaaaatattgcaactactatttggtcaaataatattgagaatgaaaattatctataccctgactctgttgttggtactgatagtcacacaaccatgattaatgctctttctgtattggggtggggtgttggtggaatagaggcagaagctg

SEQ ID NO: 282665 - DNA, 901 bp, Unknown
  Bacterial polypeptide expressing nucleotide sequence isolated from the Sargasso Sea
ccaaatgtgttaataggagctgggttattagcaaaaaaggcagttgagcttggtttgaaagttaaaccttgggtaaaaacttcattagcacctggatctcaagtggtaacggattatcttgataaagctggtcttagtaaatatttagataagctaggttttaatttagttggttatggctgtactacatgcataggtaattctggtccactagcagaaaatattgtagaggcaattcaaaaagaaaatatttatgctgtttctgttttatctggaaatagaaattttgaaggaagaatttcaccacatattaaagcaaattatttagcatcaccacctttagtggtggcttatgctttagcagggcaaatggattttgatttatataaagatccattaggcaaagataaaaaaggtaattcaattttaatgaaagatatatggccatcaaacagtgaaatagaagaagttttaaaaacttctttaagtgctgaaatgtttgttaacagatattcaaatgtttcagaaggacctaaacaatggcaagaaattaaaacaaaaaaaagcagcatctatgattgggaagaaaattctacttatgttaaaaaaccacctttttttgatgatctatcagatgaacctgagggatttaaagaaattaaaaatgcgagacctttgctaattttaggcgacatggttacaactgatcacatctctcctgcaggaaatatacaaaaagaaagtccaacaggagaatattttatgaaacatcagattttaccaaaagacttcaactcttatggatctagaagaggtaatcatgaagtaatgatgagaggaacttttgcaaatataagaataagaaacgatatggttgctgggaaagaaggaggttatacaa

SEQ ID NO: 282666 - DNA, 838 bp, Unknown
  Bacterial polypeptide expressing nucleotide sequence isolated from the Sargasso Sea
ttacgatttgaggacagcgatacagtaaatattaaacaaatcaaaggtgttgcagattggttaaaaacaaaaagttctaaaatggagatagcttacagacccgctagaattttattacaagactatacaggaattcctgcagtagcagacttagcagcaatgcgagatgcggtaaagtcaaaaaacaaaaatcccaaaaaaattaatccattgtccacagtagacttagtaatagaccattctgtaatggttgataattatgcaaaaaacgattcttttaaaaaaaatgttgaaagagaatttggcaggaatggagaaagatattcttttttaaaatgggggcaaagtgcctttgataactttagagttgtaccacctggtacaggaatttgtcatcaagtgaatttagaatatttgtcaaaagtagtttggtcctcagatgttgatggtaaaacatatgcttatccggatactttagttggaactgacagtcatacaactatggtcaatggtttgtctgtattaggctggggcgtgggaggtatagaagcagaagcagcaatgcttggacagccaatctcaatgttgatacccgaagtaattggttttgagataaaaggaaaacttactgaaggaacaaccgctagcgacttagttttaacaatagttcagatgctacgaaaaaaaggtgtagtaggtaaatttgttgaattttatggaaaaggtttaaaaaatttatcactagcagatagagcaacaatagcaaatatggcaccagagtacggagccacttgtggtttttttcctattgatgaagaaactattaaatatttaaaat

SEQ ID NO: 282667 - DNA, 877 bp, Unknown
  Bacterial polypeptide expressing nucleotide sequence isolated from the Sargasso Sea
ttgagaaaaaaaggtgtcgttggaaaatttgtagaattttatggagaaggtcttaaaaatctatcacttgcagacagagccacaattgcaaatatggctcctgagtacggagcaacttgtggtttttttccgatcgatgaagaaacgattaaatatttaaaattctctggaagagacaaagacacaatttctttagttgaaaaatattctaaacaacaaggtttatgggcgagtaaggaaatagattttactgatactgtttcactaaatttaaattcggttgtaccaagtatttcaggtccaaaaagacctcaggacaaggtactacttactaatgctgcaaaaagttttgataaagcatttaaagaaaatacaaaaagaaaaattccgaaagaggctaaagtagaaaaaaaagattttagtataaaagatggagatattgtaattggagcaataacatcttgcacaaatacttcaaacccaagtgttatgattggtgctggtttattagcaaaaaatgctgttgaaaaaggtttaaaggtaaagccttgggttaaaacctcattagcaccaggatctcaggtagtaacagattatttagagaaagccggtctaaataaatatttagaccatttaggttttaatctcgtaggatatggctgtacaacatgcataggaaactcaggacctttggataaggatatctctgatgcaatccacaaagaaaatttgtatgcagtatctgttttatctggaaatagaaatttcgagggaagaattaatccagatgttaaagcaaattatttagcatcaccacctttagttgtcgcatatgcacttataggaaatatgcatcaagatttatataaaagtcctt

SEQ ID NO: 282668 - DNA, 991 bp, Unknown
  Bacterial polypeptide expressing nucleotide sequence isolated from the Sargasso Sea
atcccaaataaaattacccttttgtcatctgttgatttggtaatagaccattccgttcaagtagataaatttgcaagtaaaaattctctcaaagaaaatgttgaaattgaattcaaaagaaatgctgaaagatattcatttcttaaatggggacaacaagcatttaataacttcagaattgtccctcctggaacaggcatatgtcatcaggtaaatttagaatatttatcaaaagttgtttggacggaaaaatttgaaggatataattatatttttccagatacattagttggcactgatagccacactacaatggttaatggattatcagttttaggttggggtgttggaggaattgaggcggaagcaggtatgttaggacagccaatttcgatgttgataccggaagtaattggttttgaaatgacaaataaactacccgaaggcaccactgcgaccgacttggttttaacagttgttaaaatgctcagagacaaaggagtagttggaaaatttgtagagttttatggagaaggtctaaaaaatttaacacttgctgatagagctactattgcaaatatggcacctgaatacggagcaacttgtggattttttcctattgatgatgaaactttaaaatatttagaattttcaggaagaaacagtcaaacaataaaaattgtcgaaacttatgctaaagaacaaggtctttgggcagataatgatattttgtttactgatactttgtctttagatatgtcaagtatagttccaacaatatcaggacctaaaagaccacaggataaagttttattaaccgaagcatcaaaaaattttaaaaaaatatttaaagaagtaacaaaaaaaattgaaccatctgcttctatagtagaaaatgaagaatttaaaataagagatggagatattttaattgcggcaataacttcatgtaccaacacatcaaatcctaacgttctcattggcgcaggtt

SEQ ID NO: 282669 - DNA, 965 bp, Unknown
  Bacterial polypeptide expressing nucleotide sequence isolated from the Sargasso Sea
gcaactgacctagttttgactgttgttaagatgttaagagataaaggagtagttggaaaatttgttgagttttttggtgatggattaaaaaatttatcactcgcagaccgtgcaaccatagctaatatggcaccagaatacggagccacttgtgggttttttccagttgataacgaaaccttgaaatatttaaaattttcaggaagagatgaaaatgaagttaaaatagttgaagaatatgcaaaagcacaaggtctctgggcgagcgaagatatagagtttactgatacaatatcacttgatatgtcaaaagtggttccaactatttctggaccaaaaagacctcaagataaagttttattaaatgaagcttcagaaagcttcaaaacagcttttaaagacgcaacaggtcgaaatgaaaaaaacaattcaaaagttgaaaatacagatttcaaaattgaagatggatcaatattaatcgctgcaattacatcatgtacgaatacatctaatccaaatgttttaattggtgcagggttacttgctaaaaaagccgttgaacttggtctaaagacaaaaccatgggtcaaaacttcactagctccaggttcgcaagttgtaacagactacttagaaaaagcgggattaagcaaatatttagatatacttggttttaacttagttggatatggttgcacaacatgcattggaaactcaggtcctttaaatgacaatattgttaaagcgatagaaagtaaaaatttatacgcagtttctgttttatcaggtaacagaaactttgagggaagaatatcaccacatattaaagcgaattatttggcatcacctcctctagttgttgcatacgctttggctgggcatatggaagttgatctttacaaagactctttaggaaaaaacaaagatggaaaaagatatttttctcaaagacatctggcctacaa

SEQ ID NO: 282670 - DNA, 865 bp, Unknown
  Bacterial polypeptide expressing nucleotide sequence isolated from the Sargasso Sea
aaaatgttaagagataaaggagtagttggtaaatttgttgaattttatggagaaggtttaaaaaatttaactttagcagatagagcgactatagctaatatggcacctgagtatggagcaacttgtggattttttccaattgatgaagaaactttaaaatatttagaattttcaggaagagataaaacccaggtagaaatagtaaagaaatatgcaattgaacaaggtctttgggcaagtagcgatatagaatttagtgacactttatctttagatatgtcaactgtagttccaactatatcaggacctaaaagaccacaggacaaagttttattgacagatgcagcacaaaattttgaagaaaattttaagaaaaatactaatagaaaaaatttcttaaaggtaaaagttaacaacgcagattttgagatacaagatggttcaatattaattgcagcaattacctcctgcacaaatacttcaaatccaaacgtgcttattggtgcaggtctattagcaaaaaaagcttgtgaacttggtttaaactctaaaccttgggttaaaacttctcttgcacctggatctcaagtagtaactgattatttagaaagagcaggtttaaatacatatttagataaattaggctttaacctagttggatacggatgtacgacttgtattgggaactcaggacctctagcagaaaatatttctgaatccgtgagcaaaaataatttatatgcagtttcagttctttcaggaaatagaaattttgaaggtagaatatctccattagttaaagcaaactatttagcatcacctcccttagttgttgcatatgcaattgcaggaaatatgcaagtag

SEQ ID NO: 282671 - DNA, 576 bp, Unknown
  Bacterial polypeptide expressing nucleotide sequence isolated from the Sargasso Sea
aagattacaattcttatggatctagaagaggtaatcatgaagttatgatgagagggacatttgcaaatattagaattagaaatgagatggctccaggaacagaggggggttttacaaaactacatcctgaaggaaaaattatgccagtttatgacgcggtggttgagtataaaaaaagaggtacagatttagtagtaattggtggaaaagaatacgggactggatcctcaagagattgggctgcaaagggaaccaaattattaggagttaaagtagttattgcggaaagttttgagcgtattcatagatcaaatttaattggaatgggcattttaccattacagtttattgagggtatggatagaaaaaaattaaaacttttgggatcagaattaattacagtattaaaaatagaaaaaggtattaaaccatcagataaagtagacgtcgatataaagtacttgtcaggagatattaaaaaaataaaaactttgtgcagaatcgatacaaaaaatgaattggagtactataaaaatggtggaattttacaatatgtattaagaaatatgatgtaat

SEQ ID NO: 282672 - DNA, 955 bp, Unknown
  Bacterial polypeptide expressing nucleotide sequence isolated from the Sargasso Sea
gatgagaaatattgctgagacaattacaagtaatgatttaattgtaagcggcgttttatcaggtaatagaaactttgagggaaggattaatccatttgtaaaggcaaactatttggcatcgccaccacttgttgttgcatatgcattggcaggatcaacaaaaataaacttaacaaaggacccaattggtattgggaaaaacaataaagaaatatacttaaaggatatatggccaaaatcaaaagagataaaatcaataattaataaaattattaattcaaatttgtataagaaaagatacaaaaatgtattcaagggcgacaaaaaatggaattcagttaaatcaccaactgggctaacttataaatggaacgagaaatcaacctacgttcaacacccaccatattttgaaaatttagactttgagaagaataatataaatgatgtaaagaatgctcaaattttagcactctttggagactccgtaactacagaccacataagtcctgcgggttccataaaagaggatggaccagctggtatatatttaactaaaaataaaattaataaagtagattttaattcctttggtgctcgacgtggaaatcatgaagtcatgatgaggggtacattctcaaatattagaataaaaaatgaaatggtgaaaaatattgagggcggaatcacagttcatcatccttctaataaacaaatgacgatttacgatgcctcagtaaaataccaaaaatctaacacgcctcttgtcatatttgctggaaaagactatggaatgggttcctcaagagattgggcagcaaaaggaacgaagctactcggagttaaagcagtaatagcagagtcgtttgaacggattcacagatcaaatctcattggcatgggggtgcttccattttcagtcatggaaaaaagaaaacagactatctctaggtcttaa

SEQ ID NO: 282673 - DNA, 868 bp, Unknown
  Bacterial polypeptide expressing nucleotide sequence isolated from the Sargasso Sea
gtaataccggaggtggttggttttaagcttactggatcaatgaaggagggcactactgccaccgatttggttcttacagtggttgaaatgcttagaaaaaggggggttgttggaaaatttgtagagttttatgggtctgcattggctagcttaagtctgccagatagagcaaccttagcaaatatggcgcccgagtatggggcaacttgcggtattttccccatagatgaggaaactattaggtatttgaaattcacctcaagggaaccagatcgtgttagccttgttgagagctatgcaaaagcccaaggcatgtggtggacaccagagaccccagaaccagttttttcagatgtattggaattagatatatctgatgttgaaccgagtatatctggccccaagagaccacaagataggattaaactatcgtcttcagccgaagccttttcggcggcactaaaagatataggagctggcaaaggccccgttaattcgaaggcaggtaattttagcatagatgatggtgatgttgtaattgcagcgataactagttgtacaaatacgtcaaacccatcggtattgatggcagctggattattggcgagaaatgcggttaaaattggcctgtcagtgaaaccttgggtaaagacatcgttggctcccggtagtcaggttgtgacagattatttggaagatgctggagtaaaaaaagacctggatgccctgggtttcaacgttgttggatacggctgcaccacatgtatcggaaactcaggaccattgccagatgacgttacagctgggatcgaagaaggtgatttaaccgtttgctccgtattatctggcaatagaaatttgaaggtag

SEQ ID NO: 282674 - DNA, 838 bp, Unknown
  Bacterial polypeptide expressing nucleotide sequence isolated from the Sargasso Sea
agttccatgtttatcaggaccaaaaaggcctcaagataaaattgaacttcccaaagttgcaaggtctttcatggaaagtttaaaaaaagattttaatataaaaaaaactgactctttaagtagggtaaagggtaaaaattattctattgatcatggacatgttgcaatagcagctattacaagctgtaccaacacctcaaacccaagtgtaatgcttggtgcgggaatacttgcaaaaaaagcatataaccttggccttagaacaaaaccatgggtaaaaacatcattagctcctgggtcaaaggttgtaactgattatttgataaaatctggaactcaaaagtatttagatcatttgggctttcagttggttgggtttggatgcactacctgtattggcaactcaggaccaatcaatacagacatagctgatacaattacaaaaaataatcttattgtaagtggggtattatcgggaaatagaaatttcgaaggaagaataaatcctcatgtaaaagcaaactatttagcctccccaccactagttgtagcttatgctttagctggtagcactaaaattaatattacaaaagactctattggattaggcaaaaatggaaaaaagatatttctaaaagatatctggccaagttctaaagaaataaaagccatgattgcaaaaacaattgattcaaaattatacagctcaagatataaaaatgtttttgctggggacgcgaagtggaaaaaagtaaaatctactactggattaacatacgaatgggataagaaatctacttatgttaaacatccaccttactttgaagatatgaatttc

SEQ ID NO: 282675 - DNA, 865 bp, Unknown
  Bacterial polypeptide expressing nucleotide sequence isolated from the Sargasso Sea
gatgtttataaaaagatatgaaaatgtttcagatggtcctaaacagtggaaagaaataagaactgaaaaaagtagtatttataattgggatgaaaattctacttatgtaaaaaaaccccctttctttgatgcactaccagataaaccagagggatttaaagagattaaagatgcaagaccgttactaattttaggtgatatggttacaacagatcatatttctcctgccggaaatattcaaaaagatagtccaacaggagaatattttatgaagcaccaaattttgccaaaggactataattcatatggatccagaagaggaaatcatgaggtaatgatgagaggcacatttgcgaatattagaataagaaatgaaatggcaccgggtacagaaggaggatttacaaagttataccctgaaggaaaaatagttcctatttatgacgctgttgtagaatataaaaaaagaggcacagacttagtagttatcggaggtaaagaatatggaacaggatcttctagggattgggcagccaagggtactaaattattaggagttaaagctgtaatagctgaaagtttcgagagaattcacagatcaaatttgattggcatggggattttgcccttacaatttattgctaatgtcaatagaactaacttaaatttattaggctccgagcttataactattaatgaaatagaaaaaggaattaaaccttctgataatgttataattgaaattaaatattcctcaggagaaataaagaaaattaaaactttgtgtagaatagatactaaaaatgaattggaatattataaaaatggaggaatactcccatacgtactaagaaatatgatttaa

SEQ ID NO: 282676 - DNA, 925 bp, Unknown
  Bacterial polypeptide expressing nucleotide sequence isolated from the Sargasso Sea
cgttttggtggggactgacagtcatacgactatggtaaatggccttggggtattaggatggggagtgggtggtattgaagccgaagcggcaatgcttggccaaccaatttctatgttaataccggaggtagttggttttaagcttactggatcaatgaaggagggcactactgccaccgatttggttcttacagtggttgaaatgcttagaaaaaggggagttgttggaaaatttgtagagttttatgggtctgcattggctagcctaagtctaccagatagagcaaccttagcaaatatggcgcccgagtatggggcaacttgcggtattttccccatagatgaggaaactattaggtatttgaaattcacctcaagggaaccagatcgtgttagccttgttgagagctatgcaaaagcccaaggcatgtggtggacaccagagaccccagagccagtcttttcagatgtattggaattagacatatctgatgttgaaccgagtatatctggccccaagagaccacaagataggattaaactatcgtcttcagccgaagcctttaaggtggccttaaaagatataggcgctggtaaaggccccgtaaattcgaaggcaggtgattttagcatagatgatggtgatgttgtaattgcagctataactagttgtacaaacacctcaaacccatcggtattgatggcagctggtctattggcgagaaatgccgttaaaattggactgtcagtgaaaccgtgggtaaagacatcgttggctccaggtagtcaggttgtgacagattatttggaagacgctggagtaaaaaaggacctagatgccctgggtttcaacgttgttggatacggctgcaccacatgtattggaaactcaggaccattgccagatgacgttacatctgggatc

SEQ ID NO: 282677 - DNA, 895 bp, Unknown
  Bacterial polypeptide expressing nucleotide sequence isolated from the Sargasso Sea
agctgatagagctacgattgctaatatggctccagagtatggagcaacttgtggtttttttcctattgacgatgaaactttaaaatacttaaagttttcaggaagagatcagactacagtcaatattgttgaagaatatgctaaagcacaaggtttatgggctagtgatgatattgagttctctgatgttttaactttagacatgtcaacaattgcgcctacaatttcaggacccaaaagaccacaagacaaagtattactaactgaggcctcaaaagagtttgttaaaagttttaaagaaatcactaataaagaagatttttcaatttcaaaagtttctaatactgactatgaaatcaaagatggatcaattttgattgccgccataacatcttgtaccaatacctcaaatcccaatgtacttattggagcaggtctacttgctaaaaaggctgtagatttaggtttagaggtaaaaccttgggttaaaacttcgttagcaccaggatctcaagtagtcacagactatctatcaaaagcaggattaagtacttatctagataaacttggttttcatttagtaggttatggatgcactacttgcataggaaactctgggcccttagcagataatattgttgatgcaattaaaaaggaaaacatttatgcagcttcagttttgtcgggtaataggaacttcgaaggaagaatatctcctcatataaaagcaaattatttagcatctcctccattagtagttgcttatgctttagcaggacacatgaattttgatttttataaagattcattaggaaaagataaaaatggaaatgatatatacctaagagatatttggccgagtaataaagaaattgaagatattttaaaaatatca

SEQ ID NO: 282678 - DNA, 861 bp, Unknown
  Bacterial polypeptide expressing nucleotide sequence isolated from the Sargasso Sea
gcgtttgataattttagaattgttcctccaggaacaggtatatgtcatcaagtaaatttagaatatttatctaaagtagtttggagtgaagagtttatgggagacaaatatctttttccagatacattagttggaacagatagtcacacaactatggttaacggtttatcagtactaggatggggtgtaggaggtatagaagctgaagctggaatgttaggccaacctatttcaatgttaattcctgaagttataggttttgaaattaaaaataaaatgccagaaggaactacagcaaccgatttagttttaacagtcgttaaaatgttaagagataaaaatgtagttggaaaatttgttgaattttatggagaaggattgaaaaatttaacattagcagatcgtgctactattgctaatatggctccagaatatggagctacttgcgggttttttccaatcgatgatgaaactttaaaatatttaaaattttcaggaagagatcaactaaccgttaaaattgttgaagaatatgcaaaagcccaaggtttgtggtcaagcaatgatatagtatttacagatactttaactttagatatgtcaacagttgtacctacaatttctggacctaaaagaccacaagacaaagtattattaaccgatgcttcaactaactttcagaaaagtttttcagaaataaccaaaaagaaaattttttcatcatctaaagttcctaatacaaaatatgaaataaaagatggttcaattttaattgctgcaataacatcttgtactaatacttctaatcctaatgttctgattggtgcgggattacttgccaaaagagcagtagagttaggt

SEQ ID NO: 282679 - DNA, 847 bp, Unknown
  Bacterial polypeptide expressing nucleotide sequence isolated from the Sargasso Sea
acaagttccggttgacctagtaatcgatcactcagttcaagtagatatttcaggagcaaatccagaagcattagaccttaatcttgacattgaatatcatagaaatatggaaagatacaccttcctaaagtgggggcaacaatctctagaaaatttcagagcagttcctccttccagaggtattgtgcaccaggtaaatttggaatggattgcaactgtggctcgccaagaaaatggagtttggttgcccgattctttagttggaaccgattctcacactaccatgattaacggactcggggttctaggctggggagtaggtggaattgaggctgaagcagtaatgctcggccaaccaatttacatgctatctccagatgtagtaggtttccgtctaacgggctctctaaatccgggagtaactgcaacagatatgacacttcgaatcgtggaaatgcttcgtgaacacggagtagtcggcaaattcgtagaattctttggtgaaggaatggcagtattgtctctgcctgaccgtgcaacaatcgcaaacatggctccagaatatggtgcaacatgcggtttcttcccagttgatggtaacactctttcttacatgcgattgtcaggtaggaatgaagaagacatcgcaggtgtagaggcttattgcaaggcacaagggctgtggtatgattccaattctccagaaaagagttacaccgcccttctcgaattggatttgaacactgttgaccccgctctcgcaggacctaaacggcctcaagacagagtggatttgtcaaaaatgtcttctcatttcagggagtcattgactcatgaattaggtcat

SEQ ID NO: 282680 - DNA, 598 bp, Unknown
  Bacterial polypeptide expressing nucleotide sequence isolated from the Sargasso Sea
catggaacaccaaattttacctaaagattataactcatatggttcaagaagaggtaaccatgaagttatgatgcgcggaacttttgcaaatataagaattagaaatgaaatggctcctggcacagaaggtggttttacaaagttatatccagaagaaaaagttcttcccgtatatgatgcggtagttgaatataaaaaaagaggaacagatttagttgttattggtggaaaagagtatggaactggatcttctagagattgggcagctaaaggaacaaaattacttgggataaaagtagtaatcgcagagagttttgaaagaattcatcgatcaaatttgattggaatgggaatattgccattacaatttattgatgatgtaaatagaaaaaatcttaaattaattggttctgaattaattagtattataaatatagaaaagggcgttaatccctcagatgaagtgacagtcgaaattaaatatgcttctggcgaaataaagaaaattaaaactttatgcagaattgatacaaaaaatgaattagagtattataaaaacggaggtattctgcagtatgttttaaggaatatgatttag

SEQ ID NO: 282681 - DNA, 624 bp, Unknown
  Bacterial polypeptide expressing nucleotide sequence isolated from the Sargasso Sea
attgcctgaaaatattgtagaagcaattgaaaaagaaaatatatacgctgtatcagttttatctggtaatagaaattttgaaggtcgtatatctccacatataaaagcgaattatttagcatcacccccacttgtagttgcttatgctctagccggtcatatggaattagatttatataaagatcctttaggaaaagataaaaatgataaagatatttttttaaaggatatttggccttctaataaagaaatagaagatattttaagagaggcattaaatgcaaaaatgtttattgaaagatactccaatgtttctgaaggaccagctcaatggcaaaaaattaaaactgaaaaaagtagtatttataattgggatgaagggtctacttatgtaaaaagaccacctttttttgataatatgccagatgaaccagagggatttaaacaaattaaagatgcgagaccattattaattttaggagatatggtaacaacagaccatatttctccagcaggatctattcaaaaagaaagtccaactggtgaatattttatggaacatcaaattttaccaaaagattataattcttatggatcaagaaggggaaatcacgaagttatgat

SEQ ID NO: 282682 - DNA, 940 bp, Unknown
  Bacterial polypeptide expressing nucleotide sequence isolated from the Sargasso Sea
aaagtagttggatttgaaatgaaatcaaaaatgcctgaaggtactacagcaactgatcttgttttaacggtagttaaaatgctcagagacaaaggtgttgttggaaaatttgttgaattttatggcgaaggactgaaaaatttaacattagcagatagagctacaatcgcaaacatggcaccagaatacggagcaacttgtggtttctttccaattgacgatgaaactttaaaatacttaaaattctccgggagaaatgatcacagtgtagaaattgttaaaagatatgctaaagagcaaggcctgtgggctagccaagaagttgagtttactgatacattatctttggatatgtctactatagtaccaaccatttcaggacctaaacgacctcaagacaaagttttattaacagatgcatcctcaaattttaaaaaaatattttctgaaattacaaaaaaagttaagccagatatttataaaatagaaaatgaagaatttaaaataacagatggcgatattttaattgcagcgattacatcttgtacaaacacatctaatccaagtgtacttattggagcaggtttgcttgcaaaaaaagcgattgaaaaaggcttgatgtcaaaaccgtgggtaaaaacatcattagctcctggatctcaggtagtaacagattatctcgaaaaagcaggcctaaatatttatttagacaagcttggttttaacttagttggttatggatgcacgacttgtattggaaattctggtccgttagctgaaaatatttcggagtccataaaacaaaataatatttatgcagtctcggttttatcggggaatagaaattttgagggaagaatttctcctttgattaaagcaaattatttagcatcgccacctttagtcgttgcttatgcaatagcaggaacgatgagattga

SEQ ID NO: 282683 - DNA, 796 bp, Unknown
  Bacterial polypeptide expressing nucleotide sequence isolated from the Sargasso Sea
tctggacctaaaaggccccaagataaagtattacttactaatgcaaaaacgtcgtttgaaaaaaattttcaggaaaatgcaaaaagaaaaaaagaaaatacaacaacagttttaggtgaagaattccaaataaaagatgggtccattgtaattgcagcaataacctcatgtacaaatacatcaaatcctaatgttcttattggtgctggtcttttagcaaaaaatgcaattgaaaaaggattacaaacaaagccatgggtaaaaacatctttagccccaggctcacaagttgttactgattatttaaataaatctggattaaacaagtatttagatgaattaggatttaatttagttggttatggttgtacaacatgtattggtaactcaggaccattacctgaaaacatatcaaatgcaataaaagaaaatgatatttatgcagtttcagtattgtctggaaatagaaatttcgaaggtagaatatcacctctggtaaaagccaattacttagcttcgccaccattggtggtagcatattctttagcaggatctatgcaggtagatttgtacaaagatcctcttggtaaagataaaaatggtaaagatatttttttaaaagatatctggccaagcaataaggagattgaagatgttcttttagaatctttaaatccagaaatgtttagacaaagatattcaaacgtattacaaggaccagatcaatggcaaaaaattaaaactgaaaaaaccagtatctataattgggacgataattcaacttacgttaaaaaac

SEQ ID NO: 282684 - DNA, 962 bp, Unknown
  Bacterial polypeptide expressing nucleotide sequence isolated from the Sargasso Sea
aatgaaaaataaacttcctgaaggcacaactgcaactgaccttgtgttaacagttgtaaaaatgctaagggataagggtgttgttggaaaatttgtagaattttatggtgaaggacttaaaaatttaacactggcagatagagcaactattgcgaacatggctcctgaatatggagcaacatgtggtttttttccaatagatggggaaactttaaaatacttagaattttctggaagatctacagaaaatattcagattgtagaacaatatgcaaaagaacaaaatttatgggcgagtgatgatatagtatttactgacactttatccttagatatgtctactgtagttccaacaatatctggtccaaaaagacctcaagataaagttcttctaacagatgcatctaaaaattttattaaagtttttaaagatgtatgtaaaaaaacggagcctactattgctaaagtagaaaaagctgattttgaaataaaagatggcgatatattaattgctgctattacctcatgtacaaatacgtcaaatcctaatgtgttaattggtgcaggattattggctaaaaatgcaataaataaaggattaacagttaaaccatgggttaaaacttcattagctcctggatcacaagtggttacagactacttagacaaagctggtttaagtaaatatttagataaattagggtttaacttagttggttacggatgcaccacttgtattggtaactcaggacctctaccagaaaatatcactgatgcagttaaagaaaataatttatattccgtatcagttttatctggcaatagaaattttgaaggtagaatttcaccaatagttaaagctaactatcttgcttctcctcctttagtagtggcttatgcaattgctggatcaatgagaatggatttatacaaagatcctctaggcaaagatagcgatggga

SEQ ID NO: 282685 - DNA, 725 bp, Unknown
  Bacterial polypeptide expressing nucleotide sequence isolated from the Sargasso Sea
tgcttacaggcctgcaagaattttattacaagattacacaggtataccagctgtcgcagatttggcagcaatgagagatgctgttaagtcaaaaaataaagacccaaagaaaataaatcccttatctactgttgatcttgtaattgaccattcagttatggttgataattacgccaaaaaagactcctttaaaaaaaatgtagaaagagagtttgatagaaatggtgaaagatattcgtttctgaaatggggacaaaatgctttcaataattttagagttgttcctccaggaacaggaatttgtcatcaagtaaatctggagtatttatcaaaagtggtttggtcttcaaagatagaaggtgatatgtttgcttatccagatactttagttggtaccgatagtcataccaccatggtaaatggcctatctgttcttggttggggtgttggtggaatagaagccgaagcagcaatgctgggccaacctatttcaatgttaataccagaagtaattggttttcaaataaacggaaaactttctgagggaactacagccagtgatcttgttttaacaattgtggaaatgttaagaaaaaaaggtgtggttggtaaatttgttgaattttatggagaaggtttgaaaaatttatcattggcagatagagcgacaatagcaaatatggcgccagagtatggagctacatgtggttttttccccaattgat

SEQ ID NO: 282686 - DNA, 856 bp, Unknown
  Bacterial polypeptide expressing nucleotide sequence isolated from the Sargasso Sea
gttttgttaactgaagctaaaaattcttatgagaaaagctttaaaaaaatcacaaacagaaaagtagaaaatacggctaaagtatctggagaaaattttaaattaaaagatggatcaattgtaattgctgcaataacatcttgtactaatacatcaaatccaaatgttctaatcggagcaggtcttctagcaaaaaaagctattgaaaaaggactaaaaacgaaaccatgggttaaaacatcattagctccaggctcacaggtcgtaacagattatttaaacaaatcaggtctaaataaatatttagacaaattagggtttaacttagttggatatggatgtacaacttgcattggaaactcaggacctttgcctgaaaatatttcagatacaattaaagaaaatgatatttatgcagtttctgtcttatcaggtaatagaaattttgagggaagaatctctcctttggtaaaagcaaattacctagcttcacctcctttagtagtagcgtattctttagcaggatctatgaaaacagatttatataatgattctattggaaaagataaggatggtgacgatgtgtatttaaaagatatttggccaagcaataaggaaatagaggatgttttattaaaatcattaaatgcggaaatgtttaggcagcgatatgcaaatgtttcaaaaggacctgaacagtggcaaaaaattaaaaccaaagagagcagcatctatgattgggatgacaattctacttatgttaaaaaaccaccattttttgaaaatctctctccaaaaccagaaggatttaaacctataaaagatgcaagacctcttttaattttaggcgaatagt

SEQ ID NO: 282687 - DNA, 916 bp, Unknown
  Bacterial polypeptide expressing nucleotide sequence isolated from the Sargasso Sea
tcatacaaaacattaaaatcaataaatataaatgacaataactataagtactattctttaaaagaagctgaaaaaaatggtctaacgaatatttctaaattgcctaaatctttaaaagtattattagaaaatttacttagatatgaagatggtttgtcagttacaaaagatcaaattgatgcaattaaatattggctcaaagaaaaaaaatcaaagactgaaatagcatatagaccagcaagagttttgttacaagattatacaggaataccggcagtagcagatttagctgcaatgagagaagcggttaaaaaaaaaaataaagatccaaatactattaatccactatctaaagttgatttagttatcgatcattctgttcaagttgataaatttgcaaaagaagattcatttgaaaaaaatgttgaaatagaatttaaaagaaatggagaaagatattcctttttaaaatggggccaacaagcttttaataattttagaattgttccacccggaactggtatttgtcatcaagtcaacttagaatacttatcaaaagtagtttggtgtgaaaaatatgaagaagataactacttattccctgatactttagttggaacagatagtcataccacaatggttaatggattatctgttcttggctggggagtaggtggaattgaagccgaagcgggaatgttgggacaaccgatttctatgctaataccagaagttattggttttgaatttactaacaaaatgccagaaggtaccacagcaacagatttagttttaacagtagtcaaaatgttaagagacaaaggtgttgttggaaagtttgttgaattttatggagaaggtttaaaaaattttaactctagcagacagagcaaccattgcaaatatggctcctgaa

SEQ ID NO: 282688 - DNA, 632 bp, Unknown
  Bacterial polypeptide expressing nucleotide sequence isolated from the Sargasso Sea
ctatcaaaaagatagtccaacaggtgagtattttatgcaacatcaagttttaccaaaggattataattcatatggctcaagaagaggaaaccacgaagtaatgatgagaggtacttttgcaaatataagaattagaaatgagatggcgccaggtaccgaaggtggttttacaaaactttatccagagggcaaagtagtgccaatatatgatgcagttgttgagtataaaaaaagaggcactgatttaatagtaattggtggaaaggagtatggcacaggttcatcaagggattgggcagcaaaaggaacaaaacttttaggtattaaagctgtgatagccgaaagctttgaaagaatacatagatcaaatctaataggcatgggtatactgcctctgcaatttatgagtggtgttgatagaaaaaaacttgacctaaaaggttctgaattaatttcgattttaaagattgaaaatggaataaatccttcagacaaaattgaggtagaaataaaatatcaatcaggtgatattaaaaaaacccaaacagtatgccgaatagatacaatgaatgaacttgaatattataaaaatggtggaattcttcaatttgttttgagaaacatgatgtaag

SEQ ID NO: 282689 - DNA, 860 bp, Unknown
  Bacterial polypeptide expressing nucleotide sequence isolated from the Sargasso Sea
taattttagaatagttcctccaggaacaggaatttgtcaccaagtaaatttagaatatctttcaaaagttgtttggactgaagaatttgaaggagaaaaatatttattcccagatacattagttggcacagatagtcatacaactatggtcaacggattatcagtactaggttggggtgttggtggaattgaagcagaagcaggaatgttgggccaacctatatcaatgttaataccagaagtaattggttttgaagtaaaaaataaaatgcctgaaggcacaacagctacagatcttgttttgacagttgtaaaaatgttaagagataaaggtgtggttggtaaatttgttgaattttatggagtaggtttaaaaaatctaacattagcagatagagctacaattgcaaatatggcgcctgagtatggggctacatgtggattttttccaatagatgatgaaaccttaaagtatttaaaattctcaggaagagatcaacatactgtagatattgttgaaaaatatgcaaaagaacaaggcttatgggcaagcaatgaaatagaatttacagatactatatctttagatatgtctacagttgttcctacaatttcaggacctaaaagaccacaagacaaagttttattaacagaggcagcaacttcatttaaaaaagtttttgaggaagcaacaagtagaaaaaatcaatctatctcaaaagtttctgatacagattatgaaattaaagatggatcaattttaatagcagcgattacttcctgcactaatacatctaaccctaacgtattaattggtgctggattacttgcaaaaaaagctgttgaattaggattaaaag

SEQ ID NO: 282690 - DNA, 892 bp, Unknown
  Bacterial polypeptide expressing nucleotide sequence isolated from the Sargasso Sea
ccaaaaaaaataaatccattatccagagtagatctggttattgatcactctgttatggtagatagttacaaaaataaaaatgccttaaaagaaaatgttagaaaagagtttgatagaaacaaagagagatatgagtttctaaaatggggacaaagctcatttgataatttctatcttgttcccccaggtgcaggaatttgtcatcaagtaaatttagaaaatatagccaaaactatatggttaaaggaaattaataatcaaaactatttatttccagactcagtagtaggaactgacagccatacaacaatggtaaactcactttctgttttaggttggggagttggagggattgaagctgaagcagctatgctaggtcaagcaatttcaatgaatattccagacgttattggatttgaacttaaaggatcacttaaagagggtattacagcaacagatttagttttatctattaccaaaattcttagagagaaaggtgttgttggaaaatttgtagaattttatggcaaaggtttaaaaaatttatcactagccgacagagcaacaatatctaatatggcaccagagtacggtgcaacttgtggatttttcccaacagatgaagaaacaattaattatctaaaattaactggcaaagaaaccaatcatctaaatattgttgaaaaatattctaaacagcaaactctttgggcagatgaaagttatgcacctgatttttcagataagatatcattagatttagatgcaatcgagcctacccttgctggtccaaaaagaccacaagataaaattcctttaaaagaagtcccaaatgagtttagtaagatagataacaaaaaaaatatcaatgaaaataaattaaatacaggtg

SEQ ID NO: 282691 - DNA, 853 bp, Unknown
  Bacterial polypeptide expressing nucleotide sequence isolated from the Sargasso Sea
atgtcaaagacattgcgcgacaagtgctgtgtaagcttaaccgtggctggtaagaaatattactactattcgctttctgaactggcgaggttctatcccttgctagaaaagctcccgttttctctaaaggtcttgctggaaaatctcttgcgtcatgaagatgggagctctgttaaaatagccgatattgaagctttagcgacttgggcagaaaaggaacaaaaaaatgagatttcgttccgaccatcacgcattcttttgcaagattttacgggtgttccagccttagtagatttggcagccatgcgtgatgcgatggaaacaattggtggtgacccggaaaaaattaatccgctatcacctgtggatctggtgattgaccactcggtaatggttgatcatgcaggtggagatgatgcagcagccaaaaatgtggcattagaatttttccgtaaccaggaacgttacgaatttttgcgttggggtgcaggggcatttgataatttccgagttgtgccgcccggaaccggaatttgtcatcaagtgaatcttgaatatttgtcgcagacggtttggacgcgtgaggaaaatggaaaaacttatgcttatcctgattcggttgttggtactgatagccacacaacgatggtgaatggcttagctgttcttggttggggtgtgggcggtatcgaagctgaggcagccatgcttggccaaccaatttccatgctggttccagatgttgttgggttccgtttagaaggcaagcttccggaaggtgcaaccgcaacggatctggttctgacgattgttgagtcgctccgtaaacgcggggttgttggtaaatttgtcg

SEQ ID NO: 282692 - DNA, 820 bp, Unknown
  Bacterial polypeptide expressing nucleotide sequence isolated from the Sargasso Sea
ttaataagactttcgtatttaggatctccacctttggtagtagcatatgctttagcggggactgtagatatagatttttattctgatccaataggtaaatctcaatctggcgatgatgtttatcttaaggatatttggcctacaaataaagagataagtgaaacagtatattcctcaataaagtctgatacattttcgagcagatataaaaatatttttaccggtgatgatagatgggaatcaatatctgttccggagggatctatatatgactggtctccagattctacttatattcaaaaaccaggatttttcgatgaattttcgattgatttgcccccgattgaagatattaaagacgctagagtattagcatatcttggtgattcaattactactgatcatatctcacccgcaggttcttttactgaggagacaccagctggaatttatttaaacaataaaggtgtaaataaaaaagattttaacagctatggttcaagaagaggaaaccatgaagtgatgatgagaggaacttttgcaaacattagaataaaaaataaaattttggataatgtagagggcggttttacaaaattttttgataatgaccaaataatgtcgatatatgatgccgcaatgaaatataaagagactaaaacgcaattaattgtaatcgcgggtaaagaatacggtacaggtagttctagagattgggctgcgaaaggatccatgttgttaggagtaaaagcagtcttagctgaaagtttcgaaaggatacatcgaagcaatctggttggaatgggtgttcttccgcttc

SEQ ID NO: 282693 - DNA, 918 bp, Unknown
  Bacterial polypeptide expressing nucleotide sequence isolated from the Sargasso Sea
gatggtcgataattatgcaaaaaaagattctttctcaaaaaatgtacaaagggaatttgatagaaatggtgaaagatattctttcttaaaatgggggcaaagtgcgtttaataatttcagagttgttccaccaggaacaggtatttgccatcaagttaatttggaatatttatctaaagttgtttggtcttcagaggccgacggccagttatttgcttatcctgatactttagttggaacagacagtcatactacgatggtaaatggtttatcagttcttggctggggagttgggggtattgaagcagaagcagctatgttaggtcaaccaatttcaatgttaatacctgaagtaattggttttgaaattaatgggaaactaactgagggaacaacagcaagtgatttagttttaacaattgtacaaatgttaagaaaaaagggtgttgttggaaaatttgtagaattttttggtgatgggctaaaaaacttatcattagctgatagagcaacaattgcaaatatggcgcctgagtacggagctacttgtggattttttcctattgatgatgaaactattaagtatttaaaattctctggaagagaccaaaatacaatttctcttgttgaaaaatattctaaagaacaaggactatggtcaaaccaaaatgatcaaattgaatttactgatacaatctcattagatttaaattctgtggttccaagtatttctggaccaaagagaccacaagataaagttttattaacaaatgctgcaaaagatttcgataaagcgtttaaagaaaatacaaaaagaaaggttcctttagaagctaaagtaaataataaagaatttaaaattaaagatggcgatattgttattggcgcgattacttctttgtacaatacatcaaaccc

SEQ ID NO: 282694 - DNA, 933 bp, Unknown
  Bacterial polypeptide expressing nucleotide sequence isolated from the Sargasso Sea
ttagaattttcaggaagatctaaagagaacattcaaatcgtagaaaaatatgcaaaagaacaaaatttgtgggcaagtgaagacgttgttttcactgatactttatctttagatatgtccacagtagttcctacaatttctggaccaaaaagacctcaagataaagttcttttaacagaggcatcaaaaaattttattaaagtttttgaagaagtttgtaaaaaaactgatccaacagtagcaaaagttaaagatacagattttgagataaaagatggagatatattaatagcagctattacatcatgcacgaatacctccaatccaaatgtattaattggtgcaggactgttagccaaaaatgcaattgaaaaaggcttaaatgttaaaccttgggttaaaacttcattagcacctggatcacaagttgttactgactacttagataaagcgggtttaagtaaatatttagatgaattaggttttaatttagttggttatggttgcaccacttgtattggtaattctggacctttgccagataatattactgatgctgttaaagaaaataatttatacgcagtttcagttttgtctggaaatagaaactttgaaggaagaatttctcctttagttaaagcaaattatttagcgtcacctcctcttgtagtagcttatgcaattgcaggatctatgagaatggatttgtataaagatccattaggaaaagatgataaaggacaagatatttacttaaaagacatttggccttctaataaagagattgaagatactcttaaacaatctttaaacccagaaatgtttgtgaatagatattcaaatgtttcagaaggaccagaacaatggcaaaaaattaaagtgaacaaaggaagtatttacaattgggaagaaaattctacctatgttaaaaaa

SEQ ID NO: 282695 - DNA, 912 bp, Unknown
  Bacterial polypeptide expressing nucleotide sequence isolated from the Sargasso Sea
gaaggtctaaaaaatctaacacttgctgatagagcaactattgccaatatggcacctgagtatggtgctacctgtggattttttccaattgatgatgaaactttaaaatatttagaattttcaggaagatcaaaagaaaatactcaaatcgtagagaaatatgcaaaagaacaaaatttatgggcaagtgaagatgttgtttttactgatactttatctttagatatgtctacagttgttccaacaatctctggacctaaaagaccacaggataaagttcttttaacagaagcttcaaaaaattttataaaagtttttgaagatatatgtaaaaaaactgatccaacaatagcaaaagttaaagacacagattttgagataaaagatggagatatattaatagcagctattacatcatgtacgaatacctccaatccaaatgtattaattggtgcaggactgttagccaaaaatgcaattgaaaaaggcttaaatgttaaaccttgggttaaaacttcattagcgcctggatctcaagttgttactgactacttagataaagcgggtttaagcaaatatttagatgaattaggttttaatttagttggttatggttgcactacttgtattggtaactctggacctttgccagataatattactgatgctgttaaagaaaataatttatacgcagtttcagttttatctggaaatagaaactttgaaggaaggatttctccattggtaaaagctaactatttagcttcacctcctctcgtagtggcttacgcaattgctgggtctatgagaatggatttgtataaagatccattaggcaaagatagcaaaggacaagatgtttacttaaaagacatttggccttctaataaagagattgaggatactctaaag

SEQ ID NO: 282696 - DNA, 763 bp, Unknown
  Bacterial polypeptide expressing nucleotide sequence isolated from the Sargasso Sea
tgtcatcaagtaaacttagagtatttgtccaaagtagtttggtcttctaagattaacgaagaaatttttgcttatccagacaccctagtaggtaccgacagccataccactatggtaaatggtttatctgttcttggttggggtgttggaggaatcgaagcagaagcagcaatgcttggtcaacctatttcaatgttaatacctgaggtaattggttttaaaataaatggaaaactttccgaggggaccacagctagtgatcttgtcttaacaatagttgaaatgttaagaaaaaaaggtgttgttggaaaatttgttgaattttacggacaaggtctaaaaaatttaacccttgcagatagagcaaccatagcaaacatggcaccggagtatggagctacttgtggattttttccgatagatgaagaaacaattaaatatttaaaattttctggacgagataaagatacaatttctttagttgaaaaatattctaaagaacaaggcttatgggctagtgatgaaatagattttacagatactatttctttagatttaagttcagttgtaccaagtatttctggaccaaaaagaccacaagacaaagtacttcttaccgatgcatcaaaaagttttgataaagcttttaaagaaaacacaaatagaaaagtccctttagaagctaaagtagataaaaaagattttaaaattaaagacggagacattgtaataggagcgattacttcttgcacaaaatacgtct

SEQ ID NO: 282697 - DNA, 874 bp, Unknown
  Bacterial polypeptide expressing nucleotide sequence isolated from the Sargasso Sea
aataaaaagtctaacactgaaatagcttacagacctgcacgtactttattacaagattatacaggaattcctgcaattgctgacttagcagctatgagagatgcagtaaaagataaaaataaaaatccagataaaattaatccattgtctacagttgatttagtaatagatcattctgtaatggttgatgaatacgcatcaggaaaatcatttaataaaaatgttgaaagagaattttcaagaaatggcgaacgatactcatttttaaagtggggacagaaagcatttgataattttagagttgttcctccaggcacaggaatttgtcaccaagtgaatttagaatatttgtctaaagttgtttggtcatcaaaaagcagaaatgatttgtacgcttatccagatactctagttggaactgatagtcacacaacaatggtgaatggtttatcagtcttaggttggggagttggaggaatagaagccgaggccgcaatgttaggccagccaatttcaatgttaattccagaagtcattggtgtagaactcaaaggaaaactaaaagaaggaacaactgcaacagacttagttttaataattgttgaaatgctaagaaaaaaaggagtagttggaaaatttgttgagttttatggagagggtttaaaaaatttaactttagctgatagagcaacaattgcaaacatggctcctgaatatggagctacatgtggcttctttccaattgatgatgaaactctcaaatatttaaatttatcaggaagagatcaagaaacaatagctttagtcgagaaatattcaaaagaacaaggtctttgggcaagcaatgatgttgtgtttaccgatactcttcact

SEQ ID NO: 282698 - DNA, 748 bp, Unknown
  Bacterial polypeptide expressing nucleotide sequence isolated from the Sargasso Sea
ttttttgataacttatctgacagacctgaaggatttaaagaaattaaaaatgctagaccacttttaatacttggtgacactgtaacaacggatcatatctctccagcaggatctattaaaaaagatagtccgaccggtgattattttatgaaacaccaggtacaacaaaaagatttcaattcatacggagcaagaagaggaaatcacgaagtaatgttgagaggcacatttgggaatataagaattagaaacgagatggcacctggtaccgaaggtggttttacagttttacaaccagatggaaaacagatgagtgtttatgaagccgctatggaatataaaaaaagaggtaacagtttggtggtaattgctggaaaagaatacggaactggttcatctagagattgggctgccaaaggaaccaagctactaggagttaaagcggttatagctgagagttttgaaagaattcatagatctaacctggtggggatgggaattctacctcttcaatttgaagaaggttttgacagaaaaaaattaaatataaaaggcactgagttgtttacaattattgacattgaaaaaggaataaaccctagagcagaggtaagttgtgaaattaaatatgccgatggatcaagcaaatctataaaactcttatctagaatagatactgaaaatgaaatagaatattacaaaaacggtggaattctccaatacgttttaagaaatatgctcaattaat

SEQ ID NO: 282699 - DNA, 844 bp, Unknown
  Bacterial polypeptide expressing nucleotide sequence isolated from the Sargasso Sea
aaaacttctttagctccaggttcacaggtagttactgattatttagaaaaagcaggcctaaataaatatttggaaaaacttggttttcatttagttggttatggatgtactacttgtattggtaactctgggcctcttaaaaaaaaaatctctgaagctatacaaaaagggaatttatattcagtttctgttttgtcaggaaatagaaattttgaaggaagaattaatccagatgttaaagcaagttaccttgcctcgccacccctggttgttgcgtatgcactggccggatcaatgaatattgatttatacaacgaacctttaggaaaagataacaatggaaataacatttttttaaaagacatatggccaacaaataaggaaatagaggaattaattttaacttcaattagtgcggagatgtttgctaagagatattcgaaagtttctgaaggttctgaagaatggaataaaattaaaactacaactagcagtatttacagctgggatgattcatctacttatgtaaaaaaacctcctttttttgaaaatatgtctgatgagccaaaaggatttgaaaaaattgcaaatgctagaccattattaattctgggagatactgttactacagatcatatttccccagcaggctcaattaagaaagacagcccaacaggaaattattttatggaacatcaagttcaacaaaaggattttaactctttcggtgcaagaagaggaaatcatgaagttatggttcgcggagcatttggaaacataaggattaaaaatgaaatggcaccaggcactgaaggaggaatgaccaaaatttatccgaaggaaa

SEQ ID NO: 282700 - DNA, 847 bp, Unknown
  Bacterial polypeptide expressing nucleotide sequence isolated from the Sargasso Sea
tcttattggggcaggattacttgcaaaaaaagctgttgagctaggattagatgttaaaccatgggttaaaacatctttggctcttggatcaaaagtggtcactgattatttagagaaagcaggcctaaatacttacctagatcaattaggatttaatttagtcggttatggttgtacaacttgtatcggtaattcaggtcctttatcagaaaatatagttgacgctattcaaaaagaaaatttatatgcagtttcagttttatcaggtaacagaaactttgaaggaagaatttcacctcatattaaagctaattacttagcttctcctccacttgtagtagcctatgcgcttgctggtcatatggaatttgatttatttaaagactcatttggaaaagataaaaacggcaaagatgtatttttaaaagatatctggccttcgaataaagaaatagaggatactttaaaaaattctcttagcgcagatatgtttgttaaacgatattcaaatgtttccgagggaccgaaacaatggcaagaaatcaaaacagaaaagagtagtatttataattgggatgaaaattctacttatgtgaaaaaacctcctttttttgaaaacctaagtgatgagccagagggttttaaagaaattaaaaatgctagaccattactgatattgggagatacggttacgacagatcacatttctccagctggcaatattcaaaaagatagtccaacgggtgagtattttatgaactatcaaattcttcctaaggattataattcatatggctcaagacgtgggaatcaccgaggtgatgatgagaggaacattgcaaatata

SEQ ID NO: 282701 - DNA, 937 bp, Unknown
  Bacterial polypeptide expressing nucleotide sequence isolated from the Sargasso Sea
attacgatatgaggatgatttatcagtaaccaaaaatcaaatagatgctctaaaaaattggctagatactaaaaaatcctcaactgagatagcatatagacctgcaagagtattattgcaagattataccggtataccagcggtagctgacttagcagctatgagagaagctgtgaaagaaaaaaatattgaccctaattcaatcaatccactttcgactgttgatttagttattgaccattctgtacaggttgatcaatcatctaaagcagattcttttgaaaaaaatgtaaatattgaatttaaaagaaatgctgagaggtactcatttttaaaatggggacaggacgcatttaataattttcgaattgttcctccgggaacaggaatatgtcatcaagtgaacttagaatatttatctaaggttgtatggtgtgaaaaatttaaagatgaggattatttatttcctgatactttagttggtacagacagtcacacaactatggtcaatggattgtcagttttaggatggggagtaggagggattgaagctgaagcaggaatgcttgggcagccaatatctatgcttattccagaggttattggatttgaggtaaaaaataaaatgccagaaggaacaactgctacagatctagttctaacaatagtaaaaatgttaagagataaaggagtagttggaaaatttgttgaattctatggagaaggtttaaagaatttaactttagctgatagagctactatagcaaatatggctccagaatatggggcgacttgtggattttttccaattgataatgaaacattaaagtatcttcaattttcaggcagagatgaagagataatttcattagttgaaaatacgcaaaagatcaagggttgtgggcgagcgaagatattgagtttactgatacaatga

SEQ ID NO: 282702 - DNA, 976 bp, Unknown
  Bacterial polypeptide expressing nucleotide sequence isolated from the Sargasso Sea
tttgatataagtaaagctaagattagccatttaccatattctttgcgtgtgctacttgaaaattatgttagaaataacaaagctatttccaaagacgttattggtaagtttgaggcatggaatggtagcgtaaaagatcaaactgaaataacattctttcctagtcgtgtgatcatgcaggacttcactggtgtaccagctgttgttgatttagcttctatgagagatgcagtaaaagcacttaatggagatccttcattaatcaatccgcaatgtcaaactgatttagttattgatcattctgtaatggttgatcattatggttcgtctgattccaaagatctaaacactaaacttgaatataaaagaaatattgagagatataggttattaaaatggggacaaggtgcattcaaaaatttaagaatagtacctccaaataatggcattatccatcaaatcaatattgaatatatttcacaagtaatttttaacaagaataatattttatatcctgataccgttgtgggcacagattctcatacaaccatggtaaatggtttaggtgtgttaggctggggagtaggcggcattgaggctgaagcagctatgcttggtcagcccatacctatgttattaccagaagttattggatttgaactgagtggtaaattagaaaaatcaactacagcaacagatttagtattaactatagtagaacaactaagaaaagccaacgtggtaggaaaatttgttgaattttacggggacgcattaaatagtttatctattgcagatagatgtactattgctaatatggctccagagtatggtgcaacatgtggtttctttccaatagacgatatgacattaaaatatatgcataccactggcaaagatgctgatcagataaaaataattgaaagttattcaaagagagttggactatttagagagtcttcagaaaaaattatat

SEQ ID NO: 282703 - DNA, 876 bp, Unknown
  Bacterial polypeptide expressing nucleotide sequence isolated from the Sargasso Sea
cttcccaattgatcatgagactttaaaatacttgaaaacgtcaggaagaaacaatgatgaaataaacattgttgaaagctatgcaaaagagcaaggcttatggacaagtgataatattgagttttctgagactatatcgcttgatatgtcaactgttgtaccaacaatttctggacctaagagacctcaggacaaagtttttttaaatgaagcatccacagaatttaaaaaggcatttagaagcacaactggaaaaaataaaaacagtatatcaaaagttaatggagctgaatttgaaattagagatggctccatactcattgcagcaataacatcttgtacaaatacatctaatcctaatgttttaattggagcaggtttacttgcaaagaaggctattgagaaaggactaaaaactaaaccttgggttaaaacttcactagccccaggatctcaggttgtaactgattatttagaaaaatctggacttaacaaatacttggacgaattaggatttaatcttgtaggatatggatgcacaacatgtattggaaattctggaccgctcccagaaaatattgttgaagcaattgaaaaagaaaatatttatgccgtatctgtattatctggtaatagaaattttgaaggccgtatttcaccacatataaaagcaaattaccttgcttcacctccattagttgttgcatatgctttggcaggccatatggaatttgatttttacaataattctttaggaaaagatgaaaatggtaaggaaatttatttaaaagatatttggccttcaaataaagaaatagaagaaactttaaaaaactcattaaatgcagatatgtttataaaaagatattccaatat

SEQ ID NO: 282704 - DNA, 749 bp, Unknown
  Bacterial polypeptide expressing nucleotide sequence isolated from the Sargasso Sea
ttttgatactcaaaaaaaaatcatcattgataaaagagaatataagtattttgatttaaatactctctcacaaatttataattttgaattaccaaaaattcctaattcaataaaaataataattgaaaatcttctaagaaacgaagatggtgaagcagtaacaagagaaatgatagataatctatgcaacaaaatttctgaaccattagaaaactttgaaatatcattctcgcctgcacgtgttcttatgcaggatttcaccggagttccagctgtggctgatttagctgctatgagagaggcattgagaaagaaaggtataaatcctagtaacataaaccctttatcaagagttgatttggttattgatcattccgtgatggtagattattttggaaatgatagtgcttttgaagacaatgtaaaaaaagaattcgatcgtaacaaagagaggtatgaatttttaaaatggggtcaaaaaacatttgataatttttacttagtgccaccaggggctggaatttgccatcaagtgaatctggagaatattgctaaaacaatatggtcaaaaaaaataaaaaatgaaagttatctttatccagactcagttgtgggtactgatagtcatactacaatggttaatgcactttcagttctgggttggggtgtcggtggtatagaggcagaggctgcaatgttagggcaaccaatatctatgaatattccaaaggtagttggctttaaattaa

SEQ ID NO: 282705 - DNA, 943 bp, Unknown
  Bacterial polypeptide expressing nucleotide sequence isolated from the Sargasso Sea
atgaaaccaggaacaaaaaattcttacaattctttatctgaaataataataaattcaaaaaaatacaaatattactctttaagcaaagctgagagcaatggattaaaaggtatctctaaactacccaaatcattaaaagttcttcttgaaaatttattgagatatgaagatgatttatcagtaaccaaaaatcaaattgatgcgctgaaaaattggttagaaactaaaaaatcatcaactgagatagcatacaggccagcaagagtattgttgcaagattataccggtataccagcagtagcagacttagcagctatgagagaagctgttaaagaaaaaaatattgacccaaattcaattaatccactttcgactgttgatttagtcattgatcactctgtgcaagttgatcaatcttctaaggcagattcatttgagaaaaatgtaaatattgaatttaaaagaaatgctgaaagatattcatttttaaaatggggtcaggatgcctttaataattttagaattgtgcctccaggaacaggtatatgtcaccaagtaaacttagaatacttatctaaagttgtttggtgtgaaaagtttagaaatgaagattatttattccctgacactttggttggtacagatagtcatacaaccatggttaatggtttatcagttttaggatggggagtaggaggcattgaggctgaagcaggaatgcttggacaaccaatatctatgcttattccagaagtaattggatttgaagtaaaaaataaaatgccagaaggaacaacggctacagatttagttctcacaatagtaaaaatgctgagagataaaggagtagttggaaaatttgttgaattctatggagaaggtttaaagaatctgactttagcagacagagctactattgcaaacaggctccgaatatggggca

SEQ ID NO: 282706 - DNA, 823 bp, Unknown
  Bacterial polypeptide expressing nucleotide sequence isolated from the Sargasso Sea
aatgccgagatgtttattcaaagatattcaaatatttcagaaggaccaactcaatggcaaaaaattaaaactgatgaaagcagtatttataaatgggacgaacgttcaacatatgttaaaaaacctcctttctttgacaaattatccgatgaacccgaaggttttaaagaaattaaggatgcaagacctttattaatattaggtgatatggttacaactgatcatatttcaccagcaggtaatattcaaaagaatagtccaacaggtgaatattttatggagcaccaaattcttccaaaagattataattcttatggatcaagaagaggaaatcatgaggtaatgatgagaggaacatttgcaaatattagaataagaaatgaaatagccccaggtacagaaggaggattcacaaaactttatccagaggaaaagataatgccagtttatgatgctgtagtagaatataaaaaaagaggtacagaccttgtggtaattggaggaaaagagtatggaactggttcatctagagactgggctgcaaaaggaactaaacttttaggtgttaaggctgtattggctgaaagctttgaaagaatccatagatcaaatttaattggaatgggtatcttaccgttacaatttttagaaaagcaaaatagaaaaaacttaaattttaaaggatctgaattaatttcaattattgatattgagaaaggtattaatcctggcgaaaatgttgaagtagagattaaatttcaatctggagacattaaaaaaattaaaatgttaagtaggatagatactaaaaacgaactagaat

SEQ ID NO: 282707 - DNA, 643 bp, Unknown
  Bacterial polypeptide expressing nucleotide sequence isolated from the Sargasso Sea
tattccctgaatacacttgttgggacagatagtcataccacaatggtaaatggtttatcagttttaggatggggagtcggaggaatagaagcagaagcaggtatgcttgggcaacctatttctatgttaatacctgaagtagttggattcgaagtaaaaaacaaacttccagagggtacaacagctacagatttagttcttacggttgtaaaaatgttgagggataaaggagtggttggtaaatttgtcgaattttatggagatggtttaaaaaacttaactttagcagacagagcaactatagctaatatggcaccggagtacggtgcaacttgtggattttttccaattgatgatgaaactttaaaatatttagagttttcaggtcgagacaaagaccaggtacaaatagtaaaacagtatgccaaagaacaaggtttatgggtaagtagtgagattgaatttagtgacactctaactttggatatgttaactgtagttcctacaatatctggacctaaaagacctcaagacaaagttttactaacagatgcatcacaaaattttaaagagaattttaaaaaatacactaatagagatgactttttaaaagcaaaggttaataattcagattttgaaatac

SEQ ID NO: 282708 - DNA, 973 bp, Unknown
  Bacterial polypeptide expressing nucleotide sequence isolated from the Sargasso Sea
gtagcttatgcgatcgcaggatcaatgaaaattgatttatataaagaacctttaggaaaaaacaaagatggtaataatgtttatttgaaagatatttggccaacgaataaagaaattgaggaaacactaagagtttcccttaatgcagaaatgtttgttaaaagatattcagatgtttccaaaggaccaattcaatggcaaaacattaaaactaaaaagagtagtatttacgattgggaagataattctacatatgtaaagaaaccaccattttttgataatttatctatcgagccagagggttttaaagaaattaaagatgcaagaccattactaatattgggagatagtgtaacaactgaccatatttcaccagcaggaacaatccaaaaagaaagtcctacaggtgattattttatggaacatcaaattttacccaaggactataactcctatggttcaagaagaggaaatcatgaagtaatgatgagaggaacttttgcaaatattagaataaaaaatgaaatggcacctggaacagaaggtggatacactacattatatcctgagggaaaagttatgccagtatttgaggcagtccaggaatataaaaaaagaggaacagatctagttgtaattggaggcaaagagtacggtacaggctcttccagagattgggcagcaaaaggtacaaaattacttggaattaaagtagtaattgctgaaagcttcgaaagaattcatagatcaaatttgataggcatgggagttttacctttacaatttaccaatggaacaaataggttaaatttaaatctacaaggatctgaactaattagtataaataacatcgaaaaaggtttttatcctcaagaccaagtagaactagaaatcaaatacttgtcaggtgagataaaaaaagtaaaaactctgtgcagaatagatacaaataatgaaactggagtattataaa

SEQ ID NO: 282709 - DNA, 563 bp, Unknown
  Bacterial polypeptide expressing nucleotide sequence isolated from the Sargasso Sea
ttatggagcaagaagaggtaatcatgaagttatggtacgtggagcttttgaaaatattagaataagaaatgaaatagcctctggaactgaaggaggttttaccaaactatatcctgaaggaaaagttatgagtatttatgaagcagctatggaatataagaaaagaggaaacgacctagttgtgattgctggcaaagaatatggggcaggctcttctagagattgggcagcaaaaggaacaaaattattagggataaagactgtaatcgcagaaagttttgaaagaattcatagatcaaatttgattggaatggggatacttccacttcaatttaaagatggatttaataggaaaaaactaaatctcaaaggatctgagcttattactattattggtattgaaaaaaatataactccaggccaagaggttgaatgtgaaattaagtacgctgatggagtagcaaaaaaaattaatttgctttctagaattgatacagcaaatgaagttgaatattataaaaatgacggaatactaaaatacgttttaagaagtatgctataat

SEQ ID NO: 282710 - DNA, 736 bp, Unknown
  Bacterial polypeptide expressing nucleotide sequence isolated from the Sargasso Sea
aaaggaagcatttacaactgggaggaaaactctacatatgtaaaaaagcctcctttttttgaaaatctatcagataaaccagaaggatttaaagaaattaaacatgcaagacctttattaattttaggcgatatggtcactacagatcatatttctccggctggtagtattcagaaagaaagtccaacaggaaattattttatgaaacatcaaattttgccaaaagattataattcttatggctcaagaagaggaaatcatgaagtaatgatgagaggtacgtttgctaatattagaattaaaaatgagatggctcctgggacagagggagggtttacaaaattataccctgatgagaaagtcatgcctatttacgatgctgttgttgaatataaaaaaagaggagttgatttagttgtgattggaggaaaagaatatggaacaggctcttcaagagattgggctgcaaaaggaacaaaactactaggtattaaggctgttatagcagaaagctttgagagaattcatagatcaaaccttataggaatgggtattttgccattacaatttatagaaagtatgaataggcagaatttaagtttaaaagggtctgaattaatttcaattctaggtctagaaaaaggaataaatccaggagatcaattgaatgttgaaataaaatacgcaacaggagatattaaaaaaataaaaatgttgtgcagaatagatactaaaa

SEQ ID NO: 282711 - DNA, 635 bp, Unknown
  Bacterial polypeptide expressing nucleotide sequence isolated from the Sargasso Sea
taatattcaaaaagaaagtccaacaggtgagtactttatgaaacatcagattctgcctaaagattataattcatatggatctagaagaggaaatcatgaggttatgatgagaggtacttttgctaacattagaattaaaaatgaaatggctcctggaactgagggtggttttacaaaattatatccagaggaaaaaataatgcctatttacgatgcagtagtagagtataaaaaaagaggcactgatcttatagttataggtggtaaagaatatggcacaggatcatctagagattgggctgctaagggaacaaagttgttaggagtaaaagcagtaatagcagaaagttttgagagaattcatagatcaaatttaattggtatgggaattttgcccttacaatttattaacgatgttaatagaaaaaacttaaaattaattggatcagaattgataagtattaatggtatagagaatgggttaaatccatcagatcatttaacagttgagataaaatatctatctggcgaaataaaaaaaataaaaacattgtgtaggatagatactaaaaatgaattagagtattacaaaaatggtggaattcttcagtatgtgcttagaaatatgatttaaa

SEQ ID NO: 282712 - DNA, 751 bp, Unknown
  Bacterial polypeptide expressing nucleotide sequence isolated from the Sargasso Sea
ctggacatgggcactgtcgaggccagccttgccgggcccaaacgcccccaggaccgcgtcgccctgccgaatgtaggccaagcgttcagcgattttctcgacctgcaattcaagcccaccagcaaagaagaaggccgcctggaaagcgaaggcggaggcggcgttgccgtgggcaatgccgacctggtcggcgaggcggattatgaatacgaaggtaacacctatcgcctgaaaaacggcgcggtggtgatcgccgcgattacctcctgcaccaacacttccaaccccagcgtgatgatggcggccgggctggtggcgaaaaaagccgtggaaaaaggcctgacccgcaagccctgggtgaaaagctccctggcgccgggctccaaagtggtcaccgactactacaaggctgcgggcctcacccagtacctggacaagcttggcttcgacctggtgggctacggctgcaccacctgtatcggcaactccggccccctgcccgagccgatcgaaaaagccatccagaaggccgacctcaccgtggcctcggtgctgtccggcaaccgtaacttcgaaggccgcgtgcacccactggtgaaaaccaattggctggcctcgccacccctggtcgtcgcctacgcgctggccggcaccgtgcgcatcgacatcagcagcgagccgctgggcaatgaccagcagggtaatccggtgtacctcaaggacatctggcccagcagccaggaaatcgccg

SEQ ID NO: 282713 - DNA, 785 bp, Unknown
  Bacterial polypeptide expressing nucleotide sequence isolated from the Sargasso Sea
tctcaagtagttacagattacctagcaaaagctggattaaacacttaccttgataaacttggttttaatttagtaggttatggatgtacgacatgcattggcaattcaggtccactacctgaaaatattgttaatgccattcaaaaagaaaatatatatgcagtatcagttttatcaggaaatagaaattttgagggaagaatttctcctcatattaaagctaattacctagcttcgcctccattagtagtagcttatgctttagcaggtcatatggaatttgatctttataaagatgctctgggtaaagacaaagagggaaatagtatttatttaaaagatatttggccgaccaatgaagaaatagaagatactttgaaacaatctttaaatgctgaaatgtttattaaaagatattcaaatgtttctgaaggacctagtcaatggcaaaaaattaagactgaagaaagtagcatttataattgggacgaaggatcaacttatgtaaaaaaaccaccattctttgataaactttcggatcaaccagagggatttaaaccaattaaagatgcaagacctttattaattttaggagatatggttactacagatcacatatcaccagcaggaaatatccaaaaagatagtcctacaggagaatattttatggagcaccagattttaccaaaggattataactcatacggatcaagaagaggaaatcatgaagtaatgatgagaggaacatttgcaaatattagaattagaaatgaaatggctccagg

SEQ ID NO: 282714 - DNA, 967 bp, Unknown
  Bacterial polypeptide expressing nucleotide sequence isolated from the Sargasso Sea
ctggtcctcaccgtgaccaagatgatgcgcgactatggtgtggtcgcgaagttcacagaattctttggaccaggtgtcgccaacctcacactcgaagaccaagccacgctgtcgaatatgtcaccggaatttggctcaacctgcgccttcttcccggtcgatgatgacacgatcaaatatctttcgaacaccggccgcgacgccgaccgtatcgctttggtcgaagcttatgccaaagcgcaaggctattggcggcccgacatggcggaccctgtcttcacggggacgattgagctcgatctttcatccgttgtccccagcatctccggccccaaacgcccgcaagaccaagtgctcttgtccgaggcggataccaagtttgccgaggccatggtcattgaattcggaacggcggccgacgatgcgacggccatccaagtcgaaggcgaagacttctcggtcacacatggcgatgtcttcatcgccgccatcacgtcctgcacgaacacatcgaacccgagcgttctgattgccgcgggtctggtggcgcgcaaagcggcagcgctgggcctcaatcgcaagccttgggtcaaaacctcgttcgcgcccggctcgcaagtggtcaccgattacttggataaggcgaacctgacccaagatctcgatgcgctcgggttcaacttggtgggatatggttgcacgacctgtatcggcaattctggtccgcttcagccggagatctcgaaagcgattgcagacggcgatctagtgtcctgttcggtgctgtcagggaaccgaaatttcgaaggccgtatcgggccggatctcaaagcaaactatctggcatccccgccactggttgtggcctatgccatcgcgggatcgctcaagatcaacatcaccaaagaaccgctcggccaggataaagacggcaaggatgtcttcctgaaagacatctggccgacct

SEQ ID NO: 282715 - DNA, 682 bp, Unknown
  Bacterial polypeptide expressing nucleotide sequence isolated from the Sargasso Sea
gttgatattaggtgatatggttacaacagatcatatttcaccagcaggaagtattcaaaaaaatagtccaacaggcgagtatttcatgaaacatcaaatcttacctaaagattataattcatatggctcaagaagaggaaaccacgaagtcatgatgagaggaacttttgctaatatcaggataagaaatgaaatggctcctggaacagaaggtggatttacaaaattatatcctgagggaaaagttttatcagtttatgatgcagtagtggaatataaaaatagaggtactgatttagtcgtaatcggtggtaaagaatatggaactggttcttcaagagattgggctgctaaaggaacaaaattattaggaattaaagcagtaatagccgaaagctttgaaagaattcatagatctaatttaattggtatgggtgttttacccttacaatttgtaaatgaagttaatagaaaaaatttaaatttaattggttcagaattaataagtattattgatattgaaaaaggaattaatccatcagatgagttgacggtagagataaaatatgcatcaggtgaaatgaaaaaagttaaaactttatgcagaatagatactaaaaatgaattggaatattataaaaacggtggaatacttcagtatgttttaaggaatatgatttaa

SEQ ID NO: 282716 - DNA, 964 bp, Unknown
  Bacterial polypeptide expressing nucleotide sequence isolated from the Sargasso Sea
ttttccggcagagatcaattgactgtaaaaattgtggaggattacgcaaaagcccaaggtttatgggctagtagtgaaatggaatttacagatactcttattttagatatgtctactatagttccaacaatctcagggcctaagagacctcaggataaggttttactaacagatgcttcaaataattttaaaaaaagtttcacagaaattacaaataaaaaagatttttcttcatcgaaagttaataatacagattttgaaattaaggatggttctattttaattgcagcaataacttcatgtactaatacatcaaatccaaatgtgctcattggagctggattattagctaaaaaagctgttgaacttggtcttgaggtgaaaccatgggtaaaaacttctttagcaccagggtctcaagttgtgacagattatttacaaaaagcgggattaaatacatatttagataaattaggatttaatctagtaggctatggctgtacaacatgtataggaaactctggacctttagcagaaaatattgttgaagcaattcaaaaagaaaatatttacgcagtgtcagttttatctggaaacagaaattttgaaggaagaatatcgcctcatattaaagcaaattatttagcatctcctccattagttgttgcttatgcgttagcaggacatatgaattttgacttatataaagattcttttggtaaagatcaaaatggaaaagaaatttacttaaaaggtatttggccttcaaataaagaaattgaagaaactctaaaaaaatcattgaatgcagaaatgtttatcaagagatattcaaatgtatcagagggaccgaagcaatggcaacaaattgaaacggttaaaagtgatatatacaattgggatacaagttctacttatgtaaagaaaccaccattttttgataatttgccagaaaaaccagaag

SEQ ID NO: 282717 - DNA, 805 bp, Unknown
  Bacterial polypeptide expressing nucleotide sequence isolated from the Sargasso Sea
atttctggtccaaaaagacctcaagataaagttttgttaactgaagcttcgcaaaattttaaaaaagttttggaacaaatcggtaaaaaaacaaaaatatctacttcaaaagttaaaaatgaagaattcgaaattaaagatggagatattttaattgctgctataacttcttgtacaaatacatccaatcctaatgttttaattggggcaggattacttgcaaaaaaagcagttgaaaaagggttaacaacaaaaccttgggtaaaaacttctttagcacccggatctaaagtagttactgattatttagaaaaagcaggactaaataaatatctagaccagctaggttttaatttagttggttatggatgcacaacttgtattggtaattctggacctttaaagaaagatatttcagatgctgtaaaaaaagaaaatatttatgcagcctctatactatcaggcaatagaaactttgaaggaagaatctcaccattagtaaaagctaactatctagcttcaccacccttagtagttgcttatgcattagcaggaacaatgagttttgatttgtataaagattcattgggaaaagataatgaaggtaaaaatgtttatttaaaagatatttggccaagcaataaagaaattgatgaaactttaaaaaattcattaaacgcagatatgtttgtaagaagatattcaaatatatccgaaggtccagaacaatggcaaaaaattaaaactgagccgactagtatttataattgggaagaaagctctacttatgtaaaaaaacctcctt

SEQ ID NO: 282718 - DNA, 895 bp, Unknown
  Bacterial polypeptide expressing nucleotide sequence isolated from the Sargasso Sea
tcaaaaactgaaattgcttttagacctgcaagagttcttatgcaggattatacaggcattccagcagttgctgatcttgcagctatgcgtgatgctgtaaaatcaaaaaaaaaagacccaaaaaaaataaatcctttatctacagtagatttagttattgaccattcagtaatggtggatacttatgcttccaaagattcttttaaaaaaaatgttgaaaaagagttttcaagaaatggagaacgttattcttttctgaaatggggtcaacaagcctttgataattttagagttgttcctccaggaactggtatttgtcatcaagttaatttggaatatttatcaaaagttgtttggtcatcagacaattttgcatatccagatactcttgtgggaactgacagtcacacaaccatggttaatggcctttcagtccttggttggggagtgggagggattgaagctgaagcagcaatgttagggcaaccaatatcaatgttaattcctgatgtcgttggttttaaaattcaaaacaaacttccagaaggaactactgctactgacttggttttaacaatagttcaaatattaagaaacgaaggagtggttggaaaatttgttgagttttatggggatggactaaaaaatctatctttagcagatcgagctactattgcaaatatggctcctgaatatggagcaacttgtgggttttttcctatcgatgaagaaactttaaaatatttaaaattttctggaagagaccaacacacaatatcacttgtagaaaaatattctaaggaacaaggactttgggctgatgaaaacatttcttttactaaaattttagatttagatttatctaaagttgttccaagcatttcaggcccttaag

SEQ ID NO: 282719 - DNA, 781 bp, Unknown
  Bacterial polypeptide expressing nucleotide sequence isolated from the Sargasso Sea
caggaaagctcaacatacgtaaagagaccaccttttttcgataatttaccggataaacctgaaggatttaaaaaaataaaagatgcaagaccacttttaatactcggagatacagtaacaactgatcatatctcaccagctggatcaattaaaaaagatagcccaacaggtgattattttatgaaacatcaagttcaacaaaaagattttaattcttatggcgctagacgaggtaatcatgaagttatgttaagaggaacatttggaaatataagaataagaaatgaaatggcacctggaacagaaggtggtttcacaatactacagccagatggaaaacagatgagtgtttttgaggcgtctgaagaatacaaaaaaagaggtaacagtcttgttgtaattgctggtaaagaatacggaacaggttcttcgagagattgggcagctaagggaacgaagttattaggtatcaaagcagttattgctgaaagttttgaaagaattcatagatctaatcttgttggaatgggaattttacctcttgaattcaaaacaggatttgacagaaaaaaattgaatattaaaggtacagaattattcactattattgacattgagaaaggaattaatcctagagcagaagtcagttgtgagattaaatattccgatggatcaagtaaaaccattaaacttttatcgagaattgatactgaaaatgaaattgaatactataaaaatggcggaatccttcagtatgttttaaggaatatgatcaactaaa

SEQ ID NO: 282720 - DNA, 880 bp, Unknown
  Bacterial polypeptide expressing nucleotide sequence isolated from the Sargasso Sea
aactttgaaggaagaatatctccacacattaaagcaaattatttagcatcaccacctcttgtggttgcatattctttagcgggacacatgtcttttgatttatataaagactcatttggaaaagataaaaatggaaaagaaatttatctaaaagatatttggccatcaaataaagagatagaagaaactcttaaaacgtctttaaatgcagaaatgtttattaaaagatattcaaatgttttacaaggccctaaacaatggcaagaaattaaaacaacaaaaagtagtatttataattgggatgaaagctcaacttatgtgaaaaaaccacctttctttgataatttgtcagatcagccagaaggatttaaagccattaaagatgcaagaccattactaattttaggagatatggtcacaacagatcatatttcaccagcaggaaacattcaaaaagaaagtccaactggagaatattttatgaaacatcaaattttaccaaaagattataattcgtatggatcacgaagaggaaatcatgaggttatgatgagaggcacttttgcaaatataaggataagaaatgaaatagctccgggaacagaaggtggatttacaaaattatatccagaagaaaaagttatgccaatttatgatgcagttgttgaatataaaaaaagaggaactgatcttgttgtgataggaggaaaagagtatgggacaggttcatctagagattgggccgcaaaaggtacaaaattacttggtgttaaagtagtaatagctgaaagttttgaaagaattcatagatctaatttaattggaatgggaatattgccgttacaatttaaagataatctaaatagaaccaatcttaaaa

SEQ ID NO: 282721 - DNA, 785 bp, Unknown
  Bacterial polypeptide expressing nucleotide sequence isolated from the Sargasso Sea
catgaattttaaaagtaaaaattcgtttcaatcattagataaactagaagtttcaggcaagtcatactatttttacaacctttcaaaagcggaaaaaaatggtttaaaagatataaacaaactaccaaaatccataaaagttcttttagaaaacctattgcgtttcgaggataatgtcacggtagatagaaaacaaatagaaagtattgcaggctggttaaaaacaaaaagttctaaaatggaaatagcttacagacccgctagaattttattacaagattatacaggaattccggcagtagctgatctagccgctatgagagatgcggtaaaatcaaaaaataaagaccccaaaaagataaatcctttatctgctgtagatttagtaatagatcactctgttcaagttgataattatgcaaacaaggattctttcacaaaaaatgttaaaaaagagttcgatcgtaatggagaaagatactcttttttgaagtggggacaaaatgctttcaataattttagagttgtacctccgggtacaggaatttgtcatcaagttaatttagaatatttatccaaagtcgtttggtccacagatattgacggaaaaactttcgcgtatcctgatactttagttggtactgatagccataccacaatggttaacggtctatcagttttaggttggggagttggtggaatagaggcagaagcagcaatgcttggacaaccaatttcaatgttaatacctgaagttattggttttgagattaaaggaaaactta

SEQ ID NO: 282722 - DNA, 888 bp, Unknown
  Bacterial polypeptide expressing nucleotide sequence isolated from the Sargasso Sea
catgagggacgccgtcaaatcaaaaaacaaagatccaaataaaattaaccccttatctacagtagatttagttatagaccattctgttatggtagataattatgcaaaaaacgactccttttcaaaaaatgttaaaagagaattcgatagaaatggtgaaagatattcttttttgaaatggggacaaaatgcttttaataattttagagttgtgccgcctggaactggaatatgtcatcaagttaacttagaatatttatcaaaagtagtttggtctactggtacaggtgatgatatttatgcttatccagacactttagtaggaaccgacagtcacacaacaatggttaatggtttgtcggttcttggatggggcgtaggtggaattgaagctgaggcagctatgctaggacaacctatttcaatgttaatacctgaagtaattggtttcgaaattataggaaaactaaaagaaggaacaacagcaagtgatttagtattaaccatagttcaaatgttgagaaaaaaaggtgttgttggaaaatttgttgagttttatggcgaaggtctaaaaaatttgtctttagcagatagagctacgatagcaaatatggcaccagaatatggtgcgacttgtggattttttccagttgatgaagaaacaataaaatatttaaaattttctggaagagataaagaaacaatatctcttgttgaaaaatattcaaaagagcaaggtttatggtccagtaaggaaattgaatttacagacaaagtttcacttaatttaaactcagtagttcctagcatatcaggccctaagagacctccagataaagttttattaactgaagcatctaaaaactttgataaagttttcaaagaaaa

SEQ ID NO: 282723 - DNA, 961 bp, Unknown
  Bacterial polypeptide expressing nucleotide sequence isolated from the Sargasso Sea
atgaaaaataaacttccagaaggcacaactgctacagacctagttttaacagtagtgaaaatgttaagagacaaaggtgttgtaggcaaatttgtagaattttacggagaaggtctaaaaaatctaacacttgctgatagagcaactattgccaatatggcacctgagtatggtgctacctgtggattttttccaattgatgaagaaacattaaaatatttagaattttcaggaagatcaaaagagaatattcaaatcgtagaaaaatatgcaaaagaacaaaatttgtgggcaagtgaagatattgttttcactgatactttatctttagatatgtctacagtggttccaacaatttctgggccaaaaagaccacaagataaagttcttttaacagaggcatcaaaaaattttattaaagtctttgaagatatatgtaaaaaaactgatccaacagtagcaaaagttaaagacacagattttgagataaaagatggagatatattaatagcagcgattacatcatgcacgaacacctccaatccaaatgtattaattggcgcaggactgctagccaaaaatgcaattgaaaaagggttaaatgttaaaccttgggtaaaaacatcattagcacctggatcacaagttgttactgactatttagataaagctggtttgagtaaatatttagatgaattaggttttaatttagttggttatggttgtactacttgtattggcaactctggacctttgccagataatattactgatgctgttaaagagaataatttatacgcagtttcagttttgtctggaaatagaaactttgaaggaaggatttctcctttagtaaaggctaactatttagcctcacctcctcttgtagtagcttacgcgattgcaggatctatgagaatggatttgtataaagatccaataggcaaaaatagtaaaggac

SEQ ID NO: 282724 - DNA, 651 bp, Unknown
  Bacterial polypeptide expressing nucleotide sequence isolated from the Sargasso Sea
tacaaagagagaaaaacctattcaagcagaagtttctggtgctgattttaaaatcacagatggagatattgtaatagcagctattacatcttgcacaaacacttcaaatccaagtgtaatgattggagcgggaatacttgcaaaaaaagccatagaaagaggtttaaaaattaagccatgggtaaaaacttctttggcccccggatcaaaagtagttacagactatttaaaaaaagcaggtttaaataaatatttagatgaactcggattcaatttagttggttacggttgcacaacatgtattggaaattctggaccactaaacaagaatatttctgatgcgatacataaacaaaatttatatgcagtttcagttttatcggggaatagaaattttgaaggaagaataagtccagatgttaaagctaattatcttgcctctccaccgcttgtagttgcttttgctttagctggtaatatgaattttgatatgtacaaaaattccctcggtactgacaaagacggcaaagaagtatttttaaaagatatttggccaagcaataaagaaattgaagatataatgttaaaatcaattaatgcagaaatgtttattgatcgttattcaaatgtttcagaaggtcctaaagaatg

SEQ ID NO: 282725 - DNA, 835 bp, Unknown
  Bacterial polypeptide expressing nucleotide sequence isolated from the Sargasso Sea
tgtgaccttgattccctgcctttcactattcgattattgctggaagccgcgctgcgaaagtgcgatggttttctcgtaactcgtgaagatgtagaacgcattgcatcatggtcaccctcaatgactccagaagaaattccattctcacctagtagggtaatcttacaggacttcacaggagttcctgctgttgttgatattgctgccctcagagacgctatggtagagttgggcggagatcctgagaaagtaaacccacaagttccggttgacttggtaatcgaccattccgttcaggtagatgtctccggcttgtttccagatgcaagagagagaaatttggagattgaatatcaacgaaacatggagcgttatgaattcctaaaatggggtcagaaaagtttggataatttccgtgcagtaccacctggacgcggtattgttcatcaggtgaatctagagtggattgctagtgttgctagagaagaaaatggtgtatggttacccgacactctagtcggcacagatagtcacacaaccatgatcaatgggctcggagttttaggttggggagtcggtggaattgaggcggaggcagtaatgttaggtcagccgatttacatgcttctcccagaagtctgtggtttcgagttaaccggctcgctcagacctggagtaacggccaccgatatgacactcagaatagtacagatgttgagggagcacggagtggttggaaagtttgtagaattccatggctcagggcttgcaaatctaagccttccagacagagcaacaattgctaacatggctcctgaatacggagcaacatggg

SEQ ID NO: 282726 - DNA, 557 bp, Unknown
  Bacterial polypeptide expressing nucleotide sequence isolated from the Sargasso Sea
tgccagaagaggaaatcacgaagtaatgatgagaggaacatttgctaatattagaatacgtaatgagatggcacctggcacagaaggtggatttacaacgctttacccagaaaaaaaagtgatgccaatttatgatgcagttgttgaatacaaaaaaagaggaacagatttagttgttatcggtggaaaagaatatggaactggctcctcaagagattgggcagcgaaaggaactaaacttttaggagtaaagactgtaattgctgaaagttttgagagaattcatagatctaacttaattgggatgggtattttaccattacaatttattgataatattgacaggaaaaacttaaaattaattggttcagaattgataagtataattaatcttgaaaatggaattaatccttctgaaaaagtcaaagtagaaattaagtatgcttcaggtgaaattaaaacgatccaagcactttgtagaatagatactaaaaatgagctagagtattataaaaatggaggaatattacaatacgttcttcgaaatatgatttaat

SEQ ID NO: 282727 - DNA, 777 bp, Unknown
  Bacterial polypeptide expressing nucleotide sequence isolated from the Sargasso Sea
aaagagaatgttgatattgagtttgatagaaactttgagagatattcatttttaaaatggggacaacaagcctttaataattttagaattgttccaccaggcactggtatctgtcatcaggtaaatttagaatatttatcaaaagtagtatggaatgaaaaatttgaggataaagagtatttatttccagacacgcttgttggaactgatagtcatacaacaatggttaacggtttgtcagtactcggttggggtgttggaggaattgaagcagaagcaggtatgctaggacagcctatatcaatgttgataccagaagttattggatttgaaatgaaaaataagctacctgagggtacaactgctaccgatctagttttaacagtagtgaaaatgttaagagacaaaggtgtagttggtaaatttgtagaattttatggagagggtctaaaaaatctaacacttgctgatagagcaaccattgcaaatatggcacctgagtacggtgctacctgtggattttttccgattgatgatgaaactttaaaatatttagaattttcaggaagatctaaagagaacattcaaatcgtagaaaaatatgcaaaagaacaaaatttgtgggcaagtgaagacgttgttttcactgatactttatctttagatatgtccacagtagttcctacaatttctggaccaaaaagacctcaagataaagttcttttaacagaggcatcaaaaaattttattaaagtttttgaagaagtttgtaaaaaa

SEQ ID NO: 282728 - DNA, 772 bp, Unknown
  Bacterial polypeptide expressing nucleotide sequence isolated from the Sargasso Sea
aagatattcctttttaaaatggggacaacaagcttttaataattttagaattgttcctccaggcacaggtatatgtcatcaagttaatttagagtatttatcaaaagttgtttggtcagaaaaatataaaggagatgaatatttatttccagatacccttgtaggaacggatagtcataccacaatggtaaatggattgtcagtacttgggtggggtgttggtggaatagaagcagaagcaggaatgcttggacagccaatttcaatgctaatcccagaagtaattggttttgagcttaaaaataaaatgcccgaaggtacgaccgctaccgatttagttttaactgttgtaaaaattttaagagacaaaggtgtagtgggaaaatttgttgaattttatggaaacggattaaaaaacttatcccttgctgatagagccactattgcaaacatggcaccagagtatggtgccacttgtggtttttttccaattgatgatgagaccttaaaatatttaaagttttcaggtagagatgataatactctatcaattgtagaaaaatatgccaaagagcaaggtttatgggcaaataataatattgaatttacagacactgtatcattagacatgtcttcaattgttccaacaatttctggacctaaaagaccacaagacaaagttttattaaccgaagcatcctctggatttgcaaaagtatttgaaaatataacaggcagaaaagaaaaatatatttcaaaagtcagtgaaaaa

SEQ ID NO: 282729 - DNA, 574 bp, Unknown
  Bacterial polypeptide expressing nucleotide sequence isolated from the Sargasso Sea
cggatcacaagttgttactgactacctagaaaaagctggcttaaataaatatttagatgaattaggttttaatcttgtaggatacggatgcactacatgtatcggaaattcaggaccattaaacaaaaatatatcagatgcaatcaatgaaaaagatttatatgcggtttcagttttatctgggaacagaaactttgagggtagaataaatcctgatgtaaaagcgaattatctagcttcccctcctttagttgttgcttatgctttagcaggaaatatgaattttgatttgtacaaaacttctctaggtaaagataaagctggtaaagatgtcttcttaaaagatatttggcctagtaacaaagaaattgaagatattatgcttacatctttaaatgctgatatgtttaagaaaagatattctaatgtttcagaaggacctaaagaatggagagaaattaatacagttgatagtgacatttataactgggaacaaaattcaacatatgtaaaaagaccacctttttttgataatcttccagataaacctgagggttttaaagcaatcaatgat

SEQ ID NO: 282730 - DNA, 916 bp, Unknown
  Bacterial polypeptide expressing nucleotide sequence isolated from the Sargasso Sea
agatatgaatttctaaaatgggggcaaagttctttcgataacttctatctagtacctccaggagcaggtatctgccatcaagtaaatctagaaaatatagctaagaccatttggttgaaggaaattgacaatcaaaactatttatttccagattcagtagttggaactgatagtcataccacaatgatcaattcactctctgttttaggatggggtgtcggaggaatagaagctgaggcagctatgctaggacaagcaatttccatgaatattccagacgtaattggttttgaacttaatggatcattaaaagaaggaattactgctactgatttagtcttgtctataactaaaattcttagggataaaggtgttgttggaaagtttgtagaattttatggaagaggtttaaaaaatttatcattagctgatagagcaacgatttcaaacatggcaccagaatacggagcaacttgtggatttttcccaattgatgaagaaactataaattatcttgaactaactggtaaagaaagagagcatcttaatattgttaaagaatattcaaaaaaacaaactctatgggcagatgaaaactactcaccagatttttctgacaaaatattattagatttagatacagtagaaccaactttagcagggccaaaaaggccccaagataaaattcttttaaaagaggtgccggaagaatttaataagatagacagcaatcaaagtattaataaaaacaaactaaatactggtgatattgtaatcgctgcaattacaagctgcacaaatacatctaatcctaatgtaatgatcgctgcaggcttagttgccaaaaaggcaattaatttaggacttgaggaaaagtcttgggttaagacaagtctagcaccaggaagtaaagtgt

SEQ ID NO: 282731 - DNA, 847 bp, Unknown
  Bacterial polypeptide expressing nucleotide sequence isolated from the Sargasso Sea
cagtagatcatttttcttacctgaagctctaaacctcaatatagaaaaagaattcgaacgaaacacagaaagatatcaacttttaaaatgggcacaaaatgcttttgacaattttaaaattgttcccccaggtacaggaatcgttcatcaagtaaacttagaatatttggctgaagtaatactcaacaactctgatgatcaaacacccgtagcatttccagatacatgcgtggggactgactcacacaccactatgataaatggattaggagttttaggatggggcgttggtggaatagaagcagaagcagtaatgctcgggcaaccttattacatggttgtccctgaagtagtaggcgtaagattaacaggtaaacttcctgaaggagctaccgctacagacctagttctttcaatagttgaaatgcttagaaaagtgggagttgtagaaaaatttgttgaattttatggccctgggctaaaagatctacctttagctgacagagctactattgcaaatatggcacctgaatacggcgcaacatgcggtttctttcctatagatcaccaaacaatcaaatatcttagagatacaggaagagatgcagaaacatgtgatttagttgaggaatactcaaaaatcaacaatttcttttacgatgaagttaatgaaccttcttatactacagaattaaattttgatatctcatctgtatctccatcaatggcaggcccaaaaagacctcaagacaatgtcacattacaaaatgtagcaaataatttcaaagattcattcaaaatttcttcgtccaaaaatataatttccatagatgatcaaaaagtagaa

SEQ ID NO: 282732 - DNA, 851 bp, Unknown
  Bacterial polypeptide expressing nucleotide sequence isolated from the Sargasso Sea
aatgagggatgcggtaaaagataaaaataaaaaccctgataagattaatccattatccactgttgatttagttatagatcattcagtgatggtcgatgaatatgcttcaggaaaatcatttaatcaaaatgttgaaagagaattttcaagaaatggtgaacgatattcttttttaaaatggggacagaaagcattcaataattttagggttgtcccacccggaacaggaatttgccatcaagtaaatttagaatatttatctaaagttgtttggtcatcaaaaagtggaaatgatttatatgcttatccagatactttagttggaaccgatagtcatacaacaatggtgaatggtttatctgttttaggttggggtgttggcggaatagaagcagaagctgcaatgttaggtcaacctatctcaatgttaatcccagaagttgttggagttgaacttaaaggaaaattaaaagaaggaacaactgcaacagacttagttttagtcattgttgaaatgcttagaaaaaaaggtgtggttggaaaatttgtagaattttatggcgaaggtttaaaaaatttaactttggctgatagggcaacaattgcaaacatggctcctgaatatggagcaacatgtggttttttcccagtagatgatgaaactcttaaatatttaaaattatcaggaagagataaagcgacaattgatttggtagagaaatattcaaaagaacaagggctttgggcaagcaatgacgttgtgtttaccgatactctttctttagatgttagcagtgttgtaacaagcatttctggacctaaacgaccacaggataaagttttgcttactg

SEQ ID NO: 282733 - DNA, 811 bp, Unknown
  Bacterial polypeptide expressing nucleotide sequence isolated from the Sargasso Sea
atgaaatcacttgatacttttaaaactaaatcaaaaattaatataaatgatcaaatttatacatattttgacttaaataaacttgcaaatcattttgatttttcattatcttctgttccaagaagtttaaaaattcttttggaaaatttgatccgcaatgaagatggtaaagtagttacacgtgatattattgatttgatatgtaataatattcataaaaaagaaaaattattagaaatctcttttttcccaactagagttttaatgcaggactttacaggtgttccggctattgctgatttagcagctatgagagatgtacttaaatcaaaaaatattgatcctaaaaaagtaaatccagtctctcgtgtagacttagttattgatcattctcttatggttgatttatttggaaattcatcggctcataaagataatgtaattcttgaattttcacgtaatcaagaaagatatgaatttttaaagtggggacaaaattcttttaaaaatttctacctagttcctccaggtgctgggatatgtcatcaagttaatttagaaaatattgcaaaaacagtttggattgattcttttgaaggtggaaattatatttatcctgattctgttgttggaacagacagtcacacaaccatggttaatgctttgtctgttttaggatggggagtaggagggatagaagctgaggcagctattttaggagagcctatctcactgaatattcctaaagtattaggttttaatatttatggatcattaaatgagggagtaactgctacagacctagttctaa

SEQ ID NO: 282734 - DNA, 585 bp, Unknown
  Bacterial polypeptide expressing nucleotide sequence isolated from the Sargasso Sea
tctgctgttgatcttgttatcgatcattcagtacaggtagatcagtctgctaaagcagattcttatgaaaaaaatgttgatatagaatttgaaagaaatggagagagatattcttttttaaaatggggacagcaggcatttgataactttagaatagttccaccaggaacaggaatttgtcaccaagtaaatctagaatatttatcaaaagttgtttggtcagaagaatttaaaggggaaaaatatctttttccagatactctagttggaacagatagtcatacaacaatggtaaatggtttatctgttttaggatggggtgtaggaggaattgaagctgaagcaggaatgttaggtcaaccaatatcaatgttaatacctgaagttattggttttgaaatgaaaaacaaaatgccggaaggtaccactgcaactgatttagtattaactgttgttaaaatgttaagagataaaggagttgttggtaagttcgttgaattttatggagaaggtttaaaaaacttaactcttgcagatagagctacaattgcaaacatggcgccggaatatggcgctacttgtggt

SEQ ID NO: 282735 - DNA, 858 bp, Unknown
  Bacterial polypeptide expressing nucleotide sequence isolated from the Sargasso Sea
aaataaaaaaaattcaaaaactgaaattgcttttagacctgccagagtacttatgcaagattatactggtataccagctgttgctgatcttgcagctatgcgtgatgctgtaaaattaaaaaaaaaagatccgaaaaaaataaatcctttatcaactgtagatttggttattgatcattctgtaatggtggatgcttacgcatcaaaagactcttttaaaaaaaatgttgaaaaggaatttttaagaaatggagaacgttattcttttttaaaatggggccagcaagcttttgacaattttagagttgttcctcctgggacagggatttgtcatcaagttaatttagaatatttgtcaaaggtggtttggacatctgataattttgcttatcccgatactcttgttggaactgacagtcatacaactatggtaaacggcctttcagtgctaggctggggagtaggtggtattgaagctgaagcagctatgttgggacaaccaatatcaatgttaattcctgaggttgtcggatttaaaattaaaaataaactttcagaaggaactactgctactgatttagttttgacaatagttcaaatattaagacaagaaggagtagttggaaaatttgttgagttttatggagatggtctaaaaaatctttcattagcagatagagccactattgcaaatatggctcccgaatatggagccacttgtggtttttttcctatcgatgaggaaactttaaaatatttaaaattttctggcagagatcagcacacaatttcacttgtagaaaaatattctaaagaacaaggactgtgggccgatgaaaatattgcttttacaaaatt

SEQ ID NO: 282736 - DNA, 870 bp, Unknown
  Bacterial polypeptide expressing nucleotide sequence isolated from the Sargasso Sea
cctcaattagtgaatttactttagcaaatggctctaaaggattattttacaatatttcttcggttgaaaaatttagtgattgtaaaattgaaaatttgccttattcaatacgtgtattacttgaaggtgcattaagaaattcggatgattttttaattactaatgaagacattaaaacaattgcagaatggaaaggagatggtgagaggaccgagatcccatttatgccttcaagagtaatacttcaagattttactggagtacctgcggtagtagatatggccgcacttagaaatgcaatggtagaattaaatggaaaccctgatttagttaatcctcaagttccagtggatcttgtaattgatcattcagtacaagttgattattcaggtgcatttgctaatgctaaagaacttaatttgaaaatagaatatcagcgtaatatggaacgttataaatttttaaaatggggtcaaaaaaatcttagtaaatttcgtgcaattccaccaggtagagggatagttcatcaagtaaatttagaatggattgctactgtagcaagggaagaagaaaatgtatggttatcagatactttagttggcactgattcacataccactatgattaacggtttaggagtacttggatggggagtcggtggaattgaagcagaagcggttatgctaggtcaaccaatttacatgttatctcctgatgttgtcggtatgaaattaataggtgcgttgtctccaggcgttacagcaacagatatgacattaagaattgtagaattgctgagaaaccatggtgtagttggaaaatttgtagaattttttggagaagggaatgtcggctttatcgcttcctgat

SEQ ID NO: 282737 - DNA, 784 bp, Unknown
  Bacterial polypeptide expressing nucleotide sequence isolated from the Sargasso Sea
gcggactctacatacgttaagaacccaccttttttcgagaacatgagcatgtcagttgagcctgttagtgatattcgcgaagcgagaatattggctttactcggtgattcggtgactacggatcatatttctccggcgggcagtattggtaaggatagccctgcgggaaattatttgcgtgaaaatggggttgctgaaacggattttaattcgtttggttcccggcgtggaaatcatgaagtcatgatgcgcggtacgttcggtaatattcgtattcgtaacgagatgttgacggatgtcgagggcggttatacgaaacacgtaccgagtggtgagcagttatctatttatgatgcggcgatgcgttatcaagcagagcagacgcctttggtggtgattgccgggaaagagtatggtacgggctcttcacgtgattgggcagcaaaggggacgttgttgttgggcgtcaaggcggtggtgacagaaagttatgagcggattcaccgatcgaatttaattggtatgggcgtactgccgctggagtttactgatggcgtgacgcgtaagacgcttaagttaaccggggaagagcttatatccattgagggattggcgtcatcgtttgtgccaggcatgacttgcaccttggttgttcggcaccctgatggagaagaaacgcgggtgagtgtcttgagtcgaattgatacggcgaatgaggcagagtattaccggcatggggggattttacaatacatgttacgtaaaatgatcaaggtaacgtgac

SEQ ID NO: 282738 - DNA, 916 bp, Unknown
  Bacterial polypeptide expressing nucleotide sequence isolated from the Sargasso Sea
tcaatggtaattcctgaggtaatcggatttaaaattaccaataagttgccagaaggaactacagcaactgatttagttctcacagttgttaaaatgttgagagataaaggtgttgttggaaaatttgtagaattttttggagatggtttaaaaaatttaacattagcagatagagccacgattgcaaatatggctccagagtatggcgctacttgcggtttttttccaattgatgaagaaactttaaaatatttagaattttcaggtagagataaaaaaacacttaatattgtgaaagaatactcgaagacgcaaggactgtggtcaagttatgatgtagaatttacagatactatttctttagacatgtcaactgtggttccaactatctcaggaccaaaaagacctcaagataaagtgttattaactgatgcatcttcaaattttaaaaaagtatttgagaaaattaacaatagaaaaatacaaaatgtttctaaagtttttgattctgattatgagattaaagacggttcaatattaattgcggcaattacttcttgcaccaatacatcaaatccaaatgttttaattgcagcaggacttcttgctaaaaatgcagttgaacaagggttacaaacaaaaccctgggtcaaaacttctttagcgccaggatctcaagttgttactgactatttaaaaaaagctggtttaaatacatatttagatgaactaggattcaatttagttggatacggatgtacaacttgcattggtaactcaggaccactatcagaaaatatatcagactcagtaaaaaaagataacatctacgtagtatctgttttatctggaaatagaaattttgaagaacgtatttcacctttgattaaagcgaactatttggcttcaccaccgc

SEQ ID NO: 282739 - DNA, 898 bp, Unknown
  Bacterial polypeptide expressing nucleotide sequence isolated from the Sargasso Sea
ggtttgcttgcaaaaaaagcagtagaattaggtctagatgtcaaaccatgggtaaagacatctctagcacctggttctcaagttgtgactgattacttagagaaagctggattaaatgtttatttagataaattaggttttaatttagttggatatggttgtactacatgcattggaaactctggtcctttgccagaaaatatttcagaagctgttaaaaaaaatgacttatttgtagtttctgttttgtcaggaaacagaaattttgagggaagaatatcacctttaattaaagcaaattatttagcatctccacctttagttgtcgcttatgctcttgcaggtcatatgagctttgacttatataaagattcttttgataaaaatatttttcttaaagatatttggccatctaataaagaaattgaggaggtactaaataagtctcttactccaaaaatgtttataaatagatattcgaatatttcggaaggaccaaaacaatggcaaaatataaaaatagaaaaaagcagcatttataattgggacgaaggatctacttatgttaaaaaaccacctttttttgataatttatcagataaaccagaaggatttaaaaaaattgaagatgcaagaccattgttaatattaggggatatgattacaactgatcatatttcacctgctggatccatacagaaggaaagtccaacaggtgaatattttatgaagcatcaaattcaacaaaaagattttaattcatacggttctaggagaggaaatcatgaagtaatgatgagaggcacgtttgcaaatattagaattaaaaatgagatggcaaaagatacagaagggggatttaataaattataccctgaggaaaaagttatgccaatct

SEQ ID NO: 282740 - DNA, 789 bp, Unknown
  Bacterial polypeptide expressing nucleotide sequence isolated from the Sargasso Sea
taaccttttatccagtagggtgataatgcaggactttacaggtgtccctgctgtggttgatcttgcgtcaatgcgtgatgcaatgaaatccttagatgcttcaaaatcagatgtggtaaaccctcaatgtcaaacagaccttgttatagaccattcagttatggtcgatcattttggaacatcagaatcaaaggatttaaatacaaagcttgagtatgagagaaatactgaaaggtataaactattaaagtggggccaacaagcatttaaaaatttgcgtatcgtacctccaaataacggaatcatccatcagattaatattgaatacatcgcaagagttatatacgagaaagagggcatgctttatcctgacacggtagtaggaacagattcccatacaactatggtaaacggcttaggtgtattgggttggggtgtaggaggaatagaggctgaagctgcgatgctggggcaaccgataccaatgttacttccagaagttattggatttgaactcactggagagcttggacagacaactactgcaactgacctggttcttacaattgtgcagatgcttcgcgaaaagaatgtcgtaggcaagtttgttgaattttatggctcaggtttagatagtttgactattgcagacagatgcacaatatctaatatggcacctgaatatggagcaacatgtggattttttccaattgactcacttaccattgagtatctaaaaatgactggtaaagatgaagaacatttaaaaattgttgataactatagtaa

SEQ ID NO: 282741 - DNA, 871 bp, Unknown
  Bacterial polypeptide expressing nucleotide sequence isolated from the Sargasso Sea
ttagatatgtccacagtagtgccaactatttcaggccctaaaagaccacaagacaaagttcttctaaccgatgcatcaagtaattttaaaaaagtgtttaaagaagcaacagataaaaaggaatataaaatttccaaggtaaaagatacagattatgaaattaaggatggttcaatattaattgcagcaattacatcatgtactaacacttcaaatccaaatgttcttattggagctggactactagcaaaaaaagctgttgagctaggattaaatgtcaaaccatgggttaaaacatctttagctcctggatctcaagtggtaactgattatttagaaaaagcaggtttaaatacttatttagatcaattaggatttaatttagttggttatggatgtacaacttgtattggtaattcaggtccgttagcagaaaatatagttgacgctattcaaaaagaaaatttatatgctgtctcagttttatcaggtaatagaaactttgagggaagaatttcaccccatattaaagcaaactatctagcctctcctccacttgttgttgcatatgctcttgcaggtcatatggaatttgatttatttaaagactcatttggaaaagacaaaaacggtaaagatatatttttaaaagatatttggccctcaaataaagaaatagaagatacattaaagatttctcttaatgcagatatgtttgttaagcgatattcaaatgtttcagagggaccaaaacaatggcaagaaatcaaaacagaaaagagtagtatttataattgggatgaaaattctacttatgtaaaaaaacctcctttttttgataatcttagtgataagcccagagggttttaag

SEQ ID NO: 282742 - DNA, 837 bp, Unknown
  Bacterial polypeptide expressing nucleotide sequence isolated from the Sargasso Sea
aatgtttagagaaagatactctaatgtttcaaaaggacctgagcaatggcaaaaaattaaaactaaagaaagcagtatttatgaatgggatgataattctacttatgtaaaaaaaccacctttttttgataatctccctacaaaaccagatggatttaagccgataaaagatgctagaccacttttaattttaggagatagtgttacgactgatcatatttctcctgcaggaacgattcagaaagacagtcctacaggtgattattttatgaaacatcaaattcttccaaaagattataactcgtacggatcaagaagaggaaatcacgaagtaatggcaagaggaacatttgcaaatattagaataaagaatgaagttgcgccgggtacagaaggcggattcacaaagctttacccagaaaataaagttatgccaatatatgacgctgttgtcgaatataaaaaaagaggcacagatttagttgtaatcggtggaaaagaatatggaactggctcgtcaagagattgggccgcaaaaggaacaaagttgctaggagtaaaagctgtaatcgctgaaagctttgagagaatacataggtcaaatttgattggaatgggcattttgcctttacaatttattaatggaataaatcgaaaaaatcttaatttagatggatcagaattgtttaccattattaaaatagaaaaaggaatcaagccttctgatgaagttgaattagagattaagtataatactggcgagattagtaagattaaagttttgtcaagaatagacaccaagaatgagttagagtattataagaatggtggaatttt

SEQ ID NO: 282743 - DNA, 665 bp, Unknown
  Bacterial polypeptide expressing nucleotide sequence isolated from the Sargasso Sea
aacagaccatatatctccagctggaagtattcaaaaagaaagcccaacaggaaactattttatgaagcatcaaattttgcccaaggattataattcttatggtgcaagaagaggaaatcatgaagtaatgatgagaggaacatttgccaacattagaattaaaaatgaaatggctccaggaacagagggaggtttcactaaattatatcctgaagaaaaagtaatgcctatttatgatgcagttgttgaatacaaaaaaagaggaacagatttagttgtatttgggggaaaagaatatggaactggttcttcaagagattgggcagcaaaaggaacaaaattattaggtgtaaaagctgtaattgcagaaagttttgaaagaatacatagatcaaatcttataggaatgggtgttttacctttgcagtttgtagaaaacatgaatagacagaatttaaacttaaaagggtcagaattaatatcagtattaggtcttgagaaaggaattaatccaggtgatcatttagaggttgagatcaaatatgcgataggtgacattaaaaaaatcaaaatgctttgcagaatagacactaaaaatgagttagaatactataagaacggtggtattttacaatatgttctaaggaatatgatcaatggatgag

SEQ ID NO: 282744 - DNA, 829 bp, Unknown
  Bacterial polypeptide expressing nucleotide sequence isolated from the Sargasso Sea
tatgaaatcaaaaaattcttttaacacaaggtcgaatttaagaattaataacaaaaattatatttattttgatttaaaaactatttctgaaaagtttaattttgatcttaatacactaccattttcaataaaaattcttttagaaaaccttattcgaaatgaggatggtgaattaatcacaaaggaaatgataagtgatttttgtactaaaattaattcagatgaaaagatttttgaaatagcctttttcccttcacgtgttttgatgcaagattttacaggagtaccagctgtggcagatcttgcagcaatgagagaggctttaaaaaataagaatgttaatccaggcaatattaaccccattactagagttgaccttgttatagatcactcagtaatggtagacaaatttggaaataatcaagcttatgaaaataatgtaaaaaaagaatttgaaagaaataaagaaagatatgagtttcttaaatggggccaagaatcttttaagaatttttatcttgttcctccaggcgctggtatatgtcatcaggtaaatcttgaaaatatttcaaaaacaatatggtctaaaaaaatagacaaagatacaatgttgtttcctgattcagtagtaggtacggatagtcacactacaatggtaaacgcactttctgttttgggttggggtgttggaggtattgaagctgaagcggcaatgttgggacagcctatatccatgaatattccaaaaattgttggatgcaaacttgaaagtaaattaaaggaaggtattacagctactgacttagtttttactattacaaatttataa

SEQ ID NO: 282745 - DNA, 914 bp, Unknown
  Bacterial polypeptide expressing nucleotide sequence isolated from the Sargasso Sea
ggtgtaggagggatcgaggctgaagcagcaatgttaggccaaccaatttcaatgttaatacctgaggtgattggttttgaaataaatggcaaactttcagagggtacaacagccagcgatcttgtattaacaattgttgagatgttaagaaagaaaggtgttgttggaaaatttgtagaattttacggaaaaggtttaaaaaatttatcactcgcggatcgagcaactatagctaatatggcaccagagtatggagcaacgtgtggatttttcccaatagatgaagagacaataaaatatttaaaattttcaggacgagataaagatacaatttcattagttgaaaaatattctaaagaacaaggtctctgggcaagtgatacaatagactttactgatactatttccttagatttaaattctgttgttccaagtatatctggacctaaaagacctcaggacaaagttttacttacagatgcatctaaaagttttgataaagcttttaaagaaaatacaaatagaaaatcacctttagaagctcaagtagataaaaaagattttaaaataaaagacggagatatcgtgataggtgcaataacttcttgtacaaatacttcaaatcctagcgtaatgattggtgcaggcttattagcaaaaaaagcagttgaaaaaggtttaaaagtaaaaccgtgggttaaaacctcactagcacctggttctcaagtagtaactgattatttagaaaaggctggtctaaataaatatttggatgagttaggttttaatttagtggggtatggatgtacaacttgtattggaaattctggaccacttgataaagaaatctcagatgcaattcaaaaagaaaatttatatgctgtctcagttttgtcaggcaatagaaactttga

SEQ ID NO: 282746 - DNA, 871 bp, Unknown
  Bacterial polypeptide expressing nucleotide sequence isolated from the Sargasso Sea
atgttgatacccgaagttattgggtttgaaatgaaaaataaactcccagaaggaacaactgcaacagacttagttttaacagttgttaaaatgctaagagataaaaaagttgttggaaaatttgttgagttttatggagaaggtttaaaaaatttaacacttgcagatagagctactattgcaaatatggccccagaatatggtgctacatgtggtttttttcctgtagatagcgaaactttaaagtatttaaagttttcaggtagagatgaacaaactataaaaattgtagaaaattattcaaaagagcaaggcttgtggtcaagtaatgaaatagaatttacggataaactttcattagatatgtccaaagtagtaccaactatatcaggacctaaaagacctcaagacaaggttcttctaacagacgcatcttcaaattttaaaaatgtatttcaaaaaattactaaaagaaaaatgccgaatacatcaagagtagatggtacaaaatatgaaattaaagatggttcaatcttaattgctgccattacttcatgcacaaatacttcaaatccaaacgtcttaattggagctggattattagcaaaaaaagctgtcgagttaggattaatgacaaaaccatgggtgaaaacttccttggcacctggatcacaagttgtaacagattatctagccaaggcaggattaaatatttttttagatgagttaggatttaatcttgtaggttatgggtgcactacatgtataggtaattctggaccgttgtcagaaaatataactgaggcaataacaaaaaatgatatttatgcagtttcagttttatctggcaatcgtaattttgaaggtcgta

SEQ ID NO: 282747 - DNA, 911 bp, Unknown
  Bacterial polypeptide expressing nucleotide sequence isolated from the Sargasso Sea
aaaatttataatctaaaaactgcagaaaaaaacggtttagaagggatttctaaactacctaaatcacttaaagttttattagaaaatcttcttagatacgaagatgacgttactgtagataagaaacaaattttagctttaaaggaatggcttaaaaataaaaaatcaaatacagaaatagcctacagacctgccagaactttgttacaagattatactggtattccagctattgcagatcttgctgccatgagagatgctgttaaagaaaaaaataaagatccaaaacaaataaatccattatctactgtagatttagttatagatcactctgtaatggttgatgaatacgcatcaggtagatcatttaatcaaaatgttgaaaaggaattttctagaaatggagaaaggtatgcatttcttaagtggggtcaaaaagcttttgataattttagagttgttcctccaggaacaggtatttgtcaccaagtaaatctagaatatttagctaaagtggtgtggtcatcgaagagtggcaacgatctttatgcttatccagacactttagttggaacagacagtcatacaacaatggttaacggattatcagttttaggatggggagttggtggaatagaagcagaagcagctatgttaggtcaacctatttctatgttaattcccgaagttgttggagtagaaataaaaggaaaacttcttgaaggattaacggctacagacttagtgttagcaatcgttgagatgcttagaaaaaaaggtgtagtaggaaaatttgtagaattttatggcgaaggtttaaaaaatcttacattagctgacagagctacaatagcaaacatggcacctgagtatggagcaacatgtggtttttttccagtagatgaggaaac

SEQ ID NO: 282748 - DNA, 638 bp, Unknown
  Bacterial polypeptide expressing nucleotide sequence isolated from the Sargasso Sea
tggaatttttcttttagaaagacaagtaaataaagataattttaattcttatggctctagaagaggcaatcatgaaattatgctaagagggacattttcaaatgatagaattcgtaatgaaattttacccaattcaatgggaggaataactaaaaattttataagcgatacggaaaagccaatttacaatgttgccatggaatattcaaaagaaaatattcctctaattgttttagcgggtaaggaatatggaacaggatcatctagggattgggcagcaaagggtactcgtttattaggcgtgcgggcagtaattgcagaatcttttgaaaggatacatagatcaaatcttattggaatgggcattcttccattggagtttatgaatggcgatacaagagaatctttaaaaatgaacggaagtgaaaagattacaatatttaaattaaatgaactttctccaaaaaaaattattgaatgtaaaattactaatgatttatcatcaagtataattgaaactttgtgccgaatagatactcaaacagaacttgaatattttaaatcaggaggaatattaaattatgttttgaattctattataaataaagaacagaaatctgatgccaccttcaaataat

SEQ ID NO: 282749 - DNA, 942 bp, Unknown
  Bacterial polypeptide expressing nucleotide sequence isolated from the Sargasso Sea
gaacacttcaaatccaaatgttttaattggagcaggattattagcaaaaaaagctgtggagtttggattaaaaactaaaccatgggtaaaaacttcattagcaccaggttcacaggttgtgactgactatttggctaaagctggattaaatgtatttttagataaattaggttttaatttggttggctatggttgcactacctgtattggaaattctggacctttagatgtaaatatttctgaatctataaaaaaagataatatttatgcagtttctgttttatcaggaaatcgaaactttgaaggtcgaatatctccattaattaaagctaactatttagcgtcacctcctcttgttgttgcttatgcattagcaggtcatatggaatttgatctttataacgattcattaggcaaaaattctgaaggcaaagacatttatttaaaagacctttggccttcaaataaagaaattgaaaatactttaagaagttctttaaaccctgatatgtttgtaaaaagatattcaaatatttctaaaggaccggagcaatggcaaaaaatcaaaactttaaaaagtagcatttataattggaacgaaagttcaacttatgtaaaaaaaccaccattttttgaaaatttaaagaatgagccagaaggatttaaagaaataaaaaatgcaagacctctattaattttaggagatatgatcacaactgatcatatttcaccagcaggctccattcaaaaagatagccctacaggggagtatttcatgaaacatcaaattttgacaaaagattataattcatatggatcaagaagaggaaatcacgaagtaatgatgagaggaacttttggaaatataagaattagaaacgagatggcacctggaaccgaaggtggttttacaaaactatacccagaaggaaaagtaatgcc

SEQ ID NO: 282750 - DNA, 937 bp, Unknown
  Bacterial polypeptide expressing nucleotide sequence isolated from the Sargasso Sea
gtatctatcaaaagttgtttggtctgaaaaatataaagaagatgaatatctatttccagatacattagtaggaactgatagccatacaacaatggtaaatggactatcagttcttggttggggggttggtggaatagaagctgaagccggtatgcttggccagccaatttcaatgctaattcctgaagttataggttttgaggtaaaaaataaaatgcctgaaggaactacagctactgatttagttttaacagttgtaaaaattttgagagataaaggtgttgttggaaagttcgtagaattctatggagatggattaaaaaacttaacacttgccgatagagcaactatcgcaaatatggctccagaatatggcgctacctgtggtttttttccaattgacgatgaaactttaaaatatttaagattttcaggaagaaatgaacatatagtttctactgtagaaaaatacgctaaagaacagggattgtgggcaagtgaaaacattgaatttacagatagagtttcactagacatgtcttcaattgttccaacaatatctggaccaaagaggccacaagataaagttttattaagtcaggcttcatcagagtttaaaaaagtttatgaaaatactactgaaagaaaggaaaaatatatttcaaaagttaataatactaattttgaaattaaagatggatctatattgattgctgcaataacatcatgcacaaatacatctaatccaaatgttttaattggtgcaggtttgttggcaaaaaaagctgtggaactaggattaaaaactaaaccatgggttaagacttcatttgctcctggttcgcaagtcgtaacagattatttggaaaaagcaggtttaaataaatatttagatgaattgggatttaatttagttggttacggatgcacaaccatg

SEQ ID NO: 282751 - DNA, 775 bp, Unknown
  Bacterial polypeptide expressing nucleotide sequence isolated from the Sargasso Sea
agatcattctgtaatggtagatgaatatgcttcaggaaaatcttttaatcaaaatgtcgaaagagaattttcaagaaacggtgagcgttattcgtttttaaaatggggtcagaaagcatttgataattttagagttgtacctcctggcacagggatttgtcaccaggtaaatttagaatatttatctaaagttgtttggtcgtcaaaaagtggaaatgatttatatgcttatccagatactttagttggaactgatagtcatactactatggtcaatggtttatctgttttaggttggggtgttggcggaatagaagcagaggctgcaatgttaggtcagcctatttcaatgttaattccagaagttattggagttgaacttaaaggaaaattaaaagaaggaacaactgcaacagatttagttttaattattgttgaaatgttaagaaaaaaaggcgtggttggaaaatttgtagaattttatggtgaaggtttaaaaaatttaactttagctgatagagcaacaattgcaaacatggcccctgaatatggagctacatgtggttttttcccagtagatgatgaaactcttaaatatttacaattatctggaagagataaagcgacaattaatttggtggagaaatattcaaaagagcaagggctttgggcaagcaacgatgttgtatttactgatactctttctttagatattagcagtgtagtaacaagtatttctggacctaaacgaccacaagataaagttttgcttaca

SEQ ID NO: 282752 - DNA, 688 bp, Unknown
  Bacterial polypeptide expressing nucleotide sequence isolated from the Sargasso Sea
tcaaataaagaaattgaagaaactttgaaatcagcattgagcgcagaaatgtttgtaaagagatattcaaatatttcacaaggacctaaacaatggcaagaaattaaaactgaaaaaagtagtatttataattgggaagaaaattcaacttatgttaagaaaccacctttttttgataatctacctgataaacctgaaggatttaaaaagataaaggatgcaagaccattattgatattaggagatatggtaactacagatcatatttctccagcaggaaacattcaaaaagaaagtccaacaggagattattttatgaagcatcaaattttacctaaagactataactcatacggttctcgaagaggtaatcatgaggtaatgatgagaggcacttttgcgaatattagaattagaaatgagatggcccctggaaccgagggaggatttacaaaattatatccagaagaaaaagtaatgcctatttatgatgcagtagttgaatacaaaaaacgaggaacagatttagttgtaattggtggaaaggaatatggaacaggatcatcaagagactgggcagccaaagggacgaaacttctaggtattaaagttgttatagctgaaagttttgagagaattcacagatcaaaccttattggtatggggattttaccacttcaattttaaa

SEQ ID NO: 282753 - DNA, 700 bp, Unknown
  Bacterial polypeptide expressing nucleotide sequence isolated from the Sargasso Sea
ggtgtaccagctgtagcagatttggcagcaatgagaaatgcactaaaatccaaaggaatagagccaaaaaaaatcaatcctctttccagagttgatctaattatagaccactctgttatggttgatgactataaaaaaaataattcactaaatgaaaatgtcaaaaaggaatttgagagaaataaagagagataccaatttttaaaatggggccaaagctcttttgataatttttatttagtgccacctggagcaggaatttgccatcaagttaatttagaaaatatagccaaaactgtgtggacgaaagaaattgaaagtacaaaatacttatttccagactctgtagtaggtactgatagtcatacaacaatggttaattctctttctgtattaggatggggtgtagggggaattgaagctgaagcggctatgttaggtcaagcaatttcaatgaacatacctgatgtaattggatttcaactcaaaggcacactaaaggaaggaattacagctactgatttagttttaacaataactcaaattcttagagataaaggagttgttggtaagtttgtagaattttatggaatgggtcttaagaatttatcattagcagaccgtgctacaatatctaatatggccccagagtatggagcaacttgtggatttttcccaacagatgaagaaacaatcaact

SEQ ID NO: 282754 - DNA, 841 bp, Unknown
  Bacterial polypeptide expressing nucleotide sequence isolated from the Sargasso Sea
ggtgttggaggaattgaagcagaggcaggtatgctgggacaacctatatcaatgttgataccagaagtggttggatttgaaatgaaaaataagctacctgaaggtacaactgctaccgatctagttttaacagtagttaaaatgttaagagataaaggtgttgtaggtaaatttgtagaattttatggagaaggtctaaaaaatctaacacttgctgatagagcaactattgcaaacatggcaccagagtatggtgctacttgtggattttttccaattgatgaagaaacattaaaatatttagaattttcaggaagatcaaaagagaatattcaaattgtagaaaaatacgcaaaagaacaaaatttgtggtcaagtgaagacattgttttcactgatacattgtctctagatatgtccacagtagttccaacaatttctggaccaaaaagaccacaagacaaagttcttttaacagaggcatcaaaaaattttataaaagtttttgaagatgtatgtaaaaaaactgatccaacagtagcaaaagttaaagatacagattttgagataaaagatggagatatattaatcgcagctattacatcatgtacgaatacttccaatccaaatgtattaattggtgcaggattgttggccaaaaatgcaattgaaaaaggtttaactgttaaaccttgggtaaaaacttcattagcacctggatcacaagttgttactgattatttagataaagctggtttaagcaaatatttagatgaattagggtttaatttagttggttatggttgcacaacttgtattggtaactctggacctttatcag

SEQ ID NO: 282755 - DNA, 832 bp, Unknown
  Bacterial polypeptide expressing nucleotide sequence isolated from the Sargasso Sea
agaaactttgagagatattcttttttaaaatggggacaacaggcatttaataattttagaattgttcctccaggtacaggaatttgccatcaggtaaatttagaatatttatcaaaagtggtttggaacgaaaagtttaaagataaagagtacttatttcccgacacgttagttggaactgatagccatactacaatggtcaatggtttatcagtattaggttggggagtaggaggaattgaagcagaagcaggtatgctgggacaacctatatcaatgttgataccagaagtggttggatttgaaatgaaaaataagctacctgaaggtacaactgctactgatctagttttaacagtagtaaaaatgttaagagacaaaggtgttgtaggtaaatttgtagaattttatggagaaggtctaaaaaatttaacacttgctgatagagcaactattgcaaacatggcaccagagtatggtgctacttgtggattttttccaattgatgaagaaacactaaaatatttagaattttcaggaagatcaaaagataatattcaaatcgtagaaaaatacgcaaaagaacaaaatttgtgggcaagtgaagacgttgtttttactgatacattgtctctagatatgtctacagtggttccaacaatttctgggccaaaaagaccacaagacaaagttcttttaacagaggcatcaaaaaattttataaaagtttttgaagatgtatgtaaaaaaactgatccaacagtagtaaaagttaaagacacagattttgagataaaagatggagatatattaatcgcagcttattacatca

SEQ ID NO: 282756 - DNA, 865 bp, Unknown
  Bacterial polypeptide expressing nucleotide sequence isolated from the Sargasso Sea
tttctagcctccccactattagttatagcatatgctgtagctggaactattaatattgatatgactaaagagcctctaggtactgattcttcaggaaaagatgtttttttatctgacgtgtggccatcttcaaaagatattcaaaatgaaattaacaaatctatttcaccagaaatgtttaaggagcaatatgaaaatgcaattttaaataatactgattggaataaattagaatcttccaaaggagaaaattataaatgggattcaggctcaagttatattcagaaagtccctttctttgataacttttcaaaagatacccctaaaattaaacctttaaaaaaagcaagattattatgtgtattaggagactctgtcactacagatcatatttcaccagcaggctctattcctgaactagcaccatctggccaatttttgatttctaaagatattcccaaaggtcaatttaactcttatggatctagaagaggtaatcatgatgtaatggcacgtggaacattcgggaatattagattaaaaaatctattaacacctggaagagaaggtgattggacaatgttttttcctgaaaatagagagatgaggatatttgaagcagcaaaagaatatgaaaaaaataacacccctttaattgttattgcaggcaaagaatatggaacaggatcttcaagagattgggctgcaaaaggaccaaacttattgggagtaaaagcggttatcgcagaaagttttgagcgaattcatagaagtaatttaattggaatgggaattgcccctttagaatttattaacggggaaagttataaatctttaggattattaggagatgaatattttgatt

SEQ ID NO: 282757 - DNA, 743 bp, Unknown
  Bacterial polypeptide expressing nucleotide sequence isolated from the Sargasso Sea
tatgagagacaaaggtgttgtgggtaaatttgtagaattttatggctcaggattaaaaaatttgagtttggctgatagagcaacaattgcaaatatggctccagaatatggagctacttgtggtttttttcctatagatgatgaaactttaaaatatttaagattttctggaagagacagtcaaacagtaaaaatagttgagagttatgccaaagaacaagggttatgggccagcgagaaaattgaatttacagacgttgtaaaactcgatatggccactgttgtcccaacaatttctggacctaaaaggccacaagacaaagttttacttactaaagcaaaacaatctttcctaaaaaactttagagaaattacaaatagaaatacagagaacatatctgaagtggttggagaagattttaaattaaaagatggatcagtagtaattgcagcaattacatcttgtacaaatacatcgaatccaaatgttttaattggtgccggtcttcttgcaaaaaaagcaattgaaagaggattaaaaacaaaaccatgggtaaagacttctttggcaccaggatctcaagttgttactgactatcttaataaatcaggattaaacaaatatctggacgaacttggatttaatcttgttggctatggatgcacaacatgtatcggtaattccggaccattacctgaaaatatttcaaattcaattaaggaaaatgacatttatgcagctt

SEQ ID NO: 282758 - DNA, 906 bp, Unknown
  Bacterial polypeptide expressing nucleotide sequence isolated from the Sargasso Sea
gtacaagtggatcaatctgcaaaaaaagactcttttgataaaaatgttgagattgaattcaaaagaaatggagagagatattcttttttaaaatggggtcaacaagcatttaataactttagaattgttccacctggaacaggaatttgtcatcaagtaaatttagaatatttgtcaaaagtggtttggaatgaaagatttaatggtgaagaatatctttttcctgacactttagttggaacagatagccacacaacaatggttaatggtctatcagttttaggatggggagtgggaggaattgaagcggaagctggcatgttgggacaaccaatatcaatgttgatacctgaggtaataggttttgaaatgaaaaataaaatgcctgaaggtactacagcaactgatttagttttaacagttgttaaaatgctaagagacaaaggtgttgttgggaaatttgttgagttttatggagaaggtttaaataatttatctttagctgaccgtgctacaattgcaaatatggcaccagaatatggagctacatgtggatttttcccaattgacaatgaaacactaagatacttaaaattttcgggtagagatgaattaatagtaaaaatagttgaagaatatgctaaagctcaaggtttgtgggcaagtaaagatatagaattttcagacactttaactctagacatgtcttcaatagtgccaacaatctctggaccaaagagacctcaagataaagttttgttaacagatgcatctgagagttttaaacaaagttttaaagagataactaacaaaaaaaatttttcttattcaaaggtagataatactgattacgaaataaaagatggttcaattttaatagcagcaataacctcgtgtactaataca

SEQ ID NO: 282759 - DNA, 678 bp, Unknown
  Bacterial polypeptide expressing nucleotide sequence isolated from the Sargasso Sea
ttttaggagacatggtaacaactgaccatatttctcctgcaggcaatattcaaaaagaaagtcctacaggcgaatattttatgaaacatcaaatattaccaaaagattacaattcatatggttctcgaaggggaaatcatgaagtaatgatgagaggcacatttgctaacataagaataagaaatgagatggcaccaggaactgaaggtggatttacaaagttatatcctgaggaaaaagtaatgccaatttatgatgctgttgttgaatataaaaaaagaggtacagatctaattgttatcggtggtaaagagtatggcacaggttcatcaagagattgggcagcaaaggggacaaaattgttgggaattaaggcagtgattgctgaaagttttgagagaattcatagatcaaatttaattggcatgggagttttaccattacaatttaccaatggtattaatagaaaaaaccttaaattaaatggatctgaattaataagtgttaacgatatagagaatggaatagaaccatctgataaaataatagttgaaataaagtatatatctggagaaattaagaaaatagaaacattatgtaggatagatactaaaaacgaactagaatattacaaaaatggtggaatacttcaatacgttctcagaaatatgatttaga

SEQ ID NO: 282760 - DNA, 886 bp, Unknown
  Bacterial polypeptide expressing nucleotide sequence isolated from the Sargasso Sea
aattttttctttatcaaaagctgaagacaatggtttgactggtatttcaaaattaccaaaatcacttaaagtgctcttagaaaatcttttaagatatgaagatgatctaacagtaaataaagctcaaatcgaagctataaaaaattggcttaaagaaaaaaaatctaaaaaagaaatagcgtataggccagctcgagtcttacttcaagattatacaggaataccagcagttgcagatttagctgccatgcgtgaagctgttaaagaaaaaaataaagatccgaatactatcaatcctctttcaactgttgatcttgtaatcgatcactcagttcaagtagatcaatcagctaaatcagactctttcgataagaatgtagaaattgagtttaatagaaatggtgaaagatactcttttttaaaatgggggcagcaagcatttgataatttcagaattgttcctccaggcacaggaatttgtcaccaagtgaatttagaatatttatctaaagtagtttggacagcagaatataaaaatgagaattatttattccctgatacacttgttggtactgacagtcataccacgatggttaatggtttatcagttttaggttggggtgttggaggtattgaagctgaagctggtatgttaggtcaaccaatatcaatgttgattcctgaagtaataggttttgaagtcaaaaataagttgccggaaggcactacagccacagacttagttttgacaatcgtaaaaatgttaagagacaaaggggtagtaggtaaatttgtagaattttacggcgaaggattgaagaatttaactttagctgatcgagcgacaattgcaaacatggctccagaatatggtgccacttgtggt

SEQ ID NO: 282761 - DNA, 796 bp, Unknown
  Bacterial polypeptide expressing nucleotide sequence isolated from the Sargasso Sea
aggtttaaataaatatttagatgaacttggttttaatctagtaggctatggctgtactacttgtattggtaactctggacctttaaatcaaaatatatcagatgcaataaataaaaatgatctttacgctgtttcagttttatctggaaatagaaactttgaaggaagaattaatccagatgtaaaagctaattacttagcttcacctccacttgttgtagcttatgctcttgcaggtaatatgaattttgatatgtacaaatctgctcttggtaaagataaaaatggcaaagatgttttcttaaaagatatttggccaagcaatagagagattgaagatttaatgttaagttctttaaatgcagatatgtttaaacaaagatactcgaatgtttctcaaggacctaaagaatggcaagctataaatacaacagatagtgatatctatgactggaaggctaattctacttatgtgaaaagaccacctttttttgatgatttacctgaccaaccagaaggttttaaaccaattgatgacgcaagaattcttcttttattagctgacacagtaacaacagatcacatttcaccagcaggaagtattaaaaaagaaagtccaaccggcgattattttatgaagcatcaaatacaacaaaaagattttaactcttatggtgcaagaagaggaaatcacgaagtaatgatgagaggaacttttggaaatatcaaaattagaaatgaaatggctcctggcactgaaggaggatttacaacgttgcagccagacggaaaagaa

SEQ ID NO: 282762 - DNA, 932 bp, Unknown
  Bacterial polypeptide expressing nucleotide sequence isolated from the Sargasso Sea
catgaaaccaggaaacaaaaactcttataattcattaatagatttaaagataaatggaaaaaattttaaaatttactctttatcaaaagcagaggcaaatggactagatggtatatcaaaattaccgaaatcacttaaagttttattggaaaacctcttaagatatgaagatgatttatcggtaaataagagtcaaatcgaagcagtcaaatcttggcttaatacaaaaaaatctcaaattgaaatagcttatagaccagcaagagttttacttcaggactatacaggaataccggctgtagctgatttggctgcaatgagagaagctgtaaaagaaaaaaataaagatccaaacacaataaatcccttgtctgctgtcgatttagtcattgatcattcagttcaagttgatcaatcagctaaaaaagattcttttgaaaaaaatgtagatattgaatttaagagaaatggtgaaagatactcttttctgaaatggggccaaagtgcgtttaataattttagaatagttcctcctggaactggtatttgtcaccaagtaaatttagagtatttatcaaaagtagtttggtcggaaaaatataaaggagaagaatatttatttcctgatacacttgtcggaaccgatagtcacacaactatggtaaatggtttatcagttctaggttggggagttggtggaattgaagctgaagctggtatgttaggccaaccaatttcaatgttaattcctgaggttataggatttgagttcacaaaaaaaatgccagagggcacaactgctacagacttagtccttactgttgttaaaatgttaagagacaaaggtgttgtaagaaagtttgtagaattctatggtgaaggattgaaaaatctcacattagcagatagagcaacaattgctaacatggctc

SEQ ID NO: 282763 - DNA, 696 bp, Unknown
  Bacterial polypeptide expressing nucleotide sequence isolated from the Sargasso Sea
ttttaatacttggagattctgttactactgatcatatatcacccgctggagcgataaagaccgacagtcctgcgggtgtttatttaaatgagcgtcaggttatgcaacaagattttaattcttatgggtcccgacgtggcaatcacgaggtgatgatgcgaggtacctttgccaatattcgcatcaaaaacgagatggttcctggaacagagggtggtgttacaagtcaccaaccctcgggggaaattatgtccatctatgatgcagcaattagatatttaaatgaaggggttccattggtggtaattgggggcaaggagtatggcactggctcatcccgtgactgggcagctaagggaactcgtttactaggagttaaggcggttattgtagagagctttgagagaattcatcgttctaacttgataggaatgggggttttaccactgcaatttctggatggtatgaatagagagagccttgggctgactggtaaggaattgatttcactaacgggcttaaaagaaggagttaaagcaaagatgggggtcagctgtaaaattgtttgggagaagggagaggaaaaaaacatcaaacttttgtgtaggatagatacagctgatgaggttgaatattataggcacggaggaattctgcagtatgtgcttagaagccttatgaaaagtacagtataaa

SEQ ID NO: 282764 - DNA, 850 bp, Unknown
  Bacterial polypeptide expressing nucleotide sequence isolated from the Sargasso Sea
gtagttggcacagatagtcatactacaatggttaactctctatcagtattaggatggggagtaggaggtatagaggctgaggcagctatgttgggtcaagctatttctttgaatgtacccgaagtaattggttttgagcttaaaggatcattaaaggaaggaattactgcaactgatttagttttgtcaataacacaaatattaagagataaaggtgttgttggaaagtttgtagagttcttcggaaatggcttaaagaacctttctttagcagatagagcaacaatatctaatatggcacctgaatatggtgctacgtgcggattttttccaacggacgaagaaacaattaactacctaaaattaactggaaaagacaaagagcatttaaatatagttgaagaatattcaaaaaaacaaactctttgggctgatgaaaactatgaaccagaatattctgataaaatattattagacttaaatacaatcgaaccttctctggctggtccaaagcggccccaagataaaattcttttaaaagaagttccaattgaatttagtaagatagataataaacatagcactaataaaaataaattgaacactggggatgttgtaatagcggcaattactagctgtacaaacacttcaaatcctaacgtaatgatttcagctgggctagttgctaaaaaagcaattgattttggtttagaggttaagccttgggttaagacaagtttagctcctggaagcaaggttgtaagtgattatcttgataaagctaatttaacagaatatctagatattttgggttttaaaactgttggttatggatgcacaacttgcattg

SEQ ID NO: 282765 - DNA, 778 bp, Unknown
  Bacterial polypeptide expressing nucleotide sequence isolated from the Sargasso Sea
gtttcagatgaatttttgaaatcacttaaatctgaattctcacaaaaaaatattcttaatctatctaaagttaagggtgaaaattatgaaatggatcatggtcatgtggccatagctgcaataacaagctgcactaatacatctaatccaagcgtaatggtcggagcgggtttgctagcaaaaaaagctgctaagttgggtctcaagactaaaccatgggtaaaaacttcacttgctccaggctctaaaattgtaacggattatttaacaaaatcaggactgcaaaaatatttagataagttaggatttcatttagttgggtttgggtgcacaacatgtataggtaattctggacctcttgataaaaatatttctgacaccattggaaagaataaccttattgtaagtggtgtattatcaggtaatagaaactttgaaggaagaattaatccttttgtaaaagcaaattatttagcttccccacctttagttgtcgcttatgcccttgctggatctacaaaaataaacttagataaagatccaattggttttggtaaaaatggtaacaatatatatttaaaagatatctggcctactaatagagaaattcaaaagataataactaaaactattacttcacaactctataagcagagatacaagaatgtatttaagggcgataagaaatggaactccgtaaaagcacctcaagggttgacatataaatggaataaagattcgacatatgtacaacaccctcctttttttaaagatctaa

SEQ ID NO: 282766 - DNA, 943 bp, Unknown
  Bacterial polypeptide expressing nucleotide sequence isolated from the Sargasso Sea
gttgttgcttttgcaatgccaggaaatatgaaaattaatttatttaatgatccaatcggaactggtaaatctggagaggcgatttatttaaaagatttatggccgtcttcatctcaaattaataaaatagtaaataagtcattatctactgatatgttcattaaaagatatcaagagatatatagtggtgacaaaaactggcagtcaattaaaagtgtttcaaacactacttatacttggagctcttcaagtacgtatattaagcatccacctttttttcaaaacgaaaagaatgaggttgaagatattattaatgctagaattcttgctcttttaggtgatagcgtaactacagatcacatttcacctgcaggagctataaaaacagatagccctgctggtaaatatttaaatgacagacaaataaacataaaagattttaactcatatggatctagaaggggaaatcatgaaattatgatgagaggaacttttgcaaatataagaataaaaaatgaaatacttcctggcacagaaggaggaataactaaattttttgatgaaaaagtcaaaaacatgtcaatttatgatgcagcaatgcaatatgcaaaaaacaatactccccttgttatttttgctggtaaagaatacggtactggatcatcaagagattgggcagccaaaggtacaaaattattaggtattaaagctgtaattgctgagagttttgaaagaattcatcgctcaaatttaattggtatgggcgtcttaccattacaatttatttcaaatcaaaatagaaaatcactttcacttagtggcgacgaacttataacattaagaggaataaataatattaagccaaactcagagcttaattgtgaaataaaatctaacggtataaaaaaaataaaacttctttgtagaatagaaacagttaaag

SEQ ID NO: 282767 - DNA, 869 bp, Unknown
  Bacterial polypeptide expressing nucleotide sequence isolated from the Sargasso Sea
catgtggtttttttcaattgatgatgagacactaaaatatctaagattttcgggaagagatgagcaaactataaaaatagttgaagaatattcaaagaaacaaggtttgtggataagcaaagaagtggaatttactgatactatttctctagacatgtcagacgtagtgccaactatttctggaccaaaaagacctcaggacaaagtttttcttacagaggcttcttcaaattttaaaaaagtatttgaaagtgttactaaaaggaaatctccaaatgtttcaaagatagaaggattagattacgaaattaaagatggatcaatactaattgcagcaattacatcttgtacaaatacatcaaatccgaatgttttaattggagcaggattattagcaaaaaaagcagttgaactagggcttaaaacaaaaccatgggtaaaaacttctttagcaccaggttctcaggtagtaacagattatcttgccaaagcaggattaaatatttttttggatgaattgggttttaatcttgttggttatggatgcacaacatgcattggtaattctgggccattactagaaaaaatatccgaagcaataaaaagagataatttatatacagtctccgttctatctggaaatagaaattttgaaggaagaatttcacctctgattaaggcaaattatttagcatcacctcctttggtagtagcctatgctctggcaggatcaatgtactttgatctttataaaaattcattgggtaaagacaaaaatggtaatcatatttatttaaaagatatttggcctaccaataaggaaattgaagatattctaaaagtttctttaaatgcagaaatgtttgtaa

SEQ ID NO: 282768 - DNA, 886 bp, Unknown
  Bacterial polypeptide expressing nucleotide sequence isolated from the Sargasso Sea
aatgcttggacaaccaatttcaatgttaataccagaagttataggctttgaatttacaaaaaaaatgcccgaaggcagtaccgctacagatttagttttaacagtagtgaaaatgctaagagacaaaggtgttgttggaaaatttgtagaattttatggggatggattagaaaatttaactctcgcagatagagcaactattgcaaatatggctccagaatatggagctacatgtggttttttccccgtagatgacgaaacattaaaatacttaaaaacttcaggaagagaaaataacacgctatctattgttgaaagctatgcaaaagaacaaggactatgggcaagtaataatattgaatttacagacactctatctttagatatgtctacagttgttccaactatttctgggcctaaaagaccacaagataaagttttgttaaacgaggcatcgtcggagtttagaaaagtgtttaaaaatataacaggaaagaaaaaacaaaatgtttcaaaagtaaaaggaactgaatttgaaatcagagatggctctatattgattgctgcaataacctcttgcacaaatacatctaatccaaatgttttaataggagcaggtttgcttgctaaaaaggcagtagaattaggacttaaatcaaaaccctgggtaaaaacttcatttgctcccggctcgcaagtagtaactgattatttgaaaaaatctggactgaataaatatttagataaattaggattcaatcttgtgggttatggatgcacaacatgtattggaaattctggacctttaccggaaaatgttgttgaagcaattgaaaaggaaaatatttacgctacttctgttttatctggtaatagaaattttgaa

SEQ ID NO: 282769 - DNA, 883 bp, Unknown
  Bacterial polypeptide expressing nucleotide sequence isolated from the Sargasso Sea
gtcggcggcaaagaattcgaaatctacaagcttgatgcagtgcaggaagggcatgtaggacggctgcccttttccctgaagatactcctcgagaacctgctgcgatttgaagacggtcgtgatgtgacccgcgaggatattctggcgctggccaactgggacccggcagctgtacccagcaccgagatttcattcacgcccagtcgggtcattctccaggactttaccggggtgccagcgattgttgatctcgctgctatgcgtgacgcagtcgtcaagctcgggggcaatgccgacagcatcaacccactgtcgcctgccgagctagtcatcgatcactcagtacagatcgaccgttatggcactgcggatgccctggatctgaacaacaagatcgaattcgaacgaaaccgcgaacgttactcattcctgcgctggggccagggggccttcgagaacttcagggtcgtgccgcccaacaccggcatcgttcaccaggtcaacctcgaatacctcagccgtgtagttttcgatgccggtgaaaacgggacgcaccaggcctatcccgatacagtagtgggtaccgactcgcacacgacaatgattaatggcattggcgtccttggctggggcgtgggcggcatcgaggcggaggcggcgatgcttggccagcccattacaatgctaatcccgaatgtagtcggcttcaaactcaccggaaaactgcaggaaggcactacagccaccgaccttgttctgaccgtcactgaaatgctgcgcgagaaaggcgtggtcggtaaattcgtcgaattcttcggcgacggcctcgatgaactgccgctggcagatcgcgcgaccctgggcaatatgtcaccggaattcg

SEQ ID NO: 282770 - DNA, 834 bp, Unknown
  Bacterial polypeptide expressing nucleotide sequence isolated from the Sargasso Sea
aagatggttcaatattaattgcagccataacttcttgcacaaatacttcaaacccaaatgttttaattggagcagggttgttagcaaaaaaagctgtagaacttggattaaaaactaaaccgtgggtaaaaacttcattagcaccaggttcacaagttgtaactgattatttagctaatgctggactgaatatatttttagatcaactaggttttaatttagttggttatggctgtacaacttgcataggaaattctggacctttatctgaaaatatttctgaatctttaaaaaaagaaaatatttatgcagtttctgttttgtcaggaaatcgaaattttgaaggaagaatttctccattaattaaagctaattatctagcatcgccaccacttgtagttgcttatgcattagcaggatatatgcaatttgatttttataaagattctttaggaaaaaactctaaaggaaaagatatttacttaaaagatatttggccttcaaataaagaaattgaagatgttttaagaaattctttgaatcccgaaatgtttgtaaaaagatattcaaatgtttctaaagggccagaacaatggcaaaaaattaaaacagtaaaaagtagtatttataattggaacgagagttcaacatatgtaaaaaaaccacctttttttgaaaatttagctgatgaaccagaaggctttaaagaaataaaagatgcaagacctttattgattttgggggacatgattactactgatcatatttcaccagcagggtctattgaaaaaaacagtcctactggtgaatactttatgaaacatcaaatttgac

SEQ ID NO: 282771 - DNA, 922 bp, Unknown
  Bacterial polypeptide expressing nucleotide sequence isolated from the Sargasso Sea
aaaagaccacaagacaaagttttattaaatgaagcatcatcagaatttaaaaaaatatttgaaaatattacagaacgaaaacaaaaacacatttcaaaaattaatggaactgattttgaaattaaagatggctctatattaatagctgcaataacatcttgcacaaatacttctaatccaaatgttttaattggagcaggtttgttggcaaaaaaagcagtagaattaggattaaaaaccaaaccttgggtaaaaacttcattagcaccaggatctcaagtggtaactgattatttggaaaaagcaggtcttaataaatacctagatgaattaggatttaatttagttggttatggatgtacaacatgtattggaaactcaggtccattacctgataatattgtagaggctattgaaaaagaaaatatatttgctgtatcagttttatctggtaatagaaattttgaaggtcgtatatctccgcacataaaagcaaattatttagcatcaccaccacttgttgttgcttatgctttagctggtcatatggaaatagatttatacaaagatcctttaggaaaagataaaaataataaagatatttttttaaaagatatttggccttcaaataaagaaatagaagacactttaagagaggcgttaaatgcaaaaatgtttgttgaaagatacgccaatgtttctgaaggaccagttcaatggcaaaaaattaaaactaaaaaaagtagtatttataattgggacgagggatcaacttatgtaaaaagaccaccattttttgataatatgtcggatgaaccagaaggatttaaacaaattaaagatgcaagaccattattaattttaggagatatggtaactacagaccatatttctccagcaggatctttcaaaaagaaagtcc

SEQ ID NO: 282772 - DNA, 882 bp, Unknown
  Bacterial polypeptide expressing nucleotide sequence isolated from the Sargasso Sea
catgcgagacgctgttaaagaaaaaaataaggatccaaactctattaatccgctttcttctgttgatttagtcatagatcattccgttcaggttgatcaatctgccaaatcagattcatttgataaaaatgttgatatagaatttaaaagaaatggtgaaagatattcttttttaaaatggggacagcaagcatttaataattttagaattgttcctccaggaacaggtatttgtcatcaagtaaacttagaatatttatcaaaagtagtttggtcagaaaaatataatgaagataaatatatatttcctgatactttggtgggaacagatagtcatactacaatggtaaatggactttcagttcttggatggggggttggcggtatagaagcagaagcaggaatgcttggtcagccaatttcaatgataattcctgaagtaattggttttgaacttaaaaataaaatgcccgaaggtaccactgcaacagatttggttttaactgttgtaaaaatcttaagagatagaaatgtagtcggtaagtttgttgaattttatggcgatgggttaaaaaatctaactcttgcagacagagcaacaattgcaaatatggcaccagaatatggcgcaacatgtggctttttccctatagatgatgagactttaaagtatttaagattttctggaagagatgaacacactgtaataactgtagaaaaatatgcaaaagaacaaggtttatggtcaagcgacgatatacaatttacagatactgtttcattagatatgtcttcagttgttccaacaatttcaggaccaaaaagaccccaagataaagttttattaaatgatgcaccgtctagttttaaaaatgcttttaa

SEQ ID NO: 282773 - DNA, 964 bp, Unknown
  Bacterial polypeptide expressing nucleotide sequence isolated from the Sargasso Sea
aaaacgtccccaagataaagttttgctaactaatgcatcatcaaattttaaaaaagtgttttcagaagttactaaaaaagaagaaccaaatatttataatgttgaaaaagaagaatttaaaataactgatggtgatgttttaattgctgcaatcacttcttgcactaatacctctaatccaagtgtactaattggagcaggtttacttgcaaaaaatgcaattgaaaaaggtttaatgactaagccatgggtgaaaacatctttagcacctggatctcaagtagttacagactatctagaaaaagctgggctaaatatttatttagataagttaggatttaatttagttggttatggatgcactacttgtattggtaattcaggtccattagccgataatatctcagattccataaaaaataataatatttatgctgtctcggttttatctggaaacagaaactttgaaggaagaatttcacctataataaaagcaaattatttagcgtctccgccattagtcgttgcttatgcaatagcaggaactatgagatttgatttgtataaggatccattaggtaaagataaagatggtaaagatgtttttttaaaagatatatggccatctaacaaagaaatagaagaaacattgagaaattcattaaatgcagaaatgtttataaaaagatactcaaatgtttctcaaggaccagaacaatggcaaaaaattaaaacagaggaaaccaatatttataattgggaagataattcaacgtacgtaaaaaaacctccgttttttgacaaccttcctgataaaccagaaggatttaaagaaattaaggatgcaagaccactattaatattgggtgatagcattaccactgatcatattttcactgctggatcaattcaaaaagatagtccaactggagaatattttatgaaacatcaaatacttccaaaa

SEQ ID NO: 282774 - DNA, 966 bp, Unknown
  Bacterial polypeptide expressing nucleotide sequence isolated from the Sargasso Sea
tttgataaatcctttaaagagaatacagggtcgaaaaattcctttagatggcaaggtagataaaaaaaatttcaaaataaaagatggagatattgtaattggcgcaatcacatcctgtactaatacttcaaatccaagcgttatgatcggagctggattgttggctaaaaaagctgtcgaaaaaggcttaaaagtaaaaccatgggtcaaaacatctttggctccaggttcacaagttgtgactgactatttagaaaaagcaggtttaaataaatatttagaccaattaggttttaatcttgtgggttatggctgtactacttgtataggaaattctggacctttagacaaagatatttctgatactattcacaaagaaaatttatatgcagtttctgttttatcagggaacagaaattttgagggaaggattaatccagatgttaaagcaaactatttagcatctccgccattagtagttgcttacgctttagcaggaaatatgcatcatgatttatataaaactcctttaggcaaagatcaaaaaggaaaagacgtatttttgaaagatatttggccaactaacaaagaaattgaagagttgatattaaaatctattaatgccgacatgtttgttaagcgttactcaaatgtttccaaaggaccaaaagaatggagttctattaaaacagatcaaaccagcatttataattggcaggaaagctcaacatatgtaaagagaccacctttttttgataatttaccagacaaacctgagggatttaaaaaaataaaagatgcacgaccacttttaatacttggagatacagtaacaaccgaccatatctcaccagccggatcaattaaaaaggatagtcccacaggtgattattttatgaaacatcaagttcaacaaaaagattttaattcttatggcgctagaagaggtaaccatgaagttatgtt

SEQ ID NO: 282775 - DNA, 897 bp, Unknown
  Bacterial polypeptide expressing nucleotide sequence isolated from the Sargasso Sea
atatgtcatcaagttaatttagagtatctcagcaagacaatttggacagacttcgatcaggatggtaatttgattgcttatcctgatactctggtgggcactgatagtcataccacgatggttaatggcttggctgttttaggttggggtgtgggaggtatcgaagcagaggcggcaatgctagggcagccgatttctatgctactacctgaagttattggtgtaaaattgactggagaaatgggtgatggtgtgacggctacagacctagttctcagaattgtaaaaattttgcgagactacggggtagttggtaaatttgttgaattttttggtgaaggtctaaaaaatttaaaattggcagatagagcaacgatagccaatatggctcctgaatacggtgccacatgtggttttttcccagtggatgaggaaaccttaaggtatcttgagctatctggtcgaggaaggagcgcaatagaactagttgaatactactcaaaagaaaatggtatgtgggccagttcagaatacgcgcccacctatactgacattatagttctggatactagtgagatagaacctgcaatttctggccctagaagaccacaagaccatgtaccattaatatctgccagcaaaacgtttattgaagagttacgtaaaacctatgatcaaagcatagaaaataaggtcaaggtagaaggagaaaatttttctctaacctcaggaaaaattgttatagctgccattacatcttgtaccaatacttctaatccaagcgtgatgattgcagcagggttggttgcccgtaaggctaaggctttcggcctaaaagctaaaccttgggttaagacatccctcgctcctggtagtaaagttgtttcagattactta

SEQ ID NO: 282776 - DNA, 800 bp, Unknown
  Bacterial polypeptide expressing nucleotide sequence isolated from the Sargasso Sea
attaccagagggaaccacagcaacagacctagttttgacagttgttaagatgttaagagataaaggagtagttggaaaatttgttgagttttttggtgatggattaaaaaatttatcactcgcagatcgagcaactatagctaacatggccccagaatacggagcaacttgcggattttttccggtagataatgaaactttgaaatatttaaaattttcaggaagggatgaaaatgaggtaaaaatagttgaagaatatgcaaaagtacaaggtctatgggcgagcgaagatatagtattcacggacacaatatcacttgatatgtcaaaagtagttccaactatttctggtccaaaaagacctcaagataaagttttattaaatgaagcctcagaaagttttaaaaaagtttttaaagatgcaactggtcgaaataaaaaaagtaattcaaaagttgagaatacagattttgaaattgaagatggatcaatattaattgctgcaattacgtcatgcaccaacacctctaatccaaatgttttaattggtgcaggactacttgcaaaaaaagcagttgagcttggactcaaaactaagccatgggtgaaaacatcattagctcctggttcgcaagttgtaacagactatttagaaaaggcagggttaaataaatatttggatgctcttggatttaacctagttggatatggttgtactacatgcattggaaactcaggtccattaaatgataatattataaaggccatagaaagtaaaaatttgtatggtgtttctgttt

SEQ ID NO: 282777 - DNA, 862 bp, Unknown
  Bacterial polypeptide expressing nucleotide sequence isolated from the Sargasso Sea
gtccttatgcaagattatactggtatacccgcagtggctgatcttgctgctatgcgagatgctgtgaaatcaaaaaaaaaagatccaaaaaaaattaatcctttatctacagttgatttagttattgaccattctgtaatggtggatacttatgcttctaaagattcttttaaaaaaaatgttgaaagagaattttcaagaaatggggagcgttattcttttctaaaatggggacaacaagcttttaataactttagagtagttccgcctggaactgggatttgtcatcaagttaatttggaatatttatcaaaggttgtttggtcatctgataattttgcttatccagatacacttgtgggtaccgatagtcatacaacgatggttaatggactttcagttcttggctggggagtaggcggtattgaagctgaggcggcgatgttgggacaaccaatatcaatgttaattcctgatgtagttggttttaaaattcaaaatagacttccagaaggaactactgctacagatttagttttaacaatagttcaaatactaagacaggaaggagtagtcggaaaatttgttgagttttatggcgatggactcaaaaatctttcattagcagatcgagctactattgcaaatatggcacctgaatacggagcaacttgtggtttttttcctatcgatgaagagactttaaaatatttaaaattttctggaagggatcagcatgtaatttcacttgttgaaaagtattcgaaggagcaaggtctttgggctgataatgatgtgacatttactaaaacattgaatctagatttatcaaaagttttccaagcatatcaggtccaaaacg

SEQ ID NO: 282778 - DNA, 625 bp, Unknown
  Bacterial polypeptide expressing nucleotide sequence isolated from the Sargasso Sea
aaagatagtccaactggcgagtactttatgaaacatcaaattctaccaaaagattataattcttatggatcaaggagaggaaaccatgaagttatgatgagaggaacctttgcaaatataagaataaaaaatgagatagcaccagatacagagggaggatttacaaagttatttcctgaaggaaaagttatgccagtttatgatgctgtagtagaatataaaagaagaggaacagatttagttgtaataggaggaaaagagtatggaactggttcctcaagagactgggccgcaaaaggtacaaaattattgggtataaaacttgtgatcgcagagagttttgaacgaattcacaggtctaatttaattggtatgggagttttgcctttgcaatttacagagggtatggatagaaaaaaactaaatataacaggatctgagttaataagtgttctaaatttggaaaaaggaataaaacctacagaaaaagttgatattgaaataaaatatgtaacaggagatattaaaaaaattaaaatgctttgtagaatagataccaataatgaaatggagtattataagaatggtggaatactacaatatgttttaaggaatatgatctaat

SEQ ID NO: 282779 - DNA, 601 bp, Unknown
  Bacterial polypeptide expressing nucleotide sequence isolated from the Sargasso Sea
tatgaaacaccaagtgcaacaaaaagattttaactcttatggtgccagacgaggaaatcatgaagttatgttgagaggaacgtttggaaatataaggataagaaatgaaatggctccaggcacggaggggggatacacaatattacaaccagatggaaaacagatgagtgtatacgaggcagctgaggaatataaaaaaagaggtaacagtcttgtcgtaattgcaggaaaagaatatgggacaggctcatctagagattgggcagctaaaggaactaaattgttaggtataaaagcagttatcgctgaaagttttgaaagaatacatagatctaatcttgttggaatgggtattttaccccttgaattcaaattaggttttgacagaaaaaaattgaatatcaaaggtacagaattattcactattattgatattgaaaaaggaattaatccaagagcagaagtcagttgtgagattaaatatgctgatggctctagtaaaactatcaaacttttatcaagaatagatactgaaaatgaaattgaatattataagaatggtggaattcttcaatatgttctaaggaacatgatcaattaa

SEQ ID NO: 282780 - DNA, 895 bp, Unknown
  Bacterial polypeptide expressing nucleotide sequence isolated from the Sargasso Sea
caggttgataaatctgcaaaatcagattcatttgaaaaaaatgttgatatagagtttaaaagaaatggcgaaagatattcttttttaaagtggggacagcaagcttttgaaaattttaggattgtacccccaggaacaggtatttgccatcaagttaatttagagtacttatcaaaagtagtatggcacgaaaaatttgaaggagaaaaatatttatttccagatactttagtaggaactgatagtcataccacaatggtaaatgcattatcaattcttggttggggcgttggtggaatagaagcagaagcaggaatgttaggacagccaatttcaatgttaataccagaagtaattggttttgagtttacaaataaaatgccagaaggaagtacagctacagatttagttttgacagtagtaaaaatgttaagagacaagggagttgtgggaaaatttgttgaattttacggtgagggattgaaaaacttaactcttgcagatagagcaactatagcaaacatggctcctgaatatggtgcaacttgtggttttttccccatcgataatgagactttaaagtatctgagaatttcaggaagagatgaaaaaactataaatattgtagaaaattatgcaaaagaacagggtttatgggagagtaataacattgaattttcagatactctatccttagatatgtcgacagttgtgccaacaatttctgggccaaagagaccccaagataaagttttattaagcgacgcgtcatctaaatttaaaaatgtttttaaaagcactacaggaaggaaagaaaaaaaaatatcaaaagttaaagaaactgattttgaaattagagatggttccatattaattgctgcaataacttctgcac

SEQ ID NO: 282781 - DNA, 904 bp, Unknown
  Bacterial polypeptide expressing nucleotide sequence isolated from the Sargasso Sea
catcagggacatggagtagatatttcagaaaaagatcgttctgtcgaagtatctgctcctgatggttctaattttaaattacaacatggtgatgtagtcatagcagccattacatcttgcactaatacatccaatccgagtgtaatgatggctgctggtttattggctagaaatgcaaagttaagaggtttgaaagttaagccgtgggttaaaccaagtcttgctcccggaagtagagttgttactgaatattatgacgctgctgaactttctgatgacctttcagatatgggtttcaacgttgttggatatggttgtactacttgtatcggaaattcaggccctcttgatgagcatatcgaatcaggtatcgatgaaggtgatttgattgtgggctcggtgatttctggaaatagaaacttcgagggccgtgtccaccagaaggtcaaggcgaattatctggcaagccctcctctggtagttgcctacgcacttgcaggaacattagatatcgattttgaaaaagatccaattggaatagattcagacggagttcctgtaatgttatctgaaatttggccgagtgatgctgagattagtgcatctgttgcttcatctatttctcctcaaatgtttagagaacgttatgcagatatcatgcaagaacctcgttgggattctattgagagttcttcttcgccgttatacccttggaaggaagaatctacgtatgttcgtttaccatcgttctttgaaggaattgaacctaatccgtcgccaatagatccagtaaaaggagctcatgttttattgaaacttggagattcagttacaacagatcatattagtcctgcaggagccttccctaagtctggacctgctgggaaatatctcgtttctaacg

SEQ ID NO: 282782 - DNA, 757 bp, Unknown
  Bacterial polypeptide expressing nucleotide sequence isolated from the Sargasso Sea
gacctaaacaaaattccaatttcaataaaagttataatagaaaatttacttagaaatgaagatggagaaaatgttagtaaagatatgatttcaaaaatattttcttctttaaaatatactacaaaagaagatgaaaaaattgaaatatcgttcttcccaactcgtgtactaatgcaagattttactggtgtgccagctgttgcagatttagcagcaatgagaaatgcacttaaatcaagaggaatagagccaaaaaagataaatccactttctagagtagatctagttatagaccactctgtaatggttgataactacaaaaatagcaacgcattaaaagaaaacgttaagaatgaatttaatagaaacaaagaaaggtatgaatttttaaaatggggtcaaagttcatttaataacttttatctagtgcctcctggtgctggaatttgtcatcaggtgaatttagaaaatatcgcaaaaacagtatggttaaaagagatagaaaataaaaaatatttatttccagattctgtagtaggtacagacagtcatacaacaatggttaattccctgtccgttcttggttggggtgtaggaggaattgaagctgaagcagcaatgttggggcaagctatctcaatgaatatcccagatgtagttggttttgaacttaaaggatctttgaaggaaggaattacagcaactgatttagttttatcaataactaaaattcttagagataaaggagtagtaggaa

SEQ ID NO: 282783 - DNA, 838 bp, Unknown
  Bacterial polypeptide expressing nucleotide sequence isolated from the Sargasso Sea
ttagtaggatacgggtgtacaacttgcattggaaattcagggccacttccagaaaatattgtagaagcaattcaaaaagaaaatatttatgcggtttcagttttatcaggaaatagaaatttcgagggaagaatttctccacatataaaagctaactatctggcttcacctccacttgttgttgcatatgcaatagctgggcatatggaagttgatttgtacaaagatccattaggaaaagataaacaaggaaaagatgtatttttaaaagatatttggccttccaataaagagatagaagatattttaaaagattcacttaatgcagagatgtttatacaaagatattcaaatgtttctgagggtccaactcaatggcaaaaaattaaaactgataaaagtagtatctataattgggataagggatcaacatatgttaaaaaacctccattttttgactcgttaccagataaaccagacggatttaaagaaattaaggatgcaagaccgttattaattttaggtgatatggttactactgaccatatatcgccagctggcagtattcaaaaagatagtccaactggtgaatatttcatggaacaccaaattttacctaaagattataattcatatggttcaagaagaggtaaccatgaagttatgatgcgaggaacttttgcaaatataagaattagaaatgaaatggctcctggtacagaaggtggttttacaaagttatatcctgaagaaaaagttcttcctgtctatgatgcagttgttgaatataaaaaaagaggaacagatttagttgtaataggcggtaaagagtatggaa

SEQ ID NO: 282784 - DNA, 778 bp, Unknown
  Bacterial polypeptide expressing nucleotide sequence isolated from the Sargasso Sea
ttagatatgtccactgtagttccaactatatcaggtcctaaaagaccacaagacaaagttcttttaactaacgcatcaagcaattttaaaaaagtatttaaagaggctacagataaaaaagattacaaaatttctaatgtaaaaggtacagattatgaaattaaggatggttcaatattaattgcagcaatcacatcatgtactaacacttctaatcctaatgttctaattggagctggccttttagctaaaaaggctgttgagttaggactaaatgttaaaccatgggttaaaacctctttagctccagggtctcaagtagtaacagattatttagagaaagccggtctaaatacttacttagatcaattaggatttaatttagttggttatggttgcacaacttgtatcggtaattcaggtcctttagcagaaaatatagtagacgctattcaaaaagataatttatacgcagtgtctgttttgtcaggtaacagaaactttgaaggaagaatttcacctcatatcaaagcaaattatttagcctctccaccacttgttgttgcttatgctcttgcaggtcacatggaatttgatttattcaaagattcatttggaaaagataaaaatggtaaagatatttttttaaaagatatctggccttcaaataaagaaatagaggatactttaaaaaattctttaaatgcagatatgtttgttaagcgatattcaaatgtgtctgaaggaccaaaacagtggcaagaaatcaaaacagaaa

SEQ ID NO: 282785 - DNA, 820 bp, Unknown
  Bacterial polypeptide expressing nucleotide sequence isolated from the Sargasso Sea
tttgctaaagcttataaagaaaacacaaagtagagaaaaacctattcaagcagacgttgctggtgctgattttaaaatcactgatggagatattgtaatagcagctattacttcttgcactaacacttcaaatccaagtgtaatgattggcgcgggactacttgcaaaaaaagctatagaaagaggtttaaaaattaaaccatgggtaaaaacttctttggctccaggatctaaagtagttacagactatttagaaaaagcaggtttaaataaatacttagatgaactcggatttaatttagttggttacggttgcacaacatgtattggaaattctggtccacttaataagaatatttctgatgcgatccacaaagaaaatttatatgcagtttcagttttatcaggaaatagaaattttgaagggagaataagtccagatgtaaaagccaattatcttgcttcaccaccgcttgtagttgcttttgctttagctggtaatatgaattttgatatgtacaaaaattctcttggcactgacaaagaaggtaaagaagtatttttaaaagatatttggccaagtaataaagaaattgaagacataatgttaaagtcaattaatgcagaaatgtttattgatcgctattcaaatgtttcagagggaccaaaagaatggagcgctatcaaaacagtagatagtagtatttataattgggaagataactctacatacgttaaaagacctcctttctttgataatttaccagatcaaccagagggatttaagccaatcaaagacgcaagattattacttttactg

SEQ ID NO: 282786 - DNA, 840 bp, Unknown
  Bacterial polypeptide expressing nucleotide sequence isolated from the Sargasso Sea
atggccctacagaatggcaagaattatcaacttccactggggtaaatttcaaatgggatcttgaatcgacttacattcaaaaaccaccatattttgaaaacttttcccaaaaacctcaatcaaaatcagaaattttaaatgcccgagttttggtgagtgtacaagattcagtaactacagaccatatctctcctgcaggatctatacctcctagtgccccagcaggacaattcttaacttcaaatgatgtacctcgacatcaatttaactcttttggttctagaagaggtaatcatgatgttatggcaagaggaacttttggaaacatcagattaagaaatcaattagttcctgatcttgagggagattggacaatccacttaccttcaaaagaatctatgcgtatttatgaagcatctgaaaaatataaacaagaaaatgtcccattaattattcttgcaggaaaagaatatggcacaggaagttctagagattgggcagcaaaaggccctatgttgcttggagtaagggctgtaattgctgaaagtttcgaacgaatccacagatctaatctaatcggaatgggagttctacctttggtattccaaaagggggagtctgttaaatcattgggattagatggaacagaaacatttgatatacctgacgtttcaaattcagttacacccggatctacaattcatatcaaagcaacagcagaaaacggtaatgtaactgaatttgatgtactagcaagaattgatactgcgattgaaaacgaatactacaagcatgggggattacttccttatgtattaagacaaatgatgcttgattaag

SEQ ID NO: 282787 - DNA, 748 bp, Unknown
  Bacterial polypeptide expressing nucleotide sequence isolated from the Sargasso Sea
atctgctcttggaaaagataaagatggtaaagatgttttcttaaaagatatttggccaagcaataaagagattgaagatttaatgttaagttctttgaatgcagatatgtttaaacaaagatattcaaatgtttcagaaggacctaaagaatggcaagctattaacacaacagatagtgatatttataactgggaagctaattctacatatgtaaaaagaccaccattttttgataatttgcctgatcaaccagaaggttttaagcccatcaatgatgctagaattcttttattactagctgactcagtaacaacagatcatatttcaccagcaggaagtattaaaaaagaaagtccaacaggtgattattttatgaagcaccaaatacaacaaaaagattttaactcttatggtgcgagaagaggaaaccatgaagtaatgatgagaggaacgtttggaaatattaaaataagaaatgaaatggcccctggcactgaaggtggatttacaacgttacagccagatggaaaagtaatgagcgtttatgaagctgcaatggaatataaaaaaagaaaaaacgatttagttgtaatagctggaaaagaatacggaacaggatcatcgagagattgggcagctaaaggaactaaacttttaggaatcaaagctgttttagcagaaagttttgagagaattcatagatcaaatttaattggaatgggggttttacctcttcaatttaaagaa

SEQ ID NO: 282788 - DNA, 820 bp, Unknown
  Bacterial polypeptide expressing nucleotide sequence isolated from the Sargasso Sea
ccattcagtaatggtagatagttataaagataataatgcattaaaagaaaatgttagtaaagaatttgatagaaataaagaaagatacgaatttcttaaatggggccaaagttcatttgataacttctatcttgttcctccaggctcgggtatttgtcatcaagtaaatttagaaaatattgctaaaaccatatggctaaaagaaattaataatcaaaaatacttattcccagactctgttgtaggaacagatagccatacaacaatggttaattcactctctgttttaggatggggagttgggggaatagaggctgaggcagctatgttgggtcaagccatatcaatgaatattccagaagtaattggatttgaactaaaaggatctctaaaagaaggtattacagctactgatttagttttatcaataactagtattttgagaaaaaaaggagttgttgggaaatttgtagaattttatggcggcggtctaaaaaatctatccttagctgatagagcaacaatttctaatatggcaccagaatatggtgcaacttgtggattttttccaacagacgaagaaacaattaattaccttagattaacaggtaaggataatgaacatttaaatatagtagaaaaatattcaaaaaagcaaaatctttgggctaatgaaaactatgcaccagaatattctgaaaaaataatattagatttggatcaaatagaaccttcacttgctggcccaaaaagacctcaagataaaattttattaaaagatgtccctaaagaatttagtaaattagataaaaattcttat

SEQ ID NO: 282789 - DNA, 911 bp, Unknown
  Bacterial polypeptide expressing nucleotide sequence isolated from the Sargasso Sea
catgaacatacctgaggtagttggttttgagcttaaaggctcattaagagagggtattaccgcaacagatttagtgcttactattacaaaaattttaagggaaaatggtgtggttggaaaatttgttgaattttatggagaaggtctatcaaacttatcattggctgatagggcgacaatttcaaatatggcccctgaatatggggcaacgtgtggtttttttccaactgatgaggagacgataaattatttaagattaactggtaaggatgaacaacatttaaacattataagatcgtattcaaaaaaacaaacgatgtgggttgataaaagttataatccaaaatttggaagtaaaattgttttagatttagaaaacatagaggcttcattagctggccctaagagaccacaagataaaattttactaaaaaatgtacccaatgaattcaataaaatagaacaaaaagtagatacaatcaaagatgctaaattaaatacaggtgatattgttattgctgcaattacaagctgtactaatacctctaatcctaatgtaatgattgctgctggtttagttgcaaaaaaagcttttgagctaaatttaacagtaaagccatgggtaaaaactagcctagctcctggaagtaaagtagttagtgattatttagataaagctgaattaacaccttttttagattatttaggttttaatactgtgggatatggttgtaccacttgtattggaaattcaggtcctttagatgaatggattgcagatgaaatacaaacaaataacttaactgtttgttctgtattgtcaggaaatagaaattttgaaggaagggttcaccaacatgttaaggcaaattttttagcttctccaccattagtagttgcatacgctttag

SEQ ID NO: 282790 - DNA, 727 bp, Unknown
  Bacterial polypeptide expressing nucleotide sequence isolated from the Sargasso Sea
ataatatttagtgatactttatctttagacatgtcaactgtagttccaactatatcaggacctaagaggccacaagataaagtttttttgacagatgcagcacaaaattttaaagaaaattttaagaaatacactaatagagatgattttttaaaagcaaaagtcaagaacgcagattttgacatacaagatggttcaatattaattgcggcaattacctcttgtacaaatacttcaaatccaaatgtgcttattggtgcaggtcttttagcaaaaaaagcttgtgaacttggtttaaaatctaagccttgggtcaaaacttctcttgcgcctggatctcaagtagtaactgattatttagagagagcaggtttaaatacatatttagataaattaggttttaacttagttggatacggatgtacgacttgtattggaaactctggacctctcgcagaaaacatttctgaatctgtgagcaaaaataatctatatgcagtttcagttctttcaggaaatagaaattttgaaggtagaatatctccattagttaaagcgaactatttagcatcaccacctttagttgtagcatatgcaattgcgggaaatatgcaaattgacttatataaagatcctctaggtaagtctcatgacggagaagatgtttttttaaaagatatttggccgtctaatcaggagatagatgatcttttaaaagaatctctca

SEQ ID NO: 282791 - DNA, 895 bp, Unknown
  Bacterial polypeptide expressing nucleotide sequence isolated from the Sargasso Sea
ggcttgtcagttttaggatggggagttggcggtatagaagcggaagcaggcatgttaggtcaaccaatttcaatgttaattcctgaggttattggcttcgaagttaaaggtaaaatgcctgaaggtaccactgcaactgatttagttttgacaattgtaaaaatgttaagagataaaggcgtagttggaaaatttgttgagttttatggagaaggattaaaaaatttaacattagctgatcgggctactattgctaatatggctccagaatatggtgctacctgtggtttttttccaatagatgatgaaactttaaaatacctaaaattttcaggaagagatcaattaacagttaagatagtcgaggagtatgcaaaagcacaaggtttgtgggctagtaatgatatagaatttacagatactttaattttaaatatgtcaactattgttccaacaatctctggacctaaaagacctcaagacaaagtgttattaactgaagcttcaacaaattttaaagaaagcttttcagcaataacaaaaaaaaaagatttttcatcttttaaaatttctaatacagattatgaaataaaagatggttcaattttaattgcagcaataacatcttgcactaacacttctaatcctaatgttcttatcggagcaggtttacttgcaaaaaaagcagtagaattaggacttgaagtaaaaccatgggtaaaaacttcattagcacctgggtcgaaagttgttacggattatttagagaaagctgggttaaatacctatttagataaacttggatttaatcttgttggctatggttgtactacttgtattggaaattctggtccattagctgaaaatattgttgaggctattcaaaaagaaaaca

SEQ ID NO: 282792 - DNA, 815 bp, Unknown
  Bacterial polypeptide expressing nucleotide sequence isolated from the Sargasso Sea
agaaattgcatatagacctgctagagtacttttgcaagattatacaggtataccagctgtagccgatcttgctgcaatgagggatacagttaaggaaaagaacaaagatccaaatacaattaaccctctctcttcagttgatcttgtaatcgaccattctgttcaagtagataagtttgcaacaaaaaattcgttaaaagaaaatgttgatattgagtttgaaagaaactttgagagatattcttttttaaaatggggacagcaagcctttaataactttagaattgttccaccgggtactggaatttgtcaccaagtaaatttagaatatttatcaaaagtagtctggaacgaaaagtttaaaaataaagagtatttatttccagatacactagttggcactgatagtcataccacaatggttaatggtttatcagtactaggttggggtgttggaggaattgaagcagaggcaggtatgctgggacaacctatatcaatgttgataccagaagtggttggatttgaaatgaaaaataagctacctgaaggtacaactgctaccgatctagttttaacagtagttaaaatgttaagagataaaggtgttgtaggtaaatttgtagaattttatggagaaggtctaaaaaatctaacacttgctgatagagcaactattgcaaacatggcaccagagtatggtgctacttgtggattttttccaattgatgaagaaacattaaaatatttagaattttcaggaagatcaaaagagaatattcaaattgtagaaaaatacgcaaaagaacaaaatt

SEQ ID NO: 282793 - DNA, 769 bp, Unknown
  Bacterial polypeptide expressing nucleotide sequence isolated from the Sargasso Sea
cgaaagatcaaattcttgcttttgcaaaaatggttaaaagataaaaagtctgagacagaaattgcgtatagacccgctagagtacttttacaagattacacaggaatacctgcagttgcggatttagccgctatgcgtgaggcagtaaaagaaaaaaatagggatccacaaataatcaatccgttgtcctctgttgatttggtaatcgatcattcagtacaagtcgataaattttcaacaccagactcattaaaaaagaatgttgaaattgaattccagagaaatgctgagagatattcttttttgaaatggggacaacaagcttttgataattttagaatagttcctccaggtacaggtatatgccaccaggtaaatcttgagtatctttcaaaagttgtatggaaagaaaaatttgaagataaagattacatttttccagatactttagtaggaactgatagtcatactaccatggtaaatggattatctgttctaggatggggagtaggaggtatagaagcagaagccggcatgcttggtcaaccaatctctatgctaataccagaagtaattggttttgagatcttaaacaaacttccagaaggaacaacagctactgacttagtgttgacaatcgtaaaaatgttaagagataaaggtgtagttggaaagtttgttgaattttatggtgaaggacttcaaaatttaacactagctgacagagcaactatagcaaatatggcaccagagtacggagcaacttgcg

SEQ ID NO: 282794 - DNA, 775 bp, Unknown
  Bacterial polypeptide expressing nucleotide sequence isolated from the Sargasso Sea
agaaattctacttacgtaaaaaagcctcctttttttgaaaatttatctgatgagcccgaggatataaaagatattcatgaagctagacctttattaatattgggagacatgattacaacagatcatatttctccagctggatcaattcaaaaagaaagtccaacaggagaatattttatgaaacatcaaatattaacaaaagattataattcatatggagcgagaagagggaatcatgaagtaatgatgagaggtacatttgctaatattagaataagaaatgaaattgccccagaaacagaaggtggatttacaaaattatatccagaagaaaaaattttgccagtatatgatgcagttgtagagtacaaaaaaagaggcaccgatctagtagttattggaggaaaggactatggtactggatcttcaagagactgggctgccaaagggacaaaactcttaggaattaaagcaatattagctgaaagttttgaaagaatacatagatcaaatttaattggaatgggagtattgccattgcaatttattgaaaaaatgaatagaaaaaatttaaacctaaaaggacctgaattaattagcattctcaatattgaaaaaagtttaaatccaagcgatcatgtagaagtccaaattaaatatcaatcgggagagttaaaaaaaattaaaatgttatgtcgaatagatactaaaaatgaattagaatactataaaaatggtggaattttacaatacgttttaaggaaaatgatttaat

SEQ ID NO: 282795 - DNA, 810 bp, Unknown
  Bacterial polypeptide expressing nucleotide sequence isolated from the Sargasso Sea
caattaacagttccacaaatactacttacaactggaacgatactagcacttatataaagcacccacctttctttgatgtgcaaaataaatttgatttaaatgatataaaagaagcaagaatattagcattgctaggtgatagtgtaacaacagatcacatttctcctgctggaagtatcaaggaagacagtccagctggccactacttaacagacagacaaattaattctagaaatttcaattcctatggttcaagacgtggtaatcatgaaattatgatgagaggaacatttgcaaatataagaatcaagaatcaaattttagataatgttgaaggaggctatactaaatcatttatctcaaataaacaaacttcgatttatgaagcagcgcaagagtatataaaaaacaacgttgatacagtaataatagcaggtaaggaatatggcactggatcatcaagagattgggcagctaagggcacaagactattaggagtaagagcggtgattgctgaaagttttgagagaattcatagatcaaatttaattggaatgggagttttgcctcttgaatttacccaaacagaaaacaaagaaaatctaaatattaaaggtgaagaaactataactatatctggtttagctgaactaaagcctggaataattcttaattgtaaaattaatgcagcaaaaactaaagttataaatttaaagtgtagaatagatacaaacaaagaattagagtattacaaagctggaggaattttaaactacgttttaaatgaaataatatctgaagctgcttaat

SEQ ID NO: 282796 - DNA, 791 bp, Unknown
  Bacterial polypeptide expressing nucleotide sequence isolated from the Sargasso Sea
agccggattaaacatttatctagatcaacttggcttcaatttagttgggtatggctgtacaacttgcattggaaattcaggaccacttgctgaaaatattgtagaagcaattcaaaaagaaaatatttatgctgtttcagttttatctggaaatagaaattttgagggaaggatttctccacatataaaagctaattacctagcgtcgcctccgttagttgttgcatatgcaatagctgggcatatggaagttgatttgtataaagatccattaggaaaagataaagaaggaaaagatgtatttttaaaagatatttggccttcaaataaagagatagaagacactttaaaagattcacttaatgctgagatgtttatacaaagatactcaaatgtttcagagggcccaactcaatggcaaaaaattaaaactgataaaagcagtatctataattgggatgagggatcaacatatgtaaaaaaacctccgttttttgactcgttaccagataaaccagaaggatttaaagaaattaaggatgcaagaccattattaattttaggcgatatggttactactgaccatatatctccagctggcagtattcaaaaaaatagtccaaccggtgaatatttcatggaacaccaaattttacctaaagattataactcatatggttcaagaagaggtaaccatgaagttatgatgcgtggaacttttgcaaatataagaattagaaatgaaatggctcctggtacagaaggtggttttacaaagttatatccagaag

SEQ ID NO: 282797 - DNA, 768 bp, Unknown
  Bacterial polypeptide expressing nucleotide sequence isolated from the Sargasso Sea
aacaaaatgccagaaggaacaactgctacagatctagtattaactgttgttaaaatgttaagagataaaggagtagttggaaaatttgttgaattttatggtgagggtttaagtaatttaacactagctgacagagcaaccatagctaacatggcacctgaatatggagcaacttgtggtttttttcctgtagacgaagaaactttaaaataccttaagttttctggacgcgatgaacatactgttaagattgtagaaaaatattcaaaagaacagggattatgggcaagcgataatatagtttttacagacaagatttctttagatatgtctaccatagtaccaacaatatctgggccgaaaagaccccaagataaggttttgttgagccaagcttcggaagattttaaaaatgtatttcaaaacatgaccggaagaaaaaaaaataatatatcaaaagttaaaaacacagattttgaaattaaagatggctcaatattaattgcggcaatcacatcttgcacaaatacttcaaatccaaatgttttgattggagcaggattattggcaaaaaaagctgtagaaatgggtcttaccactaaaccatgggttaaaacttctttagctccaggatcacaagtagtgactgattatttagagaaggcaggtcttaataaatatttagataagttaggattcaatttggttggttatggatgcactacttgcataggaaactcaggaccactgccagaaaacattgttgag

SEQ ID NO: 282798 - DNA, 668 bp, Unknown
  Bacterial polypeptide expressing nucleotide sequence isolated from the Sargasso Sea
aaaagtagttacagattatttagaaaaagcaggattaaataaatatttagatcaacttggttttaatttagtcggatatggttgcactacttgtattggaaattcagggccgcttaataaaaatatatctgaggtaattcataaagaaaatttgtatgctgtttcagtattatcgggtaatagaaactttgaaggcagaataagtccagatgttaaagctaattatttagcttcaccaccgcttgtagttgcttttgctttagctggaaatatgaattttgatctatataaaactcctctaggaatggacaaagatggaaaagatgtttttttaaaagatatttggccgagcaataaagaaattgaagatataatgttatcatctattaatgccaatatgtttatagatcgctattcaaacgtttctgaaggacctaaagaatggagttcaattaaaacagtagacagtagtatttataattgggagtcaaattctacttatgtaaaaaaaccacctttttttgatgatttaccagataaaccagagggctttaaagcaattaaagatgcaagaatattacttttgctggctgactcggttactaccgatcatatctccccagccggaaatattaaaaaagatagtcctacgggtgattattttatga

SEQ ID NO: 282799 - DNA, 959 bp, Unknown
  Bacterial polypeptide expressing nucleotide sequence isolated from the Sargasso Sea
agcagaaaaaatggtttaaatggtgtttctagacttccaaaatcattaaaagtattattagaaaacttacttagatatgaagacgatcttactgttaataaaaaccaaattttagcaattaaagattggcttagaacaaaaaaatcaaatatagaaattgcttatagaccagcaagagtattgcttcaggattatacaggaataccagcagtagcagatttagctgctatgagagaagcagttcaagaaaaagacaaagatccaaatactatcaatccactgtctgcagttgatctggtaattgatcattcagttcaagtcgatcaatcagcaaaaggagattcttttgataaaaatgttgaaatagaatttaagagaaatggagagcgttattcttttttaaaatggggacaaaatgcatttgataattttagaatcgttcctccaggaactggaatttgtcatcaagtgaatttagaatatctttctaaagttgtttggttagaaaaagtaaatgatgaaagctatattttccccgatactttggtaggtacagatagccacacaacaatggttaacggattgtcagttttgggctggggagtgggaggtattgaagcagaggctggtatgttaggtcagcctatctcgatgttaattcctgaagtaattggatttgaagtaaaaaataaaatgcctgagggcacaacagctacagatttagttttaaccgttgttaaaatgttaagagacaaaggcgtagttggaaaatttgttgagttttatggagaaggtttaaaaaatcttactttagccgatagggcaaccatagcaaatatggcacctgaatatggagcaacttgtggtttttttccaatagacgaagaaacattaaagtatcttgaattttctggtagagataaacaaacggtaaaaattgttgaacgatatgcaaaagc

SEQ ID NO: 282800 - DNA, 865 bp, Unknown
  Bacterial polypeptide expressing nucleotide sequence isolated from the Sargasso Sea
tatttgaaattttctggaagagatcaacaaactgttgatatcgtagaaaattatgccaaggaacaaggtttatgggcgagtaacgaaatagaatttactgacattatatctttagatatgtccacagttgtaccaactatttcaggacctaaaagacctcaagacaaagttcttttaaccgatgcacctagttcgtttaaaaaagtattgcaggaagccacaaataaatatgaaaagtcaatttcgaaagtatcaaatacagattacgaaattaaagatggctcaatattaattgctgcaataacttcttgtacgaacacttctaatccaaatgttctaatcggggctggactattagctaaaaaagctattgaaaaaggtttgcaggttaaaccctgggtaaaaacttctctagcacctggatctcaagtagtgacagactatttggcaaaagctggattaaatacttatttagatcagcttggctttaatttagttgggtatggctgcacaacttgcattggaaattcaggaccacttccagaaaatattgtagaagcaatccaaaaagaaaatatttatgcagtttcagttttatcaggaaatagaaatttcgagggaagaatttctccacatataaaggcaaactacctagcatcacctccgctagttgttgcatatgcaatagcaggtcatatggaagttgatttatacaaagatccgcttggaaaagataaagaaggaaaagatgtttttttaaaagatatttggccttcaaataaagagatagaagacactttaaaagattcacttaatgctgaaatgttcatacaaagatactcaaatgtttctgagggcccaactc

SEQ ID NO: 282801 - DNA, 838 bp, Unknown
  Bacterial polypeptide expressing nucleotide sequence isolated from the Sargasso Sea
tttaaaatatttaaaattttctggaagggacaagcataccgttgatattgtagaaagctatgccaaggaacaaggtttatgggcaagtgatgatattgtttttactgataaattaactctagatatgtcatctgtggtgcctacaatttcaggtccaaaaagaccgcaggataaagtattgttaaatgaagcatctaaaaattttaaaaaagtttttgaagaggttgctaaaaaatcaaaaatatccacttcaaaagttgaaaatgaagaatttgaaattaaagatggtgatatagtcatagcagctataacttcctgtacaaacacatctaaccctaatgttttgattggcgcaggattacttgcaaagaaagctatagaaaaaggtttaaaaacaaaaccttgggtaaaaacttctttagcaccaggatctcaagttgttactgattatttagaaaaagcaggattaaataattatttagatcaattaggttttaacttagtaggatatggctgcacaacatgcattggtaattcaggtcctttacaagaaaatatttcagatgctataaaaaaagaaaatatttacgcagtatctgttttatcaggcaatagaaattttgaaggaagaatttcaccattagttaaagccaactatctagcatctccccctcttgtagttgcctatgctttagctggaagaatgagtatagatctctataaagatcctttaggtaaagatagagaaggtaatgatgtttttttaaaagatatttggccaagcaataaagaaattgacgatactcttaaaaattctttaaatgcagatatgtttgta

SEQ ID NO: 282802 - DNA, 763 bp, Unknown
  Bacterial polypeptide expressing nucleotide sequence isolated from the Sargasso Sea
ggtaaatttagaatatttatcaaaagtagtttggaaagaaaagtttgacgataaagagtatttatttccagacacactagttggaactgatagtcatactacaatggttaatggtttatcagtactaggttggggagtaggaggaattgaagcagaagcaggtatgttgggacaacctatatcaatgttgataccagaagtagttggatttgaaatgagaaataagttacctgaaggcacaactgctactgatttagttttaacagtagttaaaatgttaagagataaaggtgttgttggcaaatttgtagaattttatggagaaggtctaaaaaatctaacattagctgacagagcaactattgcaaacatggcacctgagtatggtgctacctgtggattttttccaattgatgatgaaactttaaaatatttagaattttcaggaagatcaaaagaaaatattcaaatcgtagaaaaatatgcaaaagaacaaaatttgtgggcaagtgaagaagttgttttcactgatactttatctttagatatgtctacagtagttccaacaatttctggaccaaaaagacctcaagataaagttcttttaacagaggcatcaaaaaattttataaaagtttttgaagatatatgcaaaaaaactgaacctacagtggcaaaagttaaagactcagattttgaaataaaagatggagatatattaatagcagccattacatcatgtacgaatacctccaatccaaat

SEQ ID NO: 282803 - DNA, 781 bp, Unknown
  Bacterial polypeptide expressing nucleotide sequence isolated from the Sargasso Sea
gtctttggcagacagagcaacaatatcgaacatggcaccagaatatggggcaacttgtggcttcttccctacagataaagaaacaattaattatcttgaattaactggaaaagataaacatcacctagagattgtaaaaaaatattcaaaaaaacaatcaatgtggattgataaaaattataatccaaattttgataaaaagattttattagatcttaactcaatagagccctcattggcaggcccaaaaagaccacaagataagattcttttaaaaaacattcccgaagaatttaaaaaaacacaaaaaaattttaaacacaagaatgaaaataagcttaatacaggcgatattgtaattgctgctattactagttgtacaaatacatcaaacccaagtgtaatgatagctgcagggcttttggcaaagaaagctgtagaatttggattaaatattaaaccttgggtaaaaactagtttagcaccaggtagtaaagttgttagtgattatttggacaatgcagggttaacaaattatttagaaacaattggtttctacacagttggctatggttgtacaacttgtattggaaactcaggccctttagattcatggatttcagatgaaatttcttcaaaaaatttaactgtttgttctgttctttctggtaatagaaattttgaaggaagagttcatcaaagtgtaaaagcaaactttttggcttcgccaccgttagtagttgcttatgcaatagctggtaatatccatgtgaatctaatg

SEQ ID NO: 282804 - DNA, 916 bp, Unknown
  Bacterial polypeptide expressing nucleotide sequence isolated from the Sargasso Sea
tattttggatcaactaggatttaatttagttgggtatggatgtactacttgtattggtaattcaggtccactatctgaaaatattgtagaagcgatccaaaaagaaaatatttatgcagtttcaattttatcagggaatagaaattttgaaggaagaatttctcctcatattaaagctaattatctagcttcacctccactagttgtggcatatgcaatagctggacatatggaagtagatttatataaagatccgttaggaaaagataaagacggcaaagaagtatttttaaaagatatttggccttctaataaagagatagaagatactctaaaactgtcacttaatgcagatatgtttatacaaagatattccaatgtatctgagggcccaactcaatggcaaaaaatcaaaaccgacaaaagcagcatctacaattgggatgaggattcaacctatgtaaaaaaacctccattctttgactctttatcagatgaaccagagggatttaaagaaataaaggatgcaagaccattattaatattaggggacatggtaacaacagaccatatatcaccagctggcagcattcaaaaagatagtccaactggtgaatattttatggaacatcagattttgccaaaagattttaactcttacggttcaaggagaggaaatcatgaagttatgatgagaggaacgtttggaaatataagaattagaaatgagatggcaccaggtacagaaggtggttttacaaagttatatccagaagaaaaagttcttcctatttacgatgctgtggttgaatataaaaaaagaggcacagatttaattgtaatcggtggaaaagaatatggaactggatcttccagagactgggctgctaaggcacaaattataaggataaagcag

SEQ ID NO: 282805 - DNA, 744 bp, Unknown
  Bacterial polypeptide expressing nucleotide sequence isolated from the Sargasso Sea
tgatcattcagtacaagttgatcaatctgcaaaagcagactcctttgagaataatgttgatatagagtttaaaagaaatggagaaagatattcttttttgaaatggggtcagcaggcatttaataattttagaatagttccacctggaactggaatttgtcatcaagtaaatctagaatatttatcaaaagtagtttggtctgaagaatttaaaggagataagtatctttttcctgatactttagttggtactgatagtcatacaacaatggttaatggtttatcggttttaggttggggtgttggcggtattgaggctgaagctggaatgttaggtcagccaatatccatgttaattcctgaggtaattggttttgaaattaaaaataaaatgcccgaaggaacaacagcaaccgacttagttttaacaatagttaaaatgttaagagataagggagttgtcggtaaattcgttgaattttatggagatggattaaaaaatctaactctagcagatagagctactattgcaaatatggcaccagagtatggagcaacatgtggtttctttccaatcgatgaagaaacactaaaatatcttaaattctctggaagagataatcatacagtagatattgttgaaaaatatgccaaagagcaaggtttatggacaagcaatgaaatagaatttacagatattttgtctttagatatgtctacagttgttcctactatttcaggtcc

SEQ ID NO: 282806 - DNA, 780 bp, Unknown
  Bacterial polypeptide expressing nucleotide sequence isolated from the Sargasso Sea
aaaattttattaaagtctttgaagatgtgtgtaaaaaaactgagcctactattgctaaagttgaaaaagctgattttgaaattaaagatggcgatatcttaattgcggctattacttcatgtacaaatacgtcaaatccaaatgtgttaattggcgcaggattattagctaaaaatgctattaataaaggattaacggttaaaccatgggttaaaacttcattagctcctggatcacaagtggttacagactacttaaacaaagctagtttaagtaaatatttagataaattaggctttaacttagttggttacggatgcaccacttgcatcggtaactcgggacctctatcagataatataactgatgcagttaaaaaaaataatttatatgcagtatcagttttatctggcaatagaaattttgaaggtagaatttcaccactggttaaagcaaactatcttgcttctccgcctttagtagtagcttatgcaattgctggatcaatgagaattgatttgtacaaagatcctctaggtaaagatagtgatggtaaagaagtctacttaaaagatatttggccaacaaataaagaaatagaagatactcttattgagtctttaaaccctgaaatgtttgtaaacagatactcaaatgtctctaagggacctgagcaatggcaaaaaattaaagttgataaaggcagcatttacaattgggaacaaaactcaacttatgtaaaaaaaccaccatttttgaaaatttgccagagaacctgag

SEQ ID NO: 282807 - DNA, 863 bp, Unknown
  Bacterial polypeptide expressing nucleotide sequence isolated from the Sargasso Sea
gcaagtagtaactgattatttggaaaaagcaggtcttaataaatacctagatgaactaggatttaatttagttggctatggatgcacaacatgcattggaaactcaggtccattgcctgataatattgtagaagcaattgaaaaagaaaatatatatgctgtatcagttttatctggtaatagaaattttgaaggtcgtatatctccacacataaaagcaaattatttggcatcgcccccactcgttgttgcttatgctttagctggtcatatggaggttgatttatataaagatcctttaggaaaagataaaaatgataaaaatatttttttaaaagatatttggccttcaaataaagaaatagaagacactctaagtgaggcattaaatgcaaaaatgtttattgaaagatactccaatgtttctgaaggaccagttcaatggcaaaaaattaaaaccgaaaaaagtagtatttataaatgggacgaaggatcaacatatgtaaaaagaccacctttttttgataatatgccagatgagccagagggatttaaaaaaattaaagatgctaggccattattaattttgggtgatatggtaactacagatcatatttctccagcaggttctattcaaaaagaaagtccaaccggtcaatattttatggaacatcaaattttaccaaaagattataattcttatggatcaagaagaggaaatcatgaagttatgatgagaggcacatttgctaatataagaattagaaatgaaatagcaccaggtacggaaggtggtttttacaagttatatcctgaaggaaaagtaatgtcagtttacgatgccgtagtggaatacaaaaaaa

SEQ ID NO: 282808 - DNA, 802 bp, Unknown
  Bacterial polypeptide expressing nucleotide sequence isolated from the Sargasso Sea
ttgttccttgatactcttgttggaacagatagtcatacaacaatggtcaatggtttatcagttttaggatggggtgttggcggaatcgaagctgaggcaggtatgctgggacaacctatttcaatgttaatccctgaggttataggatttgaggtaacaaaaaaaatgccagagggaacaactgctacagacttagttttaacagttgttaaaatgcttagagacaaaggagtagttgggaaatttgttgaattttacggtgagggattaaaaaatttaactttagcagatagagcaacgattgctaatatggctcctgagtacggtgctacttgtggttttttccctatagatgaagaaactttaaaatatttaaaattttctggaagagataaagaaacggtagaaatagttgaaaaatatgcaaaagaacaaggtctttgggcaagcgatgaaattgaatttagtgataagatttcattggatatgtcaactgtagttcctactatatcaggtcctaaaagaccacaagataaagttcttttaactgacgcatcaattaattttaaaaaagtatttaaagaagctacaaataaaaaggattataaaatttccaaggtaaaaaacgcagattatgaaattaaggatggttcaatattaatagcagcaattacatcatgcactaacacctcaaatccaaatgttctaattggagctggattacttgcaaaaaaagctgttgagttaggattaaatgttaaaccatgggttaaaacatctttagctcctggatcaaaagtgg

SEQ ID NO: 282809 - DNA, 667 bp, Unknown
  Bacterial polypeptide expressing nucleotide sequence isolated from the Sargasso Sea
atgataactacggatcatatatctccagctggttctataaaaaaagacagtcccacgggtgattattttatgaaacatcaagttcaacagaaagattttaattcttacggtgcaagaaggggtaatcatgaagttatggtacgtggagcatttggaaatataaggattagaaatgaaatggcacccggaactgaaggaggttttaccaaactatatcccgaagggaaagttatgagcatttacgaagcggctatggaatataagaaaagaggaaacgatctagttgtaattgctggcaaagaatatggagcgggatcctctagagattgggcagccaaaggcacaaaattacttggcgtaaaggctgtaatcgcagaaagttttgaaagaatacacagatcaaatttaattggaatgggaatacttccgcttcaattcaaggatggatttaataaaagtaaactaaaacttaagggatctgagcttattactattattaacatagacaaaggaataaccccgggtcaagaagttgagtgcgaaattaaatacgcagacggagtagctaaaaagattaatttactttccagaattgatacggcaaatgaagttgaatattataaaaatgacggaatattaaaatacgttttaagaagcatgttataat

SEQ ID NO: 282810 - DNA, 814 bp, Unknown
  Bacterial polypeptide expressing nucleotide sequence isolated from the Sargasso Sea
gccgatctggcggtcacgtctgtgctgagtggaaatcgaaatttcgaaggacgtatcaaccccgacgtcaagatgaactacctcgcatcccctccgctagtggtcgcctacgcgatcgcgggaacgatggatatcgacatcacacgagagccattggggacgtcggaggatgggactcctgtctatctggcagatatctggccgagtgcggatgaggttcagaccaccattgacgcatccatcgacgcagagatgttcaccagcagatatcgggatgttttcgagggggacgaccgttggaagagcctccccacacccgaaggggacgtcttcgcgtgggacagcgcgagcacctacgtgcgcaaggctccctacttcgacgctctgcaacgtgacccgcagccggtcgcaaacatctcgggcgctcgcgtcctggcattgttaggcgactcggtcaccacagaccacatttcaccggccggttcgatcaaagccgacagcccggcaggaaagtacctcactgagcacggcgtcgaacgcgcgaacttcaactcctacggttcccgtcgaggcaaccacgaagtcatgattcgcggcacgttcgcgaacattcgcttgaagaatttgatgctcgacggggtcgagggtggcttcacggttgacttcacgcagggtgacgacgtggtggttcccatttttgatgcggcctcgtcctatgctcagcgcaatattcctctggtcatcgtggcgggtaaggagtatggatccggatccagtcgggactgggctgcgaagggcacggcgttactcgggg

SEQ ID NO: 282811 - DNA, 757 bp, Unknown
  Bacterial polypeptide expressing nucleotide sequence isolated from the Sargasso Sea
acaagcttttaataattttagagttgttccaccagggactggaatttgccaccaagttaatttagaatatttatcaaaggttgtttggtcatctgataattttgcttatccagatacacttgtaggaactgatagccacacaactatggttaatggcctttcggttcttggatggggagtgggtggaattgaggctgaagcagcaatgttaggacagccaatatcaatgttaattccagaagttgttggttttaaaattcaaaacaaactttcagaaggaactactgctactgatttagttttaacaatagttcaaatcctgagacaggaaggagtagttggaaaatttgtagagttttatggcgatggattaaaaaatctttcattagcggatagagctactattgcaaatatggcacctgaatatggagcaacttgtggcttttttcctatagatgaagaaactttaaaatatttaaaattttccggtagagacaaacatacaatttcacttgtagaaaagtattcaaaagaacaaggactttgggctgatgaaaatatttcttttagtaaaattttatatttagatttatccaaagttgttccaagtatttctggtcctaaacgtccccaagacaaggttttactatctgagtcatccgaatcattcatacaatctttcaaaaaaaatacgaatagagaaaacataaaagaagaaaaagtttcaggtgaaaattttaaattgaaagacggaaat

SEQ ID NO: 282812 - DNA, 861 bp, Unknown
  Bacterial polypeptide expressing nucleotide sequence isolated from the Sargasso Sea
cctaaatctctcaaagtattattagaaaatttattgagatatgattatgacttgagcgttacaaagtctcaaatagaagctgtaaaaaattggttaaaaacaaaaaaatctaaaactgaaattgcttatagaccggctagagtactccttcaggattacactggtatcccagcagttgctgatcttgctgctatgagagaagctgtaaaagaaaaaaataaagatcctaattctataaatcctttatcggcagtagatcttgtaattgaccattcagttcaggtagatcagtctgctaaagctgattcatttgaaaaaaatgtagatattgaatttgaaagaaatggagaaaggtattcttttttgaaatggggacaacaagcttttaataattttaggatcgtaccacctggtacaggaatttgtcatcaggtaaatctagagtatttatcaaaggtagtgtggtcagaagaattcaaaggagacaattatttgtttcctgatactttagttggaaccgatagccacactacgatggtaaatggattatctgtcttagggtggggagttggtggaattgaagctgaagcaggaatgcttgggcaaccaatatcaatgttaatacctgaagttattggttttgagataaaaaataaaatgcctgaaggaactacagcaactgacttagttttaactgttgttaaaatgttaagagataaaggagttgttggaaagtttgttgagttttatggagaaggtttaaaaaatttaacacttgctgatagagctacaattgcgaacatggcaccagaatacggtgctacatgtgggttctttcctattgatgaagaaactttgaaa

SEQ ID NO: 282813 - DNA, 680 bp, Unknown
  Bacterial polypeptide expressing nucleotide sequence isolated from the Sargasso Sea
aatattgggagacatggtaactacagaccatatctctcctgcaggatcaattcaaaaagaaagtccgaccggagaatattttatggagcatcaaattttaccaaaagatttcaattcttacggatcgagaagaggaaatcatgaagttatgataagaggaacatttgccaatataagaattagaaatgaaatagctcctggtaccgagggcggatttacaaaattattcccggagggaaaagttatgccagtttacgacgccgtagtagaatataaaaaaagaggcacagatttagttgttattggtggcaaagaatatggaactggttcatcaagagattgggctgcaaaaggtactaaattacttggaataaaaatggtaatagctgaaagttttgaaagaattcataggtctaatttaattggtatgggtattttacctttacaatttataaacaatgtaaacagaaaaaatttaaatttaatagggtcagaactactaacagttttaaacttagataaaggaattaaaccaggagacaaagtagctttagaaattaaatatataaatggagatattaaaaaggttgagttattaagcagaatagatactaaaaatgaactagaatattataagaatggtgggattttacaatttgttttaagaaatatgatttaga

SEQ ID NO: 282814 - DNA, 532 bp, Unknown
  Bacterial polypeptide expressing nucleotide sequence isolated from the Sargasso Sea
atgagaggcacatttgcaaatataagaattaaaaatgaaatattacctggaactgaaggtggtttaacaaaatcttttgtctcagataaatcaatgtcaatctatgatgcttccagagaatatattgataataaaatagataccgtagttattgctggtaaagaatacggtacaggttcttcaagagattgggctgccaaaggtactaagttgcttggagtaaaagctgtaattgcagaaagctttgaaagaattcatagatcaaatttaattggtatgggcgttctacctttagaatttttagataatcaaaataaaaattctttagaaataaaaggaaatgaaaaaatttcaataataggaatcactagtcttcaacctaataaaattttacaattaattataagtggcgataaagaaattaagacaaacttgaaatgtagaatagatacaaaaaaagaacttgattattacaaagcaggaggaattttaaattttgttttaaatgaaataatttcaaatgctgcttaag

SEQ ID NO: 282815 - DNA, 761 bp, Unknown
  Bacterial polypeptide expressing nucleotide sequence isolated from the Sargasso Sea
tggattctttcctgtagatgatgaaactttaaaatatttaaaattttctgggagagacaaacatacagtcgatattgttgaaagttatgctaaggagcaaggtttatgggcaagtaatgatattttttttacagataaattatatttagatatgtcaactgtagttccaacaatttctggtcctaaaagaccacaagataaagtattgctgacagaagcttctcaaaattttgaaaaagtttttaaaaaagttacaaaaaaaaataaaataactattttaaaagttaaaaatgaaaattttgaaattaaagatggtagtattttaattgctgctattacttcttgcacaaacacatctaaccctaatgttttaattggggcaggattgcttgcaaagaaagcagttgaaaaaggattaaaaacaaaaccttgggtaaaaacatctttagcgcctggatctcaagttgttactgattatttagaaaaagctggactaaataaatatttagacaatcttggatttaatttagttggatatggatgcactacatgcataggtaattctggacctttgaaagaaaatatttcagaagctgtaaaaaaagaaaatatttatgctgcatcagttctatcaggcaatagaaattttgaaggaagaatttcaccacttgtaaaagccaactatcttgcatcaccacctttagtagttgcttatgcgttagctggaacaatgactattgatttatacaacgatccattag

SEQ ID NO: 282816 - DNA, 871 bp, Unknown
  Bacterial polypeptide expressing nucleotide sequence isolated from the Sargasso Sea
tttgccttcaaataaggaaatagaagatactttaaaacattcacttaatgcagagatgtttataaaaagatattcaaatgtttctgagggcccaactcaatggcaaaaaattaaaactgataaaagtagtatctacaattgggatgaaggctctacgtatgttaaaaaaccaccattctttgactctttaccagatgaacctgagggatttaaagaaattaaggacgcaagaccattattaattttaggtgatatggttactacagaccatatatcgccagctggaagtattcaaaaggatagcccaacaggtgaatattttatggaacatcaaattttgccaaaagactataactcttatggatcaagaagaggaaatcatgaagtcatgatgcgcggtacttttgcaaatataagaatcaaaaatgaaatggtgcctggaacggaaggtggttttacaaagttatatccagaggaaaaagttttacccatttatgatgcagttgttcaatataaaaaaagaggaacagatttagttgtgattggaggaaaagaatacggaacaggatcatcaagagattgggcagctaaaggaacaaaattattggggattaaagcagttgtagccgagagttttgagagaattcatagatcaaatttaattggaatgggaatattaccattgcaatttaccaatgatgttaatagaaaaaatcttaaattaattggttctgaattaataagtattataaatatagagaaaggtgttaatcccttagatgtagtaactgttgaaattaaatatgcctctggtgaaataaagaaaattaagactttatgcagaattgatacaaaaaatgaactagagtat

SEQ ID NO: 282817 - DNA, 940 bp, Unknown
  Bacterial polypeptide expressing nucleotide sequence isolated from the Sargasso Sea
aaaagacctcaagataaagttcttttaacagatgcacctgtctcttttcaaaaagtattgcaggaagctacaaataaaaatgaaaagtcaacttcgaaagtatcaaattcagattatgaaattaaagacggctcaatattaattgcagcaataacttcttgtactaacacttcaaatccaaatgttttaattggggctggactgttagcaaaaaaagctattgaaaaaggtttgcaagttaaaccttgggtaaaaacttctttagcacctggatctcaagtagttacagactatttggcaaaagctggattgaatacttatttagatcaacttggctttaatttagttgggtatggctgtacaacttgcattggaaattcaggaccacttccagaaaatattgtagaagcaatccaaaaagaaaatatttatgcagtttcagttttatctggaaatagaaatttcgagggaagaatttcaccacatataaaagcaaactacctagcatcacctccactagttgttgcatatgcaattgctgggcatatggaagttgatttgtacaaagatccattaggaaaagataaaaaaggaaacgatgtgtttttaaaagatatttggccttcaaataaacagatagaagaaactttaaaagattctcttaatgctgagatgtttatacaaagatactcaaatgtttctgagggtccaactcaatggcaaaaaattaaaactgataaaagtagcatctataattgggatgagggatcaacatatgtaaaaaaacctccgttttttgattcattaccggataaaccggaaggatttaaagaaattaaggatgcaagaccattattaattttaggtgatatggtgaccactgaccatatatcgccagctggcagtattcaaaaagatagtccaactggtaaatatttca

SEQ ID NO: 282818 - DNA, 904 bp, Unknown
  Bacterial polypeptide expressing nucleotide sequence isolated from the Sargasso Sea
agataaagagtatttatttccagatactctagttggaactgatagccatactacaatggttaatggtttatcagtattaggttggggtgttggaggaattgaagcagaagcaggtatgctcggacaacctatatcaatgttgataccagaagtgattggatttgaaatgaaaaataagctacctgagggtacaactgctaccgatctagttttgacagtagttaaaatgttaagagataaaggagttgtaggtaaatttgtagaattttatggtgaaggtctaaaaaatctaacacttgctgatagagcaactattgcaaacatggcgccagagtatggtgctacttgtggattttttccaattgatgaagaaacattaaaatatttagaattttcaggaagatcaaaagagaatattcaaatcgtagaaaaatacgcaaaagaacaaaatttgtgggcaagtgaagacgttgttttcactgatacattgtctctagatatgtctacagtagttccaacaatttctggaccaaaaagaccacaagacaaagttcttttaacagaggcatcaaaaaattttataaaagtttttgaagatgtatgtaaaaaaactgatccaacagtagcaaaagttaaagacacagattttgagataaaagatggagatatattaattgcagctattacatcatgtacgaatacctccaatccaaatgtattaattggtgcaggattattagctaaaaatgcaattgaaaaaggcttaacagttaagccttgggttaaaacatcattagcacctggatcacaagttgttactgactatttagataaagcaggtttaagtaaatacttagatgaattaggttttaatttagttggttatggttgcaccacatggtat

SEQ ID NO: 282819 - DNA, 904 bp, Unknown
  Bacterial polypeptide expressing nucleotide sequence isolated from the Sargasso Sea
agtcaaatttctattaatggaaaaaattataaatatttttctcttaaggaagctgaaaaaaatggattagaaggcgtatctaaacttccaaaatcattaaaagtattattagaaaatttactgagatatgaagatgatttaactgttaacaaacaacaaattgaagcaatcaaaaattggcttaaaacaaaaaaatcagatatagaaattgcatatcgaccagctagagttctgcttcaagattatactggcatccctgctgtcgcagatttagcggctatgagagaggccgttaaagcaaaaaataaagacccaaatactataaatccactttcttctgtagatttagttatagatcactcggttcaagtagataaatatgctaataaaaattctttaaatgataacgttgaaattgaatttaatagaaatgcggaaagatattcttttttaaagtggggtcagcaggcatttaataactttagaattgttcctccgggcacaggaatttgccatcaggtaaatttagaatatttatcgaaagtagtttggaccgaagagtttgaaaaagatcattatatatttcctgatactttagtcggaacagatagccataccacaatggttaatggattgtcagtattaggttggggagttggtggaatagaagctgaagcaggtatgttaggacaaccaatttcaatgttaattccagaagtgattggatttgagttgaaaaataaattaccggaaggaacaactgcaacagatttagttttaactgttgtaaaaatgctaagagataaaggtgttgtaggaaaatttgttgaattttacggtcatggtttaaaaaatttaacattagctgatagagctactattgcaaatatggctccggaatatg

SEQ ID NO: 282820 - DNA, 762 bp, Unknown
  Bacterial polypeptide expressing nucleotide sequence isolated from the Sargasso Sea
tctgggtcctaaaagaccacaagacaaagttttattaacaaattctgccaagagttttgctaaagcttataaagaaaataccaagagagaaaaaccctctgaagcaaatgttgatggtgccgattttaaaatcaaagacggagatatagttatagcagccattacatcttgcactaacacttcaaatccaagtgtaatgattggtgcaggattactagcaaaaaaagctatagaaaaaggtttgaagattaagccgtgggtaaaaacatctttggctccaggatctaaagtagttactgactatttagaaaaagcagggttaaataaatttttagatgaacttggatttaatttagttggttatggttgcacaacatgtattggaaattctggtccgctaaataagaatatttctgatgcaatacacaaagagaatttatatgcagtttctgttttatctggaaatagaaattttgaaggaagaataagtccagatgttaaagctaattatcttgcttcgccacctcttgtagtcgcttttgctttagctgggaacatgaattttgatatatataaaagctctcttggcactgataaagaaggtaaagaggtctttttaaaagatatttggccgagcaataaagaaattgaaaacataatgttaaaatcaattaatgctaagatgtttatcgatcgctattcaaacatttctgaaggatctaaagaatggagatctattaaaacagtcgatagtagtattta

SEQ ID NO: 282821 - DNA, 691 bp, Unknown
  Bacterial polypeptide expressing nucleotide sequence isolated from the Sargasso Sea
tatgtacgacagctttaagacaaaaaaaacactaaaaataggaaaaaaaacctatacctattacagttttaaagtggctgaaaaaaatggccttaaaaatatatccgcattaccattttctataaaagttcttttagaaaacctcataagaaatgaggatgggtctacagttgaattaaatgacatcaaagaatttgagaaatggaagtctgataaaaaagttaataaagaaattaattttaggcctgcacgagttctaatgcaggatttcacaggtgttccagctgtggttgatcttgcatcaatgagatctgcgataaaaaatgaaagaggtgatcctaaaaaagtcaatccattatcgccagttgatttagtgattgatcactctgttatggtagacaaatttggaacggctactgctcataaagcaaatgttgatttggaatacaaaagaaatattgagagatatgaatttctaagatggggacaaaagtcctttaataactttagggtagttcctccaggaacggggatatgtcaccaagttaatttagaatatctcgctaaaacagtttggtcagaaaagaaaaaaattaaaaataaaaaagtcaatctagcttatccagatacggttgtaggaactgatagtcacacaacaatgatcaatggactttctgtccttggctggggc

SEQ ID NO: 282822 - DNA, 805 bp, Unknown
  Bacterial polypeptide expressing nucleotide sequence isolated from the Sargasso Sea
tatgacatataagtctttttcgcagcttgatgtaaacggtaaaaacttcaaagcggttaattttgacagtataggcagtaaatatgcgctcgacaggcttcccttttgcatcaaaattctgttggaaaacctgattcgccatgaagatgaagagttcgtaaatagtaacgatattgagcaagtagcaaaatgggacactgacaatcacgttgaccacgaagtgtcttttgttcccgcgcgcgtcatcctccaagattttacgggtgtgcctgctattgttgatttagcagccatgcgtgatgcggttaatcgtttaggtggcgacgctcaggcgattaatccattaaatccagtagaactggttattgaccactcagtaatggttgatcactttgctgaagacgatgcgcttgaaaagaatacagacattgaaatccagcgaaatagagagcgttatcaatttcttaaatggggccagtctagctttgacaatttcaaagtggttcccccaggtcgcggtatcgtgcatcaggttaacctagagtatcttgctcgttgcgcattcactaaggagcaagatggggaaaccttggtttaccccgacaccctagtgggaacagattcgcataccactatgattaatggccttggcgtacttggctggggtgtgggaggcattgaagcagaagcagcgatgctgggtcaaccagtaacaatgttattaccaaaagtggttggcttcaggctttcaggtaagttacctgctggcgtaactgccaccgacatggtgctaactatcacacaa

SEQ ID NO: 282823 - DNA, 768 bp, Unknown
  Bacterial polypeptide expressing nucleotide sequence isolated from the Sargasso Sea
gcctatatcaatgttaattcctgaggttataggttttaaaattcaaaataaacttacagaaggaactactgctactgatttagttttaacaatagttcaaatactaaggcaggaaggcgtagttggaaaatttgttgagttttatggggacggactaaaaaatctttcattagcagatcgagctactattgcaaacatggcacctgaatatggagctacttgtggtttttttcctatcgatgaagaaactttaaaatatttaaaattttctggcagagacgaacatacaatttcacttgttgaaaaatattctaaagaacaaggactttgggctgatgataatatttcttttacgaaaaatttaaatttagatttatctaaagtttttccaagcatttcaggtcctaaacgcccccaggataaagttttactatctgaatcatccaaatcatttatgacatctttcaaaaaaaatatgaatagaaaaaatataaaagaggaagtagtttcaggtgaaaattttaaattaaaagatggaaatattgttatagccgcgatcacatcatgtaccaatacttcaaatccaaacgtacttataggagcaggtttacttgctaaaaaagctgtagaaaaaggattgaaagtaaagccttgggtaaaaacttctttagcaccaggctcccaagttgttaccgattatcttgaaaaggcaggtttagacaaatatttagatcaacttggctttcatctagtgggttatggttgcac

SEQ ID NO: 282824 - DNA, 781 bp, Unknown
  Bacterial polypeptide expressing nucleotide sequence isolated from the Sargasso Sea
actgaaaaaagtagtatttataactggggaccaaggatcaacatatgtaaaaaaacctcctttttttgacaatttaccagataagccagaaggatttaaaaaaataaaagatgcaagaccattattaattttaggagacatggtcacaacagaccatatatcaccagctggctccattcaaaaagaaagtccaactggagagtattttatggaacatcagattttaccaaaagattataattcttatggatcaagaagaggcaatcatgaagttatgatgcgtggaacatttgcaaacataagaataagaaatgaaatggcgccaaataccgaaggaggatttacaaaactatatcctgaaggaaaagttatgccaatttacgatgcagtcgtagaatataaaaatagaggaacagatttagtggtaataggtgggaaagaatacggaactggttcgtcaagggattgggcagcaaaaggcacaaagttgttgggagttaaagcagttatagcagaaagttttgagagaatacatagatcaaacttaattggaatgggaatattacctttacagtttattgaaaacataaatagaaaaaatttaaatctaaaaggccctgaattgataagtgttgtcaatttagaaaaaggtattaacccttctgaaaaagttgagcttcagataaaatataatacaggggacattaaaaagattaaaacattgtgtagaattgatacaaaaaatgaattggagtactataaaaatggaggaatactccaa

SEQ ID NO: 282825 - DNA, 792 bp, Unknown
  Bacterial polypeptide expressing nucleotide sequence isolated from the Sargasso Sea
tatgcaaacagatttgtacaaagattctttgggtaaagataaaaatggcaaagaagtttatttaaaagatatttggccaagtaataaagaaattgaagaagtattattacaatctttgaatccagaaatgtttagagaaaggtattctaatgtttcaaaaggaccagaacaatggcaacaaattaaaactaaaaaaagtagcatttacaactggaatgataactccacatatgtaaagaaaccacctttctttgaaaatctttcaccaaatccggaaggatttaaacccttaaagaatgcaagaccattattaattttgggcgatagcgtaacaacagatcacatttccccagctggaaatatacaaaaggatagtcctgccggtgattattttatgaaacatcaaattcttcctaaagattataattcttatggttcaagacgtggaaatcatgaagtaatgatgagaggtacatttgccaatattagaataagaaatgaagttgcccctggaaccgaaggtggatacactaagctttttccagaaaacaaagtgatgccagtatatgacgctgttgttgaatataaaaaaagaggaacagaccttgtggtaataggaggaaaagaatatggaactggatcctcaagagactgggcagcaaaaggaacaaaattattaggaattaaagcggtgatagccgaaagttttgaaagaatccacaggtcaaatttaatcggaatgggggttttaccattgcaatttattaatgaggtaaacagacagaatcttaa

SEQ ID NO: 282826 - DNA, 868 bp, Unknown
  Bacterial polypeptide expressing nucleotide sequence isolated from the Sargasso Sea
aaaaaaatttaattttagtttaaaagaagtgcctaattctctaaaaattctattggaaaacttaattcgcaacgaagatggtatatctatttcaaaagaaattattgaaaaaatttgccaacaaataaatttaaataaaaaaaattttgaaattagttttttccctacacgcgtacttatgcaagattttactggagttcctgcagttgctgatctcgctgcaatgagaaacgctcttaaaaacaagaaaattgaccctaaaaaaataaaccctttatcaagagtagacttagttattgatcattcggtaatggttgataattatggttcaaataaagcttatgaaaaaaacgttaaaaaagaatttgaaagaaatagagaaagatacgaatttcttaaatgggggcaagaatcttttgataatttttatttagttcccccaggagctggtatttgccatcaagtaaatcttgaaaatatatctaaaacaatttggttaaaaaaagaagaaaataaagaatatttatttcctgattcagttgttggcacagacagccacactactatggtgaacgctctttcagtcttaggctggggtgttggtgggattgaagctgaagccgcaatgttgggccagccaatttcaatgaatattcctaaaattcttgggtttaagattacaggtaaattaaaagaaggtattacagctactgacttagttttgactattacttcaatattaagaaagcatggtgtagttggaaaatttgtagaattttatggtcctggactagcaaacctatctttagcagatagagcaactatttctaatatgtcaccagaatacggtgcgacttgtggttttttt

SEQ ID NO: 282827 - DNA, 970 bp, Unknown
  Bacterial polypeptide expressing nucleotide sequence isolated from the Sargasso Sea
agaaattttaaaaatataaatacagataaaaagttaaacaatggtgatatagtaatgcccgcaataactagttgtaccaatacttctaacccaagtgttatgattgctgcaggtttggttgcaaaaaaagctgttgaactagggctggatattaaaccatgggtaaaaacaagtttagctcctggcagcaaagtagttaccgattatcttgataaagctggattaacttattatttagataaaattggttttaatttagttggctacggatgtacaacttgtataggaaattcaggacctttagaccactgggtttcagaagagattaaaaaaaataatttaacagtttcatcaatattatcaggtaatagaaattttgaaggaagagttcatcaagaagtaaaagctaattttcttgcttcaccacccttagttgtggcttatgcattagctggtaacataaattgtaatctaacaaatgagccacttggtaagtccaaagatgataatgatgtgtatcttaaggatttatggccaactaataaagatataaattttttattagattcatcattaaatgcaaatatgtttaaagagcgttacaatgaaatatatgaaggtgatgaaaattggaaagcaattaaaagcaaaagaaaagaaacatacgattggaatattacaagcacttatataaaactcccacctttttttagtaattacaaaaataaaaatatatcagatattcacgaagccagaattcttgctttacttggtgatagcgttacaaccgatcatatttctcctgccgggaacattaaagaagaaagtccggctggaatatatttacgtaaaagacaaattaactctgcaaattttaattcatatggatcaagaagaggcaatcatgaaattatgatgaggggaacattcgcaaatatacgaataaaaaatgaaatactacctaatacag

SEQ ID NO: 282828 - DNA, 861 bp, Unknown
  Bacterial polypeptide expressing nucleotide sequence isolated from the Sargasso Sea
cttaaagaagctgaaaaaaatggattaacaggtatttcaaaattacctaaatcaataaaggttttattagaaaatttgttaagatttgaagatgaaaaatcagttaaaaaagaacaaattttatcgattaaatcttggctcgataaaaaaaaatcaaaaactgaaatttcttttagacccgccagagttcttatgcaggattacaccggcattccagctatagctgaccttgctgctatgcgggatgctgtaaaatcaaaaaaaaaagatccaaaaaaaataaatcctttatccacagttgatttggttattgaccattctgtaatggtggatacttatgcttcaaaagattcttttaaaaaaaatgttgaaaaagaattttcaagaaatggtgagcgttattcttttttaaaatggggacagcaagcttttaataactttagagttgttcctccaggaactggaatttgtcatcaagttaacttggaatatttatcaaaggttgtttggtcatctgataattttgcttatccagatactcttgtaggaacagatagccacacaactatggtgaatggtctttcagttcttggttggggagtaggtgggattgaagccgaagcagcgatgttgggacaaccaatatcaatgttaattcccgatgttgtcggttttaaaattaaaaataaacttccagaaggaactactgctaccgatttagttttaacaatagttcaaatactaagagaggaaggggtggttggaaaagttgttgagttttatggagatggattaaaaaaacctttcattggcggatcgagctaccatgcccatatggctcctgaatatggagcacttgtg

SEQ ID NO: 282829 - DNA, 880 bp, Unknown
  Bacterial polypeptide expressing nucleotide sequence isolated from the Sargasso Sea
gttttattagaaaatctactcagatatgaggatgatttgacagtggataaaaaacaaattttagcaataaaagaatggttaaaaaataaaaagtctaacactgaaattgcttacagacctgcacgtactttattacaagattatacaggaattcctgcaattgctgacctagcagctatgagagatgcagtaaaaggtaaaaataaaaacccagataaaattaatccattatctactgttgatttagttatagatcactctgtgatggtcgacgagtatgcatcaggaaaatcatttaatcaaaatgttgagagagaattttcaagaaatggggaaagatactcttttttaaaatgggggcaaaaagcattcgacaattttagagttgttccgcccggtacaggaatttgtcatcaagtaaatttagaatatttgtctaaagttgtttggtcatcaaaaagtggtaacgatttgtatgcttatccagatactttagttggtactgacagtcacacaacaatggtgaatggtttatcagtcttaggctggggtgttggaggaatagaagctgaggccgcaatgttaggccaacctatttcaatgttaattccagaagtcattggcgtagagctcaaaggaaaattaaaagaaggaacaactgcaactgacttagttttaattattgttgaaatgctaagaaaaaaaggtgtagttggaaaatttgttgagttttatggagatggtctaaaaaatttaactttagctgatagagcaacaattgcaaacatggctcctgaatatggagctacatgtggtttctttccaattgatgatgaaactcttaaatatttaaaattatctggaagagatcaagaaacaa

SEQ ID NO: 282830 - DNA, 887 bp, Unknown
  Bacterial polypeptide expressing nucleotide sequence isolated from the Sargasso Sea
tttttaaagaatatttggccatcaaataaagaaatagaagatactttaagaggagctttgaatgcagaaatgtttataaaaagatactcaaatatttcagaaggaccaattcaatggcaaaatattaaaactaaaaaaagcagtatttataattgggatgagggatcaacttatgtaaaaaaacctcctttctttgaaaatctgacagaagaacctgagggatttaaaaaaataaaagatgcaagacctgttgtaatattaggagacatggtcacaacagaccatatatctccagcaggatcaattcaaaaaaaaagtcctacaggagaatatttcatgaagcatcaaattttacctaaagattataattcttatgggtcaagaaggggaaaccatgaggtaatgatgagaggtacttttgcaaatatcagaataagaaatgaaatggctccaggaactgagggtggatttactaaattgtatcccgaaggaaaagttatgccaatttatgaagcagttgttgaatataaaaaaagaggaacagacttaattgttattggtggaaaagaatacggaacaggatcatccagagattgggcagccaaaggtacaaaattactaggtgttaaaactgtaattgctgaaagctttgaaagaatacataggtcaaacctaataggaatgggtattttgccacttcaatttatagatggaatggataggctaaacttgaagttaaaaggatcagaattaattagtataataaatttagagaaaggaattcaacctctagaaaaaataaaggtagagattaaatatgtttcaggagacataaaaataatagaaactatttgtagaattgatacaaaaaatgaaatcgaatattt

SEQ ID NO: 282831 - DNA, 883 bp, Unknown
  Bacterial polypeptide expressing nucleotide sequence isolated from the Sargasso Sea
atcaaagcaaattacttagcttcaccgcccttggtcgtagcctatgcattagctggtcatatggagttcgatttatttgaagattcttttggtaaagataaagatggaaaaaaaatttatttaaaagatatatggccatcgaacaaagaaatagaggaaactttaaactcttctttaaacgcagatatgtttattaaaagatactctaatatttctcaaggaccaaaacaatggcaagaaatcaaaactgaaaaaagcagtatttataattgggatgataactctacatatgtaaaaaaacctcctttttttgataatctatcagacttacctgagggatttaaacctattaaagatgctagacctttgttaattttaggagacatggttactacagatcacatatccccagcaggtaacattcaaaagcaaagtcctacaggagaatattttatgcatcatcaaattttacccaaagattataattcttatggttcaagaagaggaaatcacgaagttatgatgagaggaacttttgctaacattagaataagaaacgagatagcacctgaaaccgaaggcggattcacaaaattatatccagaaggaaaagtaatgcctgtttatgatgcagttgttgaatataaaaaaagaggtacagatttagtagttataggtgggaaagaatatggaactggatcttcaagagactgggcagcgaaaggaacaaaattacttgggataaaaacggtaatagcagaaagttttgagagaattcataggtcaaacttaataggaatgggagttttgccgctacaatttaaagaaggcatgaatagaattaatttagacttaaaaggaccagagttaattagcgtactag

SEQ ID NO: 282832 - DNA, 783 bp, Unknown
  Bacterial polypeptide expressing nucleotide sequence isolated from the Sargasso Sea
ttaggattagaagttaaaccttgggtaaaaacatctttagccccaggctctcaagttgtaactgattatttggaaaaagcaggattgagtaaatatttagataagttgggttttaatttagttggttatggttgtactacatgtataggaaactcaggacctttggctgataatattatagaagctattcaaagggataatatttatgcagtctctgttttatctggaaatagaaattttgaaggaagaatttctcctcatattaaagccaactatttagcatcacctccattggttgttgcttacgcattagcaggacatatggcatttgatttatataaagattcttatggcaaagataaagacggtaaagatatttatttaaaagatatttggccttcaaataaagaaattgaggacaagttaaaatcttcacttaatgctgatatgtttataaaaagatattcaaatgtttctgaaggcccaaaacaatggcaagacattaaaacagaaaaaagcagcatttataattgggatgaaaattctacttatgtaaaaaaaccccctttctttgaaaacctacctgatgagccagagggttttaaacctattattgatgcaagaccattattgatattaggcgatatggtaacaactgaccatatttctccagcaggaaatattcaaaaggagagtccgacaggagaatattttatgaattatcaaattttaccaaaagattataattcttatggatcaagaagaggtaatcatgaagttatg

SEQ ID NO: 282833 - DNA, 902 bp, Unknown
  Bacterial polypeptide expressing nucleotide sequence isolated from the Sargasso Sea
tatgaactttgatatatataagaattctcttggcatatacaaagacggtaaagaagtttttttaaaagatatttggccaactaataaagaaatagaagacataatgttaaaatcaattaatgcggaaatgtttataaatcgttattcaaaagtttcagaaggaccaaaagaatggagcgatattaaaaccgtagatagcagtatttataattgggaagataaatctacttatgtcaaaagaccacctttttttgataatttaccagatcagccagaaggatttaaaccaataaaagatgcaagattattgcttttattagctgattccgtaactaccgaccacatctctccagcaggaaatattaaaaaagatagtcctacaggagattattttatgaaaaatcaagtacaacaaaaagattttaattcatatggggcaagaagaggaaaccatgaagtaatgatgagaggaacatttggaaatattaaaattaaaaatgaaatggcgcctggcactgaaggtggatttactacgctacaacctgatggaaaagttatgagtgtttatgatgccgcaattgagtataaaaaaagaggaaatgatctagttgttatggcaggaaaagaatacggaactggatcatcaagagattgggcagctaaaggcacgaaacttttaggtattaaagctgtaatcgctgaaagttttgagagaattcataggtcaaatttaattggaatgggtgttttacctcttcaattcaaacaaggttttgatagaaaaaaattaaatattaccggaacagaattaattactatagttgacattgataaaggagttaagccaagagatgaagtgtcttgtgaaataaagtataaagatgggacaagtaagattatta

SEQ ID NO: 282834 - DNA, 628 bp, Unknown
  Bacterial polypeptide expressing nucleotide sequence isolated from the Sargasso Sea
agaaagcccaacaggaaactattttatgaagcatcaaattttacccaaagattataattcttatggtgcaagaagaggaaatcatgaggtaatgatgagaggaacatttgctaatattagaattaaaaatgaaatggctccagatacagagggaggtttcactaaattatatcctgaagaaaaagtaatgcctatttatgatgctgttgttgaatacaaaaaaaggggaacagatttagtagtatttggtggaaaagaatatggaactggttcttcaagagattgggctgcaaaaggtacaaaattattaggtataaaagctgtgattgcagaaagctttgaaagaatacacagatctaatcttataggcatgggagttttacctttacagtttgtagaaaatatgaatagacagaatttaaacctaaaagggtcagaattaatttcagtgttaggtcttgagaaaggaattaatcctggcgatcatttagaagttgaaattaaatatggagcaggggacattaaaaaaattaaaatgttatgcagaatagacactaaaaatgaattagaatactataagaacggtggtattctacaatatgttctaaggaatatgattaatggatga

SEQ ID NO: 282835 - DNA, 912 bp, Unknown
  Bacterial polypeptide expressing nucleotide sequence isolated from the Sargasso Sea
cttacaaaatgatgaatacttatttccagatactttagttggaacagatagtcatacaacaatggttaatggtttgtcagttcttggatggggtgttggaggtattgaagcggaggcgggaatgcttggtcaaccaatttcaatgttaataccagaagtgattgggtttgaggtgaaaaataaattaccagagggaaccacagcaactgacctggttttgacagttgttaagatgttaagagataaaggagtagttggaaaatttgttgagttttttggtgatggattaaaaaatttatcactcgcagaccgtgcaaccatagctaatatggcaccagaatacggagctacttgtggattttttccagttgataacgaaaccttgaaatatttaaaattttcaggaagaaatgaaaatgaagttaaaatagttgaagaatatgcaaaagcacaaggtctctgggcgagcgaagatatagaatttactgatacaatatcacttgatatgtcaaaagtggttccaactatttctggaccaaaaagacctcaagacaaagttttattaaatgaagcttcagaaagttttaaaaaagtttttaaagacgcaacaggtcgaaatgaaaaaagcagatcaaaagttgaaaatacagatttcaaaattgaggatggatcaatattaatagctgcaattacatcatgtactaatacatccaatccaaatgttttaattggtgcaggattacttgcaaaaaaagctgttgaacttggtctccaaacaaaaccatgggtcaaaacttctctagctcctggttcacaagttgtaacagattatttagaaaaagctggattaaacaaatacttagatatacttggttttaacttagttggatatggttgcacaacatgcattgg

SEQ ID NO: 282836 - DNA, 838 bp, Unknown
  Bacterial polypeptide expressing nucleotide sequence isolated from the Sargasso Sea
taataaagagcaaattctggcaattaaagagtggttaaattcaaaaaaatccaaaacagaaattgcatatagacctgctagagtacttttgcaagattatacaggtataccagctgttgccgatcttgctgcaatgagggatacagttaaggaaaagaacaaagatccaaatacaattaaccctctctcttcagttgatcttgtaatcgaccattctgttcaagtggataagtttgcaacaaaaaattcgttaaaagaaaatgttgatattgagtttgatagaaactttgagagatattcctttttaaaatggggacaacaagcctttaataattttagaattgttcctccaggcactggaatctgtcaccaagtaaatttagaatatttatcaaaagtagtatggaacgaaaaatttgaggataaagagtatttatttccagacacgcttgttggaactgatagccatacaacaatggttaacgggttatcagtacttggttggggtgttggaggaattgaagcagaagcaggtatgctggggcaaccaatatcaatgctaatacccgaagtgattgggtttgaaatgaaaaataaacttccagaaggcacaactgctacagacctagttttaacagtagttaaaatgttaagagataaaggtgtagttggtaaatttgtagaattttatggagagggtctaaataatctaacacttgctgatagagcaaccattgcaaatatggcacccgaatacggagctacctgtggattttttccaattgatgaagaaacattaaaatacttagaattttcaggaagatctaaagagaacatt

SEQ ID NO: 282837 - DNA, 897 bp, Unknown
  Bacterial polypeptide expressing nucleotide sequence isolated from the Sargasso Sea
tacttgtggtttttttcctgttgataacgaaaccttaagatatttaaaattttcaggaagagatcaatcaattgtaaatatcgttgaaaaatatgctaaagaacaaggtctatgggtaaatgacgagattgaatttactgatactttaactctagatatgtcaactattgttccaactatttcagggcccaaaagacctcaagacaaagtatcattaaccgaagcatctaataattttaaaaaaattttctccgaaaatacaaacaaaaaagatttttcaatttcaaaagttcctaatacagattttgaaattaaagatggttcaattttaattgcagcaattacttcttgtaccaatacatctaatcctaatgtgctaataggagctggattgttagcaaaaaaagctgtagatcttggccttcaagtaaaaccttgggttaaaacatctttagctccaggatctcaggttgttacagactatttagaaaaagcaggattaaacatttatttagataaacttggattcaatttagttggttatggatgtacaacatgcattggaaattctggcccacttcctgagaatatagttgaagcaatacaaaaagaaaatatttatggtgtttcggttttatcaggaaatcgaaatttcgagggaagaatttcaccacacataaaagcaaattatttagcgtcacctccattagttgtggcttatgctttagcaggtcatatgagttttgatttatataaagattcttttggaaaagataaaaatggaaaagatatttttatgaaagatatttggcctacaaataaagaaatcgaggaaacttttaaactttctttaaatgcagagatgtttattaaaagatattcaaatgtttcagaggg

SEQ ID NO: 282838 - DNA, 796 bp, Unknown
  Bacterial polypeptide expressing nucleotide sequence isolated from the Sargasso Sea
gacgaaactttaaaatatttgaaattttctggtagagataaacacacaatttcacttgtagaaaaatattctaaagaacaaggtctttgggttgatgacgatatttcttttaccaaaattttagaattagatttatctaaagtttttccaagcatttcaggtccgaaacgtcctcaagataaagttttactatctgaatcttccaaatcatttatggaatccttcaaaaaaaatatgaacagagagagtataaaagaggaagttgtttcaggaaaaaattttaaattaaaagacggaaatattgttattgctgcaattacatcatgtacaaatacatcaaatccaagtgtacttataggagcaggtttgctcgccaaaaaagctgttgaaaaagggttaaaagtaaaaccttgggtaaaaacttctttggccccaggctctcaagttgttacagactatcttgaaaaagctggtttaaataaatatttggatcaacttggctttcatctggttggctatggatgcacaacttgcatagggaattcaggacctttaaaagaaaatatttcacaagctattcaaaaaggaaacttatattcggtttcagttttatctggaaatagaaattttgagggaagaattaatccagatgttaaggcaaactatcttgcttcaccgcctttagttgttgctttcgcactagcaggatcaatgaattttgatttatataaagaacctttaggaaaagataaggaaggaaaaaatatctttttaaaagatatatggccatcaaaaa

SEQ ID NO: 282839 - DNA, 940 bp, Unknown
  Bacterial polypeptide expressing nucleotide sequence isolated from the Sargasso Sea
aaagatatatggccatcaaacaaagagattgaagagttaattttaacctcaataaatgcagaaatgttttctaagcgttactcaagagtttcagaaggctcagatgattggaaaaaaattaaaactactgaaagcagcatttataattggaacgaaagctctacttatgtaaaaaaaccacctttttttgaaaaaatgtcagataacccagaaggttttaaaaaaatagctgatgcaagaccattagtaatattaggtgatatgataactacggatcatatatctccagctggttctataaaaaaagacagtcccacgggtgattattttatgaaacatcaagttcaacagaaagattttaattcttacggtgcaagaaggggtaatcatgaagttatggtacgtggagcatttggaaatataaggattagaaatgaaatggcacccggaactgaaggaggttttaccaaactatatcccgaagggaaagttatgagcatttacgaagcggctatggaatataagaaaagaggaaacgatctagttgtaattgctggcaaagaatatggagcgggatcctctagagattgggcagccaaaggcacaaaattacttggcgtaaaggctgtaatcgcggaaagttttgaaagaatacacagatcaaatttaattggaatgggaatacttccgcttcaattcaaggatggatttaataaaagtaaactaaaacttaagggatctgagcttattactattattaacatagacaaaggaataaccccgggtcaagaagttgagtgcgaaattaaatacgcagacggagtagctaaaaagattaatttactttccagaattgatacggcaaatgaagttgaatattataaaaataacggaatattaaaatacgttttaagaagccatgttataatgagaaatataa

SEQ ID NO: 282840 - DNA, 804 bp, Unknown
  Bacterial polypeptide expressing nucleotide sequence isolated from the Sargasso Sea
tcattgaaggaaggaattactgcaactgatttagttttatctattactaaaattcttagagacagaggtgttgttggaaagtttgtagaattttatgggagagggttaaagaatttatcattagccgacagagcaacaatttctaatatggccccagagtatggtgcaacttgtggattttttccaaccgacgaagaaactataaactacctaaaattaaccggtaaggaaaatgagcatcttaatattgttaaagaatactcaaaaaaacaaaatatttgggcagatgaaaattatgcacctgattattttgaaaaaatattattagatttagatacaatagaacctacactcgctgggccaaaaagaccacaagataaaattcttttaaaagatgtaccaactgaatttagtaaaatagacagtaatcaaacaattaataataaattaaatacaggtgatgtcgtaattgctgcaattactagttgcacaaatacttctaatcctaatgtaatgattgcagccgggctagttgctaaaaaggctattgatttaggtttagaggttaagccttgggttaagacaagtttagcaccaggaagtaaggttgttagcgattaccttgaaaaggctggattaacagaatatcttgatacccttggtttcaatactgtaggatatggatgtacgacttgtattggtaattctgggccacttgatgagtgggtttctaatgaaatccaaaaaaataatttaactgtttgttctgtattatctggaaatagaaactttgaaggaagagtg

SEQ ID NO: 282841 - DNA, 862 bp, Unknown
  Bacterial polypeptide expressing nucleotide sequence isolated from the Sargasso Sea
aaaatacttaactttttcaggtagagacagtaatacagttaaaatagttgagacttatgctaaagaccaaggtctttgggcttcagatgatattgaatttacagatactatatcattagacatgtcgtctattgtacccactatctctggaccaaaaagaccgcaagataaagttttattgagtgaagcaagcaaaaacttcaaaagaatttttcaagatacgacaaagagaaatataaaaaaatcttcaaaagtcagaggatttgattacgatatatctgatggatcaatattaatcgccgcaataacatcgtgtactaatacttcaaatcctaatgtgttaattggagctggtttattagcaaaaaaagctgtggaacttggattaagaaccaaaccttgggtaaaaacttcattagcaccaggctcgcaagttgtgacagattatttaaataaagctggcttgagcaaatacctagatatgttaggttttaatttagtaggttatggttgtacaacatgtattggaaactctgggccactttcggaagaaattgtaaatgctattgaaaaagaaaatctttatacagtttctgtattatcaggtaataggaactttgaaggaagaatctcaccaaatgtaaaagcaaatttcctagcatcaccacctttggtagttgcatatgctttagcaggacatatggaaatagatatttataaggacaaaattggaataggaaataataataaagaaatatttttaaaagatatttggccaaccaataaagaaatagaggatacattgcaaaaagcattaagtgcagaaatgtttgttaatagatataaaaatgtttctgaaggt

SEQ ID NO: 282842 - DNA, 826 bp, Unknown
  Bacterial polypeptide expressing nucleotide sequence isolated from the Sargasso Sea
ttttttaaaatggggacagcaagcattcaacaattttagaattgttcctcccggaacaggcatttgccatcaagtaaatctagaatatctatcaaaagttgtttggaaagagtcttataaaaacgatgaatacttatttccagataccctagttggaacagatagccatacaacaatggttaatggtttgtcagttcttggatggggagttggaggtattgaagcagaagctggaatgcttggtcaaccaatatcaatgctcatacctgaagtgattgggtttgaggtaaaaaataaattaccagaaggaaccacagcaactgacttagttttaacagttgttaaaatgttaagagataaaggagtagttggaaaatttgttgagttttttggtgatggattaaaaaatttatcactcgcagaccgtgcaactatagctaatatggcaccagaatacggagccacttgtgggttttttccagttgataacgaaaccttgaaatatttaaaattttcaggaagagatgaaaatgatgtaaaaatagttaaagaatacgcaaaagtacaaggtctttgggcgagcgaagatatagaatttactgatacaatatcacttgatatgtcaaaagtggttccagctatttctggaccaaaaagacctcaagataaagttttattaaatgaagcttcagaaagctttaaaaaagtttttaaagatgcaactggtcgaaatgaaaaaagcagttcaaaagttgaaaatacagatttcaaaattgaagatggatcaatattaatcgctgcaattacatcatgtacgaatacatct

SEQ ID NO: 282843 - DNA, 922 bp, Unknown
  Bacterial polypeptide expressing nucleotide sequence isolated from the Sargasso Sea
gttaaaacttctttggcgccaggctctcaggttgttactgactatctcgaaaaagctggtttaaataaatatttagaccaacttggttttcatttagttggttatggttgtacaacctgcataggtaattcaggacctctaaaagaaaatatctcagaggcaatacaaaaaggaaatttatattcagtttcagttttatcaggaaatagaaattttgaaggaagaattaatcccgatgtaaaagcaaattatcttgcttctccacctttagttgttgcctatgctttagctggatcaatgaattttgatttatataacgaacctcttggcaaagacaaaaaaggaaaagatatctttttaaaagatatatggccaacaaataaggaaattgaagaattaattttaacttcaataaatgccaaaatgttttctaagcggtattcaaaaatctctgagggttctaatgattggaaaaaaattaaaactacagaaagcagtatttataattggaatgacagctctacctatgtaaaaaaaccaccattttttgaaaaaatgtcagataatccagaaggttttaaaaaaattactgatgcaagaccattactaatattaggtgacatggtcactacagatcacatctctccagcgggttctataaaaaaagatagtccgacaggtgattattttatgaaacatcaagtccaacaaaaagattttaattcatatggagcacgaagaggcaatcatgaggttatggtgcgtggtgcattcggaaacattagaataagaaatgaaatggttcctggaagcgaaggcggttttactaaattgtatcctgaaggtaaggttatgagtatttacgaagcggctatggaatataagaaaagaggaaatgacctagttgtaattgctgaaaaga

SEQ ID NO: 282844 - DNA, 901 bp, Unknown
  Bacterial polypeptide expressing nucleotide sequence isolated from the Sargasso Sea
aattgctaacatggcccctgagtatggagctacatgtggattctttccaatagatgaagaaactttaaaatatttagaattttccggaagagataaagaaacagtagcgattgttgaaaagtatgcgaaggaacaaggtttgtgggcaagtgatgaaattgaatttactgataaaatctctttagatatgtccactgtagttccaacaatttcaggccctaaaagaccacaagataaagttcttttaactgatgcatcaaacaattttaaaaaagtctttaaagaagctacagataaaaatgattataaaatttctaaggtaaaggatacagattatgagattaaagatggttcaatacttattgcagcaattacatcatgcacgaacacctctaatccaaatgttctaattggtgcaggactacttgcaaaaaaagctattgaattaggattgaatgttaaaccatgggttaaaacatctttagctcctggatcccaagtagtaactgattatttagagaaggcaggtcttaatacttacttagatcaactgggatttaatttagttggttatggttgtacaacttgtattgggaattcaggtccgttagcagaaaatatagttgatgctattcaaaaagaaaatttatatgcagtctctgttttatcaggtaatagaaattttgaggggagaatttcacctcacattaaagcaaattatctagcttctccaccgcttgttgtagcctacgctcttgcaggtcatatggaatttgatttaattaaagactcatttggaaaagataaaaacggcaaagatatttttttaaaagatatttggccttcaaataaagaaatagaggatacattgaagatttctctttatgcagatatgtttgtt

SEQ ID NO: 282845 - DNA, 744 bp, Unknown
  Bacterial polypeptide expressing nucleotide sequence isolated from the Sargasso Sea
catggtgctaactatcacacaacaactacgtgaacatggcgttgttggaaagtttgtagaattctatggaccgggtcttaagcatcttactacggcagaccgtgccaccatcgcaaacatggcgcctgaatatggtgctacttgcggtattttccctattgatgatgttgcgctagattacctgcgactcaccggccgagacgaagatcaaattgcccttgtagaggaatatgcgaaattcagccacctatggcacgacgaccactcaaaagatgcccagtatcatgagaccctggaacttaacttagatgaagtggttccttcacttgctggacctaagcgtcctcaagatagaattgccctcgataatgcagcagaggcatttagagagtggcatcgttcgcaaattgacgtgaaagtacttgatgaagaaaccgatctcatcgcagaagcggggttaggtacaacagacgaggtggacgaagaacacgactcattcgtggagttcagaggaagcaagttcaaccttgaagatggcgctattgtaatagctgctatcaccagctgtactaatacgtcaaatccatcagtgctcgttggcgcaggcttacttgcgaagaaagcagcagaaaaagggctaactcgtaagccgtgggttaagacttcattagcacctggttctcaggttgttactcagtatctagaagatgcaggtcttatggacccacttgaagcgctaggctt

SEQ ID NO: 282846 - DNA, 755 bp, Unknown
  Bacterial polypeptide expressing nucleotide sequence isolated from the Sargasso Sea
tctggaaaaatcaggcttaaacaaatatttagataacctaggttttaaccttgtaggttatgggtgtacaacatgtattggaaattctgggccactttccgaaaatatagttaaagcaatagaaaaagaaaatatttatgctgcatctgttttatctggcaatagaaattttgagggccgtatttctccacatataaaagcaaactacttagcttcaccccctcttgttgttgcgtatgctctggcaggagatatggaatttgatctttataaagattctttgggtaaaaatcaaaatggtaaagaaatttatctaaaggatatttggccatcaaataaagaaatagaaaatactttaagagaatcgctaagtacagacatgtttgtaaaaagatattcaaatgtttcacaaggaccaatccaatggcaaaagattaaaactgaaaaaaatagtatttataattggaacgaaggatcaacttatgtaaaaaaaccacctttttttgaaaatctttctgacaaaccagaaggatttaaaaaaattgaagatgcaagacctttgttaattttaggagatatgattacaacagaccatatatctccagcaggatctattcaaaaggaaagtataacaggcaaatattttatggagcatcaaattttaccaaaagattataactcttatggagcaaggagaggcaatcatgaagttatgatgagaggtacttttggaaacataagaattagaaatgaaa

SEQ ID NO: 282847 - DNA, 655 bp, Unknown
  Bacterial polypeptide expressing nucleotide sequence isolated from the Sargasso Sea
tccaccgggaacaggaatttgtcaccaagtaaatctagagtatttatcaaaagttgtttggtcagaagaatttaaagaggaaaaatatctttttccagatactttagttggaacagacagtcatacaacaatggtaaatggcttatctgttttaggatggggtgttggaggaattgaggctgaagcaggaatgttgggtcaaccaatttctatgttaataccagaagtaattggttttgaaatgaaaaacaaattgccagaaggaaccactgcaacagatttagttttaactgttgttaaaatgttaagagatagaggtgtggttggtaagtttgttgagttttatggagagggtttaaaaaatttaactcttgcagatagagctacaattgcaaacatggcaccagaatatggtgctacttgtggcttttttcctattgatgaagaaacattaaagtatttaaaattttctgggagagatcaacaaactgttgatgtcgtagaaagttatgccaaggaacaaggtttatgggcgagtaacgagatagaatttactgacattatatctttagatatgtccacagttgtaccaactatttcaggaccaaaaagacctcaagacaaagttcttttaacagatgcacctagttcgttt

SEQ ID NO: 282848 - DNA, 811 bp, Unknown
  Bacterial polypeptide expressing nucleotide sequence isolated from the Sargasso Sea
acttcttgtacaaatacatcaaaccctagcgttatgattggtgcaggactagtagcaaaaaaagctgttgaaaaaggtttaaaggtaaaaccttgggtaaaaacatcattagcaccagggtctcaagtcgtaacagattatttagaaaaagctggattaaatcagtatttagatcaattaggttttaatctagttggttacggttgcactacttgtataggaaactctgggcctttagataaagaaatttctgaggcaatacataaagaaaatctttatgcagtttcagtattgtcaggtaacagaaacttcgaaggtagaattaatccagatgttaaagcaaattatttagcatcaccacctctagtagttgcttatgctttagcaggtaatatgcatcatgatctttataaaaatccattaggaaaagatgaaaatggaaaagatgtatttttaaaagatatttggccttcaaataaagagattgaagagttgatgctaaaatctataaatgctgagatgtttgtaaagagatactcgaacgtttccgaaggaccaaaagagtggagttctattaaaacagaccaaagtagcatttataattgggaggaaagttcaacttatgtaaaaagaccacctttttttgataatttaccagataagccagaaggatttaagaaaatccaagatgcaagacctcttttaatattaggcgatactgtaacaaccgatcacatttcgccagccggatctattaaaaaagatagcccaactggcgattactttatgaaacaccacggttcagcaaaaa

SEQ ID NO: 282849 - DNA, 811 bp, Unknown
  Bacterial polypeptide expressing nucleotide sequence isolated from the Sargasso Sea
ttaaaagatatttggccttcaaataagcaaatagaagacactttgagagaagcattaaatgccgaaatgtttgttaaaagatattcaaacatttctgacggaccaattcaatggcaaaaaataaaaactgaaaaaagcagcatttataattgggaccaaggatctacctatgtaaaaaaacctcctttttttgataatctacctgatgaaccagaaggatttaaaaaaataaaagatgcaagaccattattgattttaggagatatggttacaacagaccatatttcaccagcaggatctatccaaaaagaaagtccaactggtgaatattttatggagcatcaaattttaccaaaagattataattcttatggatcaagaagaggaaaccatgaagttatgatgagagggacatttgcaaatataagaattagaaacgaaatggcgccaggaacagaaggaggttttacaaaattgtaccctgaaggaaaagttgtcccagtttatgaggctgtagtagaatataaaaaaagaggaacagatttagtggtaattggaggaaaagaatatggaaccggatcttcaagagattgggcagcaaaaggcacaaagttattaggcattaaagctgtaatagcagaaagcttcgaaagaatccacagatcaaatttaataggaatgggtatactaccactgcaatttattgaaaatataagtagaaaaaatttaaacttgaaaggttccgaattgataagtgttatgaatctagaaaagggaattaatccatctgaaaaagttatcttagaaataa

SEQ ID NO: 282850 - DNA, 850 bp, Unknown
  Bacterial polypeptide expressing nucleotide sequence isolated from the Sargasso Sea
actgatttagttttaactgttgttaaaatgttaagagataaaggagttgttggaaagtttgttgagttttatggagaaggtttaaaaaatttaactcttgctgatagagctacaattgcaaacatggcaccagagtatggtgctacatgtggattctttcctattgatgaagaaactttaaaatatttaaaattttcaggaagagatcaacatacagtaaatatagttgaaaattacgctaaggaacaaggattatgggcaagtagtgatttagaattcactgatattatatctttagatatgtctacagttgttccaactatttcaggtccaaaaagacctcaagataaagtgcttttaactgaagcaccaaattcttttaaaaaagtattacaggaagctacaagcaaaaatgaaaaatctgtttcaaaagtagctaatacagactacgatataaaagatggctctatattaattgctgcaattacttcttgcaccaatacttcaaatccaaatgttttgattggagcaggacttttggcaaaaaaggcaattgaaaaaggtttacaagttaaaccatgggtaaaaacttctttagcacctggatctcaagtagtaactgattatttagaaaaagctggattaaatacatatttggatcaattaggatttaatctagttggttacggatgtactacttgtattggtaactcaggtccactagccgaaaatattgtagaggcgatacaaaaagaaaatatttatgcagtttcagttttatcaggaaatagaaattttgagggaagaatctcgccacatgttaaagctaattatctagcttcacctccac

SEQ ID NO: 282851 - DNA, 823 bp, Unknown
  Bacterial polypeptide expressing nucleotide sequence isolated from the Sargasso Sea
tgattggaaaaaaattaaaactaccgaaagtagcatttataattggaacgatagctctacttatgtaaaaaaaccaccattttttgaaaaaatgtcagataatccagaaggttttaaaaaaatagctgatgcaaggccattagtaatattaggtgatatggtgactacagatcatatttcgccagctggctctataaaaaaagatagtcctacaggtgactattttatgaaacaccagattcaacaaaaagattttaattcttatggagcaagaagaggcaatcatgaagttatggtacgaggtgcttttggaaatattagaataagaaatgaaatggttcctggaaccgaaggaggttttactaaattataccctgaaggaaaagtcatgagtatttacgaggcggctatggaatataagaaaagaggaaatgacctagttgtaattgctggcaaagaatatggagcaggatcttctagagattgggcagcgaaaggaacaaaattattaggagtaaaggcggtaatcgcagagagttttgaaagaatacatagatcaaatttgattggaatgggaatgattccacttcaatttaaagatggatttaatagaaaaaaactaaaccttaaaggatccgagttaattacttttattggtatagaaaaaggcataactccaggtcaagaggttgaatgcgaaattaagtatgtagatggagtagctaaaaagattaatttgctttccagaattgatacagcaaatgaagttgaatattataaaaatgacggaatattaaaattcgttttaagaagcatgttataa

SEQ ID NO: 282852 - DNA, 766 bp, Unknown
  Bacterial polypeptide expressing nucleotide sequence isolated from the Sargasso Sea
aacatatgtaaaaaaacctccattctttgactctctatctgatgaaccagaaggatttaaagaaataaaggatgcaagaccattattaattttaggggacatggtaacaacagaccatatatcaccagctggcagtattcaaaaggatagtccaaccggtgaatattttatggaacatcagattttgccaaaagattttaactcttacggttcaagaagaggaaatcatgaggttatgatgagaggaacttttgcaaatataagaatcagaaatgagatggcgcctggtacagagggcggttttacaaagttatatccagaagaaaaagttcttcctatttacgatgctgtggttgaatataaaaaaagaggtaccgatttagttgtaatcggtggaaaagaatatggaactggatcttctagagattgggccgccaaaggcacaaaattattagggataaaagcagtcattgctgagagctttgaaagaattcacagatctaatttgattggaatgggaatactaccattacaatttattaatgatgttaatagaaaaaatcttaaattaattggttctgaattaattagcattataaatatagaaaagggagttaatccctcagatgaagtgacagtcgaaattaaatatgcttctggcgaaataaagaaatttaaaactttatgcagaattgatacaaaaaatgaattagagtattataaaaacggaggtattctgcagtacgttttaaggaatatgatttag

SEQ ID NO: 282853 - DNA, 852 bp, Unknown
  Bacterial polypeptide expressing nucleotide sequence isolated from the Sargasso Sea
tgaaaattaaagatggatcaattcttattgcagcaattacctcttgtactaatacttctaatccaaatgttttgataggagctggtttgcttgcaaaaaaagcaatagaacttggtttgaaaactaaaccctgggtgaaaacatcattagcacctggttctcaggtagtaacagattatttagaaaaagctggattaaataagtaccttgatatgcttggttttaatttagtagggtatggttgcactacatgcattggaaattctggtcctttaaaagaaaatattgtatcagcaattgagaaagaaagcatctacgctgtttcagtgttatctggtaatagaaactttgagggacgaatatcaccacacattaaagcaaactatttagcatcaccacctttagttgttgcttacgcattagcaggtcatatggaaattgatttatttaaggatccacttggaaaagataaaaatggaaaagatatttttttaaaagacatatggccatcaaataaagaaattgaagccacacttgcagattctttaaatgcaaacatgttcattaaaagatattcaaacgtatcggagggaccagttcaatggcaaaaaattaaaactgaaaaaactagtatttataattgggatgagagttctacttatgttaaaagacctcctttctttgatcaattatctgacgagccagagggatttaaagagattaaagacgcaagaccactactaattttaggagatatggtaactacagatcatatttcacctgctggctcaatccaaaaagaaagcccaactggagaatattttatgaaacatccaagtgcttccaaataga

SEQ ID NO: 282854 - DNA, 885 bp, Unknown
  Bacterial polypeptide expressing nucleotide sequence isolated from the Sargasso Sea
tctttggcaccaggatctcaagttgtaacagattatttagaaaaagctggattaaataagtatttagatcaattaggttttaatctagttggttacggttgtactacttgcataggaaattctggccctttagataaagaaatttctgaaacaatacataaagaaaatctttatgcagtctcagtattgtcaggtaacagaaactttgaaggtagaattaatccagatgttaaagcaaattatttagcatcaccacctctagtagttgcttatgctttagcaggtaatatgcatcatgatctttataaaaattcattgggtaaagatgaaaatggaaaagatgtatttttaaaagatatttggccttcaaacaaagagattgaagagttaatgctaaaatctattaatgccgatatgtttgttaagagatactccaacgtttctgaaggaccgaaagaatggagttctattaaaacagaccaaagtagtatttataattgggaggaaagttctacttatgtcaaaagaccacctttttttgataatttaccagataagccagaaggatttaagaaaattaaagatgcaagaccacttttaatattaggcgatactgtaacaaccgatcatatttccccagctggatctattaaaaaagatagcccaactggcgattactttatgaaacatcaggttcagcaaaaagattttaattcttacggggctagaagaggcaatcatgaagttatgttaagaggaacatttggaaatattaggattagaaacgaaatggccgcaggaacagagggtggcttcactatcctacaaccaaatgggaaacaaatgagtgtatatgaagctgcaatggaatacaaaaagagagga

SEQ ID NO: 282855 - DNA, 712 bp, Unknown
  Bacterial polypeptide expressing nucleotide sequence isolated from the Sargasso Sea
gaaaccttggtttacccagataccctagtaggaacagattcgcataccactatgattaatggccttggcgtacttggctggggtgtgggaggcattgaagcagaagcagcgatgctgggtcaaccagtaacaatgttattaccaaaagtggttggcttcaggctttcaggtaagttacctgctggcgtaactgccaccgacatggtgctaactatcacacaacaactacgtgaacatggcgttgttggaaagtttgtagaattctatggaccgggtcttaagcatcttactacggcagaccgtgccaccatcgcaaacatggcgcccgaatatggcgctacttgcggaatcttccctattgatgatgtagcgctagattacctgcgcctcaccggccgagacgaagaccaaattgctcttgttgaggaatatgcgaaattcagtcacttatggcacgacgatcattcaaaagatgcgcagtatcatgaaaccctggaacttaacttagatgaagtggttccttcacttgctggaccgaagcgtcctcaagatagaattgccctcgataatgcagcagaggcatttagagagtggcatcgttcgcaaatcgacgtgaaagtacttgatgaagaaaccgatctcatcgcagaagcggggttaggtacaacagacgaggtcgacgaagaacacgactcattcgtggaattcagag

SEQ ID NO: 282856 - DNA, 868 bp, Unknown
  Bacterial polypeptide expressing nucleotide sequence isolated from the Sargasso Sea
tggtccctaccagaaaatatttcaaactcaattaaagaaaacgatatttatgcagtttctgtactgtcaggtaatagaaattttgaaggtagaatatctcctttagtaaaagctaactatctagcttcacctcctctcgtagtagcatattctttagtgggatctatgcaagtagatttatataaagattctattggaaaagataaagatgataaggaagtttacttaaaagatatctggccaagcaataaagaaattgaagaagttttattacaatctttgagtcctgaaatgtttatagagagatattcaaatgtttctaaaggaccagagcagtggcaacaaattaaaactaaagaaagcagcatttatgaatgggatgataattcaacttatgtcaaaaaaccaccattctttgaaaacctttcatcaacaccagaaggatttaaagctataaaaaatgcaagacctttattaattttaggtgatagtgtcacaactgatcatatatctcctgcgggtgcaatacaaaaagaaagtcccacaggtgagtatttcatgaaacatcaaattcttccaaaagattacaactcttatggttcaagacgtggaaatcatgaagttatgatgagaggtacatttgctaatattagaataagaaatgaagttgcgcctggaacagaagggggatttaccaagctatatccagaaaacaaagtaatgccagtatatgatgcagttgttgagtacaaacaaagaggaaccgatcttgtagtaattggcggaaaagagtatggcacaggttcttctagagattgggctgccaaaggaacaaaattattaggaatcaaagctgtaattgcagaaa

SEQ ID NO: 282857 - DNA, 867 bp, Unknown
  Bacterial polypeptide expressing nucleotide sequence isolated from the Sargasso Sea
aaaaagttctaaaatggaaatagcttacagacctgccagaattttgttacaagattatactggaattccagcagtagctgatttagcagcaatgcgagatgcagtaaaatcaaaaaataaagatcctaaaaaaatcaatcctctatctaaagtagatctagtaattgatcattcagtgatggtggataattatgcaaagaaagattcttttaaaaagaatgtggaaagagaatttgacagaaatggagaaagatattcatttttaaaatggggacaaagtgcttttaataattttagagttgttccgccaggaacaggaatttgtcatcaggtcaatttagaatatttgtcgaaagtagtttggtctttagatattgaaggaaaaacttatgcttatcccgatactttagtaggaactgatagtcacaccacaatggttaatggtctatcagtattaggttggggtgttggaggaatagaagcagaagctgctatgctcggacagccaatctcaatgttaatacccgaggtgattggttttgaaataaatgggagacttaccgaaggaacaaccgctagtgatttagttttaacaatagtacaaatgttaagaaaaaaaggtgtggtaggtaaatttgttgaattttatggagaaggtttaaaaaatttatctcttgcggatagagcaacaatagcaaacatggcaccggagtatggagctacttgtggtttttttccaattgatgaagaaacaataaaatatttaaaattttcagggagagatgaaaaaactatttctttggttgaaaaatattcaaaagagcaaggtttatgggcaagtgaagaaatagaatttactgatactat

SEQ ID NO: 282858 - DNA, 814 bp, Unknown
  Bacterial polypeptide expressing nucleotide sequence isolated from the Sargasso Sea
cttgatactgtagttggcaccgactcacacactacgatggtaaatggacttggtgtgttaggctggggcgtaggaggcattgaggccgaagcagctatgcttggacaacctattcctatgcttttaccagaagttattggatttagactagatggacagctagctaaaacatccacagctaccgatttagtgttaacaattgtagagaaattgagacaagctaatgttgttgggaaatttgtagaattttacggtgacgctttggacaccttatcaatatatgacagatgcacaatagcgaatatggcgcccgagtatggagcaacatgtggtttttttcctgtcgatcaactcacattagattatttaaaaactaccggaaaatctgtggaacatgttgatatggtagaaaactattgtaaagaagtgggtttatttagagatccaaataatgatattaaattttcccaggaattacacttaaatttatctgatgtacttccttgcatatctggaccaaaacgaccagaagataaaattcttttaagtgatgttaaaaatgtcatctctactgagatatcgaagatatccaaaaacaaagatagtaaaaaaactgtactagaagatggttctatagtaatagcagctattacaagttgtactaatacttctaatccgagcgttattataggagcaggacttctagctaaaaatgcaatagagaaaggacttaacaaaaagacttgggttaaaacgtcactagcgcctggatcaaaagttgtcgaaaattatttaaggaaagccgacctgctaa

SEQ ID NO: 282859 - DNA, 931 bp, Unknown
  Bacterial polypeptide expressing nucleotide sequence isolated from the Sargasso Sea
aataaagatcctaatcaaattaatccactatctacagtggatttagtaatagaccattccgttatggttgacgagtatgcatctggtaaatcgtttaatcaaaatgttgaaaaagaattttctagaaacggagagaggtatgcatttcttaagtggggtcaaaaagcttttgataattttagagttgttccaccaggaacaggtatttgtcatcaagtaaatctagaatatctggctaaagtagtatggtcatcgaaaagtggtaatgatctttatgcttatccagatactttagttggaacagacagtcatacgacaatggtaaacgggttatcagttttaggatggggagtgggtggaatagaagcagaggcagctatgttaggccaacctatttcaatgttaattccagaagttgtaggagtagaaattaaaggaaaactacttgaggggctaacagctacagacttagtattagcaattgttgagatgctcagaaaaaaaggtgtagtaggaaaatttgtagaattttatggcgaaggtttaaaaaatcttacattagctgatagagccacaatagcaaacatggcacctgagtatggagcaacatgtggtttctttccagtagacgaagaaactctaaaatatttaaaactctctggaagagataatgaaacaattgaacttgtagaaaaatattcaaaagaacaaggtctatgggcaagcgagggtatggaattcacagatactttatctttagatattagcagtgttgttccgagtatatctggtcctaaaagaccacaagacaaagttttattaacaaattctgctaaaagtttcgctaaagcgtataaagaaaataccaagagagaaaaacccattgaagcaaatgttgctggcgctgattttaaaatcaaagatggagata

SEQ ID NO: 282860 - DNA, 828 bp, Unknown
  Bacterial polypeptide expressing nucleotide sequence isolated from the Sargasso Sea
gttgttacagactatttagaaaaagctggtttaagcaaatatttagatgagttaggtttcaatttagttggttacggatgcaccacatgtattggtaactctggacctttgcaagataatatcactgaggctattaaagaaaataatttatatgcagtttcagttttgtctggaaatagaaactttgaaggaaggatttctccattagtaaaagcaaactatttagcctcacctcctcttgtagtagcctatgcaattgctgggtctatgagagtggatttgtataaagatccattaggaaaagataacaaaggccaagatgtttacttaaaagatatttggccaaccaataaagagatagaggacactcttaaacaatctctgaacccagatatgtttgtaaacagatattcaaatgtttctgagggaccagagcaatggcaaaaaataaaagtagataaaggaagtatttataactgggaagagaattctacttatgtaaaaaaaccaccattctttgaaaatttaccagatgatccagaaggatttaaagaaataaaagatgcaagaccattattaattttaggagatatggtaacaacagaccatatatctccagctggaactatacaaaaagaaagtccaacaggtaattattttatgaaacatcaaattttaccgaaggattataactcctatggagcaagaagaggaaatcatgaagtaatgatgagaggaacgttcgctaatattagaattaaaaatgaaatggctccaggaacagagggaggatttactaaattatatcctgaagaaaaagtaatgcct

SEQ ID NO: 282861 - DNA, 610 bp, Unknown
  Bacterial polypeptide expressing nucleotide sequence isolated from the Sargasso Sea
ttggatcaattaggttttaacttagttgaatacggctgcacaacttgcattggtaattctggaccattacaagaaaatatttctgaagctataaaaaaagaaaatatttatgctgcatcagtgctatcaggtaataggaattttgaaggtagaatttcaccattagttaaagctaactatcttgcttctcctcctcttgtagttgcttatgcattagctggaactatgagtattgatctttataaagatcctctaggtaaagataatgagggcaataatatttatttaaaagatatttggcctagcaataaagaaattgaagatacacttaaaaattctttaaatccagatatgtttgtaaagagatattcaaatatttcagaaggacccaaacaatggcaaaaaattaaaacagaacctagtagtatttataattgggaagaaagttcaacatatgttaaaaaacctcctttttttgaaaatttgccagatgagccagaggatattaaaaatattaatgaagcaagaccattattaattttaggagatatggttactactgatcatatatctccggctggaacaattcaaaaagaaagtccaaccggag

SEQ ID NO: 282862 - DNA, 918 bp, Unknown
  Bacterial polypeptide expressing nucleotide sequence isolated from the Sargasso Sea
gagacctcaagacaaaatactactatcaaatgttgctgatcaatttatgacatcatttgaagacgaatttggccaaaagaaaacatcaaatcctatttcagtaaataatgaatttgaaattgatcacgggcatgttgccattgcagcaattacgagttgtaccaacacttcaaatccaagcgtaatgattggagcaggattacttgcccaaaaggcaaataagctaggtttaaaaactaaaccctgggttaaaacctctttagctccaggatctaaagttgttacggattacttggaaaaatcagggctccaagagcaattagacaaacttggttttaatctagtgggttttggatgtacgacttgtataggtaactctgggcctctagatgaaaatatttccaatgcaatttctaaaaatgacttaatcgttagtggtgttctgtcaggaaatagaaattttgaaggtaggataaatccttttgttaaagcaaattaccttgcctcaccaccacttgttgtagcttatgccttagcaggttcaactaagataaatttaataaaagacccaataggaattggtcttaataatagggaaatctatctaaaagatatttggcctaaatcaaaggaaatagaaaccgtaataaataaaataataaactctaatttatataagaacagatacaaaaatgtatttaagggtgataaaaaatggaattcagtaaaatctccgactggcttaacttatcagtggaataagaactcaacttatgttcaacatcctccattttttaaaaatttagatttaaaagttaataatgtttcaaatataaggaatgcacatattttaggagtctttggcgactctgtaacaacagatcatatcagtcccgcgggggcgatcaaagaggatgg

SEQ ID NO: 282863 - DNA, 808 bp, Unknown
  Bacterial polypeptide expressing nucleotide sequence isolated from the Sargasso Sea
aaggaaaaacatatttcagaagttaatggaactgattttaaaattaaagatggttctatattaatagctgcaataacatcttgcacaaatacttctaatcctaatgttttaattggagcaggcttgttggcaaaaaaagctgtagaattgggattaaaaacaaaaccttgggtaaaaacttcattagcaccagggtcacaagtagtaactgattatttggaaaaagcaggtcttaataaatacctagacgaattaggatttaatttagttggctatggatgcacaacttgtattggaaactcaggtccattgcctgataatattgtagaagcaattgaaaaagaaaatatatatgcagtatcggttttatctggtaatagaaattttgaaggccgtatatctcctcatataaaggcaaattatttagcatcacccccactcgttgttgcttacgctttagctggttacatggaagtagatttatataaagatcctttaggaaaagataaaaatgataaagatatttttttaaaagatatttggccttcaaataaagaaatagaggatgttttaagagaggcactaaatgcaaaaatgtttgttgaaagatactccaacgtctctgaaggaccagttcaatggcaaaaaattaaaactgaaaaaagtagtatttataattgggatgagggatcaacttatgtaaaaagaccaccattttttgataatatgccagatgaaccagagggatttaaaaagattaaaaatgcgagaccattattgattttaggagatatggtaacaacagatc

SEQ ID NO: 282864 - DNA, 743 bp, Unknown
  Bacterial polypeptide expressing nucleotide sequence isolated from the Sargasso Sea
ctcagaaatatctaacgacccaggatcaatatcgaatataaataaggcaaaaatattagccgttttaggtgatatgattactaccgatcacatctccccagctgggtcttttctcgagacaacacctgctggtaaataccttacagaacgtcaagttccagcaagagaattcaactcatatgggtccaggcgtggcaatcacgaaataatgatgcgtggaacattcgctaacattcggataaaaaacgagatgctttccaatactgaaggtggatatactaaagacccaaatggtgaaacaacatctatttttgatgctgcgatggcctataaaaatagcggcatacccttagtcgtcattggtggagatcagtatggagcgggttcttctagggactgggcagctaaaggaacagcattactgggggtcaaagcagttatagctgaaagttttgaaagaattcatcgctcaaatctcgtgggcatgggagttataccctttgaattcacacagggtgacaatcgaaaatcgctttcattaagcggggatgaaatagtttcaattcacgggctcgaagaaataacgccgcttgagcatgtagactgtgaaattttatatccggacggaaacattaaaatcattagacttaaatgtaggatagatactgcaatagagattgagtatatcgagcacggtggcgttttacattttgtattaagaaaccttgcaaaagcctcataga

SEQ ID NO: 282865 - DNA, 826 bp, Unknown
  Bacterial polypeptide expressing nucleotide sequence isolated from the Sargasso Sea
aaggtgctgctggaaaacctgctgcgctgggaagacgccaagaccgtcaccggcaccgacctcaaggccatcgccgcctggctcaaagaacgccagtccgaccgcgagatccagtaccgccccgctcgcgtgctgatgcaagactttaccggggtacccgccgtggtcgacctggccgccatgcgcgctgccgtggccaaggccgggggtgacccacagcgcatcaacccgctgtcaccggtggatctggtgattgaccactcggtgatggtcgacaagtttggcagcaccagcgccttcgagcagaacgtcgatatcgagatgcagcgcaacggcgaacgctacgccttcctgcgctggggccagagcgccttcgacaacttcagcgtggtaccaccgggtaccggcatctgccaccaggtcaacctcgaatacctgggccgcaccgtatggaccaaagaggaagacggccgcacctacgccttccccgacaccctggtaggcaccgactcccacaccaccatgatcaacggcctcggcgtattgggctggggcgtgggcgggatcgaagccgaggcggcgatgcttggccagccggtgtcgatgctgatcccggaagtgatcggcttcaagctcaccggcaagctcaaggaaggcattaccgccaccgacctggtgctgaccgtcacgcaaatgctgcgcaagaaaggcgtggtgggcaagttcgtggagttctacggcgacgggctggccgatttgcccctggccgaccgcgcgaccatcgccaacaaggcaccggaatatggcgcgacctgtggctttttcc

SEQ ID NO: 282866 - DNA, 629 bp, Unknown
  Bacterial polypeptide expressing nucleotide sequence isolated from the Sargasso Sea
cctgtgttctcaagttgtgactgattacttagagaaagctggattaaatatttatttagataaattaggttttaatttagttggatatggttgcactacatgcattggaaattctggtcctttaccagaaaatatttcagaagctgttaaaaaaaatgacatatttgcagtttctgttttgtcaggaaacagaaattttgagggaagaatatcacctttaattaaagcaaattatttagcatctccacccttagttgttgcttatgctcttgctggtcatatgggcttcgacttatacaaagactcttttgataaaaatatttttctaaaagatatttggccatctaataaagaaattgaggaagtgctaaataagtctcttactccaaacatgtttataaatagatattcgaatatctcggaaggaccaaaacaatggcaaaatataaaaacagaaaaaagtagcatttataattgggacgaaggatctacttatgttaaaaaaccaccttttttcgataatttatcagataaaccagaaggatttaaaaaaattgaagatgcaagaccattgttaatattaggggatatgattacaactgatcatatttcacctgctggatccatac

SEQ ID NO: 282867 - DNA, 909 bp, Unknown
  Bacterial polypeptide expressing nucleotide sequence isolated from the Sargasso Sea
gaagcatataaaaaaaatgtaaagaatgagtttgatcgtaataaagaaaggtatgagtttttaaaatggggacagcaaacatttgataatttttatttagcaccacctggaggtggcatttgtcaccaagtaaatcttgaaaatatagcaactactatatggtcaaaaactattgataaagaaaattttctttatcctgactctgttgtagggactgatagtcatacaacaatggtaaatgctttatcagttttaggatggggtgtgggcggaatagaagcagaagctgcaatgttaggtcaaccaatatcaatgaatattccaaaggttgttggctttaagttgaacggaaaacttcaagaaggaataacagcaacagatttagttttaacaattactgaaattttaagaaaacatggagttgttggaaagtttgtagaattttatggaggtggtttacaaaacctttctcttgctgacagatctactatatctaatatgtctccagaatacggagctacttgtggattttttcctactgatcaagaaacaatcaattatttaaaactatcaggaaaaaataatactcaattaaatatagttaaacaatacactaaaattcaaaaactctggatgaatgaagattacgagcctcgatttgatgaaatggtaagtttagatttaggcacaattgaaccagctgtagcaggtcctaaaagacctcaagacaaaatatttgttaaagatcttcctgaagcttttaaaaaaatagataagttagctattagcaaatcaaataatagtcaacagctgcaatctggcgatattgtaattgctgcaataacaagttgtacaaatacatctaatcccaatgtaatggatagctgcaggtttggtgcaaaaaaagca

SEQ ID NO: 282868 - DNA, 784 bp, Unknown
  Bacterial polypeptide expressing nucleotide sequence isolated from the Sargasso Sea
gaaaaatataaagatgaacaatatttatttccagatactttagttggcaccgatagtcatacaacgatggttaatggattatctgttcttggctggggtgttggcggaatagaggctgaagcaggaatgcttggacaaccaatttcaatgttaattccagaagttattggttttgaatttaaaaataaaatgcctgaaggtattacagctactgatttagtattaactgtagttaaaattttaagagataaaggagtagtaggaaagtttgttgaattttatggagatggtttaaaaaatttaacacttgctgacagggctactatcgcgaatatggcacctgaatacggggcaacttgtggattttttcctatagatgacgaaacactaaaatatttaaggttttcaggaagaaatgaacataatgtagctattgtagaaaaatacgcaaaagaacaaggtctttgggcaagtgaaaatgtagagtttacagataaagtttcactagatatgtcatcattagttccaacaatatctggtccaaaaagacctcaagataaagttttactatctgaagcatcatctagttttaaaaaagtttttgaaaatacaacatcgagaaataaaaaaaatgtttcgaaagttaatggtaaagaatttaatattgaagatggctcaatattaatagcagcaattacttcatgcacaaatacatctaatccaaatgtattaattggtgcaggtttgttagcaaaaaaagctgtcgaattaggcttaaaaacta

SEQ ID NO: 282869 - DNA, 869 bp, Unknown
  Bacterial polypeptide expressing nucleotide sequence isolated from the Sargasso Sea
ttcagatgctataaaaaaagaaaatatttacgctgtatccgttttatcaggtaatagaaattttgaaggaagaatttcaccattagttaaagctaactatctggcatctccccctcttgtagttgcttatgcattagctggaagtatgagtatagatctttacaaagatcctttaggaaaagacaacaaaggtaatgatgtttttttaaaagatatttggccaagcaataaagaaattgatgatactcttaaaaattctttaaatgctgatatgtttgtaaaaagatattcaaatatctccgaaggacctaagcaatggcaaaaaattaaaactgaaccaacaagtatttataattgggaagaaagctcaacatacgtaaaaaaacctcctttttttgaaaatctaccagacaagccggaagatattaaaaatattaatgatgccaggcctttattaattttaggagatatggttacaacagatcatatttctccagctgggacaattcaaaaagaaagccctacaggagaatattttatgaaacatcaaatattaaccaaagattataattcctatggagcaagaagaggaaatcatgaagttatgatgcgtgggacatttgctaatataagaattagaaatgaaatagcccctgaaacagaaggtggttttacaaaattatacccagaagaaaaagtgatgcccgtatatgatgcggttgtagaatataaaaaaagaggaacaaatttagttgttataggcggaaaggaatatggaaccggttcatctagagattgggcggccaaaggaacaaagctattgggtataaaagcggttttagctgagagtttcgagagaatccatagat

SEQ ID NO: 282870 - DNA, 757 bp, Unknown
  Bacterial polypeptide expressing nucleotide sequence isolated from the Sargasso Sea
agataaattagggtttaatttagtaggttatggatgtacaacttgtattggaaattctggtccattggcagataatattgtcgaagcaatacaaagaaaaaacttatatggtgtatcagttttatcaggaaatagaaactttgaaggaagaatatctcctcacattaaagctaactatttagcatcacctccactagtggtagcatattcattagctggacatatgtcttttgacttatacaaagattcatttggtaaagataaaaatggaaatgatatttttttaaaagatatatggccctcaaataaagagatagaggaaacattaaaaaaatcattaaatgctgaaatgtttatcaaaagatattctaatgtttcacaaggcccaaaacagtggcaggatattaaaaccgaaaagagtagtatttataattgggatgaaaattccacatatgtaaaaaaaccgcctttttttgataatttatcggaagaacctgagggatttaaagctattaaaaatgcaagaccattacttattttaggagatatggtcactacagatcatatttcaccagctggaaatattcaaaaagagagtccaacaggggaatattttatgaaacatcaaatattaccaaaagattataattcatatggctcaagacgagggaatcatgaagttatgatgagaggtacctttgctaacataagaataagaaatgaaatagcacctgggactgaaggtggatttacaaaa

SEQ ID NO: 282871 - DNA, 862 bp, Unknown
  Bacterial polypeptide expressing nucleotide sequence isolated from the Sargasso Sea
ccaaatgttttaatcggtgcaggcttgcttgcaaaaaaagcagttgataaaggtttgcaaacaaaaccttgggtaaaaacttctttagcgccaggatctcaagttgttactgactatttagaaaaagcaggtttaagttcctatttagatcagttaggttttaaccttgttggttatggatgcacaacttgtattggtaattctggacctttaaaagaaaatatttctaatgcagttaaaaatgataatatttatgccgtatcagttttatctggaaatagaaattttgaaggtagaatttctccactagtgaaagcaaattatcttgcatcaccacctttggtagttgcgtatgcaatagctggttctatgagaatagatttacttaaagatcctttggggaaagataaaaatggaaatgatatttttttaaaagatatttggccaagtaataatgaaatagaagaaactttaaaagattctttaaatgctgaaatgtttataaaaagatattcaaacatttcggaaggaccagaacaatggcaaaaaattaaaactgaacaaagtagcatctataattgggaagaatcttctacctatgtaaaaaaacctcctttttttgaaaacttgccggataaaccagaaggatttaaagaaattaaagacgcaagaccattattgattttaggagatatggtaacaacagatcacatttcaccagctggaacaattcaaaaagaaagtccaactggtgaatactttatgcaacatcaaattttatcaaaagattataattcttacggatcaagaagaggtaatcatgaagtaatgatgagaggtacatttgcaaatattagaataa

SEQ ID NO: 282872 - DNA, 754 bp, Unknown
  Bacterial polypeptide expressing nucleotide sequence isolated from the Sargasso Sea
aggtatgaagatgatgtaactgtagataaaaaacaaatattagccttaaaagattggcttaaaaataaaaaatcaaacacagaaatagcttacagacctgctcgtactttattgcaagattataccggaatccctgcgattgccgatctagcagcgatgagagatgctgtaaaagataaaaataaaaatccagataaaattaatccattatctactgttgatttagtaatagaccactctgtgatggttgatgaatatgcttcaggaaaatcatttaatcaaaatgttgaaagagaattttcaagaaatggtgaaagatattcttttttaaagtggggacaaaaagcatttgataattttagagttgtcccacctggaacaggaatttgtcatcaagtgaatttagaatatttatcaaaagttgtttggtcatcaaaaagtggaactgatttatacgcttatccagatacattagttggaactgatagtcatacaacaatggtaaatggtttatcagttttaggttggggcgtaggcggaatagaggcagaagctgcaatgttaggtcaacctatttcaatgttaatcccagaagtcgttggtgttgaactaaaaggaaaattaaaagaaggaacaactgcaacagacttagttttaatcattgttgaaatgcttagaaaaaaaggtgtggttggaaaattagtagaattttatggcgaaggtttaaaaaatttaactttagctgacagagcaa

SEQ ID NO: 282873 - DNA, 829 bp, Unknown
  Bacterial polypeptide expressing nucleotide sequence isolated from the Sargasso Sea
aaaaaatgtggatatcgagttttctcgcaacgccgaacggtatgcatttctacgttgggggcagcaggcatttcagaattttcgggttgtccctccagccattgggatcgttcatcaagtcaatcttgaatttttggcaggttgtgtctttttgagaaaacagagtgattctgaaaagggtggggataaccgtttgcctgtggctgttccggatacactcgtcggtactgatagccataccacaatgatcaatggtcttggggtagttggctggggtgttggtggcattgaggccgaagcggtgatgctggggcaggcgctgtcgttgctcatgccagaagttgtaggttttgaattgactggcacgttacctgctggggcgacggcaacagacctcgtgctcacggttactgaagcacttcgaaaagagggtgttgttggtaagtttgtggaattttttggtgaaggccttgctggtatgtcgttggcagaccgggcgaccattgccaacatggctcccgaatatggtgccaccatgggtttcttcccagttgatgatgagacgcttgcctatctccgactgacggggcgctcagatgatcatgtgtcattggtggagcgatacatgaaagagcaggggctttttcgaacgaatgaagctcctgtgccagaatacacaaaacgtctttctctagatctagggtctgttgttcccagtctggcaggtccaaagcggccgcaggatcgcgtaccgctgtcgtcaatcaaggaaaccttcggccaggcattacaggcgccggcaaatcaacgtggatttgcccttgaagga

SEQ ID NO: 282874 - DNA, 721 bp, Unknown
  Bacterial polypeptide expressing nucleotide sequence isolated from the Sargasso Sea
tcttgtacaaatacatcaaacccaagcgttatgattggtgctggactagtagcaaaaaaggctgttgaaaaaggtttaaaggtaaaaccttgggtaaaaacatcattggcaccagggtctcaagtagtaacagattatttagaaaaagcaggattaaataagtatttagatcaattaggtttcaacttagttggctacggttgtactacttgtattggaaactctgggcccttagataaagaaatttctgagacaatacataaagaaaatctttatgcagtttcagtattgtcaggtaacagaaactttgaaggtagaattaatccagatgtaaaagcaaattacttagcatcaccacctctagtagttgcttatgctttagcaggtaatatgcatcatgatctttataaaaattcattaggtaaagatcaaaatggaaaagatgtatttttaaaagatatttggccttcaaataaagagatcgaagagttaatgttaaaatcaattaatgccgatatgtttattaaaagatactcgaatgtttctgaaggaccaaaagaatggagttctattaaaacagaccaaagtagtatttataattgggaggaaagctccacttatgtaaaaagaccacctttttttgataatttaccagacaagccagaaggatttaagaaaattaatgatgcaagaccacttttaatattgggtgataccgtaa

SEQ ID NO: 282875 - DNA, 852 bp, Unknown
  Bacterial polypeptide expressing nucleotide sequence isolated from the Sargasso Sea
tggacctttgcagataatattactgatgctgttaaagaaaataatttatacgcagtttcagttttgtctggaaatagaaactttgaaggaagaatttctcctttagttaaagcaaattatttagcgtcacctcctcttgtagtagcttatgcaattgcaggatctatgagaatggatttgtataaagatccattaggaaaagatgataaaggacaagatgtttacttaaaagacatttggccttctaataaagagattgaagatactcttaaacaatctttaaacccagaaatgtttgtgaatagatattcaaatgtttcagaaggaccagaacaatggcaaaaaattaaagtgaacaaaggaagtatttacaattgggaagaaaattctacctatgttaaaaaaccaccattttttgaaaatttacctgatgaaccagaaggttttaaggaaataaaagatgcaagaccattattaattttaggggatatggtaacaacagaccatatatctccagctggaagtattcaaaaagaaagcccaacaggaaattattttatgaagcatcaaattttgcctaaggattataattcttatggtgcaagaagagggaatcatgaggtaatgatgagaggaacatttgctaatattagaattaaaaatgaaatggctccaggtacagagggaggtttcactaaattatatcctgaagaaaaagtaatgcctatttatgatgctgttgttgaatacaaaaaaagaggaacagatttagttgtatttggaggaaaagaatatggaactggttcttcaagagattgggctgcaaaaggaacaaaattattaggtataaaa

SEQ ID NO: 282876 - DNA, 912 bp, Unknown
  Bacterial polypeptide expressing nucleotide sequence isolated from the Sargasso Sea
acaacatgtattggaaattctggacctttgcccgataacatagttgaagcaattgaaaaagaagacatatatggtgtatctgttttgtctggtaacagaaattttgagggtcgtatttctccacatataaaagcaaactaccttgcatctcctccacttgtcgttgcttatggattagctggtcatatggaaatagatttatataaagaccccttaggcaaagataaaaataacaaggatatttttttaaaagatatttggccttctaacaaacaaatagaagaaactttaagagaagcattgaatgctgaaatgtttgttaaaagatattcaaacgtttctaagggaccaattcaatggcaaaaaataaaaactgaaaaaagtagtatttataattgggacaaaggatcaacctacgtaaaaaaaccacctttttttgataatcttccagatgaaccagagggttttaaaaaaataaaagatgcaagaccattattaattttgggagatatggttactacagaccatatatctccagcaggatctataccaaaagaaagtccaactggagaatatttcatgaaacatcaaattttaccaaaagattacaattcctacggatcaagaagaggaaatcatgaagtcatgatgagaggtacattcgcaaatataagaattagaaacgaaatggcgcccggaactgaaggaggatatacaaaattatatccagaaggaaaggttatgccagtttatgatgcagtagtagagtacaaaaaaagaggaacagaattaatagtagtaggaggtaaagaatatggaactggctcgtctagagattgggcggcaaaaggtacaaagcttctagggataaaggtagttattgctgaaagttttgaaagaatcatagatcaa

SEQ ID NO: 282877 - DNA, 847 bp, Unknown
  Bacterial polypeptide expressing nucleotide sequence isolated from the Sargasso Sea
ttcaaatatttctgaaggaccaaaacaatggcaagaaattaaaacagaaaagagtagtatttataattgggatgaaaattctacttatgtaaaaaaacctccattttttgaaaatcttagtgacgagccagagggtttcaaagagattaaaaatgcaagaccattattgatattaggagacatggttaccacggatcatatttctccagctggtaatattcaaaaagatagcccaacaggagaatattttatgaactatcaagttcttcctaaggactataattcatatggctcaagacgtggaaatcatgaggttatgatgagaggaacatttgcaaatataagaattaaaaatgaaatggttccaggtaccgaaggtggtttcactaaattatatcctcaggaaaaagttatgtcagtttatgatgcggcagtagagtataaaaaaagaggaactgatttagttgtaattggtggcaaagaatatggtacaggctcttctcgtgattgggctgcaaaaggaactaaattactaggcattaaagccgttatagctgagagttttgagagaattcatagatccaacttaattggaatgggaattttaccattacaattcaaaaataatatgaatagaattaatttaaatttaataggatctgaatttattagtgttttaaatattgaaaaagggattaatccttcagatagtgtaaaattagaaattaaatatttatctggagatataaaaacaatagatactctttgtcggatagatactaaaaatgaattagaatattataaaaatgggggaatattacaatacgttttgagaaatatgatctag

SEQ ID NO: 282878 - DNA, 718 bp, Unknown
  Bacterial polypeptide expressing nucleotide sequence isolated from the Sargasso Sea
tcttagatatgaagacaatgtaacggttaataaagaacaaatttttgcgattaaagagtggttaaattcaaaaaaatccaaaacagaaattgcatatagacctgcaagagtgcttttgcaagattatactggtataccagccgtagctgatcttgctgcaatgagggatacagttaaggaaaagaataaagatccaaataccatcaaccctctctcttcagttgatcttgtaatcgaccactctgttcaagtggataagtttgcaactaaaaattcattaaaggaaaatgttgatattgaatttgacagaaactttgagagatattcatttttaaaatggggacagcaagcgtttaataattttagaattgttcccccagggactggaatttgccatcaggtaaatttagaatatttatcaaaagtagtttggaacgaaaagtttaaagataaagagtatttatttccagacacgctagttggaactgatagccatactacaatggttaatggtttatcagtactaggttggggagtaggaggaattgaagcagaagcaggtatgctgggacaacctatatcaatgttaataccagaagtagttggatttgaaatgaaaaataagctacctgaaggtacaactgctaccgatctagttttaacagtagttaaaatgttaagagataaaggtgttgtaggcaaatttgtagaattttat

SEQ ID NO: 282879 - DNA, 925 bp, Unknown
  Bacterial polypeptide expressing nucleotide sequence isolated from the Sargasso Sea
aatttacttaggtatgaggatgatatattagttaataaaaaacaaatagaagcagtaaaaaactgggttgatacaaaaaaatcaaaaaccgaaatagcttacagaccagccagagttttactccaagattatacagggataccagcagtggctgatttagctgctatgagagaagctgtaaaagaaaaaaataaagatccaaataagattaacccactatctgcagttgatttagttattgatcactctgttcaagttgatcaatcagccaaaaaagattcatttgaaaagaatgtagatatcgaatttaaaagaaatggtgaaagatattcctttttaaaatggggtcaaagcgctttcaacaattttagaattgttcctccaggaactggtatctgtcaccaggttaatttagagtatttatcaaaagtagtttggtcagaagaatacaaagaagaaaaatatttattccctgatactcttgttggaacagacagtcatacaactatggtcaatggcttatcagttttaggctggggtgttggtggaattgaagctgaggcgggcatgttgggacaacctatttcaatgttaatccctgaagtcattggatttgaggtaacaaaaaaaatgccagagggcacaactgctacagacttagttttaacagttgttaaaatgcttagagataaaggagtagttgggaaatttgtcgagttctacggtgagggattaaaaaatttaactttagcagatagagcaacaattgctaacatggcacctgagtatggagctacatgtggattctttccaatagatgaagaaactttaaaatatttagaattttctggaagagataaagaaacagtcacgattgttgaaaagtatgcaaaggaacaaggtttgtgggcaagtgagaaatgaa

SEQ ID NO: 282880 - DNA, 859 bp, Unknown
  Bacterial polypeptide expressing nucleotide sequence isolated from the Sargasso Sea
gaagagtgggtatctaaagaaattaaaaataaagatttaacagtttgttcggtcttatctggcaatagaaattttgaaggcagagttcatcaagaagttaaagcaaactttcttgcatctccacctttagttgtcgcctttgcaattgctggaaacatgaacattaatttatttagtcaacctgttggaataaataaatctggcaagaaagttttccttaaggatttatggccatcttcttctgaaataaatgagattgttgatagttcattaacaactgatatgtttaaagatagatataaagaaatatataatggggacaaaaactggcaatctgtaaaaagtttttatgaaaaaacttattcatggagtgctgctagtacatatattaaacatccacctttctttgcggataaaaaaactcaaattcaagatataaataatgcaagaattcttgctttgttgggtgatagtgtgactacagaccatatttcaccagctggagctataaagttagacactccagcaggaaaatatttaaatgcaaggcagataaatacgaaagattttaactcctatggatctaggaggggtaatcatgaaataatgatgagaggtacttttgcgaacattcggattaaaaatgaaattgttccaggcactgaaggtggggtgactaagtattttgaaactgaagaaaagatgtcaatttttgatgccgcaattgcatacgaacaaaaaggtattccattagttgtttttgcaggcaaagaatatggaacaggctcatcaagagattgggctgcaaagggtacgaaattacttggtattaaggctgttattgctgagagtttcgaga

SEQ ID NO: 282881 - DNA, 573 bp, Unknown
  Bacterial polypeptide expressing nucleotide sequence isolated from the Sargasso Sea
attttaattcttatggatctagacgtggaaaccacgaagttatgatgagaggaactttcgctaatattagaattagaaatgagatggcaccaaataccgagggtgggtatacaaaattatatccagaaggtaaggtcatgccagtttatgatgcagtagaaatatataagaagagaaaggtcgacctagttgtaataggtggtaaagaatatgggacaggatcatcaagagactgggcggcaaaaggaactaaattattaggaattaaagttgttattgctgaaagctttgaaagaattcatagatcaaatcttattggtatgggtatactaccattacaatttattaatggaatggatagaaataaattaaacttaataggctctgaattaattacaattttagatatagacaaaggtttacaaccgtctgaaaaagtaaaagtggaaataaaatataattcaggtgatattaaaatcattgaaactatttgcagaatagacacaaaaaatgaattagaatattataaaaatggtggaattcttcaatttgttttacgaaatatgatttaac

SEQ ID NO: 282882 - DNA, 827 bp, Unknown
  Bacterial polypeptide expressing nucleotide sequence isolated from the Sargasso Sea
tatccgaattttactggaacaggctcttcgaaatgttgaagagtcaaaatctaattacgaggaagtgagtttactagctaattggaatgcttcggaaagttcatataaagaaattccatacaggcctgcacgagttattttgcaggattttaccggcgtaccagcagttgttgatcttgctgctcttagatcagctgtagttgaaatggaaggtgaccccgcagttattaaccccagagtgccagttgatttagtaattgaccactcaatacaagttgatgtttttggaaattccgatgcgcttaaaaataatatggatattgaattcaaacgtaatcgagaacgctatgaattcctcaaatggggaaaggaagcattcaaaaattttaacgtctatcctccgggagtaggaattgtacaccaagtaaatttggaaactatagcaagtgttgttcaatatagaaatggagtttgtttcccggacacacttgtaggtacagactcgcacacaacaatgataaacggccttggagttatgggatggggagtaggaggtatagaggcagaatcagtaatgcttggacaaccaatctacatgctaattccagaagtaatcggctttcgtttgcatggtcaactgaatgaaggcactacagctactgatctagttttgcgcgtcgtagaaatgcttcgccaaaaaggtgttgtagaaaaatttgttgaattttttggacctggtttaaataatctaaaattagctgaccgagcaaccctttcaaacatggctccagaatacggagctaccatgggattttttcccagttgat

SEQ ID NO: 282883 - DNA, 749 bp, Unknown
  Bacterial polypeptide expressing nucleotide sequence isolated from the Sargasso Sea
acctaaagaatggcaagctatcaatacaacagatagtgatatttataattgggaagctaattctacatatgtaaaaagaccaccattttttgataatttatctgaccaaccagaaggttttaaaccaattaatgacgcaagaattcttttattattagctgacacagtaactacggatcatatttcacctgcaggaagtattaaaaaagaaagtccaactggcgattattttatgaagcatcaaatacaacaaaaagattttaactcatatggcgcaagaagaggaaatcatgaagtaatgatgagaggaactttcggaaatatcaaaattagaaatgaaatggctcctggtactgaaggtggatttacaacgttgcagccggagggaaaagtaatgagcgtttatgaagctgcaatggaatacaaaaaaagaaaaaatgatttagttgtaatagctggcaaagaatacggaacaggttcttctagggactgggcagcaaaaggaactaaactattaggaattaaagctgttttagcagaaagttttgagagaattcacagatcaaatttagttggaatgggtgtattgcctttacagtttaaagaaggttttaatcgaaaaaaattaaatattactggagtagaattagtttcagttatagatattgacaaaggtgtaaagccaagacaagaggtaacttgtgaaattaaatatcaagatggcactagtaaaaaaattccaatgcttt

SEQ ID NO: 282884 - DNA, 920 bp, Unknown
  Bacterial polypeptide expressing nucleotide sequence isolated from the Sargasso Sea
tgagtacggtgcgacgatgggcttctttcctgttgatcaggagacactcagctatatgaagctcaccggtagaactgctgaacaggtggaactggtcgagcgatacacaaaagagcagggcctcttccatacagagtcggcgtcaacgccagagttcacaaaacgactttcacttgatatgagtaccgttgtgccgagtcttgccggtcccaaacggccgcaagacagggtgccaatggtcagcgtaaaggaagcattccaagatgcgttaaaagcgccggcagcaaatcgtggttttgccttgcctgaatccgaaatgacttctcatgctaccgttgccaacaatggacattcagctgaaattggacacggcgcggttgtcattgcagcgattacgagttgcaccaatacaagtaatccaaacgtcatggttgctgctggtctggttgcccggaaagcagttgaaaaggggctgtcgaccaagtcatgggtcaagacaagcctggctccaggatctcgtgtggtgacagattatcttgagaaatcaggactagcctctgatctcgactcacttggttttgaaaccgttggttatggatgcaccacctgcattggaaactctggtccccttcctgaaccagttgcggcagcagtaactgagggagatcttgtcgctgcagcagtgctgtcaggcaatcgaaattttgaaggccgggtcaatccactggtgaaggcgaactggctcgcaagcccaccgcttgtggtggcatatgctcttgctggaacaattgatattaatcttgaaacagattcactcggcgagggcagtgacggtcagcccgtatacttaaaagatatctggccaacgcaggaagaagtgcgtgagacggtggcgacagcagtcgtgcccgagcagtttc

SEQ ID NO: 282885 - DNA, 861 bp, Unknown
  Bacterial polypeptide expressing nucleotide sequence isolated from the Sargasso Sea
aagtaaagccgagagcaatggattaaaaggtatctctaaactacccaaatccttaaaggttcttcttgaaaatttattgagatatgaagatgatttatcagtaaccaaaaatcaaattgatgcgctgaaaaattggctagaaactaaaaaatcatcaactgagatagcctacaggccggcaagagtgttgttgcaagattataccggaataccagcagtagcagacttagcagctatgagagaagctgttaaagaaaaaaatattgaccccaattcaattaatccactttcgactgttgatctagtcattgatcactctgtgcaggttgatcaatcttctaaggcagattcatttgagaaaaatgtaaatattgaatttaaaagaaatgctgaaagatattcatttttaaaatggggtcaggatgcatttaataattttagaattgtgcctccagggacaggcatatgtcaccaagtaaacttagaatacttatctaaagttgtttggtgtgaaaagttcagagatgaagattatttattccctgatactttggttggtacagatagtcatacaaccatggttaatggtttatcagttttaggatggggagtaggaggtattgaggctgaagcaggaatgcttggacaaccaatatctatgcttattccagaagttattggatttgaagtaaaaaataaaatgccagaaggaacaacggctacagatttagttctcacaatagtaaaaatgctgagagacaaaggagtagttggaaagtttgttgaattctatggagaaggtttaaagaacctgactttagcagacagagctactattgcaaacatggctcctgaatatgg

SEQ ID NO: 282886 - DNA, 682 bp, Unknown
  Bacterial polypeptide expressing nucleotide sequence isolated from the Sargasso Sea
tttaatttagttggttatggatgtactacatgtattggtaactcaggtcctttacctgacaatatttcaaatgcaataaaagataaaaatatttatgctgtatcgattttatcaggtaatagaaattttgaaggaagaatttcaccagaagttaaagctaattatttagcatcaccgccactagtagttgcttatgcgcttgcagggtcaatgcaaaaagatttatataaagattcattaggaaaagataaagatggcaaagaagtatatttaaaagacatttggccaagcgataaagaaatagagaatacgttaaaaagttcattgaacgctgaaatgtttgttaaaagatattcaaacgtttcaaaaggacctgagcaatggcaaaaaattaaaactactaaaagcagtatttataattgggaggaaacatcaacttatgtaaaaaaacctcctttttttgaaaatcttccagataaacctgaaggatttaaggaaataaaaaatgcaagacctctattaatactaggagatagtgtaacaacagatcatatttcgccagcaggatctattcaaaaagaaagccccacaggaaactattttatgaaacatcagattttaccaaaggactataactcgtatggatcaagaagaggaaatcatgaagttatgatgagaggaa

SEQ ID NO: 282887 - DNA, 854 bp, Unknown
  Bacterial polypeptide expressing nucleotide sequence isolated from the Sargasso Sea
ccaaaaattataaatccactgtctagagttgatttagttattgatcactcagttatggttgatagttataaaagtgaaaaatcactagaaaaaaatgtaaaaaaagaattcgagagaaataaagagaggtataaatttttaaaatggggtcaaaactcatttgataacttttttcttgttcctcctggagcaggaatatgccaccaggtcaatctcgaaaatattgcgaaaactatttgggtaaaaaagttaaacaattataaatatctatatcctgattcagttgttggaactgatagccataccacaatggtaaatgccttatcagttttaggatggggagtaggaggtattgaggctgaagctgcaatgttaggccaacctatttcaatgaatattcctgaagtggttggttttgaattgaaaggatcactaaaagagggaataacagcaacagatttagttttgacaattacacaaatcctaagagagaatggagttgtaggaaaatttgtagaattttttggtgagggattatcaaatttaacattagcagatcgtgccactatatcaaatatggcgccagaatatggtgctacatgtggtttttttccaactgaccaagaaacaataaattatttaagattaactggtaaagatgaacatcatttagatattgttacagaatactcaaaaaaacaactgatgtgggcagatcaaaattataatccaaattttaataataaaataaatttaaatttaaactctatagaaccttcattagcaggtccaaaaagacctcaagataaaatattattaaaagacgtgcctgatgaatttaataatattattaa

SEQ ID NO: 282888 - DNA, 1009 bp, Unknown
  Bacterial polypeptide expressing nucleotide sequence isolated from the Sargasso Sea
aatacatctaatccaaaatgtttaattggggcaggcttgcttgcaaagaaagcggttgacaaaggctggcaaacaaaaccttgggtaaaaacttctttagctccaggatctcaagttgttactgactatttagaaaaagcaggcttaagttcttatttagatcagttaggttttaaccttgttggttatggatgtacaacttgtattggtaattctggacctttaaaagaaaatatttctaatgcggttaaaaaagataatatttatgccgtatcagttttatctggtaatagaaattttgaaggtagaatttctccactagtgaaagcaaattatcttgcttcaccacctttggtagttgcgtatgcaatagctggttctatgagagtagatttgcttaaagatcctttaggaaaagataaaaatggaaatcatatttttttaaaagatatttggccaagtaataatgaaatagaagaaattttaaaagattctttaaatgctgaaatgtttataaaaagatattcaaatatttctgcaggaccagaacaatggcaaaaaataaaaactgaaccaagtagtatctataattgggaagaatcttctacctacgtaaaaaaacctcctttttttgataacttaccagataagccagaaggatttaaagaaatcaaagatgcaagaccattattgattttaggagatatggtaactacagatcatatttctccagctggaacaattcaaaaagaaagtccaactggtgaatactttatgaaacatcaaattttatcaaaagattataattcttatggatcaaggagaggcaaccatgaagtaatgatgagaggaacatttgcaaatattagaataagaaatgaaatggctccaaatacagaaggaggttttactaaactttatccagaagaaaaagttatgcctgtatatgatgctgtagaggcgtataaaaaaagaggcactgatttagttgttattggaggaaaggaat

SEQ ID NO: 282889 - DNA, 724 bp, Unknown
  Bacterial polypeptide expressing nucleotide sequence isolated from the Sargasso Sea
tgtaattgctgcgataacatcttgcacaaatacttcgaatccaagcgtgatgatcggggcaggtcttttagctaaaaaagcaaatgaaaagggactaaaagttaaaccttgggtaaaaacttcactagcaccaggatcacaagttgtaactgactatttagaaaaagcaggtttaaataaatatttagatgaacttggttttaatttagttggttatggttgcacaacttgtattggcaactctggacctttaaatcaaaatatatcagatgcaattaataaaaatgatctttacgctgtctcagttttatctggaaatagaaactttgaaggaagaattaatccagatgtaaaagctaattacttagcttcacctccacttgtagttgcttatgctttagcaggtaatatgaattttgatatgtacaaatcttcacttggtaaagataaaaatggtaaagacgttttcttaaaagatatttggcctagcaacaaagaaattgaagacttaatgttaagttcattaaatgcagatatgtttaaggaaagatattcaaatgtctcgcaaggacctaaagaatggcaagctatcaatacaactgatagtgatatttataactgggaagctaattctacatatgtaaaaagaccaccattttttgatgatttacctgataaaccagagggttttaaaccaataaatgacgcaagaattcttttatta

SEQ ID NO: 282890 - DNA, 855 bp, Unknown
  Bacterial polypeptide expressing nucleotide sequence isolated from the Sargasso Sea
aattgccaaaatctttaaaagttcttttagaaaatttacttagatatgaggatgatttatcagtaacaaaagctcaaatagaggcaattaaaaattggatccagaaaaaaaaatcttctacagaaattgcatataggccggcaagagttttattgcaagattatactggaatacctgctgtagccgatctagcagcaatgcgtgaagctgtaaaagaaaaaaataaggacccaaatactattaaccccttatcttcagttgatttagttatagaccattccgttcaagttgatcagtcggcaaaatcagattcatttgaaaaaaatgtagatatagaatttaaaagaaatggtgaaagatattcttttttaaaatggggccaacaagcttttaataatttccggattgttcctccgggaacaggtatttgccatcaagttaatttggaatatttatcaaaagtagtgtggacagaaaaatatcaagatgatgaatatttatttccagataccttagttggaactgatagtcacacaactatggttaatggattatcagttcttggttggggagttggagggatagaagcagaagcaggaatgttaggacaaccaatttctatgttaattcctgaggtcattggttttgagttaaaaaataaaatgcccgagggaactactgcaacagatttagttttaacggttgttaaaattttaagagacaaaggtgttgttggaaaatttgtcgaattttacggagatggattaaaaaatcttactcttgctgatagagcaactattgcaaatatggcgccacgaatatggtgccacatgtggtttttttccgatagatgac
